United States Patent Application Publication US 2026/0062700 A1 - sequence listing, part 4

SEQ ID NO: 8709 - RNA, 1707 nt, synthetic construct
  source 1..1707: mol_type = other RNA
atggtgctgaataagaatttccccgtagacatccctgaggacattagagactgtcggaatatcacagaccttgccaagcttctgaatataaatctgaaagccctgttcttctttgcatataaaaaagaacggctgtacttgtccttcaatattaagaagaagaacggcggcgctcggaacataagcgcgccaattgaagccctgaagaacacaaccaaaaaaatcaactcttacctctcagtggtctatgaggagtataagcctaaatctgtgcacggtttcgtttatgatagagatgtggtcaccaatgctgggaatcatctggataggaagtacatcctcaatatagacctgcttaacttctttgaaactatcaccgcccagcgtatctatggcctattcaaacgctatccgttcattttcggtaacaagttcgcttccatactcaccggaatagttacatataacaattgcctgccccagggttctccctgttccccagtgctcagtaatatggtatgtctgaagatggataaacagctgatcaacctcgctaatgagaacggctggagatatacacgctacgccgacgacatcacatttagtgctaacaagatatcgtccaatttagcaaacttcgcaagtgacggcattaacgtcggggagaagatcgtgaatatcatcaacaagaatgggtttgccatcaatgaaaagaagacccgactgagctcgcacaatcagagcaagtgggtgactggaattaaggtgaacaagaaatgtaacgttagcaggaaatatgtccgtaacgtacgcgcgatgcttcatgtttgggaagcatacgacgaaaaattggcagaaaaaacgtacaatgccaagtataactttggcaagaacaaaaagttccggagtgtcgtaaacgggaaaattgagcacattggccatgtcaagacgaagaaggacctcatctacatcaaactgcacaaccgatactgcgaattagtgggcgagtcacacaagaggctgccggagacaaagaaagatgaatacttgaacaaggtgctaatgatacaaggacagagtggctacggatctggctttttcattacgcagcatctcatcttgacttgcgctcatgtagtcaagggttctaagaaggtgaagtttaccacaagactcaataaactgccagtggagtttaaagaggcctccgtgattgacatcaatattgagaaagattacgcgattctgttttcagagaagaaattcaacgagttcgtttttaagtgcaaccttaataaaggactgaacatgtattcccacaatgacgcctacatcagcgtgggatacgccgggtttcgcactgatggaaatttttgggttgaaccttccattgcagaccaaaaaatcgtccagactaaccagaggaaaaacgtcaatagcttcgatgtgtcaggggctatgtggaaaggcatgagcggtgggccaatcattcttgagcacaccgattacgtggaagggtatatcgtgaacggcgcctcttccttagatacctccgaagacgttaaatcacacagcttttaccccattagcaacattccaaaaaaatactacgagcccaagtttttgaccctcctaatcgatgagatgtatggatctaggtttaccgagactaaggaagtgggaatgcctgatcaattcttcacttga

SEQ ID NO: 8710 - RNA, 1584 nt, synthetic construct
  source 1..1584: mol_type = other RNA
atgaacctaccagaggctgcttaccatttctttgagatgagcttgtttgctaaagatgataaatccctgctggaagccttttattcggccaaaaattacattgacttggcagatgttttcgaaatcacacccaaacaattcaaatttcacgtcttcatggtacctggggacaagaagtacgtgcagttcactttgcagaaaaaaagcgggggggtcaggaacatttacgccccaaacggtaacctcaagttcatccagaacaagctttcctacattctatacaagatctacaagcctacgtttagcgctaagggctttgtgctgaatgaatcgattgtgagcaacgcccgcctgcattctggcaaaaaggcaatccttaacatcgacattaaggactttttcgaaagcataaacttcggcagagtctacggacttttcaagtccaaaccgttttctttcaatactgaaatcgctgccgagctggctaacatttgctgtttcgataataaactcccgcaaggcgccccaacctcacccatcgtgaccaacatgatctgcgtgggccttgataaaaatctgcagtccttggcaaagaaatataatctgatttactcccggtatgcggatgacattacatttagtaccgatttcaagttcctacctcaggctatcgccctgggcaaattgaatgtggttgaagtcggcgagacagtgaaaagcattctgattaagcacggattcaagataaacgacaaaaaaagcaggatctactaccacttcaatagacaggtagttactgggctgatagttaataagcaggtgaatgtgtctcgaaactatattaggaacctgcggggtatcatacactctattgagaagtttgggctccccgccgcagagatagagtttcagcggaaatatgacaagcagcggttacccggaaagtccgtaccaccctttactttttatttaaagggcaagctgtcctttctggcccaggtcaaggggacagagtcctctgtctatatctctatcgttaagaaactccgatcactcatacctggggagttcgagaagaccctcaccaagttagaagagctgcgcaaagactttgacgacctgaacaaactggtttataaaggtgcaagtatcaccgctcgtcagaggggatttgaattcgaaaaattcctcgccgaactttttagtttctttaagatcgacgtgacggaatcattcaagcgagtgggcgatgagcaaattgatgcggccattaacttcgactcctggcattacctgatcgagtgcaagtggaagtcaacacaatgtgatactagggatgtcgacagcctgaccatgaaactgtcaagaagcggatctcaaacaggcggactttttattagtataaatggatggagcgcaaatgtggtggaaaacttgtcacgcaatccaatcaagaataccatcctgatcaacggtgacgatattaaagacatcttggtggagaaggtagcgctcgatcagctcctcaagttcaagttacagagactgaatctttatagtgagccttatgcacgctgggagtga

SEQ ID NO: 8711 - RNA, 1401 nt, synthetic construct
  source 1..1401: mol_type = other RNA
atgctgtccatcacaaacaacaccatggaagttgtcacagacacctttaataagaagtacagtaagtacttcaggaatattgacgaatcaactataagcgaggaacaattttctaatcgtctgaagtcgtcctggaagtcttcatcttgggtcaatgataacgagagcttcttcgctaattatctcgtgaatgacgacttcctgctgcaaatcatcaaaaactcaacattacccgatttccagaagcatttggccctagaagagtttaagcggcggtggcagcagtatgaaattgccaaggaaaaattcctgcagattgtctccgggagggatctggccgtcttctttgagctgaaatatcagagtttcctttctaccatcggtcttctcaagttcaacaaccagaaaaagtattccgagttcacaatccccaagaaatctggcggagctaggattatcaattctccaaatcaacagctcctgcaccttcagcgcaagctgaacttcatactaaatctgttttacgatcctccaaaagcggcccacggctttataaacaagatcatcaacaaggagaaggttagcagccgtggtattgtgtcgaatgcaaagtctcactccggcaggaaattaatccttaattttgacctggaggatttttttcctagcataactggaaacagaatcttcagctttttcagggcatcacccttcaattttaacaaagaggttgctggtctgctcaccgagatatgctgtgatccgaatataaaagggctgccacaaggggcagcaacatcccctatattgtctaatatgatcgccagaagattggacatcaaattgattcatctcgcgagtaagcacaaactgatttacaccagatacgctgatgacattacctttagcagcaacaagttggacgtgccctccgacttcctggacgagttctactcagtgattactagcgagaaattcaagatcaaccgagaaaaaacgagacagcatagatactcccagaaacagatcgtaacgggcttaattgtgaataagaaagccaacgtcagccgcaaatatatccgaaatgtacgcgccatccttcacaacattgagaactatgggtacgataagtgcgaagaggtgctgaatgagaagtatgctaaatcaaaaaagggcatgatctccctcgaaaactacctacggggacgaattgaatttatcggcaatgtgcgcggaaagaacaaggagcaggacaagaatgatatttacaacaagctgaagaaccggtttgagaacctcgtggtggggcctagttttgaaccaagtccgattatcgaaaacgaaactagtaaccgcaattccaaaaccctctcagagcggatgaaagagattgataaatga

SEQ ID NO: 8712 - RNA, 1734 nt, synthetic construct
  source 1..1734: mol_type = other RNA
atgaagataattcggttcctgctgaatatcctggaagaattttatctccttcataccaggaattttgagtatgccctctggaatatcagggaatatggttaccggaccaaaaagataaccaagaaaaatggaacagcacgcgagttgaacatcccaccctcctttgtcaaaacgatgcagaaaaagatcaatgaacttctgcaagaacagtacattgctccaaaaccagtgcacggctttattaaggcggatgagaacaacaaaaagagcataatcagcaatgcaaatatgcacacgaaaaagtacatagtgattaacctggacatcaaagacttctttgactctatcaactttggtcgcgtccgggggttatttctaagtaaaccgttcgagattaacgaaaagattgctaccaggctggcccagcttgttataaatgacaacaagttacctcagggcgcaccgacttcgcccatccttagcaatttcatctgtaaacaaatggaccataacctgatcaaagtggccaagaagttttcgctcacttattccaggtatgccgacgatatcacattttcctcccataaaaagaatctgaacctgaagtacatcataaaagagattaccgaggtagttaagaataatggcttcacggtaaatactaaaaagactcggtttcagatggcccatcatacacaaatcgtgaccgggttgaaagttaaccagaaggtgaacatcaacactaagtataagaagcagattcgaagtatgttatactcatggtttaccgatggactcacaaaggctacacagcttcactttaaggagtacaataaacagaagcgtaaatacctccctgaaaaggagaaatcattcaagaacattgtgatcggaaaaatcaacttcctggggttagtctgcgggaccgataaccccttgtatcaaaagtacagacacacatactttctactgagcgataagttcattctcacaagaaaattggatgagtacgaggagctagatattaacgacatcaaacgcagaaaagctcttagcatcttcattcagatctacaattccatactcattttcactgaaggcgagacagacatactatatattaaaagcgcgctccagtcttttcaaaagaagggtatgtacttggatctcaatctgcgcttttgtaacttgagaggatgggtgaacgtgaaaaacattcacgagatcttctacaagaataccaacaagtctaatgatctcactctgataaaccgacgtaagtgcgtcagtccctttatcccaaagtctttcaagctgtgttttatacttgatgctgacgacgatggcattaggaaatacttcaaacatcagaagcacaaaaactatcacctcatcgatgaagccaatcagggctatattgagaagttcatcgacaagaacatcatcattgacattatcaagaactctggatattcaattgaccctaccaaagccgggaccacaaagcagaaattgattgaccacctgaaggacaataaggaaaaagatgagatcttcagtatcgacaattatattgtctacaagctgctgctgattaaaaagactgagctggcaaatatcatatcaaagaaggacatcgacttcagcaacttcaaagagatgttcgatttcctgaaaaaactggaacctgataatgactacgccgatgaactgtgctgcaactccctgtattga

SEQ ID NO: 8713 - RNA, 1707 nt, synthetic construct
  source 1..1707: mol_type = other RNA
atgaatgaactcgaagacttttacacgcataataaaaaggtgatcgagtatgcccttttgatcatccgtaaagaaaactataccaagaagtacatctcaaagaagaatggatctctgcgcgaactaaatatccctcctcctttcgttatgcagattcagaagaaattcaacagcttgctgcagaaactgtattccccccctgccccaattcatgggtttatagagaagaaggatgacatagtgaagtccatcgttacaaatgccaatcagcacattcagaaacacattgttatcaatgtggacatcaagaactttttcgctacaattaacttcgggagagtccgcggtctttttttagcagaacccttcaaaactactgagcagatcgccaccagactcactcagctggtaatcacagaaaaccaactcccacagggatcgccaacaagtccgaccattagcaacttaatctccttgaaaatggataaccagctgacgaggctggcaaagcggcacaagatggtatttacaaggtatgcggacgatataaccttttctagctaccgtaaaaacattaacgttcaggaggtgatagaggagattgagaaaattgtcaagattaacggcttttcccttaatccccaaaaaacccgagtgcagtatccacatcagagccagaccgttactgggctcaaagtcaaccagaagattaatctggaccggaaatacgtccgacaaatcaggtctaagctgttcagctggtattcagccggattggataaagctaccgagctgcacttcgagaagtttaacaaacaatccgtgaaatacgcgagcgccgacaagaccagtagctataagaaaatcgtcctcggtaaaatacatttcttaggacaagtgttaggccaggataatagtcactttatcaggttccttcatacctattacttgttggagtctaattttgtccttgaccgggagaaggtggaagagatttacgaaaagttcgatctgaataatcctaatcccaacgatgtgatcaaaacgttttctcagatctatgactccatgctaattattactgaaggcattaccgatgtgatctacatcaaacaggctctcaagtacttccaatctaaagggaaattcattgatcttaagctcagatattgcacaatgggcggatacgtagatgtcatcaagctccataaaattctgcatgacaaagacctctgcaaaagtttttgtgacgtggagaaaagaaatttcatcctcccccttataaacaagaacctgaagacatacttcgtgctggatgctgacgagaagcaaatcctggattacttcaataacaagaaccagctaatgaagaattacttcctactggacgaagtgaaccggggctatatcgaaaagatgatcgacaaggaaatcataatcgactttatcatgtccaagggctacgatattgatccaacacgcgaggagctgggtgataaatcaaagaatggcctgaaagagtacctgaaaagtagcaagtttactgacgaagagatacacgcaccgaagaacacttcatacattgcacacaagaagaagattatagaaaagacccgcctggccaaacacataaagaacaaggaagacgtagattatgggaattttgagtcattgttcctgaaactggacgagatcaaaaaccactga

SEQ ID NO: 8714 - RNA, 1725 nt, synthetic construct
  source 1..1725: mol_type = other RNA
atgcataaaattgaagaattttaccacagccacaaaaagatttttgaatacgctctgtatcagatccgcaccaaaggatattccgagaagatcatcaccaagaaaaatggcggccaaagaaagttaaatattccacccactttcgctaaagtcgtacaaaagaaactgaacaccttgctgcaggacatctatatcccgccaaaacccgtgcacggatttatcaaaagctacaagttcgacacaaagaatattgtgtctaatgcccttaaacataccaagaagagcatagtgattaatgtagacatcgagaatttcttcaacactgtgaatttcggccgtgtgaggggactctttatttctaagcctttcgaaatagacaaggatattgcaactcgactggcccagcttaccgttttcaataatgaactcccccagggtgcccccacctctccaatcattactaacctcatttgcaagaagatggattttcagctcctgaaagtagcaaaagagaactctcttgtgtttagcagatacgcggatgatatcactttttctacgaacaaacagaacatcaacatagagaacatcatttcagatatcgagcaggttatcgtcgataacggtttcaagattaacacaagcaagacacgcgtgcaattgcagaaccagacacaaacagtgaccggactgaaggttaatcagaaggtcaatctggacagaaaatacattcggcagatacgctcgatgttgttctcctggtatacagatgggcttaaggaagccgcagagaaacactttgagaagtttaataagcagccagataagtacctgacagacttagagagttcctttaagaatatcctgatcggcaagattaactttctgggtcaggtcaaagggagggacaattttctatacattaagtaccggcatacgttttaccttctcgacagtaattttagcttaagcaaaaagctcaacgaattcgaaaaactggatctgaatcacctgaatcagcgatgtgtgactaccatattcacccagatttattctagtatcctggtctttactgagggcatcactgacataatgtacatgaagaaagcactgaagtactttcaagaaaaggggaaatatgaaggcctacacctccggtattgcaacttagaatcctggtccaacgtaagtaacattcataaggttttctacgagaatcaaaaggacctgtccatcattaatatgaggaagtgcatactgccttatgtcaaagacgacttgaagttctgtttcatcctggatgcggacgataggaacatcaagcagtatttcgagagatataagcataccaactatttcctgatcgatgacgaccggagcgggtacatagagaagctcttcgagcaggggatcgtgatcgacaaaattaaaaagttgggctacacgatcgacaccactaaagagggactccagaaatccacgataaaggctcttaaagaatatgtcagctctgaactagtgacagaggaggctattcactccatcccttcaacctcatatatcgcctacaaggacaaaattatcaagaaaaccgatttggccaacttcataacaaaagatgactcagtgacatacgatgatttcgagtcaatttttgtgtacttggacagtatgaaacacaacaaggattacgttaaacctctctgttgcaactcgctgtattga

SEQ ID NO: 8715 - RNA, 1740 nt, synthetic construct
  source 1..1740: mol_type = other RNA
atgaaaatcttagagcagttctacaacgattacgaaaagctgttcgaactggctttgtatgataaccggaaaaagaagtacaagaggaagaacatatccaaaaaaagtgggggcaaacgtagactcttaataccccctgagactaccgacaaactgcagaaaaaactaaatagaatcctgcagacaatctataatgcacctaatagtgtacatgccttcattaagtcaaaggaaaacgaagagaaaaagtcaatagtcagcaatgccaagcagcacgtgaagaagcagattgtgatcaacatcgacatcaaagactttttcgacacgatcaattttggtcgggttagaggcatttttctcgctaaaccaattagtctggatgagacactggccacgaaatttgcgcagttgatctcgtatgataataaacttcctcaaggcgcctctacatctcccatcatttccaatatcatctgcaagaaaatggaccacaatctgatccagtttagcaaaaagcactcactaacttacagtcgctacgccgatgacattacttttagcacacataagaactcccttgatacggactttattctgaatgagatcgagaagatcatagtcgacaatggtttcgaaattaataccctcaagacccgaattcagctcgccaatcagtctcaagttgtcaccggacttaaagtcaaccagaaagtgaacgtgccccgcaaatatattcggcaagtgagatcaatgctgtacagttggaaaactgagggcattgaagaagcatccaagaaacatttcaaaagcttcaacaaccagaccaagaaatatatcgacagcaaagaggaatctttcaaaaatatcgtactggggaaaatcaacttcataggacaggtgaaagggaccgacgacttgaattacatacgcttttaccatacatactacttgcttgacagctccttcagtctcaaagagaaactagattactttgaacacttcgatttctacaacatgcagcaggatagggccaaactgctgctgacccagatctatgactccttactcgtgtttactgagggcgtgaccgatatcatttatattaaggaggctctcaagttcttcaagaacaagaagatgtttacaagcctcaacctgcgctactcttattttggaggatatgccgatgtgattaagatgcatcggattctgtacgatgaacacattgtgcgaatgtccaagcttaacgagttggatatagctaatatacgtaagtgcatactgccaaatatagataagagcctcaagttttgctttgttcttgacgcagatgaaatcgcaatcgaaaagcacttcgagaaacacgattacaagaaccattttctcttggacttaaagaacaaggggtatattgagaaactcctggacaaggagctgattaaaaagatcatcaagaagtacggtttcaaaattgacgtcaacaggaaggaattctcggagaaaacaaaaaccgagttgaacaaatacatgaagatcaagaacaagtacagcaacatctcagctgtgagcaattatattgcgtatggcgtcaagattatcgagaagactaacctagcaaagtttatctcaaataaggacgatgttgactattctaagttcgaagacctgttctgtgtactggagaagatcaatcacaattttaggtccccgaagcaactttgttgtcaatctctgtattga

SEQ ID NO: 8716 - RNA, 1737 nt, synthetic construct
  source 1..1737: mol_type = other RNA
atgaacgagctggagaacttctatctcactaataagaagaatgtcgagtatgctctctttctcatcagatcagagggttaccggaataaaacaatctcaaagaagaacggcaatactcgaattctgtctatcccacctgacttcacgaagattattcagagcaagtttaacgagatccttcaggagctgtatatcgcaccaaaacccgtgcatgggttcgtaaagacaaacaatgatatctccaaaggcatcatcacaaatgctagcatgcatattcggaagagctatgtgatcaacgtcgatatcgagaactttttcgacacaattaactttggcagggtgcgcggcgttttcctgagtgagccttttaatactaacgagaagatagctacgaagttagcccagttggtatcttttgagaataaactaccccagggagcgcctagctctcccacaatctctaatatcatctgcaagaaaatggaccatgagctgattaaaatagcaaaagagtactcgctaacctacagccgttacgccgatgatataacattctccacccacaagaagaagatcaacaaaatccgcattctgagagcgatctctaaagtgatcaaaaataacgggtttaccataaacgaaaacaaaacgagagtccaaaaatacattcacacccaaattgtgactggcttgaaagtgaaccagaaggtgaacattaaacgtgagtatattaggcagatacgcagtatgctgttttcctggtataaggacggactcgcttcaagcgcagataaacatttcgaccggtttaataagcaggagtcaaagtacatcgacaaccgggaagaatcctttaagagtatcttgataggcaagattaactttcttggacaggtcaagggtaaggagaataggctgttcattaagttccgacacatatactacttactgagagatgagttcaaactgctagaaaaaaccaacaccaagttttcattcgagcacatagacgtgaataatctgacaagtaatgaagtgcttaagattttcacgcaggtttacgattctcgactgatcttgacagaaggggtgacagatgtaacctacatcaaaagcgccctgaagtactttcaatccaaaggagaatttcagtcactcaaactgcgctattgctgggttgggtccatctccattcttgtcacctttttcaagatcttgtatgcccataaaatgaaagagctcgacattatcaacaaaaggaaatgtgttttgccactcgtcgataagaatatcaagatctctttcgtcatggacagcaatgacgacaaaattaataccttcgttaaggccaagaatttcaacaactactatcttctggacctgagcaacaaaggctatattgaaaaactgctggataagaacaaggtgatcgaatttatcgagagcaatggttacattatagacaccactaggcccgaactcaaaccggactcaaaaagaggactcgaggagtatttactgagttctcagaagagcgatggggaaattcactccgtgcagaaaacctcgtatatagcctacgaaaacaagattattgagaagactaagctgagtaagctattcgaagagagtgaagatatcgaatacgaaaaattccgggagttattcactcaccttgaaaagatcgaatctatatccatccaaaatgagaagctctgtactggctccatttactga

SEQ ID NO: 8717 - RNA, 1725 nt, synthetic construct
  source 1..1725: mol_type = other RNA
atgaatgaactcgaaaacttttacatcacgaacaagaagaatgtggaatttgccttattgaaagttagggacgagaagtacgtcatcaagaatatctctaagaaaaacggcaagaccagaatattacacattccaccctcctatacgaaaataatccagaagaaattctcccaaatcctgcagaaacaatatattcctctcaaacctattcacggatttgtcaagattgagaataatacatcccggaatataatcaccaatgctagtaaccatatcaacaagagatatgtgatcaatatcgacatcgaaaactttttcgataccatcaactttggccgcgttaggggtctatttatgagcaatcccttcaacattaatgagtccattgctaccaaactcgctcagctggtgacatatgaaaataaactgccccaagggagccctacttctcccatcattagtaacttgatttgtaggaaactggatcaccagctcattaagattgcgaaagactatagcctgacatatacacgttatgccgatgacataaccttctctacctataacaagaagataaactacatccgaatcatacgtgacatagacaagattatcaagaacaacggattcattatcaacaaatctaagaccaggatacagaaattcaatcaaactcagattgtcaccggcctgaaggtgaatcagaagattaatgtgtctcggaaatatatcaagcagattcgctcaatgctgttctcctggtataaaaacggattagagaatgccagcaatttgcacttcgacaagttcaataagcaggagtccaaatatattctggaccgcaatgaaagtttcaagaacattcttatcgggaagataaactttctcggccaggtgaaaggaaaagaggatcgattattcattaagttcacccatacgtactacctcttgagagatgaatatttcttgaaagagaagcagaacaagttcgagatccttgatatcaataatctcaagtactgcgagatcatcaagatctttactcagatttacgatacaaagctggtgctgactgaagggattacagacataatttacatcaagcaagcactgaagtacttcaagaacaataacaagttcaagaaccttaagctgcgcttttgtcaggtaggcagcataagtaacctaatcgaaatctacaaagtcctatttgagaacccaaaagatctgactgtcatcaatcggaaaaaatgtctgctcccgtacatcgataagaaactgaatatgtgctttgtgatggacagcgatgataaacagattgagcttctgaagaaaactctccactttcataactattacctgctcgcagaggacattgggggttatattgaaaagctgttcaacaagaacctgattatcgagataatcaacaagaatgggtacgtgattgatacatcaaatccaaaactgcaggactcatcaaaaaaaggcctggaggaatacttgcggtctacaaaaaagagcgacaatgaatttcatgcagttcctaaaacttcgtacatcgcctatgaaaataaaatccttaagaagaccgagctttccaagttcataattgatagtgagaacgtaaactacgacagatttgagaatttgttcaactacctagagaacatcaagatcatcgactttaaatacgacaaactttgcagcaactcaatcttttga

SEQ ID NO: 8718 - RNA, 1809 nt, synthetic construct
  source 1..1809: mol_type = other RNA
atgttctttaagaactttttacgcaataccaccaaacacgtcctgaatctgttcaagaagaaaaagaactatgagaacatcctgatcgacgagtttcacaatcgagagagcaagatcttctacaagaacaacaagaaaatcatcgagctttcactgagcaatattcgtaataacaaagcctatttccacaaagagatttctaagaagaacggaggtaaaaggaggctatccattccagattcatataccaaggttgtgcagaagaaaatcaacattctgctcacaaagttctatcacgccccaaagtccgtgtacgcttttgtgaaatcgtcggacaataagaaaaacattgtgactaacgcttacatgcacatcaacaagaaaatcgtcattaatgtcgacatcgagaacttctttaatagcatcaactttggccgggtacgaggtcttttaatgtcctatccctataacattgacaaagacctggcaaccaagatagcacagcttactatattcaataaccagttgcctcagggcgcccctagtagtcccgtgataagtaatatgatctgctacaaactggacaaacagcttatgcatctggccaaggagtataggtgcatgtatacgcggtacgccgacgatattacatttagcacgaacgataagtatctgaatcagaaagctttcttcaaggaactcaacaagaaaatcaacgaaaatgggtttagcctgaattcctctaaaaccagagtgcagaaatactgtcattctcagattgtgactggcctcaaagtgaacgagaaagtaaatctgagtaaaaagtacatccggcaaattaggagcatgttgcactctctccataaggatggcttagcagaggcctctgtcaaacacttcaaactctacaatatcgatgagaagtattcaaaggataaggagaagagctttaaacgcatattgagagggaagattgactttatgggaatggttctggggaaagaggactacaagtataagaaatccatttacctgttctacctagccacaaataattacttgcccctgaactattaccaaaaactcgaaaagatgaacagcgaagacgaagattttttgaaactgtccctccaagagatgtattccagtatcgtagtttttactgaaggcgagacagatataacatatttaaaggccgcacttaacttcttccatagcaaagacaaattcctggaactcaaaattagatttgtcagcctgggagggtttcctgaagttataaagtaccacaaagcgatttttctgactaagaatgacaatgtcacactggaattacgcgagaaactgtctccctacctgaataagagtgtgaactattatttccttctcgatgctgacgacccagatatcaagaactactttaacaagacctatgtgccaaattcattctacctcataatggaaaagacagatggttacatagagaaatgctttcagaaggagttgattaaggacatcatcaataagcatggatacaagattgagccggaaaaatcaaccaaacagaaggtgacgaatcaactgttgaaccatctaagaaacaactcaaaaaaggatgacttcttctccatcgattcctacatcgtgtatgcggagaagcagattttcaagaccattctagctaagtacatctgtgacaataaagaagttgactactctgtcttcaaagatttcttcgactttatcatcaagaacaagaccaacaatcttatccctactaagctctctatagatgatgaatacaagtga

SEQ ID NO: 8719 - RNA, 1572 nt, synthetic construct
  source 1..1572: mol_type = other RNA
atggcgaaagtacgtaccctgatttgggctttcctgtatcacatgctgaccctagatgagttcgaagagaaaatcggcattagcatcggcaagctcaactatatcggttacattctaaaagaggaggacaagtaccttaatttcgagatttccaaacggaatgggaattcccgacaaatcaattcaccaaactcaatcctgaaacatattcagaatcggataaagcttatcttagaagagaatttccacccttacagtgtcgtccacgggttcgtgaatgacaagtccatattgtccaatgccaaaaagcacctcaatgctaaatggatcctgaacttggatatcgagaacttttttggtaccatcaatttcggtcgcgtgctgggcctcttcctcagtaagccatacaaatttgacaagaagatcgcaacactgatagctcagctggtgacttatcagaatgtgctccctcagggatcacccgcatcaccaatcattagcaacctgatctgcaacaaaatggaccgggatttcatatctttttgcaagtctaagcatctaatctatacaaggtatgccgacgacataacgatctcttcgcaaaagcgcaagtatatgaatttcgatagcaccctggacgaagatctcttagaggatatcaagaagctggtgaacgagaatgggtttaagatcaatagcgacaaggtatcttttagctatgggaaggatggaggcatagtgactgggcttagagttaacgagaaaatcaatatcccacgcaaaacaatccggagtttgaggggtttgtatcatagcatcagatccaacggctaccaggtcgctaacgagatttataaccgcaagtacaaaaaccttaacaggctgcctaaagaaaataaagagctcatcaaccacattaacgggcacctgaacttcatttttatgataaagggccagtttgacgacgtatactcgaactactacaacaaattcaagacccagttgaagcttaatataaaatcaccgatacccaaaagcgtttgggactacatttttatcatggagagtgaatctactcagaaacaaggcacggcctttaagctgaacaagtttgggattatctcctgtgagcacgtgtacgataactatagcaagatctttctcaagaacaatttctccaagaagtttgatcttgaactcatcaagaaagacgaacgtattgacttgattaaatcaagggccctggatcttttcattgaagatggcctcgaaattaatctcgacttccattacaaaatcggaagcaaattaaggctgctgggatttcctaattatcgaatcggcgattctggaatggacaagctgataacaattgtgagtaaaagaactgtgtctggcgttgaaagaatcttagtcgattccggcattgtggcgggaaatagtggaggtcccattttggacctgaacggggccgtggttggaattgcagtcacaggtgccgaagatcacgataagctagacgtcaccgagaaccattccttcattcccattaagtacctgctgcagttctga

SEQ ID NO: 8720 - RNA, 1857 nt, synthetic construct
  source 1..1857: mol_type = other RNA
atggataacccgttttccgagctggacacgaacgaaataagcgccagctttcgccatatctccaatgtctcagaattagcgtcttttctgggtgtgacccgccaaaaactattttattactgcgccgagcatttgaacaagaagcactatgagctttttgacatccctaagaaaaacgggggcacacgaacaatagaagaacccacaaaaggtctaaagctcatacagaaaaagatcgccttcgctgtgagcatcaattaccatccagccgcttgtgtctcagcattcactgagggaagaagcattagatatggcgcagagcggcacaaaggcgcacggaaagttgtctgctttgacctggagaactttttcccttcctgtccacaatataaggtctttggggtgttctacaagttcttcaaattacccaaagaggtgtctgactgcctcgctaggctgtgctgctataaaaaacatctcgcacagggggggcctagcagtccaatcctctccaacgtgatgctgaatagtatggacaagaagtttctgagtcttgcaaagaaaactaagactgtttatacccgatacgccgatgatatgagcttcagttctaagggcgatatgcccagcttgatttggcagaataacaacatatccagctatattacctctattgtacaggaaagtggttttcacataaagcaggaaaaaactcggattctgggaagatcgtgtaggatgcaagtgaccggtgtggtaatcaacaaattcccaaatgtacctcgaacctactaccgtagagtgcgcgccatgttacataacttcaaaactaccaaggactatgaggagacaaaaaagaactttttgaagtactacggcaagtccgacgactgtaatcccgctaaggtgattcagggaatgatctcgtatatcttccaagtcaggaacgacggcggaacacattcaacgctcgcgagaaacatgatgcaggaattcaataccatccagtggccagggaatgaaaagttcaaagttgaaatggccatgccccactcatataagctgcacaaagcggtgtttgccgtcgaaaccaagatcggcgaggatttcttttatggcacagcttttctctgcaataacaagatcatttcctgttcacacatcttcaaaaaaggacacgagaagaaacttagtgacgagattgaatatgttcacctgatcgagcataatgtggaagacaattctatctacaagaagtacaatgtgacgaggatcgaatattggcccgacttcgatgttgcttaccttcataccgactcttgtatcaataaggcaaagcagaagcagttcagcactcctaattttctgcaccagggcggcaataaggtcttcgttgtgggattccctgccagcctgcagactgggtctagttcgcggatgtacgaagaaaaggagacaattcaggaggaccaccgcgtggagctgcagtacaacgagttcgccgtggggcaaaagcaaaccattattgataaaaggcgcatgacctttatctctaaccagaacgggggaattaacccaggaaactcaggtggccccatcctggatataagcgaaaaaaaggtgataggtattgctctcaaaggagataatgtaaaggattccaagtctttgtccaataaccggtcagagttcttcgatctgtacgagtggcttaacatggacaaaccgaaggccttcacatgggagaagattgtcgggaaactcaaatttgagtttaaacacctgtacttgttcgtctacatccataattccaaaaactgcgatcttctgggccgtctgcacaataagctattttga

SEQ ID NO: 8721 - RNA, 1221 nt, synthetic construct
  source 1..1221: mol_type = other RNA
atgctgtccaatatcattctctacgcttttgacaaacagatgctggaattggcccgaagaacgaaaacggtgtacaccaggtatgtggatgatattacattttcaagtcagaacaccatgccgcgtctgctgtggcagggagagaactggtcaaccactgttaaaaagatcgtggaagaggcggggttccaactatcagaggagaaaactagaaagtttgggaaggggaatagactttctgtcactggagtcgtggtcaatgaaaaaatgaacgtgcgtcggatgtatgtccggaagattagagcaatgctccataactttaagatcacggaggattacgactccacagtgaagaagttcaacggcttctatttgaaagataagatcgtggatcctgaacgcgtgttgaaaggaatgatttcgtacgtatatcagatacgatccgatccagagcaggaccaggttctcagtcggaggctgatgcaagactataattctatcaattggccagggggctccagattcgagctgaagctggccatcccccagaagttcaaaaggtataacgcaatctttgcagttgaagtagtcacactcttcaaggattttttctttggtaccgccttcctttgcgacgggaaaatctactcctgctgtcacatttttgagaatcgaaacgagcctgacgaccagccaaagagcatcaaactaattgaattcgaccccgagactctggaggtccacaagacatacaaggtggacaaagtggatctctggagtgaggatgatatcagtatgctttacagctctgccctgaacaagacaaagcggaagtcattcaatagccccgcgcaccctctcaaaggacctgccaaagtggacattttaggttatcccgaagcttttcagattggcgaaaaaagcaggatgtacactgccgaggagactacaattataaccataggggacaatatcagccagtcacataagagtgaaaattcccggtccgtagtgttgctgaccaacgacaatggaggcatccaaagcggcaactctggtggtccagtagtttctattggaaacggcaccgtggtcggcatagctatcaggggcgctcaaccgaaggatggcaattacgaagtggttcgctctgagatggttgacttctacaactggcttcatagcaacaaacgcacccccgaaacattacgcctgcgctga

SEQ ID NO: 8722 - RNA, 1743 nt, synthetic construct
  source 1..1743: mol_type = other RNA
atgaaggatctcttttggacgaaaaataacaccgacattaagcgccaatttcccgacctgaaatcagccagagaactggcctcatttctaagcatcaagtatagccagttaacctattatgtttcgaaaggcaagaagtataagtccttccaggtgaaaaagaagaatggtgaaatcaggatcctggaggccccaatcgtggggctgctgctgatccagaaaaaacttgcatacacccttggattgatttacactccatctccctctgccatgggatttgtaaaggggcgcggcattagaaagaatgcccaggtgcatgtcaatagcagagaggtgttgaacctggacgtcgaaaacttctttccttctatccgttcaaacctagtgttcggggtgttccataagttcttcaggttcaatatcaagcttagtgacacactgacaaagttggtttgcttagacggtgcactgccacaaggggcacctactagccctattttgtccaacatcattatgaactccattgatcgcaaattcactgccctcgccaggtctaatcactgtctgtacactcggtacgtcgacgacataacttttagcagtcgcaataccattccacgaacactgttcaggaacaaggacgtgagtgatctcatcaagcaaatactcaaagaaaagggactcaaggtgaatgagaacaaagtaagactccgaaaacgctttcagcggcaggacgtgacaggcgtgctcatcaataagaagatcaacgtgcagaaaaattacctgcgcttaaccagagcaatcctacacagctttgagttgaatgagtacaaagacgctaagaaagtcttcttatcacattacaggaacgaaaaccatctgggaaagaaaatcgaacccgagcacgtagtcaagggcatgatctcctatatataccagattcgtaaggatcctaaggacgatgaggcagtatcccggaaactcatgcagcggttcaacagaatcaattggccatacaactccaaatttgaccaaaagattagcaatcccgttctttttcagaaactcaatagtaccttccaggtttatgtcagcttcaaaaaggagaacggggactttgatagattcactggtaccgcgttcctctgcaacggcgaaatctattcatgttctcatactttcgtccaaggctccaggaagaatgtgggccccgaattaaacgatgcccagcttgttgagttcgattctttcaagaaaaatcagcggaaatgctacaagattaccaagattgagtacaatacggatctggacttttgtcacatttacaccaaccacaaatttgaggggggctttaggaagccgacgacagctccctatgaaaacgagaaactgcaggtggtgggatttcctagtattctcgatcacaacaacacagtcggtctgtatcagaagtccggccggatcaccagcacattttctgaacccaacccagattatgacaaagagaaaggggaggtggaggacggaaagttgttcatgcctctgaagcaacgactattgataaacaccgatgctacaatcctggaggggaacagtggaggtccgatactgactaaagatcttgttgtcattggcatagtgctgaaaggacagaatcgtgaatcggctacgaataatacagctcttgacttcaattttgcgctgaactcagatttcctgatgaagaaatactatctgaagtga

SEQ ID NO: 8723 - RNA, 1617 nt, synthetic construct
  source 1..1617: mol_type = other RNA
atgaacgcagaatccaaaaagattaggagccaattcacacaactctttaacgttgatgagctggcaagttttgtgggtactaacgcgcaaactatacagaccatcacaaataagacaacctcctattataagtcgttcgagttgaaaaaacggagcggcggaagcaggacaatcctggctcccaagcaacagctcttgagcatacagaagaaaatagccactacgcttgaaaagatctatcctgtctctatctacagccatggtttcatttataagaaggggattaagaccaacgccgaggagcatttacgcagcacggaacttctgaatttcgacattgacaactttttcgacaatatcccagagtatcgcattttcgggatttttcggtactacttcaatatgaacaactacatctccggcatattgaaagagctcacatgcgtagagcggcacttaccacagggggctccatcttctcccattctgtccaacataatatgctataagatcgacaaggatctgggaaagcttgccaggagaaatcattgcaagtatacaaggtacgtagacgatatcactttttcatctaaacgaaagctgccaagctcaatctacaatcgtattaacaagtcttgtagcaacaacatcgtcaaaatcctctcagactctggattcaccattaaccaccgaaagaccagacttttgaccaagtcacagcggcaagaggtcactggtattaccaccaataagcagctgaatgtgtccaaaacttacattagaagcactagggccatgctgtacaacttcaaaaacagtaaataccaggtggccaacgcgaaatttaagaaatactacaaggcaaagcagaatctgaatccgaattccgagattttacctgaagagattattaaggggcgtattagctacatatatcagattcgcaagtcgagaaaagaacagtccctagacaattctgtgacacacaagttaatgcagagtttcaatatggtgtactggcctaaaggctccaagtttgaccagaaaatcgccaatcccgaaaaattcaagctctataacagcatctttgaaatcgaagttaaggctaaggatgaagacctctgtgagaaagacaatattatgacctacaccgctacagcatttctgtgtgaaggcaaaatttactcatgtttccacatcttcaagaaaccaaagcagatcatcgagcctaaactgaaagagtatgattgctataccaagaaaatccgcgctacgtatgaaattgccagtatcgatttcgatcaaaattttgacgtgagtatcatacaccttaacaacacatgcaagatcaaaaaatccggcttcaagagtcctaaaaaggatgctacagagaatgaacagttgattctggccggctttcccgaattttcccatcaccagggaaacacgctcaatctctacaagaaaaatacccagatcgaggatatctacaaggagaacataactaaactgaacaaaccgccctattcatttagtaacaagatgaaggcagagaaaaatctactgttcttccagtatttctctctgtttaacaagatcatcgccgtttttgtgtga

SEQ ID NO: 8724 - RNA, 1755 nt, synthetic construct
  source 1..1755: mol_type = other RNA
atggacgaagacaagaagtacaaaacatttacaatcccgaaacgttcaggcggacgcaggcagattctggctccctgtggacccatactgggcctgcagcataaattaagagacttcttggatgcctgctacgaaccaccaccaagcacacatggctatgttcccggcaggagtatccgtacaaacgccgtgcctcatgagaaatgccaatacatgatgaagttggacattgtagacttcttcccaagcatcaccttcgccagggtatatggcctcttcaaggctgctccattccggtttacgaataaggtcgcctccactctagctaacttgctctgttatcgcgaagtgcttcctcagggggctccaacctcacctgtggtaagtaacctcatatgtcagaggcttgatcgggatctcctgaagtttgcacgagagtattcctctcaattcacgcgatacgccgacgacctgacattcagcacaaaagacggtgcccagtggggtttggtggtcctgaatgataagcgtaagtgccctcatcccgagatcgaaaggatcattcaggaaaacgggttccgacttaatgaggcgaagacccggtttctgaacaaatattgccggagaatagtcacgggtgtggtgaccaacgagcggctgaatgttcctcagtcttatcttagaaccaccaatcggatgctgaaactggcgggcactaacgggcttgacaacgtgggacggtggtactgtcaagacaatcacatttttagctcgaccgtcatgaatttcgccgattacgtggtcaaagttctgcagggccgcatcgcttatgctaagatgattcgtgggtcagacgatcccatctgccagaagcactccatttatctagacaacattgtttctgggaggcccctgacttacggagccggtaactacatgaagtttgctaaactaacacctctgcgcgtactccacctctcagacttccattttcgggttgagacatcctggaacgccacccccctgttagaggatttagtgaattgcataggcgaccccgctagaatgagtctcctccctcctgatttggtcgtggtcaccggagatatcgcctttagtgggagaaaagccgagtacgcactggccgccgattttttgtcccagctgtgcgcacgcatatcacttccgatcaacagagtttttatggtgccaggcaaccacgatgttgatagagcggcagtgtctgacgtggccctccgagaacagaaggacttgctgaaactcgacgaacctggcgcaagaatcagtgcaatgtttaaagacgctgacatcaggcgggtcttactccgccgcctagatagctacgtggatttctgtaagaatttctatggttctggactccgagcagagccgtggtggaaggagactgttcaggtgagggatatgaatatcgggatttcgggcctgtgtagttcctggatgtccgtgtcagacggagagcaggggcaactgatgctgggtctgccacaagtcaatgaggtgatgcacagaggctttactcacgatctgactatgactcttctgcaccatcccttaaattggatttccgagaaggacgccgaaagcgtggacgaaattagggcgtggagcgacgtagtgttccatgggcacgtccacaccagcgatatcgcaaccacttacagccagtgcaggggcgatgatgatatcggatctcgctctggagtgagatggtga

SEQ ID NO: 8725 - RNA, 1041 nt, synthetic construct
  source 1..1041: mol_type = other RNA
atgaaaaagctgtacttggcggacattgaggagcgttcgcgacggttcttagggtgtcgcacaatcgatgatctgtgctgccttggtttcgtgaaaaatgagttgttactccacagcctcaatatatcatactactcctttgagttgcgcaagaagtcaggtaagatgcgccagattgaaagccccaacgagagcctgaaaaaggtgctgcggcaattcaactattatctccaatgcgtctattacattcaccagaccgatgcttcccagggctatataatcacccctaagaaaagtaaggtgtgcaaatcaatcctggaaaacgctagggtccacctcaggaacaggttcatgcttaacattgactttcaggactttttccaccagatctcattcgaacgtctcgccaagcggctttccgagacaccctttaaattcgacaccagtacttctaaactcctggccctgctcttcacatataagggaaggttacctatgggcgccccgactagcccagtgttgtccaatctgtgtgttatgaaactagacatggaaatgtctgaatggagtaagaagaatggggtgacctactctagatttgtagacgatttgaccttcagcagagatgatagcgagtttatcagcgatacctatacagaaatcaaccatatatgtctgaagcattctctgaaagtgaatccagcaaaaatcaagtacttcggagaagggtccctaagaaaagtgactgggctgattctgcgagagacgattgatattgaagacggcttttaccacgagctggacaaagacttcaatcgcatgaagaaccttgtggaggttgtgatcattaaccatggcgtaaagtccaacgacgaagtccaaacgttcaagaaggagatcgagggacagatcaattttataggcatggttgagggatataactctcctatctttaatcagtaccggcagaaactgaaggccgttatgaaccccgcagaggaagtccttagtgtcagatggactaattttaattacgtgtga

SEQ ID NO: 8726 - RNA, 1041 nt, synthetic construct
  source 1..1041: mol_type = other RNA
atgagaaagctctatcgagatgaggttaaaaatagggcctgccagttcctcgagtgtcaaaatatgattgaccttcacaggctgggctttgatacagcccgtattaaactgctggccctcgccccaccgtactattgctttgatatgcccaaagagtccgggggagtcagacacatagaggcacccgaagagcacttgaaggacgtgcaacggcagttcaacaggtatctgcagtgcgtatactttgaaatccagacgcccccaagttatggttatatcataagaacgaaaggacagactccatggaaaaatgtactggaaaacgctcggcaacatctgggtgcccggtacatgttaaatgtggacttcaaggactttttccatcagtttactctgagacgaatacaccggatgctgcagtgccctccattccagtttgacaataagaccgcccacctcctcgctcggcttttctgttacaaagggcgcttacccatgggagcgccaacttccccggctttgagcaacatcggcaccatcgctttcgataacgacatgtatgcctgggctagcaaccagaaactaacattcacaaggttcgtggatgatatgaccttttcttcacctatcgttcccctgactgacgaacacttggcacatatcaacaccatctgtcagaagcacgcactgctcattaaccctgacaaaacagtgtttttcggcgaagccgataccaagaaagtgaccaaactcctgcttcgcgataccgttgatatcgatcctgacttctacagagagttagacaaggacataattaggctgaagcatctaactgaggtcaatattctgatggagaaccataagcgcgggcagcttctgcgtaagttcaagaaggaagtcgaaggccaagtgaattttattggcatgattgagggattcgactcttcaatcttttacaagtaccgcatgaaaatgaaggaggcattgaaacctgataataaggcgcttagtagccgatggacaaactttaactacttttga

SEQ ID NO: 8727 - RNA, 1041 nt, synthetic construct
  source 1..1041: mol_type = other RNA
atgaggaagctgtatctgaaagaagtagagcaactggcaaagcagttctgtgcgtgcgaaaacttaaaagatctggagcgccttaatttcgccatcaaccgaattaggttgctgtccctgaaccctcaatacgatgttttcaaagtgccgaaacccaacggtaagactcggctcatagaggccccagaggtcgaactgaaggaagtccaaaaacagttttctaactggttacagtgcgtgtactttctgctccagcctaagtctgtttttggttatattcagagagtgaaggatgttctcccagcaaagaacatcttggagcacgcaagacaacacctgggcgccatctatctgctcaatgtggactttcaagactttttccatcaggtcagccacactgatcttgtgaggcttctgcagcggccccccttcagatggaccaaaaaggctgcagctattctcgcaaagctgttcacccgtaatggccgcttgccaatgggggcccctaccagtcccgtgctctccaattttgcggctatacagctggacctggatatggagaaatgggcccagaagcagggaatcaattacacaaggttcgttgacgatctgtcctttagcactaaggaccaggccctaacaaccgctcacctagaccaagtcaagaccatctgcgccaagcatcagttcgtgattaacccacaaaaaatcaaatggtaccctcccggggtcagcaagaaagtgacaggcttagtaatcaacgagacagtggacattgacccgtcattctatcaggaactaaacagaaatctcaaccggctgcagggcctttcagacgtgaatgctatagtaaatcagagtcgacagaatgacttgtaccaggatttcaaaaaggaggtccagggaatgatcaacttcattgggatgattgaaggatacggctcgcaactgttttttgattaccggcagaagctcaaagaggccttgcatgtgtctcctgaatgtcttagcgtgcgctggacgaattcccagtatttttga

SEQ ID NO: 8728 - RNA, 1020 nt, synthetic construct
  source 1..1020: mol_type = other RNA
atgaatcggtgtttctcttcattcatggctatgagagagccaggggatatgtgcgcgctgttgcggctgccactcttcaagctgaaactgctttcgctgcgcagcgtctataatactttcgagatcaagaagaatggcggcgcacgcttaattgaaaccccggcccagcctctcatgaaatacctgaagagtctcaaaaacttcttgcaagccgcctattactacctgaaaaccgacgctgcctacggatatatactcaaccccggtcagacaaaaaacccccggaatataatgactaacgccaagatccatctaggaaacccttggatgctgaacatcgatcttgacgacttcttccatcaggtcaaggaaaaacacgtacagcaaatctttggcatgctgccatttcgtttttccggcgagctcgtccagctgctgtgcaaactaagttgctacaagggaagattaccgatgggaagtcccacctccccacctatgtcaaatttcgcaatgattcccgtggacaaccgtctcctgaagtgggctaggtccaacggtattgtctacacgcgctttgtggatgatctgaccttttcttctcagaaacccatcaatagctgtacacttacaaggattgaagagattctatacgagtacagatggaagattaatcaggacaaagtggtgttgtttggcgaatctgacataaaaaaagttactggcctggagcttaggaacagggtgtccgtccctgatacgtattttgaggaggtggccaaggatattgtgcggcttgagaaggctaaggaattagtgatccgagcaccctttcacgaaagcacagcctggatcaagaagttggagcaacacgttaatgggcagatcaatttcctggggatggtttatggttacgggagccctgagtatctcaacaaacgaaccaaggcggacgcagtactccagagagattacgaaccagaatcattgaactggctggacttcccttatcaattcttttga

SEQ ID NO: 8729 - RNA, 1011 nt, synthetic construct
  source 1..1011: mol_type = other RNA
atgcttggcaagataaagaccaccaaagagctggctttgtacctggggacatcctatgagaaactgaacaagatagaccccgaaaagagcttcgcaagcttctacataaacaagcacggttctactgaaaagaggttgatcgaatacccacgaggtgagctgtttcgcattctcgaccggctaagtgatggactgcaatggctttacctggatcacctgacaacggccgcttatggctttatcaggaagctgaagcctaataaggatcctcggaatatttataccaacgcaaaacgccacttggggaaaaagtaccttctgaacatcgacctcgatgacttcttccatcaagttgatactagaaaattgcagaacctgttcagtgattattccctattttccctcaatcaggagagtgaacagttattggtcaagctggtgtcataccgagggcggttaccaatgggcagcccaacatcaccctctctgtcaaatttcgccacaattggcatcgacaatgacctttcggtgtgggccggacgcaattctttcgactatactaggtacgtggatgatatgtctttttcaagcaacatcaagatcacccagaatcatattaaccagattatcgagattctctttgcacatagatttctcatagatccaaacaagaccaaaatcttcgggcctcaagacaccaaagaagtgacgggactcgtcctgggcaaaacaattactgttcccgacgagtttatcaatgcgttcatgaaagacatcaacagattcagcgagatgcatcacctggcctgccagaatcccgacagtagggtcttcgagtggctggaaaagatgagaaaagtgctacagggtcggatggcctttcttaaaatggtacacggcccgaagaacgaaacctacaagctctttcagctgaaactcgataacatttacaagcctgaactgttagagactagcgtgtcctggcgttatgctggatatgagtactcctga

SEQ ID NO: 8730 - RNA, 1047 nt, synthetic construct
  source 1..1047: mol_type = other RNA
atggcagtgggctatcgccacatttatagaacagcccgctacctgcggtcttgcagacaactctctgatctcgagggacttataaaagtatccaaggctgacattaccctccacagcctgcatcctaaatactacgaattcagggtcttgaagaagaatggtggctttaggaaaattgaagctccacagccgggtcttatggacctattacggaagctgaactttgttctgcagtgcctttatttctttgagaaacctcccgcgagctacggtttcgttatgtcacataaggggaacaaacaaccacgcaatatccgtaccaatgccgagcggcacatcaattctgcctgtatgctgaatgtggattttgaggacttctttcaccaaatcaaagtagacaaggtgtatgcagtgctcgtgaatccaccattccacttcagtagggaatcggcagatgttctggccaccctatgtactttcaagggcaggttacccatgggatcccctgccagtcccgctttgtcaaatttcgccgtgcgtgacatggattggatgcttgacgcttggtctaaagaacgggggtacagattcactcgcttcgtcgatgacttgagctttagctcagaaaccagcgcgttccatcccacaatgatgccggagattaacgctatactctccaacttcaacatgaagattaaccctacaaagaccaaatggtttggccccggcgaagtgaaagtggttacggggctggaggtcactgatcaggtcagaattccaggaagcttttattatgacttgagtaacgatctgaagcgactgaagtactcaatcgaggcccaggtccaggtaatgggatcccagcacaacgagatggtggagaaactcaagaaacaggtccgaggcaagatcaactttgtggggatgatacaggggaagggagatcggaaatacacagatctgctgagggactacgacaatgcaatccatcccgatatcgacaagctgtccgtgagatgggtggattttccttatcaggacttttga

SEQ ID NO: 8731 - RNA, 1035 nt, synthetic construct
  source 1..1035: mol_type = other RNA
atggccacgcccatcaagaccatccgcacccggaatcacgctttcaggtccatgagagtgattggggacctttgcaggctcaccggtgaaagtaatctcgtcctgggcttgatggccgataaacctagatacagacagtatttcatgcgcaagaaagatggatcgaagcggccaattgaggatcccgatgccaggctgaaggcggtactgcgggtgattaacgaccatctccaggcagtttactactacttgcgcccaggggcggttcacggctttacgattagcagcacttcagatgaaacagagaggaacatcctatctaacgctcgggcacatatgcaatctcactatatgctgaacctggacctcaaggacttttttcaccagatcacccaaaaatccgtcgttcagctactgagctctcacttcgatcaatgggacgactcattaatccatcttgttgcaggcctgtgttgctttagggggcggttacctatgggttctcccgccagtccggccctttcaaattttgctatgactgacttagaccatgagctcatgacactgtgtaaagtgtatgatgtggtgtatacacgatacgcagacgatcttacttttagctcccgtgaaccaatgtccagtgtcttccgcgacatggtgaacgacgctgtgagacaccgaggatttgagataaatcctaagaaggtccgttattacattatggaagatagcaaggtggtgacaggaataatcgtaaccaaggacgagctgtgcctgcctgaagagtacatgcaccagttgagaaaggaaatagacctctaccgcaacagcgtgatcgttgataccatgtatgagactgggatgtctggcaaaaagctgagtctcttcgagcaggaaatcacaggcaaactgtccttcgccaaaatggtaatgcccgatgacgacgaggtcaaagagctggaagacttgttctacaatgaggtggatgtccattcagtgatgcagtcctggctggatattccatatattttctga

SEQ ID NO: 8732 - RNA, 1053 nt, synthetic construct
  source 1..1053: mol_type = other RNA
atgcacatgggcagtagttcactgagatttttccggagcaacgctaagaggtttgcatctgttcgctccaaggaacagctcgctcgggagcttgatagctccaaatatactctggagctgttggccgtctcacctccttaccgttcttttaaaatcccgaagaaagatggtacttggaggagcatagaggagcctgaagaggagctgaagctggtgttaaagctgcttgcctttcatcttcaaaccgtgtatttcttcattaaacccccttgtgcctatggctacatcctgagtcacaggtcggatccagacaaacgcaatatagtcaccaacgcacataggcacattcaggctcatactttattgaacgttgatatgcgggacttcttccaccagtgcgacgaagccgaggtcgtgagcgtattgaggccacactttccggaaatggaacaggactgccttgagctgattgcaaatttgaccacctaccacaacagactacccatgggcagcccagcatcccctgttctctccaattatgccgcttttagactcgatcacgctatgctggcctggtcccaggaaagaaacatcgtcttcacgcggtacgtggatgatatgacgttcagcagccgtaccgtgctgcccgtggagtatgtgaagcaactcgaagaggcctgcgcgaaatttggattccccctcaacccagctaagaccaaatattacggacccgaagacgaaaagtatgtgacagggctgatgctcacaaaagaagaggttgtcctcccagggaagtacttctcatttctgcaggacgacctggacagattcgcggctctgtacccagtattcagttgtctatcagacgagcgatcttctgcatgggtgtggcattttgaacaaggcttgacagggcgcatcaatcacattggagcagtgtacggtcggtcttccgccacttttcgacattaccagaagaagcttcaggccgccaaacgccctgtagcggaggagatctatatgaattggctggatttaccctacgagacatga

SEQ ID NO: 8733 - RNA, 1050 nt, synthetic construct
  source 1..1050: mol_type = other RNA
atgacctttggcgacatccaaaccaaagctagcttggtgagtaagtgtgataccctgactgagctgtgcttcctgcttaagactccacggaaagccttactggcaatcgccgataagcctgactataatgagttctttatgccgaaacctgacgggaaaggacgacggttgatcgaagatcccgtggcggtcctccaatatattcaggagatcctgaacgactatttccaggcagtgtactacctgatccgccccgaagccgcttatggctttcagttgagttttgatgacgatcacgcaggccgcaatataagaacgaacgccgagaggcacttacataaaccatggctgctcaacatggacttcaaggattttttccatcaggtgacatcacagaaggtggaaatgatcttacgtggggacagctttagctttgacaaggagtgcgtcgaggtcctttgttctattctgacttataagggtcgcctacccatgggtgctccaacctcacctgtacttagcaacatggctgtcatggaaatggacaatcaactgggccagatggccaaagaaaagaggctgatttatacgaggtttgcagatgatttgaccttttctggacaccaggagataaatgagttcactataaaggcgatcaaggccgtggtggctcaattcgactacttcttcaatgagaataagactagactgttcacaccagagatggagaaaacagttacaggagttaagcttggcgatcggctggggctagaacccaagtacctggataaagtatctctcgaaattcagaagtacgagcataccaaggagattcagggaataaacgggattgagagttcggaatacctcaccaaatatgaacagcagctctcaggtcacatcgaatttattggcttcatctatggaaaacaggcccctgagtacgttcatctcaaaaaaaggtacgacaaagccgagtcctcctcctacttcgattccagatcttggatggaattcgaccgacactacacattttttaacaagaagtga

SEQ ID NO: 8734 - RNA, 1047 nt, synthetic construct
  source 1..1047: mol_type = other RNA
atggcccggctgaacaagatcaagaagataaagaagttggcagagtatttcgcttctatccacacgaccgaacagcttgcaacattcgtcggggtgcctgtataccagttgactcttctcgccgagtttccggcttacaactgtttctctattccaaaacagaacggcaagccaagaatgattgaggatcctcataaacctctcaaaaaggtccaacagatactcaatagcgccctccagtgcggttattactgtaataaaacacatgctgcctttggcttcctcctcaatccagaagacgatacggatcccagaaacatcctgaccaatgcacagaggcacatcaaccgactgtggctattaaatgtggactacgtggacttcttccacgccgtttccacacaccgagtggtcgagctgctgctgtctgactacttcagcttcgatgaacccactgcccttctgattgcgcagctgtgcacctataaaggccggctgccaatgggggcacctactagtcctgtgttgtcgaactgggcggcaaggaccctcgatgaggagctgctggcctggagtcatcgccatggatttgtgtatatgagatttgccgatgaccttacatttagtagacaagaacccattttgccccaacacgtgcaggagatcagggcgataagcactgtgaatggattcacttttaacgagcagaagttaaagatctgcgctccaagcgccgaaaaaattgtgaccggtctagtggtcggaaagaacggcgtacagctgccctccggttttttaggggaactggaagccgaaatcctgaaatttcgtaccgtcttggaggttcaagctcgcgcagggcgtgcccaatccgtttgggtggaggaattccggacacagctcgagggccacctttcattcgcttcctttgtccttggagaggaccacgctgactaccggcgcctgtcaaggctgctagaggaagccatgcagccgtctgtagctcatgactcagttagctggctgcacttcaattattttttttga

SEQ ID NO: 8735 - RNA, 1098 nt, synthetic construct
  source 1..1098: mol_type = other RNA
atggctaaaaaagtctctatctatgaactacggcggagagcgaacagtttcctcgcttgcaaagggaccttagacctggcccgccactggagagtggataatgtgcggttggcagtgctagcaattgagcccgagtatcgggaattcagaatccctaagaaaaagcctggaaccttcagggagatagaggatccccgtccaaagttaaaagctattcttcgcaagctcaaccgcgatctccaagctgtctactattttcagcgcagcccagccgcgtacggctttttaactagcccggccagggacccagatccacgaaatatcctgactaacgctcagcagcacctaggggcaaagtggctgatgaatgttgacatgcgtgacttttttcatcaaatagaaacacacgaggttgcagagctcttccggcagccacctttcagcttcccgaaggcaacggctaagctgctggccggcctgaccacctacaaagggagacttcccatgggtgcgcctacttcaccaatcctctccaactggtacgccatccccctcgacaagactctgaccgaatttgccagacagcgtgaatggacatacacaaggtacgccgatgacattacatttagctcgaagacctctcctattaagtttgaggatgtgggtcgggttaacgtgctggtaagggggagggagctggaactcaaccataacaaaaccgtcatttatcccccagatgccccgggaaaggaagtgacgggactgatcgtaggcgctgaacaggtacaactgagttctgagtttttggccaaggtcaaagacggactcagacgattgaatgacgtggtggatactaagtatctgatgccttccggccgcctggccaaaaccccatgggttgaggagatagcacagcaggtgcgaggccttgtctcattcgcacaaaaagtgctgcctcccgccgaccctttgggcatggaacttgaggaagcttacgccacagccttggctcccccccagaattacggtcccgtgtcctggcttgagttcgggtatctggacttcaggattgatacaaatcctgaccagatcaagtga

SEQ ID NO: 8736 - RNA, 1083 nt, synthetic construct
  source 1..1083: mol_type = other RNA
atgccaaaaaggcctaccattcggaccttgaggagacacgccgagcagttcagagcctgtcgcggccagacccaattgagttggctgcttcgaacagagcctgtgagactggcaatgctggcagcggaccccaagtacgcgacatatagaatccccaaaaaacggaaggggaccttccgcctcgtggaggacccagagcctagattgaagcgggtgcaaaaacgcttaaattactaccttcaggccgtgtattactttcacaggcctaagaacgccttcggctttatcaccaatcccgtggatgacccagatcaacggacaatcgctactaacgccgccaggcacctgggatgccagtggatgttgaatgtcgacatgaaggactttttccacttagtaaatcgcgaacgagtctatgagctgttccgtgcttcccttctcaagttcccgaaaaatctggctagagtgctagctgatctgtgcacctacagggaaaggctacctatgggggcgccaacttcccccgtcctctctaacctcgcttgtatccccctggatcatgacctggaccatttcgcagagcagcgaggcctcacttattcaagatacgccgacgacctgacctttagctcgagggaacagcccatcaactgggagctgatacctcagattaacgagtggattacggcatatgattttcagctcaacccggctaaatctaagctgtacggccctgcagacccccataaagaagtcacaggccttatcgtcggagtacagcaggttagcttatctccagattacattgccagtctgcggaagggtattcagcaactggatcaggtggtgaatgctaagtacgttatgccatccggacgtctgcgcgccactacctgggttgacgaaatagcccaacagcttcaggggcggctggcatttgccagccagatcctaccagacacggatcctctccgcatagagcttgaaacagctatggatgaagcactggccccacccacagagtatggtcccgtgtcatggttggatttcggatatactctctttaacatgccgcctgcgtga

SEQ ID NO: 8737 - RNA, 1128 nt, synthetic construct
  source 1..1128: mol_type = other RNA
atgccaggttacagatatgagtccgatggcgaggagatttctatcgcccggggtcataccatcgatatgaaatacacccgtaagagagtgaattggctcgctagacagtttgggcaactcacggaccccgcttctctgtcacagctgttaggagtccagctccatctgctgcaactgcttgcgctgcagccgcggtataacacgttcagagtaccaaagaaaaatggcacttttcgcttaattgaagaccccgaaccccaccttaaacaggtgcagaagcgccttaacacatacttgcagtgcgtctactatttgcggcgcacacctgccacatacgggttccagatatcagtggacggggacaacgatccgaggaacatactgactaatgcaaggcgtcacgtggggaacccttggatgctgaacgctgactttctggactttttccatcaggtgaactacgattgggtgtatcggttgttcacaagagaggttttcaccttcgagcctgatcttgcagagttgctggccaaactaaccacttacgggggacgcctagctatgggcgctcctactagccccgtgttaagtaatctcgctacaatgccagtggacgatgcgctgactgaactggcccgatcctacgattggacctacacccgctttgccgatgatctcacagtcagcgcacaagcctgtatcgcccctgcccaagtccaggaatttctgaatactatcgcgccctttggacttgcattcaatgaagccaagttcgcagtcaggagcccggcgatgcccaagaccgttacaggcctggtggtaaccgcacaagacgtgcagctgccagctagtttcgtgaccgacaccctgacggagatcgagaagctcggacacttactggaaattcattataggtccggccgacctgtcacccgatggttggagcagtatcaacagcaggttgaaggtcagctcgcattcgccgaatttattctagacgatgctgactcccagctgcactctctcagggcagcttttgtacggatccagcagacacccgacttgggcgagccagtttcgtggattaatgccgcctatctcgagccagccagccacactctttactga

SEQ ID NO: 8738 - RNA, 1053 nt, synthetic construct
  source 1..1053: mol_type = other RNA
atgaaaaaccagaaactgacactcaatcagatcaagcgaaacgatgtactcataaagaaatgcaaaacatccaagcaaatcgcgtccctgctaaattgttcagctaaggagctgacacttcactcctttgaacctatatattaccatttcaaggtgccaaagaaacgcaagggcgcctttaggtacattgaggcacccagccaggaaattaagcacctacagagaaagcttaattactacttgcagtctgtgtattacctcaatcagtctaaagccagttacggatacatcattaaggctattggtcaaaagaacaccaagaacatctacactaatgccttacagcatctgggatccacctatatgctcaacgcagatttcaaggacttttttcatcaaatcgcactgaatgatgtggtccagatctttaaatcgaaactgttcaacttcaacaagaatacggcttataccttagccaagatctgcacttataaggggagactgcccatgggagcgccaacgtctcctgccctgagcaatttatattcaatcgctttggatcacgacctctcaacctgggcaacattgaacaaactaattttcactcggttcgtggatgatctgtcctttagcagcaaaaacaatttgctgaatcaaacccatttcaagcagattaacaatatcgctctcaaatatcaccttaactttaaccccaacaagaccaaatatttctcgaaaaccgacaagaaaatcgtgacggggttggtcctgaataatactgtagacatagacaagagttactataatgaactcgacaaggacataaaccgtctgcagaaggttattgaggttcatcacattactggtaaaacacaggggctcgcctttcttaaagagtttaagcaacagatcatgggcaagatcaatttcattagcactatcgagggcaagaacagcaaacagtacctgacataccttaactctttccacaacgccctggaagtcaacaatgagctggtgaacaggtggaccaaattcagtaattacatttga

SEQ ID NO: 8739 - RNA, 1050 nt, synthetic construct
  source 1..1050: mol_type = other RNA
atgaagcagcagaagcccaccctgaaccagctcaaatggtacgaaaaccagatatttaactgcaaaacgctcgaggaaatttctgtgctgctcaattgttcaaaaaacgaactgctattgcatagttacaaccccgagtactaccaatttagcatcccaaaaaagtcagggactttccgcattattgaagctccgaatgagtcactcaaacggctccagaggaatctgaatcagtacctgcaggccgtgtactacctgaaccagagcgtgtgctcctacgggtacgtgatatctatcctgggcgagaaacaaacgaaaaatatctacacgaatgccacacagcaccttgctaaaccttttatgctgaataccgatttcaaggatttctttcaccagatcaagatcgatgacgttacacaaatttttaagagcgagttcttcaactttgatatctatacagcaactactctcgccaagctgtgttgctataaggatcgtctgcccatgggaaccccaaccagcccagtcttatccaatctgtatacactgaaattggataacgaactcttgcagtgggctaagaagcataatacttcttatacgcggtttgtagacgaccttacctttagttccgtaaccactagtttttcccctcttcacttcaaacaaattaatgaaatcgccctccgacacaaactgaatttcaacgaggaaaagactaggtatcttaattctgacgacatcaagaccgtgaccggacttgtgctaaataccactgttgacatagacaacgcgtattatttggagctaggtaaggacttaatcagacttaagaacgtcatggaggtctattacatcacaggcaaaacacatatcataaccttcttgaagactttcaagcaggagctgttcgggaagattaacttcattggtaccattgaaggcagaaattcgaaacagtttctgaactatctcaacctgttctataacgcattagagcctgatacagacctggttcaacgctggacaaagtttagcaactacgtgtga

SEQ ID NO: 8740 - RNA, 1044 nt, synthetic construct
  source 1..1044: mol_type = other RNA
atgaagatcacattcaaaaaactgaagaaggaggcagatctcttctgtaaactgagtacgttaaacgatcttgccgcagtcatatctgtgagcaagaatgaaattttgctgatggccttcgaaccagtatattaccatttcacggtgcctaaatccacaggcggccaaagatatatcgaagctccggacattgagctgaagaaaatccaaaggaggctgaactactttctgcagaaggtttactacctcaatcagtctcgcgcggctcacgggtacattataagtgtgatcggtgagaaaaacccaaagactattctttcccaggcagaaaaacatcttggagctaactatatgctaaacgtagatttttccgacttcttccaccaaataagcattacagacgtcaagaatatctttcagtgttctccctttaagttcaaccagtacgcagcctacacattagccaaaatatgctgctataaggatcgcctgcccatgggtgccccaactagtcctgtgttatccaatttctacacccgttcattggatgaggacctcattaaatggtcaatgccccagaagattacctatactcggttcgtggacgatctatcgtttagttctctggacagccccttcaacattacacactatgaacagatcactgagatcaccaacaattacggactggtcctcaatccaagcaagaccgtctactatgacattaaggatgaaaagattgtcacagggctgatcttgagagaaaccgtggatattctgcctgagttttatgaggagcttgataaagacatcaatcggctgaaggctatcaatgaggttgtttacatcactggaaaaatccagaaacccctcatgctgagcacctttaaacaagaggtgatgggcaagatagcctttatcgcccagatcgaagggaagaattcaccggagtacaaccattatatggaaaaatacgaggacgctgaggcgcctgacgaagagttgtccgtgcgatggaccaagtttggcaactatctcatctga

SEQ ID NO: 8741 - RNA, 1053 nt, synthetic construct
  source 1..1053: mol_type = other RNA
atgtccaagaagcacactaagaagcagattctgaataaagccgctgagttttctaactgcaaaaacatcaagcaagtttcttttgtgctcaaagtgtcccctatgcaactggcaacaagcgccttactgccgcaatactactacttcaagatgaagaagcttaaggggggatttaggaatattgaagctcccgaaccccccctgaaaaagttgcagcgcaagttaaacacgtacttgcaatattgctactattcagaacagaccaaagccgcttacggtttcataattaatccgcgtaagcaaaaagcgaagaatattgtgagtaacgcacagcagcataaaaacaactcgtacatgcttaacatcgacttcgatgatttctttcaccaaatcagcattaaggaggtgattgctatattcaggaagagcccattcaatttcaacaaaaacacagcagggattctctcaaaaatatgtaccaataagggaagactgccaatgggcgcacctacaagtcctgttctgtctaattttgcctgttcaggcctcgataaagagctgcagcagtgggccgatactcggatcatcacctatactcggtttgtcgacgatcttaccttctccagcaacatgccaattaccaaacagcattacaacgagataaaggaaatcaccgacaagtacgactttcagatcgagactacgaaaaccaaatggtatgggaaagaacaggaaaagactgtgacgggtctgaccgtaggcgagacaatcgcaatccctgaggcgtattatacagagctagacaaggacctgcaccgcttgcagaaaactaccgaggtgcatattattacagggcaggtctataaggccgacgccggaaagaagtttaagcaggaaatcatgggcaaaatcaatttcatcgccgtagtccacggctatgacggaaataaatacgagacatacatgcagaagtatgaggatgctatcaatcccccagataaagacgaactcagtatgcgatggctaagattttccaactacatgcagttctga

SEQ ID NO: 8742 - RNA, 1050 nt, synthetic construct
  source 1..1050: mol_type = other RNA
atgaagctcaaccagaagctcacaagaaagcagatatacaaaaaagccaagatgctgttttcctgtactactctgaaagacgttgaacagctgattggtgccgagctcaatagcatctctctgcatgcttttgacccaggatactttcacttcacgatgccaaagtcaaatggtgaactcagatacattgaggctcccgaggatgaacttaaacgtctgcagaggaaattaaaccactatctccagtgcgcgtattttgtcgtgcggaccccctcctgctacggctttacaattggggccatctccgagaaaaacccgagaaacattctctcgaatgcacagaagcacttgaactgctcttatcttatcaatgtggatgtggatgactttttccatcaaattagtaccgaacgggttcagtttatattcgagaacgatccgttccgattcgataggtacatttctaagacattagccaagctgtgtacctacaaaggaaggcttcccatgggcgcccctactagccctgtcctcagtaacttctacacaatcgaacccgacacagaattgcagaagtggtcagagaaccagagcattacatatactcgcttcgtggacgatctaacttttagctccaccaaaaatctgaacagccggcatatcgagagcatctctgggatactggatggcttcaatttgccactgaattctggcaaacacaaactgtatggaccagaagaccccaaaacggtgactgggctagtggtaggtaactcagtggagatcgctccttcattctactgtgcactggacgaggaccttgtccgattaaagaaggtcgttgaggtgcaccaaatcaccggcatgacctccggattgagtttcctgaagcgctttaagcaagaggtcatgggcaagatcaatttcgttaagcagataaaagggaccttttccgaagagtatgtgagatacctggatcaattccatgaagctctggaacctgacgagaggtttgtggcacgctggaccagtttcaacaattatgtatga

SEQ ID NO: 8743 - RNA, 1053 nt, synthetic construct
  source 1..1053: mol_type = other RNA
atgaacaagcggcacaccagcgagtggaggcgattaggtgaggatctgctgcagacaaggaccccagacgacctctcaagactgcttggcattaccactgctagacttgctgacaccgcggaggcaccagcatacgccactttctacgtcgacaaaagaaacggtggaaagcggttaatcgaagacccagcccctcccttgaaggctctacaacgacgcctaaatgatctgttgcagggcttatactggctggaacggtccgaggctgcatacggctttgtcgttaaccctctcgacgatccccacccccggcacattgtgacacatgccgagcgtcacctgggatgcagacgcctcatcaacgtggatcttgagggctttttccatcagatagacaatgatagagtgaggaagacattgctggcccctcctttgcagcttgaggcagaagctgtcgagctcctggtggccctgacgacatggaagggacgcctaccaatgggagcgcccacctctcccgtcctgagcaatctggcttttcgtgacgaggatttgtatctgaccaggtttgcgagagacagggggtggctgtatacgagatacgccgatgacctgacattttcaagccggaaccaggacatggaacctcatcacttacatgagattgttcagcacctcgaggatggcctcaaatataccgtacatccagagaagcggcgttatagtgatgatggcgatatcaaatccgtgactcggctcgtgctcgaagggaatcaggttactctccccgaggagtatttccaccaactggacgaaacccttaatgaccttagttccgcccgccgagtgcatcaccgaatgggagggaggcacactctgtggttggaagactacaatgctagaatcgaaggtctgctgtcgtatgcccgctacgtactggatgaaagggatccggtgtacatggatctcaaaaggcgctatgatgacgcaaaccaagcctctccggacgacttcggggcctacacatggtttgacttcccttacttcgaatga

SEQ ID NO: 8744 - RNA, 1044 nt, synthetic construct
  source 1..1044: mol_type = other RNA
atgttaagtcttagacagctccagtacaggcgcaatcggttgactaaacttagaaccatgcaagaactgtgtctgctgctcggcaagcccggtcataagttggaattgctgtgtgcacaacccatgtacaacgagttccacatccggaagcgaaatggaggcaagaggcatattgaggatcccaggccccctctgaaaagggtgctaggaatcctgaatgacctcctgcaaggggtctattacttcgaaaaaactgaagcagcctatggtttcatcgcgattgcgcgggatgatccagctcctccaaggcacatagtcacgcacgccgagaggcatttagggtgccggtggctgatgaacatcgacctgacatccttctttcaccaaatctctaccgagatggtcttggatcgcttgaaagatccacccttccattttgatgacgaggtggccgatctgatggctcgcctgtgcacgtataaggggcgccttccgatgggagcccctactagccccgtgctgtccaatctggtatttcagcgagaggatgaagttctcaaagcatgggcagacgaccacgggtggctttacacaagatacgccgacgatttatccttttcttcgcagaaggagattagctcatgggaaatgcagcagaccataaacctgctagagaaccacagctacgctgttcacccagagaagcgccggctttatggcccagacgacgttaaaaacgtgactagattggtactgggagatggagagctcgagctaccgcctgacttcctcgaggagcttcgggactgcattgaggacctgcgccgtacaaccagaacccacctccgaatgggtgtggccaggccacctgcttggctgacaaagtacagacagcgtctgaatggcatgatgggctttgctaagcatgtgctcggcgaatatgacgaagatttcctccagatccagagatcatacgacgaagccgtgaaccccccggatgaagacttcgggacctatagttggttagactttccttattggtga

SEQ ID NO: 8745 - RNA, 1038 nt, synthetic construct
  source 1..1038: mol_type = other RNA
atggacaacagcatagccgccctcgccggactgcgaaaggcctttttcgctatgaggacagcgggagacttggccgaactcctcgcggtatccccagcgcacttggtggctgttgcctttagaccatggtatcatattttcgagctccctaaaaaagacggcaccatgaggcttatagaggacccagatgaccgcttacagcctctgcaggatgggctgaacgattatctgcaggcagtttattggcaccaacggagcccagctgcttacgggttcctggtcattcctactggggaccctgagcccaggcatatcgagacaaatgcgaggaagcatattggaaagccttggctcctcaattgcgacctagaggactttttccaccaaatcaccgctggccgcgtgcacaagctctttgctgatgccccctttggatttgacgaggaagtgtgcgatctgcttgtgcggctgactacttttcggggaagatgtcccatgggtgctccaacctcaccggttttatctaatttggtgttctctgccacagatgcagatctaaccgatcttgctagacgccgagggtggacttacacacgttacgcagatgacctgtcctttagcagttatgacccactggactgggatgattacacccacatccaacgggccgtcattcgccatgactatgagttcaacccagaaaaagccgctctttttggcccggatgatcccaagatcgtcactggcctgctgttgggcacgcaggatgtagaagtgcctcccgatttcttccctcagctgaccgacgacattcaccagctggccggtgccatgcgtgtgcagttcagagtcaacccccgcggtagtcgtacaacggccagattccggaggtcagtcgaaggcaagttgaggttcgcagagcgcatcatggggagaaagcacccgggcgtggcaaaattatggaaagactaccgaaatgcagtgaaaccccccgcaaagcatatccagcggtcctggtttgacttcgaatactggtga

SEQ ID NO: 8746 - RNA, 1068 nt, synthetic construct
  source 1..1068: mol_type = other RNA
atggccgataccattactatcaagggaatggagtcccgcgcgaggaggtttctcgacgtgcagacagtcgaacagttggctaaaatccttggaaaagacccaatgaagctggcagttctggccgccctgccacagtaccgggaattcgacatcccaaagaaaaatggagggaagagacatattgaggaccccgcccctccactgaaaaaggtgcaacgcaaactgaacgatttccttcaggccgtgtatttctttcaccgcacagacaatgccttcggcttcattacaaatcctgtggatgaccccagccctagacacatcctgactaatgcacaagcccatctcggttgccgatggctactgaacgttgacatgaaggacttcttccacctggttagccaggagagaacggagcagctattcgaagctccactatttgggttcggcgagcacgtttccaccctgcttgctagcctcgcttgttacaaaggcagattgccgatgggggctccgacaagtcccgtgataagcaacctggtgtcaattcccctggatgaagatcttaatgcatttgcccgggagcggggctggacctatactaggtatgctgacgatatgtcctttagttctcaaacggaaatccctccggatgccgtgcaggagatcgaggcctgggtaaaggcctatgactttgaactgaaccccgcaaaggtgaagctctttgggcccggctctcccaatccaaaagaggtcacagggctgcatgtcggagagactgaaatcggccttggtgcagattacaccggtcaactgactggggccatacagcacttgaacgacatagtggacgcgcagtacctcaccccttcaggtaagtcccagccttctcggtgggtcgaagagctggaagcgatggtacgtggcaaattagagttcgcacgtcagattttgggcgaggcagatcctctctatcaggatctctcgttacgattagaaaacgctctcgagccccccgagacatacggaccactgacctggttggaatttggatacgctacccctaggtga

SEQ ID NO: 8747 - RNA, 1062 nt, synthetic construct
  source 1..1062: mol_type = other RNA
atggctgacacaattaccattcggggcatgagaggacgcgccgatcgattcctagcttgccagactttcgaccagctcgctcggttacttgggaaacagcctctgcaactcgttggtctggcggcccacccgcaatatcgtgagttctatatcccgaagaaatcaggcggtaaacgcctgatagaagacccagtaccccccttgaagaaagcccagcgtagactgaacgactacctgcaggcggtgtactattttcatcgaaccgctagcgcatatggattcctcaccaatcccgtggacgatccacaacctaggcacatcctcacaaatgcaggccagcacttgggtcgcccatggatgttaaacgtcgacatgaaagacttcttccaccagatcacacaggaaagggcccaggagctgtttaaggcacccattttcggatttaacgacgagatctccactgcccttgccgccctgtgttgctataagggaagactccccatgggcgctcccacttcgccaattctgagtaatctagcctctattccactcgatcaggacatggaggattacgctagagataggggatgggtctacacgaggtacgcggatgatatgacctttagcgccaacgaacctattacagaagcacacttctccgagatagagaactggataaccgcttacgactttatcttgaatcctactaagaagcggttttacgggccaggggacaagaaagaagtaaccggcctggttgtgggagattcagaggttgagcttgctgacgattatcttgatatgctcaccggcgccatccaacattttagtgatatcgtggacgcccagcatctgacacctagcgggaagaatcagccctccccttgggtggccgaattgcaagcacaggtgaagggcaaattagaattcgcaaggcagatcctgggggaaaacgatgagcggttcattgacctggagacgcgcctgatcaaggcagcggagcctccagaatcttacgggcccctgacttggcttgagtttggctatgacgtcaaattgtga

SEQ ID NO: 8748 - RNA, 1065 nt, synthetic construct
  source 1..1065: mol_type = other RNA
atggctgacacaatcaccatacaaggcatgaggaatagggccaaacgcttcttgtcgtctggaacactggaaggcctggcactctcactgggcaaggcgagtctcaagcttctagcgctggcagagcagccatcctacaatgagttccggatccctaagaagtcaggaggtatgagacgcatcgaagacccaacgccagaattaaagaaggcacaaagaaagctaaatgactatcttcaggcagtttatcacttccagaggactgatgctgcgtatggtttcctggccaacccggtggacgatcctagcccaagacacattcttagtaacgcccgagtacacatgggctgtcgatggctgttgaatgtggacgccaaggacttttttcacatggtgtccgaggagcgtgtcaagcaggtgttccagagcggccctttccattttgaagagcccattgccggtcttctggcctccctatgctgctacaagggacggctccctatgggggctccaacaagcccaattctctcaaacttcgcatctgtgcctatggaccacgcactgatggagctcgccaggaaatacgattggaaatacactcggtacgccgatgatatgaccttcagcgctcaggaagaaatcactgaggctcattttgccgaggtaggcgcgattatacgttcccacgggtttttactcaaccccgaaaagaaaaaacattatggacccgaggatgaggataaggaagtcaccgggctgcttgttcgcgaatctagaatcgatctgcctgagggatatttggagcagcttgagaaggccatcgatcatctcgataaagcaattgacgctaaatactctatggccagtgggcgcgggcaaaaaaccgcctggctggaggagctggagcagcaaatccggggaaaactcgaatatgccaggcagatactcggcgaaggcgacttgctgtatctggatctggtcgtgcagttagacgaagctctgacaccccccgactactacggtccgatggcttggctggactttgggtacgctttgcccaaatga

SEQ ID NO: 8749 - RNA, 1053 nt, synthetic construct
  source 1..1053: mol_type = other RNA
atggccaatcacccaagccgcctcgagttgagagcacttaaggatgcctttctggccatcagaacacccgccgacctgtgttcactgttagcagaggacatgctcgagctctctgccctggccttgaaggaagacaactacgaggctttcttcgtgcaaaagcgaaacggagaacagagattgatcgaaaatccctctcctcccctgaagcgaatccagcggaagttaaatgactgccttcaggctgtctaccatttccaccgctctagtgcagcctacggctttttatcggcatgttccgacgatcctccctgggcacaccgtgggattgtggcgaatgctaggcagcatcttggccggccgtggatgctgaatatggacgttgaggatttctttcatgcgattttggcagaccgggtcgcgtgggtctttctgaacaaaccattcagttttgacaccgagctgactaatttgctcatgcgcctgtgcatctacaagggcagactacccatgggcgctcctaccagcccgatactgagcaactttgccgccaggctgcttgatacagatctggaactgttggccagatcaaagcaatggctgtatacccgttatgcagacgatatgacaattagctcccggcaggagattacagaggatgatgtgcaacttctccgggattattatagggctcacagctttgaagctaacgaaaaaaaaacgaagcttatgggtcctaaagacgtacacactgtaactgggatagtgctactcgagaacaggctggacttactaccagaattcttcgaggatctcgactctgagattggtaaactgagtgagatcgccggcgttaagggacgcctcggcatcaccctgatggactgggttgatgattatgctgagaaaatacaggggatgatctccttcgccgcgcatgtgctgggtgaatcagacgcaagggtggtgaaagctgaaaaggctctcggaaaggcccagcacgggccaaaagactacggagccgtctcctggctggatttcccttaccattga

SEQ ID NO: 8750 - RNA, 1044 nt, synthetic construct
  source 1..1044: mol_type = other RNA
atggataagaagactagacagaggcaccagcacaacaaggcagtgttttgctcaatcaggtctatcaggagtctctgcagtctgctcaaaaccgaccagagacgcctactgctgctagctcgccagcctccctataaggtttttactgtgcccaaaaaagacgggggcgagagacaaatagaggcgccaggcgctgaactaaagaaggtactggggcacttgaatcgctaccttcaatccgtgtactattttgagaaatcaagcgccgcttacggcttcatcgtgggagtcctcaatgatgatgatcgtcgaaatgttgtaacgaacgcccggaagcatgcaggtcggccctatttgctgaacatcgacctgatcgacttcttccatgccataactcgggagcaggtcgttgagatattccagagcaagccgtttcagtttaaaaaagaccttcctgagctcctggccgatctggtgacgtaccaagggcggcttcctatgggcacccctacatcccccgtgctcagcaacctggcctgtagagaacttgacgaacagttgagcgcctttgctgaagacatgctgtgggtgtacacaaggtatgcagacgatatgtcctttagttcccgaaagccaattgacgccgacaaaatcgactcggtgcgcgctattattgagaaagccggtttcgaggtgaatcagaggaaactgaagacctacggcccggaggatgataagatcgttaccgggctcctggtgacagacaaggtcacattggcaccagactatctgccacagttagatgaagacattaggcagttgcagaatgtcttactgatccaaaatgaacagggacagctgtctactcgctgggtagaacagttcaaaaagaacatcattggacggttaaacttcgcaggtttcgtccttaagcgttctgatgagagatacattgacctcaaagatgcttactataccgcgattaacccaccccaagaagatttcggagccgtgtcatggcgaggctttccttataatctctga

SEQ ID NO: 8751 - RNA, 1044 nt, synthetic construct
  source 1..1044: mol_type = other RNA
atggataaaaaaaccattgctcgccatcagcataacagagacgtcttctgctctattaatagcattagatcactttgctccctgctcaaaatggaccagaggcggctcacattattggtccggcagcccccctataaagtgtttaccgtgcccaaaaaggatggaggagagcggatcatagaggccccgggtaccgacctcaagggcgtactgggcagactgaaccgttatcttcaatccgtgtattacttcgagaagtcctctgctgcgtacgggtttatcgtcggcgtgcatgacgacaatgaccgtagaaatgtggtaacaaacgcacgaaagcacgccggacgggcctacctactgaacgtggatcttacggattttttccacgctgtctcgcgggaaaggatcgtggaaatctttcagtcaaaaccattccagttcaaacgcgacctgcctgacctcttggccggcctaacgacttaccagggtcgcctccctatgggtacacctacaagcccagtcctcagcaacttcgcttgtcgcgagctggacgcaaggttgactacctatagtggcaatatgttgtgggtgtatactagatatgcagacgatatgagtttttccagtaataagcctatagatgcagacaaggtggatagcgttagagcaattataagggaagaaggattcgaagtgaacgaacgaaaactgaaggtgtttgggccggaggatgacaagatcgtcaccggtctgttagttactgataaagtaaccctggcccccgactacttatcagggctggctgatgacatccaccagctgcaaaacgttcttttgatccaaaacgagcaaggacagctgtctacaaggtgggttgagcagttcaagaagaacattattggcaggcttaattttgccgggttcgtgctgaagcgaaataacgaatcttacatggagctgaaggatgcgtactatactgccatcaatccaccccaggaggatttcggcgccgttagctggcgcgggtttccatacaatctctga

SEQ ID NO: 8752 - RNA, 1044 nt, synthetic construct
  source 1..1044: mol_type = other RNA
atgaagaaagacacgcgcgagcgtcaccagcatcgaaaaatggtcttctgttcaatcaatagtgagcacacactgtgccgcctgctccacattgatcagagaagactgcagttgctcgccaagcagccagcctacaagagcttcactgttcccaagaaagatggcggccaacggcagatcgaggcacccaacgcggagcttaagagagtattaggtaggctcaacaggtatctgcagagcgtgtattattttgagaaaagttctgccgctttcgggttcatagtgggagtaaccaatgacgacgatagaagaaatgtgataactaatgccaggaagcatctggggaagccttacctgctgaacatcgatcttcttgatttcttccactcgatctctcgggaccgagtctaccagatatttcgggaaaagccattcaacttccggcggaacgttccagacctgctcgcggatttgactacataccaggaccatctacccatgggcactcctacctcacccgttctgtctaacttcgcgtgccgcgatcttgaccgcgaactgttgattttctcccaaacccacgactggacctacacccgatacgctgatgatatgagctttagcgccgcagagcctatccttcagggtcaagtcgaggctctgggggccatcattcagcaggctggttttgccattaatccgaggaagactcagctctttggaccagaagatgagaaaatcgtgacaggactgctcttaacagacacggtgaccctggcccctgactacttgccactgttgcaagctgagatcgaccagctgcgcaacctcctcctggtgcagaatgaacagggcgagctatccacacggtgggtcgaacaatttaagaaacaacttatgggcaggctaaactttgccggatttgtgctgaggagaaatcaccctgattatatggcactcaaagacgcatactatgctgccattcatcccccgcaggaagaattcggggcaatttcctggcgtggctttccctataatttatga

SEQ ID NO: 8753 - RNA, 1044 nt, synthetic construct
  source 1..1044: mol_type = other RNA
atggacaagaggactgtggagcggaacctgcacgtcaaaacagtatttttcggagtgcggtctatccgcgctttgtgtggggtgctacagattgaccagcggaggctgttgctgctggctaagcagcctccctaccgctcatttactattcccaagaaagacggaggcgaaagacacatcgaggatccgggcgcagagctgaagaaagtcctggggaaactgaaccgatatcttcagagtgcctacttctttgaacgttccatggctgcttacggattcatattaggcgttcagaacgataacgatcgccggaatgtggtgactaacgccaggaaacacctcaagcggccatatttattgaacacagacttgcgcgacttcttccacactattgcgagggatagggtttacgctatttttgctgggccaccttttcattttcctaaagaaatccccgaaatcctggcagatctgaccacctatcagggcagacttcctatgggtgctcccacaagccctgtcttatccaacttcgcatgcagaaatcttgacctggagctagcagcgttctctgagaatatgctctgggtttatacccgttacgcagatgatatgtcgttcagcagtcatcaaccaattgacgccgataaaatccagtccgtgagaaccataatagagaaagaaggatttgccgtgaatgaaagaaaggtcaaggtatatgggcccaatgacctcaagatcgtgaccggtctgctggttgccgacgacgtgcagttggccccagattaccttcctaatctcgaggccgagatcaaccggcttcaagaggtactggtcgcacagaacgagcaaggacagctgtttacgaactgggtggagcaatataagaagcagatcacggggcgcctcaatttcgccggctttgtgatgaaacgatcaaatccagaatatatgaggctcaaggacgcctactacacagcgattcatccaccgcaggaagagttcggcgccatgagctggcgaggtttcccctacaatctctga

SEQ ID NO: 8754 - RNA, 1041 nt, synthetic construct
  source 1..1041: mol_type = other RNA
atggacaaaaaaacgcgagaacgccaccagcatcaaaagatgttgttttgcgggatcgggtcggtacgcgcactatgtgggctcctgcagactgaccaacggcgactggctctgctggctcagaaacccccatacaagactttctcagtgcctaagaaagagggcggcgaaagattgattgaggcccctggagaggagctgaaaagaatcttatcccgcttgaatgggttgcttcagtccgcctacttctttgaaaaatctagcgccagttatggatttattgttggagttctgaacgatgatgataggcgtaatgtgcttactaacgcccgcaagcatgctggacggaaatacctgctgaacgtggatctaaaagacttctttcactacgtgagcagggacatggtccttaaaatcttcaccggcgaacccttccggttcaagggagagctcgcagatctgttggccgacctgaccacatttcagggaagactgccaatgggcgctcctacatcacccgtgctgtccaacttcgcatgccacgatctcgatgccgggcttatcacactctctgaaaatctgctgtgggtttacaccaggtatgcggatgacatgtccttttcagcaaaccagccctttaatgcagagaagatcgctagtgtcggggcccttatacataatgccggctttgtggtaaaccagcagaagatcaagatatttggcccaggtgacgagaagatagtcaccggtctgctggtgacagacactgtcgcgttagctccggactttctgcctaggcttgaggcagacattagccacctccaacagattatgaaggcccagaatgaacagggccagctcctaacgaagtgggtggaacaattcaaaaagcaaatcatcggtcgtctcaatttcgccggcttcgtgttaaaaaagagcaacgacgcttatattagactcaaggatgcttattacaccgccattaatccaccggaggatgagttcggtgcagtctcttggcgggcgttcccctataactga

SEQ ID NO: 8755 - RNA, 1047 nt, synthetic construct
  source 1..1047: mol_type = other RNA
atggataaacaggctctatatcaacaccagcaacagaagacagtgctgtgctcaataaactccctgaatgagttggcgcgccttctgagactcgaccagcggaaactgacattgatggccgaaaggcctaattacaggacatttgagataccaaagaaggatgggggtatgcgagaaatcgaaacaccaggggacgacttaaagcgtaccttggggattcttaatcgctatctgcagagcgtctacctgtttgagaagtcctccgctgcctacggctttgtggtgggcgtcaaaaacgatgatgaccgaagaaatgtactgtccaacgcacggaaacacattggtaagccttatcttctgaacattgacttggccaacttcttccacagtattacccgcgagagagttctgaaggttttcaccgaggcccccttcaggtttaagcgcgaactccccgatgtcctcgctgacatttgtacttaccgtggcagactgcccatgggcgcaccaacaagtcccgttttgagcaacctggcatgtatggatctcgacagggacctcagtatactggcaaattctctgttctggaactttactcggtacgctgacgacatgtcgttctcttcagatacgcctattaccccagagaacatcgtgtctctgagaaagatcatcaccgacgctggtttcaccctgaatgagcaaaaattaaaactctacggccctgcggatccgaagactgtcaccggaattctattggaagctgatgattgcactctggacccttcatatctcgatctgctagacgaagagatcaaaagattacatgaagtgatgagggcccaaaacgaacttggacagcttaatactcggtgggtggagcagctcaaacagcagatccgaggcaggatggccttcgccggatttgtactcaagcggaagaacgagcggttcgtggagcttaaaaacgcatttcatagcgccatcaatccgccaacggaggaattcgggtctatcagctggcgcggatttccctataatttttga

SEQ ID NO: 8756 - RNA, 1044 nt, synthetic construct
  source 1..1044: mol_type = other RNA
atggataagcggacgcgacaacggcatctgcagctgaaaacacaattctgcagtctcaggtctgtcaccgagttctccatgctcgttaagacagaaaagaggaagctccagctgctggctgcgcaacctgcctacaatacttttaccgtccccaaaaaagatggcggcgaaagactgattgaggccccagcccccgctttaaaaaaagcccaggggtcaatcaatcggtttttacagagcatctactaccttgaaaagactacggctgcacacggctttgtggtgggtgttcgaaatgacgacgataggcgcaacatactcaccaatgccaagaagcatttgaacaaaacttacctgctgaatatcgacttgcaggacttcttccacaccgtaactagagacgaagtgttagacgtcttcatgaagccaccgttcaacttcaaacgccagctgccagatcttctggccgaccttttgacctatagcggtcgtctaccaatgggtgcgcctaccagccccgtactttctaactttgcttgtagggagatggatcggcggctaacagcaatggccgaggatatgttgtgggcctatacccgctatgcggatgacatgagcttctcatccaaccgtaacattgatgaagaaaccgtaaacacagtgattcgaataattagagaggagggatttgttccgaataagcgtaagatcaaagtgtacggccctaaggatcagaaagtggtgacagggctgttgatttccgacaaagtgtctctggaggacaattatctggcacagctggaaactgacatcagacaactcggagacgttctactcgcccagaacgagcaggggcagctcgctacaaggtgggtcgagcagctcaagcagcaagtgcggggccgcctgagtttcgcaggctttgtccttggaagacgccacgaaaggtacaaccagctgaaggatgcttactataacgccgtgaatcctccccaggaggagtttggggcaatctcgtggagaggatttccctataatttctga

SEQ ID NO: 8757 - RNA, 1044 nt, synthetic construct
  source 1..1044: mol_type = other RNA
atggacaagcgcacacgtcagaggcaccttcagaacaagaaaaaattctgcggcctgaggtctgttagcgagctatgcctcctgctgaagacggataagaggaaattggagctgctggccaatcagccaccctacaagacctttactgtgccaaaaaaggatggcggagaaaggctcattgaggcaccaggaggtcctcttaagaaggtgcagggactgctcaatcgctatttgcagtcagcctacttccttgagaaaagcacagcggcctatgggttcgtggtgggtgtacgtaacgacgaggaccgccgaaacgtgctgacaaatgcaaagaaacatctcggcaagacctatttgctcaatatcgacctgcaggacttttttcattctgtgacacgggatcaggtccttgacatccttttgaagccgccctttaacttcaagcggcggttacccgacctgctggccgatctgctgacctataacggcagattacctatgggggcccctacctcgccagtgctatccaatttcgcctgtagagaattggaccgccgattatcagctatggcggaggatcttctgtggacgtacacccggtacgctgacgatatgtctttctccggcaatagaccgttcgacgaggagaaagtgaacagtgtactcagactcatcagagaagagggttttactccaaaccctcggaaaattaagaggtttgggcctaaagacgagaaagttgtcactggattactcctgactgataaagtccagctcgaaaagggttacctcgatcaactacagcaggacatacagcagctggcagatactctgagggcacaaaacgaacaggggcagctggccacacgatgggtggaacaattcaaacagcaagtcagaggcagattgagctttgctgggtttgttctggggcgccggcacgaacgctatcagcaactgaaggatgctttctacaccgcttccaatcccccccaagaagagtttggcgccgtcagttggaggggattcccctacaatttctga

SEQ ID NO: 8758 - RNA, 1035 nt, synthetic construct
  source 1..1035: mol_type = other RNA
atgaaaacattatcaaaacggcgcctgaagcaaaggagggacaagtttctgtccatgaggtatgtagacgatctcgcagagctaactagcttcgtccggtataaactgacactcattgcaggagtccctcagtaccatttcttcagtgttccaaaacgaaacggaggcctgcggcacatagaaaaccccgcgcgaaaactgaagaaggtgcagaggactctcaacaattttttgcaggcggtgtactttttcgagaagactgaggccgcttacgggttcatcatccgcgcccgtgatgaagcccctcgagacatagtgtccaatgcccaccagcatctgaacgtcccttggctgatgaatatggacctgacagacttcttccactacgttaagcgcgaagatgtctttcatattttctgccatgtgcccttcaatttttccgaggacttggcggaaattctgacccagctcactacgtataagggccggctgccaatgggagctccgacatctcccgtcctctcaaattttgcaacgatcgacatggatatcgacctactggcctttgcacaggcacggggctggaccttcacaaggtacgccgatgatatgtcttttagcatggatactgcccccatggatagtgagattgaggctatcagacaaattgccggcaaacaccagttcctcttcaacgaaaccaaattaaagatctacgggccagaggacgaaaagttagtgaccgggctgagacttggtgaagaggtaaccctttcgtctgcattcttgcaggagataagagaagagattgatcgcctgcagaaggttgtggaagccagagctatggccggccaaccgccaagcaaatgggtggagaagtatacccagcaagtgcagggtcgcatggcttttgccgagaaggttcttggggagtatgaccccatctatgtggagcttgaaaaagcttttaacagagctttgaaccctccagatcgttttagctccgtgaattggctcgactttccttaccactga

SEQ ID NO: 8759 - RNA, 975 nt, synthetic construct
  source 1..975: mol_type = other RNA
atggcacggttgttaggtatcgagcataggacactggattacctggcagaacgacctcagtataatgagttcgatgttcccaaaaagaacgggggattccggcatattgaagaccccgataacgaattgaagaatgtactgcgtttgtttaacgattaccttcaagctgtttactatttccgcaagtcagatgccgcctatggattcgtcagagttccagacaacgacaccgcgcctaggaacattctcagcaatgcagagaaacatcgcaatcgtccctggatgctgaatgtggactttctggattttttccaccaaatcaagcagatcgaaatctacgagctctttgtgtgcccgcccttcaattttggggaggaactggctgtcctgttgtcgaagctaaccacctacaaaggaagactcccaatggggagccctactagcccagtactctccaatttcgcgaccctgctcctggatcaggatcttctgggtttcgccacaaagaaagacctggtgtactctcggtttgccgacgaccttactttcagtgccaactcacctctctctgtggaacacttgacaggcatccgccagatttgtgctttctacggcctgaagctcaacgagaacaaaattaacttctttctgccccatcagacgaagatagtcaccggcttaattgtcacaaaccgcgtggacataccgcacacctatttagaggacctacgaaaagagattgacaagcttaggacggtgcttgaaatcaattataggactgggagacaggccagcgagtgggtgcagaggtttcaccagcagatagagggcgccattgaatttatcagacagatcgagacatccaagtctccagactaccagcaaatacggcaatattatgctgagagtcaacagatggcagaaaattaccagcctacttcctggctggatttcggctaccacaaatttatctga

SEQ ID NO: 8760 - RNA, 1071 nt, synthetic construct
  source 1..1071: mol_type = other RNA
atgaccctgtttgagcagcgcaataacccggcgatggccggaaaaatcaggacacaaggaaacgctgcacggttcatccagctacgtaattgccaagatctcgccgtttccctaagaatcgatgcgtatagactgcagctcttggtgctccaaccaaagtataattgctatagtgtacgcaaaccaaagggaggctttcgcttaattgaagacccccagggacggctgaaatccgtgcagagccgacttaatgatttcctgcagtctgcttatctgccactccggcccgagtgtgcctacggtttcactcgggcaaagagtgaagatgacgacagaacagttgtcgggaacgctcttcaacatctcggatgcagatatcttctgaacatagacctcaaggacttcttccaccaggttagtgatgaaaaaattgatggcgtgtggcagagccatttccgtaggtttgatgctgggctgaggcagctcctgaccggccttgtatgcttccgccagagactgcctatgggagctccaacatcaccggcactgtctaacttcgcctctttggagatggaccaccacctgactgaatacgcgcaccggagctgcatgcactacaccaggtatgccgacgacctgagcttttcaagcacagagcccataggcaagggggaataccatgatctacgcaacatcattggcgagtgtggttttgaggtgaatccttccaaggtgaggtggtttggtgatggtgaagcaaaagagatcacgggcatcgagttgggcgaagaatgtctgagattgcctggcaattatctgggccgcctggccagagagattgaacgatacagggccttttttgagttagaatcgcgataccagactggggcctcagggaaaaagcttaagctctttgagcaggagttgagggggaaactggagttcgcccggcaagtcttgaccgaggacgaccccgtgtggcagaagctggccgagtctttcgagcaggctcagtttgcacttgaagacttcgaatccgtcgattggctcgactgtccttacttatactga

SEQ ID NO: 8761 - RNA, 1038 nt, synthetic construct
  source 1..1038: mol_type = other RNA
atgagcattaaaactgccattaagatcagggccaaaaggttttccaagatagaaacattgagagacttgtgttccctaattaggaaacatgagcagcaagtggttctgatggctcaccagcctcggtatcatcggtacgaaattccaaagagcaagggggggctacgcctggttgaagatccagagaagaagttgaagatcgtgcagaccttcattaacgagcacttacaggctttctactcgctgattcgacccgagtgcgtctacgggttcgtcatcaaaagagaagcgggcgaggacaggactattaccggaaacgctatgcagcatctcggatgcaactatctgctcaatgtcgacttaaaagattttttccaccaggtgtcacgtgtgagagtagaggagatctttaagatccacttcaatcacttccacgatgagcttatcgatatactcgcccgcctaactacataccacgacagactcccaatgggggcaccctcctctcctgtgcttagtaacatggcctctatcgagatggaccgcgagttaattcaatatagtaaacacaccggattggtgtatagccggtatgctgacgacctgtcattttccacgctggatctgatggaacctgagcatctggacaacatcaagtccattatctcacagtgtggcttcaatgtgaaccctcaaaagataaaatggttcggccatgaggatagaaaggaaataaccggtatccttctggacggtaatcggcttggcctgccggaactctacctggagggactccaaaaagagttgatgcgatacaaaagctacatggaagtagagtctcgttatcgcacaggcgcaagcgccaaaaagctcaagctgtttgagtctgaactcaggggtaagatcaattttgccctgacagttatgcccgaagatcagggcgtggggaaacttttcgatcagtttgaagaggcaaaggaaatcatgcaggattttgagagtgtctcatggctggacctgccctacgaattcttttga

SEQ ID NO: 8762 - RNA, 1035 nt, synthetic construct
  source 1..1035: mol_type = other RNA
atggccaaccgctctacaattcgatcgaaagccaaaagatttgaaaaactccgcaccgtgtttgaatttgcacattggttaggcagagaagaggcaaaactccagctgctgtctttcaagccgcgttataaagagtatcaaattcctaaacccgggggtgggtggaggcaaatagaggatcctgaacctaagttgaaaagtgtgctccagaagcttaatgagcatttgcaggcctgctactacagcgttcggcccgccagtgcttatggttttgtaatctccgcttccgaagacgaagaccgcaatatcgtaactaacgcaaagaaacacctcggctgtaagcacttactcaacatcgatttgaaggatttcttccatcagattcgggaggacaaagtcgtggccattttctcccgccacttcccacagtttgaggacgctctgatcgatctactggcccggctggtctgctacaaggcgagattaccaatgggggcaccaaccagcccagttctgtctaactacgctgcgatacccctggatgaacagctaatggcttactgtagccagtcaggcatctcctacacccggtacgccgacgacctgtcattctcttcaaaacaggcgatcagtaggattgactatgaacactttctgcactgcgtgcaaacctgcgggttcgaggtgaatcccaagaagattagatgggccaaggagaacaatcccaaggaaataacgggccttttccttaagatgggagaggtttgtcttgaagaaaattacctgaggcagctcgagactgagatcggaaggtatatcacatattacgaggtggaggcccgatatagaacaggcgcctccatgaagaagctcaaactgttcgagcaagagctgcgtggaaaactgagctttgcacagcttgtcgagccggataacgagcggattgactatttgagggaccagatggatcaggctaaggaggctctggaagacttcgaaagcgtgcattggctggatttgccttacggattttga

SEQ ID NO: 8763 - RNA, 1038 nt, synthetic construct
  source 1..1038: mol_type = other RNA
atggcagcgagtagcactgtaaaactccgcgcccggaagtttagtcagctcaggtctgtgtttgatctcgcacatgtgctgaaggttccccaacataatctggtgcttatgggcagcaagccaagatatcgcgtctacgagattcccaaacctaagggcggaatgagattggttgaggatcctgagaagagtctcaagaaaatccagagccacttaaacgacttcctgcaagctgcttactatctgatccgaccggactgtgcttacgggttcacgatcgcatgccctggagatcagctgcgtaacatcaaaacaaacgccgaaaggcacctgaactgtaagtacctgttgaatattgaccttaaggattttttccaccaggtgaaggacatccacctaatcaacctcttcaataggcattatcccgaatttgactcagagttggtgtcttgcctttcaaatctattttcctaccatggtagactgcctatgggtgccccaacctccccggtgcttagtaattatgccatgttggaacttgaccacggcctgcagaactattgcaagtcaggggggatagtgtattcacgctacgccgatgatctgtcgttttctagcaccaatcagattcaggacttcgactttgtgagcatagacgcgatgattaaagattatggattcgagccaaacccaaagaaaatcaaatggtacgaacctaaagataagaaggaaattacaggcctggttctgggtgatgacggcgtcgagcttcaggacgggtacctacagcacctgtaccaagagattcagcggtacaaaatttacttagaggtcgaaagcaggtatcgaactggagcctccctcaagaaactgaagttgttcgaacaggaactgcggggcaaaatacaattcgcaaccatgatcctgcccgagaatgaggagctcttaaattggatgcagatggtagaggacgctatgtccgtcctcgaaaacttcgaatctgtcgattggctggagctcccctattccatctactga

SEQ ID NO: 8764 - RNA, 1002 nt, synthetic construct
  source 1..1002: mol_type = other RNA
atgaaatgccggacaacagacgacttggctcaggcatgccagaccgatgccaaccaactggttctctttggactcaaaccacgctataaggagtattatattccgaagaacaagggcgaaatgcgattgattgaagatccaagtaaagaactgaagaagatacagactcaccttaacaagctcttacaggcctggtactatacgcagcgatcagatgcctcgcatggatttggtattgccacctcaaaggacgagcaggccaggggcatcaaaaccaatgcatccgtgcacctgcaatgcaattacttattgaatatcgacctgcttgattttttccatcagattgagttccctaggctgcagaagaccttcgagacgtatctgcctaagcagaaggcggacatcagaaatctgctgctccaagtgtgttgctacaaaaacaggctgccaatgggggctcccacatctcctgtccttagcaatatcgcatgtctcgatctagacgggtcccttcagcaactgtgtaaacacgctaatctgaacttcacacgttacgccgatgacctctctttctccagtttactacccatagagaaggaggtacaggatatgatcaaagatgccattatgcacgaaggcttctccatcaactacaacaaggtgaattactttagcatcgaggacgagaagctggttaccggtcttgtgttgcacccagatggcgtgagactaccgaaagagtacgtgcccctgctcctcaaggagatcgagcggctgaaaattataaacgacgtcgaatacagataccagactggaatgtctcggaagaaactcaatttgttagaacaggagattcaagggaaaattcgcttcgtatctgacgtcctgggcagccatgctatcgaaactctgtcaatcgaaaaagcgtatctgaacgctatacaggcacctgaagactttgaaagcctgagttggttggagctgccctatgagtttctttga

SEQ ID NO: 8765 - RNA, 1026 nt, synthetic construct
  source 1..1026: mol_type = other RNA
atggccaccgggatcccaatcattagaaagcggcagcgcgcggtgctgaacgtcaagtcaatgtccgatttgtctaagctccttcagtgtcaggaacacgttatggctgcccacgcgctcacaccagaatatgacacgtatttcatacccaagaaaaatggcaaaagactgatcgaggaccccaaccctgttctgaaggaaatgcaagggatactaaacgatcacctgcaggccgtgtacttttatatccgccccgcaggcgtgtttggattttgcattagctcaacaacaggcgaagagaagaatatcgtgagtaatgcaaaaaagcatatcggcaacgactacatgatcaatatcgatctgaaggacttcttccaccagataaaaaccaatagggttgctcaaatcatcaacgatgtcttccttcatagcgaaactgaggttaaggaaatgatgaccgccctgatggtctataaaggtcgactccctatgggtgcccctacctctccgattctttcaaacttcgcactgcagaatctcgatcatgagatcaccaatatttgccaatcctttggagtcaccttcacacgttatgccgatgatctaactttcagcagtatggagtacatgaatgacacttttgaggccatgattaaagatgctatcgtgtacgagggatttgaaataaacccagagaaggtgaagcactacctgccctccagtatcaaaatcgtgaccggaattgtagtcgggagagaggacttaaggctgccagaactgttcttagaccaacttcagaaagaggtgattatctatggcaacgtggtgctcgctgaacataggtaccagactgggatgtctcagaagaagctcgaccagttccggcaggagattagcggtaaaataaacttcgcagcaatggtagactccgaaaaccccaaattgttgaagattacggacacatttaacgccaatgatgagattgagaatttgtcgtttgactggctggatattccttacgcttga

SEQ ID NO: 8766 - RNA, 1035 nt, synthetic construct
  source 1..1035: mol_type = other RNA
atggccacaaatccccgaataatcaagaaacggaaggacgccatcgacagagtccgaacaaccgcggatatatgtaagattctgggggagaatgaactcagactccagctcatggcaaattctccccggtacaaagtgtatactatccggaagaagaacgggaatctgaggctgatcgaggatccagaaatccagttaaaagaagtgctgaggaccattaacgatcacctacaagcagtctattactaccagcgccctgattgcgtgcatggtttttgtatctctagcactcacgacccagacaggaatgtcgtgtcaaatgctcaagcacatatgatgtccgctacaatgctgaacatcgacctcaaggacttttttcatcaaatctccgtttctcaggtgaaaggcattattaaacgccagttccacagatgggacaactatctggccgccatgattgccagtctatgcacctataaaaagcgtctccctatgggatcaccaactagtccgatcctgagcaactttgcaatgctggaattggatcatgagttaatgcagctctcgagggtcttcgaagtgacctatactcgttatgctgatgaccttacgttcagctcaggcagcgatttgccaaccgattttgttaaaatggtgcgggacgctctgcagcaccacggcttcacagttaatgagaacaaggtaaagtactaccaggcctccgacatcaagattgttacaggtattattgtgaaccctacgggactgagtctccctgatgactacatgacccaactgcgcaccgagattgacttgtataggaactcccgcctggtggacgcgatgtaccagactgggatgtctgagagaaagatgacattgttcgagcaggaaatcataggaaaacttaatttcggctacatggtgatgccggatgatcccgaactgaacgaattaaaccagctttttgaggtcgagatagacgtagagtccatgacccagagctggcttgatatcccctacaatatgatgtga

SEQ ID NO: 8767 - RNA, 1038 nt, synthetic construct
  source 1..1038: mol_type = other RNA
atgatgtcttcactgaagattaaacagcaggttcagtccctccttcggtccaaaagtgtcgatgacctggccaaagtgttgaaattcacagctgagaacatcacgctgctcagcatcagtaagaagtatgaggtgtacaagatccctaaaaaggacgggagctttagaatgatcgaggacccctacgcacctttaaaggccttgcagaaacgtctcaacgaagttcttcagtgctattatgccactattcggccatccccagtgtacgggttttgcatctctacatcaccggataagcccctcaatattaagactaatgcccaaaggcatgtcggaaacccatggatgatcaacatcgacctgaaagattttttccaccacatctctgaaaagcgcgtccaaaatatctttagcaccaacttcaaacactgggataagaatctagtcaagactatggcggcgatcgccacctataagcatagattacccatgggagcacctacttcccccgtgctgtccaacttggcttgtatcaatctggatcacgagctgcagaatttcaccaagaattcaggcataacctttacacgatttgccgacgatttcacttttagcgctcatcacgaactcaacaagaacgacatcgacattattttctctgctctccaccactacgggttcttagagaaccagaagaaagtggtgatttaccccccagatgatattaaaatagtcacaggattggttgtgggtaatgatgacgtgagtctgccgaaggactatattccacagctgcttattgagatagacaggctgaaaaacattctcagcgtagagaagcgctaccagacgggcatgtcgaacaaaaagctgcaactattcaaacaggaaatcgaaggcaaaatcaatttcgcaaccaccattctgggtaatcaacatgtagacatccagcatatagagcaggcatatatagatgccacagctcctgaagatgactacctgtcaatgaactggcttgagatgccttacagcctgtga

SEQ ID NO: 8768 - RNA, 1026 nt, synthetic construct
  source 1..1026: mol_type = other RNA
atgaagcgaaagaagcttaacaccatctacaagaagataacttccattaggttcatagagcaactgggatttctgactggtatctcaccccacattatggttctccagtcggttctgcctaaatacgacatgttttacgtcagaaaacgtacaggcggaaaaagactgatagagaaccctaacccaatcctgaagaatattcagcgcaagctcaacaagtatctgcaggtggtgtattatattcattgtcctcaaccatctcatgggtttgtgatcaatgtaaaacggggcaagaaaaaagggataattagcaacgccaaagtccatatcggcaatgactatatgctcaacatagatctgaaggacttcttctactacatcaagtacaacacagtgtacaaaatcttcaactctgacctgttcaatttcaatacgtatctcgtcaagatattggcggacttgtgctgtaaagacgaaaggcttcccatgggagctccaaccagtcccgtgttagccaacttagcatgcatcgatatggatctaaaactcgagagcatttgcaatagtttcgccattaagtacactagatatgctgatgatatgacattttccggcctcaatccgatccccgatcacttgattaagaagatctactctatcattgacgaatatggatttgtggtcaatgagaagaaggtcaaattgcgcgggatcaatgaccagaagaaggtgaccggcattatcgttggtgatggtctgagcctggccgaattcttttttgaggaaacccttatcgagatcagcaaactgaagacactgatggagctaaattacaggtatcgggggaacaaggacaaattagtgaacaaacacaagcagaagattgatgggtacatcaactacgcaacccaaatttatggcaaagacaatgagaaagtgcagcagctgattgatgagcttgacaaagctatgtcaatcgaagacttcatcgaaccaatgtcctgggatgattttccttatgtatga

SEQ ID NO: 8769 - RNA, 1032 nt, synthetic construct
  source 1..1032: mol_type = other RNA
atgaaaaacagtgggatcacttaccaatctaacctgttccacgccctccagagaactgccgatttggagaaactgctgcatacggacatacccgggctcatccaattgttcagggagaagccatatcagtccttttacattcctaagaagaacggagggcgccggctgattgagaatcccaagccggtgctgaaagagatgctcaaacgcctgaatctgctcctccagtgtagttacctgcagtttcgaccgaagtgcgtgtatggatttaccatcaggaaaggcagcgagaaatcccgcaacattatcagtaacgctagacgacatgtaaggaaaaagtttctgctaaacatcgatctgaaagagttcttccattcagttaaggaaaatagagtgcggcaaatttttgaaagcaaactgggcaagaaagatcctttgctagttctgcttttgtccaagctggtgaccctcaatggtcgcttacctatgggctctcccaccagccctgtcatcagcaacctagctcttctggacaccgactgggaactggaggccctctgctctaacctccagttagagtacacccgtttcgcagatgatttatcattttcatcgaatcagcgtatcacaactaaggatatccagttgcttaagcaggtgataagataccacggcttcgagattaaccgggaaaaggtcaagctttacggacccgaagatacaaagtgggtaacggggcttatagtggaagagacagtcaaactgccaccagactacctcctgctgttggagaaagagatcttccggttcaaagaatttactcttctccaccacaagtataagtctggtgcggacgaggacaagataaagcttattcagagcgagatcaggggaaagtggaatttcgccaatatggtgattcccggcgacgaaaaattgatggaattacagctgcaaatggaatatgcattcaaccctgttgaggaatatgagtccacaaattggctggacatgccatatacctttttttga

SEQ ID NO: 8770 - RNA, 1011 nt, synthetic construct
  source 1..1011: mol_type = other RNA
atgtacaccttcagcgagcaaaagagtgagctaaacacgacccaagtgacagccctcggcaagcgatttgagaacttgaggtcagtcgccgaattggccggtctgttaggcactacagaaccacttctgagtaggcagatggcaaggcccgtatactataccttctacatacccaagcccgggggacagaagcgactcatccagcatcctgccccggccctgaagatcgtacagcaaagcttgaaccgctatctgcaagctatgtactatggggttaagcctgattgcgcttatgggttcattctgtccccttctgacgaattgcgcccaagaaatatctactccaatgcactcgcccacctgaaaggtgagtggttcctcctgttcgacctgaaagacttttttcatacagtgaccctgacgcacttacgggacctgtttagaaacgtcctcttttttcccccagagttgtgtaacgcgctttgccagctctgtgcctaccagggtcgcctccctatgggagctccaacatcaccggtgttgagtaatctttgctgtctgttctttgactaccagctggagaggctagctgcgggtgcacaagcagtgtatactagatatgctgacgatcttaccttctcctttagaagcgaacctccctcaggcttcgcagatgaagtgcgcatggtcgttctgaggcatggattcgcggtgaatgagtctaaagtccgtctgcagagccggccagagcagccagagattactggcctggttttaggcaaaaatgccctgcccgtgcctggcaagaactggcttaagtcgctgaaacaggaaatcaagatctacacttggcttatgtctgaggccgtgcgagaaaggggactattccacgcttgggtttttgatcggttcagacgttccgtccaggggcagattgagtttctcgggttcatactcgggaaagatcaccgcgaatatcggaagctggcaggaaaagtgcggtggggctga

SEQ ID NO: 8771 - RNA, 1005 nt, synthetic construct
  source 1..1005: mol_type = other RNA
atgtacactttctctgagcagaagtcagcccttcataccacacagctcgctaccctgggccaacgttttgaggccttgaacgatgtgcaaggactggccaaactgttgtccgtgagcgaggcggttatagcgaagcacgtggataagcctgtatatcacagttttcacattcctaaaccaggaggcaggaaacggctgatccagcaccccaccgctgcactcaaggccatacagcaggttctaaaccactatttgcatgcggtttacttcggagtgaaacctgattctgcttacggtttcatccttagtccggtcgacgaactgcgtccccggaatatttactctaatgccctcgcccatagcaagggagaatggttcctttcgtttgacctgcaggatttttttcacacagtgacgctcacacagctgagagatttattccggcgcgtattcttttttccccccgaattgaccgccgcccttactggcctgtgtacttaccagggccgccttccaatgggtgcaccgtccagtcctgtgctctccaacttgtgttgcctgtttttcgacttccagctcgaacaactggctgcatcagccaaagctgtttatacaaggtatgccgatgacctcaccttctcctgccggcaagctccacccccagaattcggcgaccaggtgcggcaagtcgtgctgagacatggttttgtcgtcaatgagagcaaggtgaggctgcagactagactggagcagcccgagattacgggtctggtcctcgggaagaaggtgctgcctgtcccaggcaaggcctggttaaaaagactaaaacaggagatcaagatgtaccgctggttgatgtcagaggctgttcgcgagagagggctattccatgcatgggtgttcgacaggttcaggcagagcgtggcagggcaggtcgaatttgtaggctttatcctggggaaagaccacggagaatatcgaaagttagcagggatggtgcgatga

SEQ ID NO: 8772 - RNA, 1011 nt, synthetic construct
  source 1..1011: mol_type = other RNA
atgtacgcttacctccctcctaagagtgatctgaccaccctgcagctgaaagctctggcacagcggtttgaggctctcacagacgtgcccggtctggccaaacttctcgggattaccgaaaatagtctgactaaggctgccgccaagcaggattatttatccttttatgtccccaagccgggaggggagaagcggttgatccagcatccagcatctgcattaaaaatgctgcaacagacactgaatgggtacctgcaagcggtctatcacggaatccgtccagactgtgcctacggcttcatactgagccccgccgatgaactgcagcctcggaatatatacttcaacgcaatgcgacacattaagaatgaatggttcctgttggtagatctgaaggacttctttcacaccgtcacgaagacccatttgaagaacctgttccggcacctcttcttctttccgccagatttgacatctgtactcactgacctttgctcctgtcaaggccgcctacctatgggcgcgccaacttccccagtgcttagcaactttgcttgcctcggcatggaccatcagatggaaaaacttgccgagacgcacagggctgtgtatacaagatacgcggacgatctcacattctcattctctactccccctcccgccgatttcctggagagcgttcgcgccatcgtgctgtttcatggatttgtcgtaaacgacaaaaaagtgaggttgcagtccagactagagcaacctgagattaccggattagttatcgggaagggtagcaaaccagtgcccgggaaagaatggctgaagcaccttcgtcaggagatcaaaatttacaggtggctcatgtcggaagccgtgcgagagagaggcctctttcacgcctttgtctttgacagattcaagaagtcagtgcttggccaggttgaatttgtgggtttcgtgttggggaagggtcataaggagtatcgcaaactagcaggaaaagttaggtggggctga

SEQ ID NO: 8773 - RNA, 1011 nt, synthetic construct
  source 1..1011: mol_type = other RNA
atgtattacttccagcaatttaaaagcgagctctcgacagcccagctccgaactctgtcaagtagattcgaggctctggaaagcgtaaaggatttaagcgtgcttcttaagaaggagacgcccgcactgatgaaaatggccgagtccccttcttatcaggagttttatattccgaaaccaggcggggaaaagaggttcatacagcacccggcaccaaccttgaaggccgtgcagcaggagctgaatcggtatctccaggccgtttactatggtattagacccccctgcgtgcacggattcgtcgttagtccaggggatgagtcccaaccccgaaacatctatactaatgcgctggcccacacccggggtcattggttcctgaacatcgatctcaaggacttctttcacactgttactgcccagcatgtgttcgacctgtggaggcacattttttggttccctgagcacctgagcacactgctagcctgtctctgctgttatggagggcgtttgcccatgggtgccccaacctcaccagtgcttagtaacttggtattttacgaactcgacgggcagttactccaactagcgcggtcttccgacgctatttacacacggtacgctgatgacttaacattttcttttcccaggcctcctgcagacgattttacggaccgcgtgcgccatctgctccttacccatggcttcaccgtgaatgagaagaaagtccgcctacaggggagattggagcagcctgaaatcactggcctggtcgtcggccatggagctaaaccagtactgtcaaaatcctacctgaagacacttaaaaaggaagttgtgatctaccgctggctgatcagcgaagcagtgcagaagagagggttctttcagcaatggttgtttgaccagttcaggaaatctatcaccggccagatagaatttgcaggtttcgtcctgggaaaaggcgatagagtgtaccaaaggctggctggaaagatgcgttggggctga

SEQ ID NO: 8774 - RNA, 1002 nt, synthetic construct
  source 1..1002: mol_type = other RNA
atgtatgatatcgctccgccttcacttgaacttaccctagctcaaatggatgccaaggccgcccgcttcctcgctattaagcaccccggggaattagcaggtcttctgaaggctgacgccgcgctccttgccaaattcgcagccaaacctcactacgcagtgttttcaattcccaaacccggcggagctaaacgcataattcataacccacatcctgatctaaagaccatacagcagtctctgaacctctacctgcagtgtgcctattgccaattgatgccaccatgcgcgttcggttttatccctagaccgacagatgagccccggccaaggaacatttataccaatgccctcgtgcacttcggatcccagtgggtgctcaatttggatctgaaggactacttccataccgttacatcgagacacctgacatgggtcttccgggaactctttggattccccgaggccctagctaaccagcttatcgctctggcatcctaccgaggcgtgttaccgatgggagctcctacgtcccctgtactgagcaatctggccgccttgcccctcgatcaggagctgcagcctttcgcgaatttactggacgcagcttatacgcggttcgtcgacgacctcacattttcttttgacactcagcccactcccgaagtaatcgccgcaattcgacagaaggtggaaaagcaccattttatccttaacgagacaaagatacggttgactgcaaaaaaagacaatcctgaggtcaccggcttgatcctcaagagtccacacccagacgtcagtggcagcttcctgaagaagctgaaaaaggacatccgcctgtacagaaggctgaccactccagggatgatgcaaagggggatctttcatgcctctgtgctggataagctgcgtaggagcattgcgggccaggttcaatttgtcaaatttattcgcgggagagtggagaagggtctgaaacgttgggagaaagtggttggctga

SEQ ID NO: 8775 - RNA, 1002 nt, synthetic construct
  source 1..1002: mol_type = other RNA
atgtacacaatttatcctccctcattagatcttacattggcacagtccgacgcaaaagccgcccggtttctcgccattaaacaccctggcgagctggcttccttgctgaaggccgatgcggccaagctcgccaagttcgttgctaagccatactaccaggtgtttagcattcccaaaccaggcggagcacggcggatcatccataacccccatagtgacctgaagacaattcagcaaaccctgaacatgtatttgcagtgtgcctattaccagcttaagcccccttgcgcctatggattcatccctaggccaaccgacgagcccaaaccaagaaacatttttacaaacgcaatgacccacctgggcagcgaatgggtacttaatctcgacctgaaagattacttccacacagtcacgtccagacatttgacgtgggtgttccgtgagctgttcgggttcccagaagcgctggctaatcagcttttggctctggtgagttatcgtggcgttttacccatgggggctcccacttcgcctgtgctatctaatctggcagctcttcccctcgacgctgacctgcagtcatttgccaatctgctggatgctctgtacacccgctttgttgatgacatgactttcagccttgaacagcagccaactccggaggtgatcgcggccctgaggcaaaccgtcgagaaacaccaattcactctgaatgagactaagatcagactgacagcaaagaaagatcacccggaagtaaccggtttattgctcaaggagccacatcctgacgtgtctgagcactttctaaaacggctaaagaaagacatccgactctaccaaaagctgaccgaacgcagcatgatggagaggggaatatttcatgcaaacgtcctcgataagctccgacgctctatcgccgggcaggtccagtttgtcaaattcatacgcggcagggtggaaagagaactcaaggtgtgggagtgggcccctggttga

SEQ ID NO: 8776 - RNA, 999 nt, synthetic construct
  source 1..999: mol_type = other RNA
atgtatggggtgattccacaggcccttgaactgacgctggcacaattggacatcaaggcaaataagttccgcgcactgaggcaccctggtgacttagcagggctgctcaaagctgacgccgcccagctggctaagttcgccgctaaaccacactaccaggtcttccatatccccaaacctggcggcgaccgtaggacaatccataatcctcaagctgagttgaagacaattcaacaaaacctcaacgtttttcttcaggccgcgtattacgggatcaaaccgccctgtgcttacggcttcatacctcggccaaccgacgagccacgcccaagaaacatctatacgaatgccttggtccatgaaggaagcgaatgggtgctgaaccttgatatgaaggactatttccatactgtgacctctagacacctcaattggatctttaaggagctctttgaattgcctgaggcactgtcacttcatttaattggtctatgcacatacaagggcgtgctgcccatgggagctcctaccagccctgtattgtcaaatctggccgcactgccactggatgcggaactgcagggaatagctgcacagtataacgccctctacactcgctatgtggacgatctaacctttagtttcgatgccgaacccgacatcctctttaccggcgtggttagggaggctgtcgaacgacacggattcatgctgaacgagtccaaaataaaactcactagaaaacgggaccaccccgagatcacagggctcattctgaagccccccaagccggatgtatccaaaactttcctgaaacacctgaagaaggacatcaagctgtaccgggagctgatttctgccgatatgatgcaccgaggtatttttcacgccagtgttcttgagaagttgaaaaaaagcattgatgggcagctacagtttttagcattcataagaggcaagcaggataaggcttacctcaggtgggccgcgcttgcctga

SEQ ID NO: 8777 - RNA, 1029 nt, synthetic construct
  source 1..1029: mol_type = other RNA
atgcagtacttcaggcagagcttcaaaaagctgacttcacagcaagttctggccaaggggcaactacttgtcaaagcccgaaccgtgaaagccatcgctgccctgaccatgacagaggagacttggatgagagaacaggctgtgaacccgcaatactatgccttccaggcccctaaagccaatggtactttcaggcttattgagaatccccatcccaagctcaaggagtttcagagggcactggcagacatgctgcagggcgtatactacggaatccgcccaagggcgtcatacgcttttgtaccatctaccgccgatgaaacttctccctgcaacatatatacaaatgccctgaggcattgtaagagcaagtggatattgcagctggacttgaaggattttttccactccatttcggcccatcgtatcaaagagctgtttatgcggattccctttgaatacccagaggatacagctcaggtggttgctcgcttggtgacatccaagaacagactgcctatgggggcaccaaccagtccggtgctctcaaaccttatctgctttgaacttgaccacttacttgacaaactctctagagatcacgggtggacatatacccgatatgcagacgacatgacgtttagtggcgcaaagcggttcagtaacgagagcgtggagatcatcagacagcagatcgagggaaatgacttcgtgctcaattatgaaaagactcagcagcaccgcattgaggacgagcctgaagtctgtggattagcgttaaaagaggacggaaaacccgatctctccaatatgttcgtcaaggatctgaaggctgatataaagacctataaacaactcacgtccgacaagatgatcgctcaggaaattttcagcgctgaggcactgaaccggttccggcaacacattgaaggtgaactggcgtttgttcgctttattaaaggccctaataacgggttgtacctgaaactacgtttcatgctggccgatggcatgctcggcgtcgaatga

SEQ ID NO: 8778 - RNA, 1029 nt, synthetic construct
  source 1..1029: mol_type = other RNA
atgcagtattttcggcagccgtttaagcagctgactgcacagcaggtgctaaccaaaggacagttcctgcttaaagctcaaactgtgaaagctatcggttctcttctactttgcgaggaagcctggatgagagaacaagccgcaaatccccagtactatgccttccaggcccccaaggctaacggcgctttcaggctgattgaaaatcctcatcctaaactgaaggattgtcaacggctgctcgctgatctcttacagggcgtgtattacggaattaaaccgcgagctagctatgcctttatcccttcaacagcggatgagactagtccctctaacatatacacaaacgccctccgtcattgtcaaagcaagtgggttttgcagctggacttgaaagatttttttcacagcatctccgcccagcgaattaaggaaatgttcctggcgatcccattcaattatcccgaagacacagcccttgtaatggcacgcctcgttacctccaaaaatcgcttacccatgggagctccaagttctcctgtcctgtcaaacttagtctgcatagacatggaccaccaactggataagcttgcgagagatcagggatggacatatacccggtacgcagacgatatcacgttctcgggtgagcgccggtttaccaacgagactgtggagttgattagacagcagatagagggcaatgacttcgtgctcaactacgaaaagacagccctcaacaggaccgaagacgagccagagatctgcggcttggccgtaaaaccaggcggcaaacctgatctgagcgagcgtttcgttaaggacctgaaaacggacatcaagatttacaaggtgctcacctccgataagatgatcgcacaggaggtcttttccgcagaagctattaatcgcttcaggcaacatattgagggggaattgtcatttgtgaggttcatcaaggggccacaccacgggctgtacctgaagctgagatttatgctggccgacggtatgatgggggtcgagtga

SEQ ID NO: 8779 - RNA, 1029 nt, synthetic construct
  source 1..1029: mol_type = other RNA
atgctgtactttcgacagccctcaaaaaagctgacgacacaggagctgctcaccaaaggacagttccttctgaaggctcgaacactgaaggctatcggcgctttgctgatgtgcgacgattcatggatcagagagcaggctgcatctccgcagtattacagcttccaagcgccaaagagttctggggcttttaggctaatcgaaaacccccatccaaaactgaaagaatgtcagcggctgttggccgacctcttacagggagtgtactatggcattcgccctcgtagcgcctatgcgttcgttcctaccactgcggacgagagctcaccatgcaacatctacacaaacgccttgcgtcactgtcggtccaagtgggtccttcaactggatctgaaagatttctttcacagcataagcgcacacaggattaaaacaatgttttgcgcacttccctttaattaccctgaggacatcgcccaagtgctggccaaactcctcacctcaaagaacaggttaccgatcggggcacccactagccccgtagtgtctaatctggtttgtattgaactcgaccaccagctggataagttggccagagactacggttggacctacacacgctatgccgacgatattactttcagtggggagaaacggtttaagaatgagactgtcgaacatgtgagacaacacatagagtccaacggtttcgtcctgaattttgaaaagaccgctatttcgaggacccaggatgaacccgagatctgcggactagctatacgccctgaggggaaacctgacttgtcctctcggtttattaaggatctgaagatggacatccgcatttataagacgctgtccagtgacaaaatgatcgcacaggatctattcccagccgaagccatcaacagattccggcagcatatagagggcgagttatccttcgtgagattcattaagggccctaatcatggactctatctcaagcttaggtacatgctcgcagatggccttccaagtgccgaatga

SEQ ID NO: 8780 - RNA, 1038 nt, synthetic construct
  source 1..1038: mol_type = other RNA
atgagcacgccggagtatcatcagttaactccagccaccgtcaagttgagcacgcaccaggttgcagcccgagcacggacattcctgagtcagcctcatctgggccagatggctcacctgctagggctggataagaatcagctcgtgcttctctcgaagtctcctcggtatgactgcttttttatccctaagccaaaggggggaaaacggttgatcgaggcgcccagagagcccctgaagggtacccagcaaagattggccaagtggctccaatgcgtgtactttgtccatagatccgaggcagcttttggctttatgatggtccctgtggacgacgaggatccccgccacatctacacccacgcacaacgtcacagggaagccacatggcttcttaacatcgacttgaaagatttcttccaccaaatcccggctgatcgagtgctgaggcttttccaacaggcgcccttcggcctaactcccaaagctgcagcttgtctgactggcctttgtacattccagggccggctgcctatgggagctccaagcagtccagtactatccaactttgcctgccgtgacctggatgcagaactggaagcgctcgctcgcagagaaggctgggtatataccaggtacgcagacgacttaacattctcaggaccaaaaccgtttactcaggcccattgggagtctatttcaggtttgataggggccgccgggttcaaaatgaataccaagaagatgagactgcgccacagaaaggacaagcccgaagtgaccgggctcattctgaaaaagaatccagatgtgtctcccgatttcctggccggaatcgaggccgatctcctggtgctcgaggctctcgtttcagaacggatgctgcttagggatattttcagtcggcagcctgttaaacgcctccgtaggagcattcagggacagataaactttctgaaagccatccgaggtaaagaccataaatcctgtcgcaaattacagaacaggttggaccagtccgtcattaagctgaagtga

SEQ ID NO: 8781 - RNA, 1023 nt, synthetic construct
  source 1..1023: mol_type = other RNA
atgtatctgaaaatcagcacacagaccggggacaagccatcggcatacgaacttcaggaaaaaggtaggcagtttatagccgctgacacttttcccgcccttgcagagctcctgaatattaaagaggaaactcttcgggccaagatgtataaccggaaatacacccaattcttcgtgccgaaacccaacggcgagaagcggcttattgagaatccagaggattggttaaagtctcttcaaggacagctgaataagcattttcaggccgcatactatatggtccgaccaccttgcgcatatggggctttactagccgtggcagacgaggtgaaaccaagaaatatttataccaacgcgctcaggcacatcggtcaaaagtggttgttgaacgtggacattcgcaggttttttcccagcatatcctacgagaaggtttacatgacactccgcagaccccccttctcttttaaccccaacgccgctaaatgtctgagtatgctcacgacattcgaacagagactgcctaccggcgctcccacttcccctatactctcaaatatcatatgcctgccgctcgactcaatgctcctgcagctgtctaaaaaacatggttgggcttatacccgctttattgacgatctgtcctttagcggagagaataagttcaagaaaaagcatctgagggccatccagggcatcctgctgagccaagggttccttatcaacgagaagaagctgaagattaaccgagtcagagataagccagaagtaacgggcctgattctgaagaagaaaaaacctgacatttcccctagtttcctaaagcgtctcaaaaagtacatccacctgtaccacattatgacagaacaggatatgttgaatcgtcagctattccctgccgaattgatccagcgctaccggaattttatcaacggccaattagcgttcatcaagttcatcaggggagagggggataaagattacttgagactgttcaaacggtttcagccacgaggatattga

SEQ ID NO: 8782 - RNA, 1035 nt, synthetic construct
  source 1..1035: mol_type = other RNA
atgaaaagaggaaagactcgggggtaccagaagaacgccgctaattttttggggattcgaacacatatggaattagccaatctgctggggatcagtctgtctcagcttgaagtgctaattaacaagcccacctacaaagagtacactatccggaagaaaagacatggtgtacgaatcatatacgacccttcccctatgttgaaggccgtgctgaaacagttgagcttcttcctgaatgctgtctacagcaccctgcagaatgactgcgtctatggattcatcccacacctcgataagaccggcccccagaagaatatccgggagaacgccatcaagcacgtaggcaaaaatcatctgttcagcctcgaccttaaagattttttccacagcatttccacaaagcgggtgttccaaatttttcaggaagaaccctttaacttctataagtcaatagccgtccctctagcactgcttaccacctatcgcaagagcctgccaatgggtgctaatacatctccaattttgtcaaactttgcctgtttagagctcgatgcggagcttagtaggctggcgagtcgctctgacctcgagtacactcgttatgcagacgacctgacattctcttccgacttgcccttcaccgatcagctcaaatccgatatcagagagatcatacaaaaacacggattccaaattaacgagaaaaaagtgcgggaacgcagcaagaacagaaggcaagtggtgacgggaattaaggtcaacaccaagccgaaccttgaccgtaaatatattaggaatctgagggcattactgtttgattggcgcattaatggtatctataaggctgttatccatcactacaacctagacggaatcccaacgtttcagcagataactcactttctctcatcaacacgaggcagaatctcctttgttggctttgttaggggcaaagaagatcctatataccagaagctccaggtggagttcgagcgcctgactacattccatgggcacaaggaactgtcgggctga

SEQ ID NO: 8783 - RNA, 1089 nt, synthetic construct
  source 1..1089: mol_type = other RNA
atgaaagatatacagcagacagccattgagtttaactctgaaatatccaatggagcctttgagacaacactagtaaataagaagcagtttaccagaacccaaaagaaggccttagagcttctcagaatcgagtctgatcaggaccttatcctgttcagcggcgtttcagcaaatgctctgctccgaaacattaacgcccctgtctattccgagaaaaacatccggaagaaaaatggcggatttcgctctctggacattcccgagaagtctcttaaactgctgcaggaaaagctgaatgatcatctgcaaagtgtgtacacatacctgaggccccagacaacgcacggatttgtgagatatcctaatcggaagtcctgtaacattttgaaaaacgccagcgtgcacaccagcaaaaactatgtcctgaatatggatctgaaggattttttccacagtgtaaatgctctgcgcgtgaaacatgtgttccagaacagcccattcaagtttaatgaacacctctccaactgtctggctttgcttacaacctacaaagggaggttgccccaaggtgcgcctagctctccagtgctctcgaatttcgccgcactgagcctagactacaaaatatgcaaactgtgcaagacttatgcgatcgactacagccgatacgctgatgacctcaccttcagttcccagtcatttatgccggaagcgttcaagaatgagttaaataacctcatcgaaaaggaggggttccacgtcaatgccgataaaaccagattacggagtaaaaaccgcaagcagctggtgaccggcgttgtggtcaaccacaaagctaacgttgatcggacctatgtgcgtaagctacgcgctatgatcttcgactcggaaatcaacggcctcccctccgcagcagcaaagcatttgaacttgactactaagcctactacggaccatatttcattttttgttcggaggcttaacgggatgctggccttcatgtcacaaattaggggtaaggacgacgccttgactctcaagatgaaaaaccgtttccttaatgtcctgtctatcccactcaatcagtga

SEQ ID NO: 8784 - RNA, 1137 nt, synthetic construct
  source 1..1137: mol_type = other RNA
atgataactattgaagagattctcaccctatctaagacaaataagtcagagcttcagaaatacttcagtggtggctcctaccacttggacaaaagcatggaatcttttcagaagcatgagctcaacgccctctatttcttgagcattgaggaacccaaggagctcacccggttttttaaaacctccttttttcagcttgaggagatcttgaataatcctctgtacaagaactacaccattaagaaaaagagaggcggggccagacaaatctgtgagcctgaaaagcatctgaaaagtattcaaaaacggctcaactatttcttgcaggcatattatctttggatcaagcctaatgaagtgcacgggtttgttgtaaatccccattatctcggaatccactgtaacattgttgaaaatgccaaggtgcacgtgaacaaaaaggatgtgcttaacattgacctgaaagactttttcccgtcgattagcgcccagcaggtgaagaacatcttttccagcaattacttcaacttcaacgagcagatttcaactgcactgactctgttaactacatacgagggaaagctaccaattggtgctcccacatccccagttatcagcaatttcatttgccaccaactcgataatgatctgataaccttttgcaagcagaacaatctgacatttactcgctacgcggatgacttaaccttcagctctgacaacaccatctctgacgataacaccctgaatatattcgacctgatcaagaagaaccagttcgaaataaacgagaaaaaagtcaggttgaagcgatctcacaggaaacagacggtcacaggcctgacagtgaactcaaaagtgaatgtcgaccgcaagctgctgaagaaaatacgcgctatgctgcatgatctggtaaagaacggaatagaaacgagtgtcaaaaagcatttcaatatcggcaatatcgaacaacgtcacaaggtgatcttcatcaatcggcttaaaggctatatcaactttgtcggacaagtgagggggaagaacgactcattatacctgaaacagaagtccactttcaacaatatcctcatcagctccaaggggaaaagtctagagattgatatgaaacaggcttga

SEQ ID NO: 8785 - RNA, 1305 nt, synthetic construct
  source 1..1305: mol_type = other RNA
atgagtaatatttacaacatcgcagtggtgttcctccagcctaaatctagttgcaagcaagaaaatatcgcgatctactgtgatgcgcattgtgtgccactgttaatcaactctaaaaagaccaaggataacctgcagcgtctctttctgaacaaaaatcgcatgactgtaccagagattcagcagctggtgcagaggcacaagaaggaatttaaaaagtacttctcggacgacttttatctgacgaatctggcccttcaggatttcaaaaagcatgaattaaacgctctgtgtctgctgagcattgaggaacccttcgaattggccaaattcctgaccactccgatctatcacctggaagagctgcttaataatcccccatacaaacatttcacaatacagaagaagagaggcggaaccaggcaaatcttcgcccctgaaaacagcctcaagggaatacaaaagcggttgaattatttcttgcaggcatattacctctggctgaagccacatcacgtgcacggatttgtcattaatccgcactaccttggcacatcatgcaatatcgtggagaatgctaaggttcatgtctctaagaatttcgttctgaacattgacttgaaagacttttttcactccattaccgctaatcaagtcaaggatatcttttcaagccacttcttcaacttttctgaacccatcgccatcgcactcaccttgctcaccacgtataaggggaaactgcctataggcgcccctacatcccccgtgctatcaaactttatatgccatgagttagatgatgacttactccgctttagtgctgagaatgatcttacattcacacgatacgccgacgacctcacttttagctccaacttcaaaatttcccatgatatcactctggacatcatcaacctcattaagaagaacttcttcgagatcaatagcaaaaaaatccacctcaaaacccaaaaccgaaaacagattgtcactggtctgaccgtgaatcagaaggtcaacgttgacaaaaagctactgaaaaagataagagcaatgctacatgatgtttccattaatggcattgagaaagccgcccagagacactttaaactgaacaagatcgacaaacggtacagctcacagtttatgaaccggctagagggctatatcaactttgtggggcaggtgagggggaaaggtgatacattggtactgaagtttaaggaagagttcaagcttatattcgagattgagattcacaaggaaagtaacaaaaagcttgacgagaacaatatcaagtga

SEQ ID NO: 8786 - RNA, 1131 nt, synthetic construct
  source 1..1131: mol_type = other RNA
atgccgaccatcgaggagatcgtgaccttttcgaaagcccataagtctaatatccagaagtacttcaacggagggcatccctactccaccctgccaaaacttgtgcagaaaattaagaagcacgaacgaaacgcactgttcctgctgtctacagaaacccccaccgaactgtgcactttcttgaaaactcccttcttccagctggaggagatcataaacaatccaatctacaagcagtatgagattaagaagaagcggggcgggaatcggcagatctacagtcctgagaaaaagctgaaagcaattcagaggcgactgaattatttcttacaggcctactacctctggattagaccgaatgaagtgtttggattcgtggtgaaccctcactatcaagggaccttctgtaatatagttgaaaacgcaaaacctcacactggcaagaagcatatcctgaatatggacctgaaggacttttttcccagcataagcgccagtagaattaaaagtgtgtttgcatcctcctattttaacttctcagagcaaattgccactgcgttagctctcctgaccacgtatgagggaaagctgccaatcggcgctccaacatcccctgtaatcagcaacttcgtttgtttccagctcgacgctgatctaaagaatttttgcgagactaccggactgcagttcacgaggtatgccgatgatctcacctttagcagcaatctgctcatttctaatgagacagtcctcgacattatcaacttgattaagaagaacggtttcgaaattaacgaaaagaagcttcgcttgaaatcttccaataggaaacaaacagttacagggcttaccgtcaatgagcgcgtcaacatcgaccgtaaacttttgaagaaagtccgggccatgctacacgatttaactacaaacggtatagacgtggcggctaagaggcactttaactggtcaggcgagacggatgcaaaacagcgctcaaaatttatccatcggctcgaaggctacatccactttgtgggccaagtcagaggtaagaacgacgctgtatacactaaacttaagcagcccttggataaattttcagccacacagcaaagagccgaacagatgtggtga

SEQ ID NO: 8787 - RNA, 1119 nt, synthetic construct
  source 1..1119: mol_type = other RNA
atgccaatcgtgaaggaaattcttaccttcagtaaggaccataagtcaaagatccaaaagtatttcaacggcggctacctttattccaaaacaccgaagctactgcaagagaagaagaaacacgaactcaatgcactgttcttgcacacaatcgaaaccccagctgagctatgcaagttcctgaacacatctttctttgagctggaggaactcattaacaatcccgtttacaagaattacaccatccggaaaaaaaaggggggcgagaggcagatttacagccccgaaaaaaaactcaaggctattcaacgccggcttaactacttcttgcaggcctattatctgtgtattaaacctaacgaggtctttggatttgtcgtgaacccccactacttaggtaattattgcaatattgccgagaacgccaagccacatactgggaaaaagcaccttctcaatattgacctgaaggacttttttcctagcatctccgcaagccgaatcaaatccgttttcacctcaagttactttaatttcagtgagcagatcgctactgctctgacattgctgactacctatgagggcaaactcccaattggaacccctactagccctgtgatctctaattttgtctgtttccagctggatgccgacctcaaaaatttttgtaaaactaacggactgcagttcacaaggtacgccgacgatctgacctttagctccgatacccttatctccatagatatcgttctggatatcataaacctgatcaagaagaactcttttgaaatcaacgagaaaaagttgcgtctgaaatcatcgaatagaaaacagactgtcacgggcctcacggtgaatgagaaagtgaacgtagatcgaaagctgctcaaaaagattcgggcgatgctgcatgatttgacgacaaacggtatagacattgccaccaagagacactttaacttaaacggtgaaattgacaccaaacatagggggaagtttatcaatcgcctagaagggtatataaacttcgtgggacaggtgagaggcaagaatgacaccgtgtacataaagttaaaacagcccttcgacaaggtattctctaatactgcaacatgctga

SEQ ID NO: 8788 - RNA, 1101 nt, synthetic construct
  source 1..1101: mol_type = other RNA
atgacaaataccagtaccatcattgaatttgcacgacgaaataagggcgtgctgcagaaccaccttgctgacggttccttaaggctccccgtggccttagagatcctggagaaacaccaattgaacgcattgtatctcttgtcgatagaaacccccatagatttgtgttccttttttaagtccggtttactgcagctggagtctataatcaacaatccgcagtacacccattatacaattaagaagaagcgcggaggaaacagacacatttatgcccccaacaaaaagttgaaagccattcaaaaacggctaaactacttccttcaggcgtactatctgatgattaagccagaggaagtccatggcttcgtcgtaaacccacattatctcgggagccactgcaatatcgtagagaatgcgaaagcccatacggggaaaaagcaccttctcaatatcgatctgaaggacttcttccctaggatcactgccaaacaagtcctcgatctcttcagcagccctgtttttggatatagcgaccaggttgcaaccgctatcaccctgctttgtacgtacgaagggcgtcttcccgctggagccccttctagtcctgtgatttctaacttcatttgcctgaatctggacgcagatctgaaagccttttgcgctacccacaatctggaatacactagatatgctgatgatctgacatttagctcaaacgccgcgattgagactaacacactactagacatcatcagtctgatccagaagaacaatttcgagatcaattccaacaaactccgcataagaccagccaaccggcgccaaattgtgactggactgaccgtcaatgaaaaagtgaatgtgaaccggaagatgctcaaaaagatccgggctatgctgcacgacctttcaactaacggcgtggagactgccacaagaaagcatttcaaaatatcaggcaaggcaaagccattccaggagggcaagtttctgcagaggctcgagggttacatcaatttcatcgggcaggttagggggaagacagacgcactgtacattggctacaaagaacagtttgaacaggcttttgagaattga

SEQ ID NO: 8789 - RNA, 1071 nt, synthetic construct
  source 1..1071: mol_type = other RNA
atgatccagaaatatcatttcgagggcttatacctgaataatatcgtgctgcaacagtttacccgacatgagctgaacgcactgttcattctgactgttaaaaagcctctagagctggtaaaaatcttcaacgtgagtttttgtatgctcgaggagcagataaaccacccagcttaccgctattttacgcttcccaaaaagaatggaggttctagggacatctacgccccctccgtgaaactcaagtcgatccagcaatgtctgaactactatttccaggcctactatttgttcattaagccagaggaggtgcacgggttcgtcataaatccccattatcttgggaaacgctgcaacatcgccgaaaatgcgaaagctcacgttaagaagaaatatgtgcttaacattgacctgcaggacttttttcctaatatcaaggctaagcgagttaaggaaacatttctgagtcccgtgttcaattttaatgaacagatcgcaactgccttgacattgctaacaacatacaagggcctgcttcctgccggtgcacctactagcccggtgatctcaaacttcatttgcctgaaactcgacaaagagctcaagtatttctccgaactcaacgatctgacttacacccggtacgccgatgacctgaccttttcaagcaaccatgagatcccaggcgacatgattctcgacattatctgtattatacaccggaacgatttccggatcaacgaaaagaaattaaggctcaaaccatccaacagaaagcagacagtcaccgggataacagtcaatcaaaaggtaaatgtggacagaaaactgctcaagaagactagggcgatgattcacgatctaggcacccatgggctgtatgccgcaacctctagacactttaaagtggctgaagataagaacagctctcttaatgccaagttcattagaaggctgcaaggatacattaattttatcggacaggtccgcggccgtgatgacgctgtctacttgaaattgaagaccacgtacctgagcttattctcctttcagaccgaagatttctgctga

SEQ ID NO: 8790 - RNA, 1116 nt, synthetic construct
  source 1..1116: mol_type = other RNA
atgaactcacaggaagaaatcctctcgattctaattcccgcaaaggataagatctggaattctttttatgggatacccatccggaagaaatctaagcaacttgagcagttaaagaagcatgaactgaatgcgctgctgctcctgaccattaataaaccgagtcgcttggcacagttcctaagcactcccttctttgaacttgagggcatcatcaataaccctaattacaggcactataccatcccaaagaaaaaaggcggcatgagagagatctacgcgccagcaaactctctcaaaaaaattcaacgaaggctgaactatttcttgcaggcctactacttgtgcattaagccaaaggaggtgcacggattcgtggtaaatcccgcttatttgggaaagaaatgcaatattgtcgccaatgctaggctccacataggcaaaagccatgtcctgaatatcgacgtgaaggattttttcccttctatatcagccaaacaggtcaagggtatcttttctagccacctgtttaacttcaatgaccagatctccaacgccctgacacttctcactacatttgaaggaagattaccagctggcgcccctacttcccctgtcatttccaatttcgtgtgtaccaagttggatagtgatctgattgaattctgttccttaaacagtctttcatactcccggtatgctgatgatctgaccttctcaagcaataacgttatcgataacgacattatccttgacctcataaatatcatcaacgccaacaacttcaagattaacgacaagaaactgcgcctcaaggctagcaataggaaacagacagtgaccgggctgaccgtgaacgagaaggtaaatgttgatcgcaaactgttgaagaaaattcgtgcaatgctgcatgacctcacaacgaacggtatcgataaagccgccaaacaccattttaacattaacaaggacatcgacgagaagctgagaggcaaatttatataccgactagaggggtacattaattttgttggtcaagtgcggggaaaaaaggaccttctgtatgtcgggctgaagtccaagtttgacaacgagttcaaagtgataccgctcagctga

SEQ ID NO: 8791 - RNA, 1107 nt, synthetic construct
  source 1..1107: mol_type = other RNA
atgaactcccctgaggagctgatctacctagccaggaataagaaatggttagtttggaaggacaacttccttgaactcgccgggaaagacttggcactgcacaagttcaagaaatatgaactggttgctctgcgcctcctgagcatcgaaaccgctagcaacctggtaaaactcgctagcgtgtcactggatacgcttcagaacaaccttaatcatcccgagtacaagcattatcagacaaagaaaaagaagggcggctctcgcctaataaatgccccgacaggcgaactcaagaagatccagaagcggctgaacaattatctgcaggcgtactacctctgtctcaaacctaaagaggtgcacggatttgtcttactggctccattgattcagcaacgctccaatatcgtggccaacgcagaggtgcatgtgggtaaaaagtttgtgctgaatctggacttgaaagattttttcccctctatcaccgccaaaagagtcaaagctttctttatgagccccttgttcaactataacgaacaaattgcaaacgcgctaactcttctttgcaccttccagggaaaacttccaattggggcccctacttccccagtcatatccaactttatttgtttgaagctcgatgctgatctacagaatttttgcgcagccaacgaactcaattatagtaggtacgccgatgacctgagtttcagctcgaattcatctatatccaatgacacaattctcgacctgatcaatctgattaccaagaacgacttcacggtgaactacaagaaactgagactgaagtcaagtaataaacggcagacagtgaccggcattactgtcaatgagaaggttaacgttaaccgagtgttacttaagaagattagggcaatgctgcacgatctgacatctaatgggttggaggtcgccactcacaaacacttcaaatttaacgggttcgtagaccagaagtataaggaacgatttttattccggttgaagggatacatcaattttatcggtcaagtgagaggcaaagaggattttatcttcctgaagtttcgtaatgagctgaaaatgatcctcatagagatcacctga

SEQ ID NO: 8792 - RNA, 1161 nt, synthetic construct
  source 1..1161: mol_type = other RNA
atgaaaaaccttcctgatatctccattgcactcaaaaatgtccgggagaacttcaatagctactttaactggaatagcctgccacagaataagtcagaaaagtataagctgcatgagattaacgctctcattttactatccattaagattccaacccatctgtgtttagccctatcaaattcaatcagcggcatcgaagtgctgataaataatcccgtgtatacggaattgaaagtcaagaaaaagagcggagaattcagacagatatacgcacccaattatgaattgaagagagtgcagaaacgactgaactattttctgcaagggtactacctgtgcatcaagccaaacgaagtcaatggcttcgtcatcaacccgtttccctttgacgcaaaatgcaacatcgctgagaatgcaaagtaccacgttaataagaaacacgttctgaacatcgacatcaaaaacttctttccttctatatcagcgtatagggtgaagaagatcttcactagtgagttgtttaatttcaacgaacaggtcgcgactgccctgacactcctttgtacctacaagggagtgttgcccatcggtgctcctacctcgccagtaatttccaacttcatatgcttccagctggacagagatctgaagaacttctgcaacgagaaaaacataagttatagccgatatgctgatgacctgacattttcctctaacgagaaaatcacagatgagattatctccgagatcaccctgctgattaacaaatacggattcgagctcaacaaaaataagtttagacttcgcctctctaataggaaacaagttgtgactgggttggtggtgaacgaaaaggttaacattgatcggaagcttctcaagaagattcgggccatgttacatgacatgtctcgtaatgggatcgaagtagccgccaaaaggcactttaaaagtgagaatccgcctattaagacaaatagcctcaccaacaaaaacaccgctattttcgagtccgagcagagtgacaatgagatcaatatcgcctttgcctgtcgcttcaaaaagatcgtgataggctacatcaattttgtgggtcagattaggggcactgatgaccgcctttacaactctttcaaggcagcctacaagaatagctggtga

SEQ ID NO: 8793 - RNA, 1179 nt, synthetic construct
  source 1..1179: mol_type = other RNA
atgatgacggttgaagagattttaaagttgtccaagacctctaagtccaagcttcagaaatacttttcagggggttcttaccacctgggaaaaagtatggaaaatttcaagaagcacgagctcaacgcattgtattttctgagcatcgataaacctgcagagctgacacgttttctcaaaacttcgtttttccagttggaggagatactgaacaatcccacatacaagaattacaccatcaaaaagaagcgcgggggcactcgacagatttttgctccagaaaaacacctgaaatcgattcaaaagaggctgaactatttcttacaagcgtactatctgtggatcaaacctaacgaggttcatggtttcgtcgtgaacccacactatcttgggactcattgcaatatcgttgaaaatgccaaagtgcatgtgaacaagaagtttgtactcaacatagacttgaaggacttcttcccatccataagtgcccggcaagtgaaagaaattttcagctccacctgtttcaatttcaatgagcagatttctactgcgctcgcccttctgactacctacgagggcaaactcccgatcggcgccccttcttctcccgtgattagcaacttcgtctgccttgagttagatctagccctgaaggaattttgtcagaagatcaacagcgaatatttctacaacgataacaacaaactgctacataagaagaaacagttcgtgtttttcgagacatacgatatcgcctatagcaggtatgctgacgacattacattctccagcaacattcccatttcaaccgagatgctctcaaacatcatcagtatcatacaccagtacggatttgaacttaacgagaaaaaactgcggttcaaactgtcaaatagaaaacagacagtcactggactcaccgttaatgagaaggtgaacatcgatagaaagctgctaaaaaagatccgggcaatgctccatgacctgacgacgaatggaatcgaacaaagcgtccagaggcactttaaagtgaccaatatagagcagagacacaaggctacctttatcaatcgcttggaaggctacattaattttgtgggccaggtccgcgggaagagtgactccctgtatgtgaagcaaaagacagctttcgataatgtatttgaacagcgaaagtga

SEQ ID NO: 8794 - RNA, 1002 nt, synthetic construct
  source 1..1002: mol_type = other RNA
atgaagcatgagaaaatcatcaatttcgtagagtccaacctcgaaattattcggtccaatatcaattcgagagaaatcattttcggcatcctgcagggtccccagcacaaatttcaacggaatgccgccgtgttcctttccatcacccatgcctatgacctctgcaattttctgcagctgtcatatagcgtcctgcagaatcaaatcaacaatcctgtgtacaagcagttcgagataaaaaaaaagtccggcgggatgcgttccattgaagagccaaacgacatcttaaagggaattcagaaacgccttaactactacctgcaggcctactacttatggatcaaacccgcagaggtacatggcttcattatccgcccacagcagtatgagcacaggtataacatagttgaaaatgcccgggcacatatcggtaagaaacacgtgctgaacttggacatcaaggactttttttctagcataagtgttgcacagatctttgagcttttccagagtgattacttcagattcaacgagaacatgtgtgtggcgttaacactcctcgttacccaccaaaagcacctccccacaggggctccaacttctcctgtgctatcaaattttatctgcttgggactggatagggatttgagagagtttgcggaagccaatcaattgacatatactcgctacgctgacgatctgacgttctcaagtgacgtgcatattcctgaagacgttgtgctcgacgtgatgaatatcctgaaaaaacacgcttttgacattaacccgaagaagatacgaatgtctagtagctttagaaaacaggtggtgactggaattaccgtcaacgataaggtgaacgtcgacaggaagctgctgaagaaggtacgagcaatgctacacgatttcgccgaaaacgggcttaaggaagctaccagcaaacacttcaagattagcgtcgatgaggatagcatttattgtagggtcctgtctatagattga

SEQ ID NO: 8795 - RNA, 1089 nt, synthetic construct
  source 1..1089: mol_type = other RNA
atgttgactccatttcgcttcgctagccttgtgtttaaaattcgctacgctcctcccaacttcgtgaagaaaatgattcggatagttaataagcgataccatttcctcaaaatcaagaatgccagtgacctgagcaaactcctgttcgtgtctttcgaaaacttacaaatcgagattaaccagccgacttacaagacgtttgaaatctccaaaaaatccggcgggaagaggatcatacaccagccccttgacaatactcttagaatacagaatgaactgctatcaatcttccagaactactatacgaagataaaacctaaccacgttcatggttttgtgtcatatagcaagaaagacggaaagaagagcaacattttagagaatgctaagccccacgtcggaaaaaagcatctccttaacattgatctgaagaactttttcccatcaattacagccaagaaggtgaagcagctgttcgagtcggattttttcaagttcaataccaacattgccacaagtctggctttgttgaccacttttgaaggaaagctgaccatcggcagccctacttcccctgtaatatctaatttcatctgctatcccatggacattattctggccgagttctgtaaaaagaacaacctgacatttacccgatacgcagatgacctctccttttcttcatatgattacatcaagaacgacactctgttggacatcatcaatatcatcaccgagaatggctttgacgtcaactataaaaaactccggtttgccaattccaatgccaagcagacagtaaccggcatcacagtcaatcaaaaaccaaatgttgataggacctttctaaagaagattagagcgattctctacgatataaatcaaaacggtcttgaaatggcagcattcaagcactactctatcagtaaaaaaggggaaaatacactgagcttcttaaacgtcctggagggctacattctgtttgtgcggcagatccgtggggtgaatgatacctattatcagtgcttcaacaacaagctcaaagagattaggttgaagaacctggagatcgagaacaaaaaaatctga

SEQ ID NO: 8796 - RNA, 1095 nt, synthetic construct
  source 1..1095: mol_type = other RNA
atgaataacataaaaaacaaggcgaagcagtggcgcaataagtacgtctccacggagactaaaagatttacgttcaataagaacgagcgcaaacggtatacatttaacgcccttcatttactgagcctagaaaacgaaacacagctctgcaggatgctcgatatctcactggatactctttccgaggtgattaataaccctgtctaccagactttcgagatcccaaaaaaaaaaggcggcaagcgaactattgatgctcccgaagatattctgaaggacatacagcggaaattgaattacttcctgaatgcatactaccttatgatcaatccggaggtggtgtttggtttcgtcatacaaccccatgaactgggcaaaatctgcgccattgccgaaaatgcgaagccacacgttggtaaacggcaggtgttgaacatcgatatcaaggacttctttccatcaattaagactacccacgtcaaggctctgtttcagtctgaattgtttcagttcgacgagcacctggcatccctgctggctctccttactacatataaaggcaccctgcctattggagcccccacatcacctgcagtggctaacttcatctgttaccaattagacaaagaattgcaggagttttgtaaggaaaatgatctcagcttcagcagatatgccgacgaccttacattctcttcggacaccaagtttcactctgacaccatactggacattgtgagtatgatcaacaagagaggattttccatcaacgagaagaagtttcgtattcaaagtgccaacaagaagcaaaccgtgaccggactcgttgttaacgccaaagtgaatgtagatcgcaaattcatcagaaagctgagggctatcatgcacgacattcgactcaatggggtcaaaattgcagcccagcatcattttaacttaaagcaggagcccgatgagaaactgttggcatacttcatccacaggctggaggggctaatcaacttcgtaggccaggtgagggggaatcatgataagatctatacccggtttaagtatgaattcgacgagatattcaccacaagcctcaatgtttga

SEQ ID NO: 8797 - RNA, 1107 nt, synthetic construct
  source 1..1107: mol_type = other RNA
atgaataataggaaggagatggcacgtcggtggcggaaaaagtacgtctccgccgacaccaacagattcaaattcaataaaaaggctcgacagaaacacacctttaatgctctgcatctgttgtctttggagaacgagaatcagctctgccggatgctcgatatccagctgggctccttaagcaacgtgataaataaccccatttatcagagtttcgaaatccccaagaagaagggagggaagagaaatatcgacgcgcccgacgatgagcttaagaacatccagcagaaacttaacttcttcctgaacgcctactatttaatgattaagcctaacgccgtgtttggatttgtaattaggccaagtgagtatgggaaaatctgtgccatcgctcagaatgctaaacaacatgtaggaaagtaccaagtgcttaacgtggacataaaagatttctttcccagcatcaatgccgcccaggttcgcgcgctgtttcagagcgaaatcttccagtatgacgaacacttagccaccctcctggccctcctgaccacatacaaggggaaactgccgattggcgcaccttcctctcctgcaatctctaattttatatgccagcagctcgatgatgaactgcaattgctttgtaatgccaaagagatcgcatataccagatacgctgatgatctgacattttcgagctccgtgaaaattgatactgacttcatcctagacattgtctcaatcatcaataagcatcactttcgtatcaacgagaaaaagttcagaattcagtcagaaaaccggaagcaaactgttactggccttgtcgtgaatcagaaagtcaacattgacaggaagtacataagaaacctgagggcaattttgcacgacattcggctcaatggtgtggaggaggctgccaaaaatcactttaagctaaaacagcgaccaaacgacacaacgattaactatttcatcaaccgcctggggggactgattaattttgttggtcaagtgcgcggcaaccaggacttcatatactatcgctttaagggcacattcgatgaactgtttgcgtcaaggctcaagcaaccaaagtacttctga

SEQ ID NO: 8798 - RNA, 1059 nt, synthetic construct
  source 1..1059: mol_type = other RNA
gcagacacgggacgttttttctttagacgggatgcaccacaacgatatccattcaacgggttgcacctgctgagtgtggagcacgagtcgcagttttgcaaaatgcttgacgtcacactcaaggcgatgagcgcccttattcatcatccggcttatacgactttcgagatatccaagaagaaaggcgggaagagaaccattgaagcgccagatgaagacttgaaggaggtgcagagacggctcaactactatctgaatgcctactacctgatgatcaagcccgcaagtgtgttcggttttgtgattcagcctaaggagaacgggcgatattgtgctattgccgagaatgcaaggccgcatgttggcaagaagcaagtcctgaacatagatatcaaagatttctttcctgctatcaaagccggacgggttaaggccttatttacctccgaaatctttggctacaatgagcatctagccactctgctggccctgcttgtgacacacaaaggagcattaccagttggcgctcctacctcacccgctatcgcaaattttatttgttatcccctggacatggaactcatgcaattctgcagcgaccacggattgacatacactagatacgccgacgatctgacattctctgctgaagaaaccatagacactgacgatatccttgatatcgtctctatcatcaactcccatcacttcgctattaacgagaaaaagttcaggattcgcagtgcgcaccagcagcagatggtgaccggggtagtggttaatagaaaagtgaacatcgaccggcgcctcattcgccgagtacgtgccatcctccacgacatccagcagaatggcctgattgctgccacaatgcgccacttccggatagacgagatgcccgacgatgcagccatttcttattttagccgcaggaccgtgggtctggtgaatttcatcggtcaggtaaaaggccccaaggatcctgtctacttgaggtataagaggatactcgatgatctatttccttcaagcgtctcctcaccaaaaacttacttctga

SEQ ID NO: 8799 - RNA, 1080 nt, synthetic construct
  source 1..1080: mol_type = other RNA
atgacccttatcaataagattcacacccggctcgccgagtataattcctattattacggcccatttgaggccatcgagtttagatttgaacagacattctttgtctcgaaactcctctccctgatcgaaatctctgatctctgtttgctgcttaaaacaagattgttcgacattgagcatgtgattaatcaaccacagtacgagacttttcagatacccaagaagaggggagggtcacggctgatccagactcctgaatctcaactgatgtttatccagtcacgcctcaacttctatctacaaaactactaccacttgattaggcccgaatgcgtccatggcttcgtgatcaacccgaacaaaaacgagaagaagtgcaacattgtggagaacgccaaaatacacgtacagcagaagtatgtgctgaatctggatctcaaagacttttttcctagtatacaggcataccgagtcaaggaactcttcttgagcgactacttcagatacacagaacatattgcgaccgctttaactctgttagtgacgtatgacggcaaactacccattggggctcctacaagccccgtgatttccaattttatctgtttagagttggacgaagcactgtctgtttattgcaagaagaatgaaatccgctacagtcggtatgcggatgaccttaccttcagcagcaatcatttcatttctaagacgataatcaccgatctggagtacattatcaacagtttccagttcaaactgaacccaaagaaaacccgtatcaagacaaagaatagaaaacagaccgtcactggactggtcgtgaatgaaaaagtgaatgttgaccgcaagatcataaagatggtaagggccatgcttcacgacacactgcagaatgggatttccaaagccgctaaaaagcacttcaaatcaatcaacgagatcaggaacactagcgaggcctattttctgaaccgactggagggttatataaacttcattgcacaagtgcgtggtaatgatgattccatcgttattaagtttcggtactactacaagatgatcttccagcttgcttga

SEQ ID NO: 8800 - RNA, 1080 nt, synthetic construct
  source 1..1080: mol_type = other RNA
atgatcctgataaataaaattcacgcccggctcgaagagtataattcatactactatggaccatttgaggcaattgacttccgattcgatcagactttctttgtttccaagcttctctccgtagtcaaaattgcggacctatccctcttgtttaaaaccagactgtttgacatagagaaccttatcaatcatccacagtacgaaacgttccaaatccctaaaaaacgcggtggaaaccggctgattcaaacccccgaaagccaactcatgtacatccagtctaggctgaatttctatctccaaaactactaccacttagtgcgcccagaaggcgtgcatggttttgtcattaatcccaacaaaaaggagaaggtttgtaacattttcgaaaacgccaagatccatgtacaacagaagtatgtgctgaacgtcgatctcaaagatttctttccgtctatcaaggcataccgggtgaaggaactgttcctgtccgattatttcagatttaacgagcagattgccacggccctgactctgttggttacttatgaaggcaagttgcctattggctctcccacctcacccgttatctcgaatttcatctgcctggagcttgacagcgccctttccgcatattgcatgaaaaacgagattaggtatagccgctacgccgacgacctgacatttagttcaaatcagagtatctctaaggctcagtacactgagctcaaggagataatcgagcagaaccagtttgaactaaacgtgaagaaaaccaggttaaaaagtaacaatcgaaagcagacagtcaccggcctggtcgtaaatgagaaagtgaacgtggacaggaagataataaaaatggtgcgggcgatgttgcacgacacattacagaaaggaatttcaaaggctgctaagaatcacttcaagagcaaaaatgagatcagaaacaccagcgaaacatactttcttaatcgtttggaggggtacattaatttcatcgctcaggtgagagggcatgatgatcctatcgtgctgaagtttaagtaccactataagatgatcttccagctggcatga

SEQ ID NO: 8801 - RNA, 1092 nt, synthetic construct
  source 1..1092: mol_type = other RNA
atgaacaacccgcttaaaaccattgataaaatccatacccgcttggaagagtataacgcctattactatggctatcagggcgatgttgtgttcaagttcaatcagacatttttcgtccagcagttgctgtccgtggtcaagctgagcgacctgaaggtgctgttgaagctcaatttttcctggctgggccctttaataaatgcgccccactacgatagctttagtatcccaaagaaaagcggaggtatgcgcaagattgaagcacccgaagttctacttagagccactcaggctcggttcaacttttacttacagcattactatcacctcgtacgtccagagggggttttcgggttcgtgatcaaccctaataagaaagagtccttctgcaacattgttgagaatgccaagctgcatgtgcacaagaaatacgtactgaacctggacctcgaggactttttttcatcgattaaagcatatcgggttaaagccctgtttcagagcgagtattttaggtataccgaagaagtggcgaatgcccttgcactgctggtcacatacaatggaacactacccaccggtgcaccaacctctcctgtgatctctaactttatctgccttcaactggacgctatgctcttggcctactgtaacgaaaacgctctgcactactcacggtacgctgatgacctgacttttagtagtgacagggaaatcactacgctacacctggaagagctcagcaagatcattcactccaaccatttcaccataaattctaaaaagacccgccttaggctccatcacagaaagcagacggtgactgggctgattgtgaatgaaaaggtgaatgtcgaccgaaaaacaataaaaatggtcagggctatgttgtatgatgcactgcagaacggcgtatccaaggctgccaaaaagcatttctcaattactaaggagacaagccaaatgtctgacacatactttttaaaccgacttgagggctacatcaatttcatcgcccaagtcagaggaaaggaggatgccatggtgcaaaagttcaaagaggagttcaaaatggtgcacctcctctcatga

SEQ ID NO: 8802 - RNA, 1125 nt, synthetic construct
  source 1..1125: mol_type = other RNA
atgaaacacaaactccttctggacaaaatccattctagaatcgaagactacaatcggtacttctactcatccgaaaacgacgtgatttttaggttcgaacagaaattctttgtgactaagctgttgtctatcgtcaccatacctgatttgaagatcttgttcaaagtgcacttatcttacattgagaaagtcattaacgagccgaactacacaagcttcttgatcccaaaaaaaaatggaggcaatcgcctgattcagagcccagagtcagatctgaagaagatacagatgaagctgaacttttatctgcaacagtattatcactggattagacctgacggcatttatgggtttgttataaaccccaataagaaggagaagatatgcaacatcgtggaaaacgctaaagtccatacgaaccaaaaatacgtactcaacttggatctgaaagacttttttccctctatcaaggcataccgtgttaaggagctttttctctccgagtatttcaagtttagcgattgcgtcgcgactgccctggcccttctgactacatacgaggggaagctgcccattggagcccccacaagccctgtgctgtctaattttatatgtctcgagctagatgctgatttagttgccttctgtaacaagaaccagattaattttagccgctatgcagacgaccttacctttagttcaaacaatgaaatcaccgatgagacgatcaacatcatctccgaaatcattaagaagaaccagttcagtatcaatccaaaaaagaccaggctcaaatccagtaatcgaaagcagaccgtgaccggtctagtggtgaacaagaaagtgaatgtagatcggaagacaattaagatggttagagctatgctgtacgacgcctcgaataacggtatcactattgcagcgattaaacatctaaagctggatcggaatgctaatgtggtggacgtcagttatttcctcaacaggctggatgggtatataaatttcatcagccaagtaaaaggcgacgacgaccttctcgtcttaaagttcaagtccgaattcaagaacctggccaaaatgaaaacaaaacacatcaagagcaactcctacaataattcatga

SEQ ID NO: 8803 - RNA, 1203 nt, synthetic construct
  source 1..1203: mol_type = other RNA
atggttactgccttcacatgcttctgcgtggctcactgtgttccacttctgaaagcggatgaaattcagattatcagtaatggaagcttcttcatgcttacctctgatgaactgatctctactgcaaggcgatacaagcggtggatgaaattaaactatcggcttcgatattcgatgcgcccagccgtcctgaaccatctctccaagaatgaatttgaatctgcccggctcctgatgatcgagaatagtcatgacatgatatgcttctttgaccagattcccaaaagctatctggagaagatactcaacgagcctaattacacagagtacgccctgaacaagaaaaaggggggacagagaaagatccagatacccgaacccgtgcttaagcgtatgcagaagaagatcaatgccgctctgcaggcgtactacctgctgatcggctatgaaaattcatttgggttcgtcaagaagacctcccatgctgcttttacctcaggaattgccaccaatgcttcaaaacacatcgggcagcaggtagtgctcaacctcgatctaaaggatttttttgagtccgtgtccgcagcacgtatttttaccctgttcaaatctccgttgtttaagttcaatgaggacatcgccgcagctctagctctgctgtgcacgtggcagaaaagactgccaaccggcgcgcctacttcacccattctgagcaatttcatatgtctggagctggatcagaacttgcacgagttcagcctcaaaaataagcttaactactccagatatgccgacgacctcacgtttagcacaaacgaaaggattacagaggagatgaagatcgaattgaaagagattatctgtagaaaccagtttgaaatcaacgcaaagaaatggcggattaggacacagaatcaaaagcaattggtaacaggcctagtcgttaacgagaaagtgaatgtggacagaaaattcataaggaagatccgcgcaatgattcacgatcttaagctgaacggattagagaacgccactggcaaccactttcgcaagagcactaaaaataatcacgagttacaattccggttcatcaacaaactccatggttatattgacttcatcggtcaagtcaggggccgcgaagacaccatctacaaaaagtttaaatgggaattggtgcctttcgggatggccgatagttga

SEQ ID NO: 8804 - RNA, 1095 nt, synthetic construct
  source 1..1095: mol_type = other RNA
atgaccaaaacaaacgatataatacagtacgccagggccaacaaaaagtgggcacagcatagaaaagtctcaattgcaaacgggaccgctggaataaaagacgttatccagcagagggaaatggccgctctgcacttcttgtgtatggacagcgctcatgatttaacccgtctattcaaacgggatatcagcttcgtggaatattgtatgaactacccggtgtacgtggagcacctgattgcaaaaaagacagggagtaaacgcattatcctcgcacctgacaaaaatctgaagcggatgcaaagaggacttaattattaccttcagtgctactacaacctgatcaagcctgatgttgtatttgggttcgtcaaaacaatacggaggcagaagaacccatcagctattgtacagaatgcctctatgcaccagaaaaagaaatatctcctgaacctggacttagagaatttctttccttccatctcagccaagagaattctgactctgttttctggaccccacttccaatttaacagcgagattgccaccgccctcgcgttgctgacgacttaccagggcaaggttcccgttggtgcacccacttctccaatcctcagcaattttatttgcctggagatggatgaacaattgatcgagctggctagtcgtcatcagcttacatattccagatatgctgatgacctgactttctcgagcaatgagttcatcactcctgagatacttaaggagattcgctccgtgatcgaacagaaccagtttaaactaaatgagaagaagctccgctttagaaacgctggcaagcagcagattgtgaccggcttaacagtgaacgaaaaggtgaacgtggaccggaaattcctcaagaaagtcagggcaatggcccatgatctggaaaagaatggcctggaggacgcggcgcaaaagcactttcggcgaaattctccctccgaagagatgaatgccacgttccttaacaccctcgccggatacgtcaattttatcgggcaagtccgaggcaaggaagacggtgtgtatttgcgctataagaggatcttcagtccaatcccatcctga

SEQ ID NO: 8805 - RNA, 1059 nt, synthetic construct
  source 1..1059: mol_type = other RNA
atgaagctcaagataaacagtaccatgaagtgggaatcaattctggaaaaacgcgactcacacgcagcgaatatcagacggttaatctgcacaagtaatggggtgatcccgtctttttctcactccttaagggaggggcgagtcttgacatttctctccgtcagcaattggatcgaactgagctgctttctgcagctctccccaattaagctcgaacaggtgatcaactgtccgaattaccggcagttcacaatccctaaaaagaagggcgctccaagacttattttccagcccgacccagatctgatgaaaatccagcggaaactgaatcgctatctacaggatgtctactccttccaactccctgaatgcgtgcatggatttgtatgcaagagcaaccaggtatcaagaagcatagtgactaatgcgcaaccccacataaataagcaacgggtcctatctattgacctggagaactatttccccagtatttctgccaagcgtataaaggtgctgttttgtagctggggctttaacgaagaaattgctacagccctgacgctgttatgtaccttcaaaggaggcctgcctgctggagcaccttcctcacccgttctggccaatctgtgtaccatggagttggattccaagctgatcgagttctcaaaaaacaacgagcttacttatacaaggtacgccgatgatctgaccttctcgagcaacgactatatcctagacgacactatactccgtgtgcttgagatcattaagagtacggatttctctattaacatgaagaagaacaggtgcatgggcaggaatagtaagcagaaaatcaccggtattgttgttaacgagaaattgactgccgaccgcaaagtgaaaaaaaaattgcgcgctatgctccacgatttggcaaagaatgggcttgagatcgccacccagagacattactccattgtcggtcagccaactgacctggagcaaaacaggttccttaagcatgttatcggcgtgcagtcttttgtgaatatggtgaataaccaccgatttagctga

SEQ ID NO: 8806 - RNA, 1029 nt, synthetic construct
  source 1..1029: mol_type = other RNA
atggataagatcgaagtgaacaagattgttaacgctagcaaactgaatcagttccggacgattgagctactggacaaactctcctgctttttgaaagttaataccgaagtcttcagtaatagactgaattatcccgtatatacaactaaccgaatcccaaagaaaaagggcggttggcgggagctgcttgtacctgaaacagagctgatgaggatacagtccaaactgaatgtgtgcctgcagctgtacttcaacaagattaaacccgactgcgtgcacggctttctcatgaatgaacggaccggcgaagagctcagaagcattgtgtcaaacgcccaggcccatgtgggaaagtcatttttgctgaacattgacctcaagaatttctttccgagtatcagcgcaaaacgcattaacgagctgctgcatgataaactgagcctttttcctaatgagaagatggcaaatgcggtcactcttctgtgtacctataagggttttcttccaaccggggctcccacgagtcctgttttgtccaatatcgtgtgtctcccactcgactacgaattgtcgacatactgtgaaaataaccagatcacttatactaggtacgccgatgatctctctttttccagcaaccgctattttagtgagaagtgtataagcgagattagacagatcatcaaggagcaacaattcgccatcaacgagaagaaattcaggataaactcacgcaagtctcaacaacgtgtcactgggttagtggtcaacaacaaagttaacgtggataggacatatattaagaccattagagcttgcttacataattggaagctaaacggattagaacacgccacagctaaacactactttgtgatcgcaccctctaccgaggaacaggcccagttctcaaataagctgaaaggccagatagaattcatcggcatggtgcgagggaagaaggacgagatctacataaagtacaaaggggagttcaaatacttgatcggatcctctgtcttcccttga

SEQ ID NO: 8807 - RNA, 903 nt, synthetic construct
  source 1..903: mol_type = other RNA
atggtcaatcccaccatatttgaagatcgcttaaattctccagtgtacactaccaaccggatcccgaaaaaaaagggcggatggcgcgagctacttgtgcccgagaaggagcttaagtacatccaaaaaaacctgaacttctatctgcagctctattacaacgacattaagcctgattgtgtgcatggatttttgatgaacgagagaaatggcgataagacgcgtggcattgtcagcaatgcacaggcccacacagggaaagcgttcctcctgaatattgacctcaaagactttttcccaagcatctctgccagacgaataaagcaccaactgtttaacgagctcgatgtctttgccaatgaaaatatcgccaatgccattaccctgttgtgtacatatcaggggtatctgcccacaggcgctcctaccagtcctgtcatatccaatattatctgtttacagctggataaaagcttgatggccttctgcaaggaaagaaatatcacatataccaggtatgcagacgacctgtcatttagcagtgacaactacttttccgatgagtgcattaacgaactgaagaaccttatcgagcagcaccatttcaagatcaacgaaaagaaattccgcataaactcatcgaaatctaaacagacagttactggcctcgttgtgaatactaaggtaaatgtggacagaaaatacatccggaacattcgagcttgcatttacaactggcggatgaacggactggaattcgcaaccgctaaacattaccaggtgatctccccagatatggagaagcagactgaatttgctaataagcttaagggtcaagtggaattcgtaggtatggttagggggaggaaaatgaagttcattagggacacggaggagatctga

SEQ ID NO: 8808 - RNA, 1194 nt, synthetic construct
  source 1..1194: mol_type = other RNA
atgcatgctttctcgacatcttttcacacccacgctttccaccttaaaatctctaccactgccttgttcctgctgcttacaatgacccactctgataacaaaaggaccgagaagattagagaggccttctttgctcaaattcaatcagaggcgaaggaggagcgtaagcaaaatcggctcaaagccatccagtcacgggaaaagttcgtgggacgctttctgagaatgcagctggcaggtgatctgtgcaaactcgtgaaggaagactataactccctgaatgagatgattaatcgccccaattaccacagtttcagcattcccaagaagagagggggaaagcgagaaatcacggcacctgataaaaggctgttacgggtacagaaaaagcttaacaggtatctacagtttgtgtacctcggagtccgtcctactgcagtgcatggtttcgtgatgcaggtttcagatggaagcgtccaggccaacatagttgagaacgccaaggtccatgtcggcaaaagggcggtgctgagcatcgatctggtggactttttcccaagcattagtgccaaaaaagtaaaggatctgctcatgggcagcccgtttaatttcaacgaacatattgccgttccactggccctgctcatgactgcggagcgcaaattgccacagggcgcacccacctcccctgtgatctccaactttatctgtttgcagttagatgagacactaagaatctgggcattaaaccacaacgctaactataccaggtacgccgatgacttgacatttagcgccgacctcgctttctccgaagagcagcaagcagacttgaggaaactcatagaagcttacgggtttgtgatcaatgtcaagaagttgagacagagactgaagaatcgaaagcagactgtgaccggtctgacggtgaatactaaagtaaacgttgaccgtcggtacctaaaaagaatccgagctatgctccatgacctgaatacaaacgggatagaagaagccacaattcggcactttaaactggttcgccgggcaagtcccgagcaacgcctgcttttcgtcaatcggcttgaggggtctatcgcctttattggccaggtgaggggccagtccgaccctatatatcagcgcatgcgaaaggctttcttcgacatgtcttcaagtaagaaggaaaagtga

SEQ ID NO: 8809 - RNA, 1113 nt, synthetic construct
  source 1..1113: mol_type = other RNA
atgaacaaaccagccaacgagttccagccctccataagcaacggtaacttcaagcagacccttgctgaaaggcggattgaagtgaagaaaaacaggattaagaactttcagatgcgggagaactattccaatagattcctgcgtatgcagtgcgccaccgacctttgcctactgctgaacgaaccgttctataatctggaattcctgatcaataagcccaattacaataccttctcgattcctaagaaatctggggggaagagagatattagtgcccctgaaaagaacctcctcagagtccaaaaaaagttgaataggtacctccagtttatttacctgcgactgcgcccaacaaatgttcatggctttgtgctccaagttgggaatcatgagatccaagcaaatattgtggagaatgcaaaacaccacgtgggaaaaaaagccgtgttgaacatcgatcttgaagacttttttccatctatcactgcaagaaaagttaaggagctgctgaagagcgccccgtttcagttcaacgaggaccttgcaatcgctattggcctgttgacaacgcataagggaagaatgccccagggagctccaacctcacctgtgatttccaactttatatgtttgcccctagaccacgccatgcagcagtggtcaatcaaaaacaaagtaaactactcccgttacgccgatgacttaacgtttagcgctgatatagtcttcagcccctcacaaatcctggagctgcgggccatcatcgaatctttcggctttagactgaatgagaaaaaactccggcagcgacttaacaaccgaaagcagagtgtcactggaataaccgtcaacactaaggtgaacgtaaatcgcaggttactcaaactagtgcgcgcgatgctccacgacctcagggttaatggcatcgagacagctacacggaatcacttcgtgagccctgaaaacccatatttcgacaggaagaagtttttcctgaatcgcttggagggttccattgcgtttatcgggcaggtccgcggccttgatgatcctctgtacaccaagatgaagacagagttctatctgctgttagatagtaagaatactgactga

SEQ ID NO: 8810 - RNA, 1080 nt, synthetic construct
  source 1..1080: mol_type = other RNA
atgacagtatacgagttcgtcgaaaaacagcgcccggagcttaagcagtcattaagaactcagaccatgaagatcaagagctcacccgaactgactaaacacacaatctccgccggactgctactctctcttcagaacgcccaggatgtgtgtgcttacttccaactgccaagagcagtgctcgaacaactgattaattcccctaaatatcggtccttttccattgcgaaaaagcgcggggggaaaagactgatccaagcacctgaattaggtctaatgaaggtgcagaggattttgaaccacggactgcaaagtctctacgcctgcaatcctaatccaagtgtcttcgggtttgtgatcaatgacgagcaagccaaccccgcctcacccatcgtccagaatgccgctccgcacgtcggcaaggcatacgtgctgaacatcgacttgaaggattttttcccaagcatccgagcacaccgggttaaagagttgttcatgtctcagcagtttaggtttaacgagcagacagccaccgttctcactctgctcactacatatcagggtaggcttccccaaggagctcccacctcgccaataatcaccaatttcatctgcgctaagatggacgcggagatgcgaaagatagccaacgataagggttggacctacacacgctatgctgatgacttgacgttcagcgccgacctgttcttcgacgcagaagccgtagcggaaatcaggagcatgattgtgtccaaccatttcgtgattaacgaaaagaagatcagacagaagggaaaaggccgcaggaaagaggtcaccggcatagtagtcaacactaagccaaatgttaagcggagttacatcagacaggtgcgcgccatgcttcatgatctggaaaagaatggccgtaccattgcttcagcaaaccatttcaaaaacagccctgttgtgagggagaatgatcactctgtgtttattaatcgactgcgtggctatatttcttttattgggcaggtgcggggcaaagaggaccctatatttctccggtttcaggagaaaatgaaagctctgacgtga

SEQ ID NO: 8811 - RNA, 1122 nt, synthetic construct
  source 1..1122: mol_type = other RNA
atgaaccagactgagctgctcgcttacaaagccacatataacagcgtgtttcggcagtacctgaactccccaagaaaaacatttaagcctccctttttgctaagcaagtcaattcagtatgcgctttatttcctggccatcgagcgcccattagatatgtgtgcgtttttcaagatccaccaccaagaacttgaagatattatcaaccagccaacttacgtaacccacttcctgctgaagaaaaagcaggggttgagaactattaaggcccctattgggaccttgaagctgcttcagcagaagttaaacagacacctgcaaggcgtgtaccttaatctgaaacctacatgtgccaaaggctttgtcatcaatccccccggaagttccttgaaggctaacattgtggaaaatgccctcccccacgtcgcaaagaaatatgttctgaacatggatatcagggatttcttcactagcataagcgacaagcaaatctaccatttattcaagtcctcacctttcgatttttctccgcaaatcgcagctgcctttacgtatctcgtgaccgttgacgactgcctgccgcagggtgcacccacatctccaattctatctaacttcgcctgccgtagcctagacgaaaagctgatggagtttgctaaccatcatcagttgaattacacgaggtatgcagacgatctcaccttctcctcagacatccctttcactaaggagcagatcgccaccataaaaaagaccctccgggaggaggggttcgaacccaatgagaaaaaatttcggctgaggacaagtaacaaaaagcagctggtgaccggccttgttgtcaatgaaaaagtgaatgtcgacaggaagatgctcaagcgagtccgagcaatactgcatgacctgagactgaatggtgcctcaaaggctgcacagaacttcttcaagtccgagagcaaaccaaatgagacagacattctcctttttttcaaaaaactccgtggaatgatagatttcatcggccaggtacgcggaaaagaggacgtgctgtttgtgaagatgcggcaagattattctagttcgtttgctattgaagaagatcgcatggtgtactaccgctga

SEQ ID NO: 8812 - RNA, 1152 nt, synthetic construct
  source 1..1152: mol_type = other RNA
atgctgacagccatcctggatggcattaggaaaaactatacgaaggccacattctatacgtacaggcagattgttgtaaataaaaagaaggggggcaagagaatcatttccatacccggattgctgctgcgcaaatcacagcggagcctcctccctttttttcagcagctccggacgcattcatgcgcacatggttttgtcgtcggaaagagtatcatcacccacgctagcctgcatctggctaaagagtcaattctgaccctggatatccaggatttctttggatcaattactagcgagcacctggagaagattttccgatctcatggtgttcagaaaagtgaggacctggagctgctgattaagttgactactataaacgggaagctaccccaaggggctcctaccagcccaatattgagcaacgccgtggtttttgaaatggactttgaactcaacgagtgggccaccaaaaacaatctgatctactcaaggtacgcagacgacatggtgttctcctctgaaactcgcacaatcgaaaaaacctgtatcgatgaggtcagtcaaataactcagaaattcggcttcaaactcaataattccaaaagtcgcatcatgccgcgcgggaagagacaggtggtaaccggactggtggtcaatactaagttgaatgtcaagcgtgagtatttaaggaatacctctgcgatcctccacaacatcagcaacaatccatttagcgccctgtcccaggtgtctcggggatcagtgttcgcaacctaccaaagttatgaaaaagaatacctttcccgcaatctgtcgctttcttcctttcactacctgatccggaatcagaagcaacagcagaaacttataaacccaacaaagatccgattgcacaggaagagccacttctctaactatcccattttccggctattacttctcctccaaggtgtgaatgggaggatttccttcatttcgtccgtgatcggcgaaaaccagattagtgtgcaaaagcttagaaatcagttcaaggagatcgagaaagagctatttggcaactattctatcaactggagcacaaacacaacccgtctttacaagattattctcagagaatgccctcagttacgaacaagaataaagggctga

SEQ ID NO: 8813 - RNA, 960 nt, synthetic construct
  source 1..960: mol_type = other RNA
atggattacttctacaagaagataaagcggcttattctggcttgggaagacgggacacccaactctgataatattccaagcaattacgactattcccgtttcaagatcattaaaaaagacggaggacaccgcatcatctactcaccttatggccatttaaaaaagatacagcgcggcataagcgagctgctgtacaagaatgtggaattgcatggcgcaagtcacggctacacaatcaacaagtctatcattacgaacgcaaagcagcacctgaaaaagaactgcattatcaacattgatctggagaacttctttcagacaatcaacaccgtgatgctgaataaatccctcaaactttttttcccagacatcaccgatgaacttttgatcaagatcatcgccatttgttcattcgagggctccctaccgcagggtgctcctacttcacccattctgtccaatctcgtgtgttattcgctggacttgaaactctctgaactggccataagccacaatctcgattatacaagatttgcggacgacatgaccttttcaactaacaacaagatagtcgagttgcaactgaagaatgatatcaacgggattatccaaagcgaagggtttagactcaatgagaagaagtacagggtattaaaaaagagacacaggcagagtgttactggtattacggtcaatgagaaaatcaatgtcacccggaagtatattcgagggattcgcgccgccctgtacaattgggagacttacggtaaaaaagaagctagtaggaggtattttgagagcgcaaaaaccaaaatatgccgatctcataactttgaagtttcccttagaggcaaaattgagttcgtgggaaatgtgcggggaaaggaggacgaaatctatagcaagttcaagaacaagttcgagatcatcaacctatttgagaaaatcaaccagttctga

SEQ ID NO: 8814 - RNA, 1893 nt, synthetic construct
  source 1..1893: mol_type = other RNA
atgaacatcaataccggaatcctgtttttcgtgatgaagaagttcaactaccacaagatcaaatacaagaataccgagctagaggaattcataagcaaggagttaaatagtcatctcattaagaacatcctgaagcacaagagttccttttataagagcttcacagtgctgaagaaaaatggtgcaaagcgcagaatagaccagccccattacaaactgatggacatccaaaagaagattgccaattacctgctagtaaagaggaagaaaaacagtagtagtcacgggttcgaatactacaggtctatagtcaccaacgcggagaaacacatcaataagaacatcgttctgaacttggacttcaaagagttcttcaagaacatatcaaagtcccaagtcctgtccgtgttgaggaacagctttgatataacaaatgagtctgcctacttactcacagaactcgtgacctttaataactgcttgccccagggcgcaccttcttcacccgttatctcaaattatgtttgcaacaatctggataacgatttgaagacgtactgtaaggagtacaatatcatttatacccgatatgccgacgatcttacgtttagctttaatttcaagaagctgcctcgtcagattgtagatgagataatcagtatcattgtgaaacacggcttcaagcttaatgatcagaagtttcgatatttccacaaaaactcaagacagttagtcacggggatcgtcgtcaacgaccatgtgaatattaagagggaattctacaagaaggtgcgggccattctgcataattggaaaacaaaaggatacgtcgtgaccaaacagaaatttgacctcgagtatccaaacaagaactttcgtaagactctgcttggctgggtgaactacattggttatgtaagaggcaaagacaacccaatgtatctgacattgtcgtcttcccttgagcttctgttacgcactaaatatccgaagagtgagtttaaaacagacgaaaaatactgcgacaaatgcaaaactgggattctcattgaaaccaaagaaggaggagtgaagaacaacttcaaaaaatctaacgatgctagctatttcttcgagtgcaacaatgaggaatgtaatttctcagagaacatcgatagcaaatacttctttctcaaatcgaaggcctaccttaaaaataataacctggagaaggtgaaggaacttctcgaaaagtccatcgaacttgatagcaataactacaaggcatataacaatctgggcgtgatcagctacaacaaaaaagagtacaaagtgtctgtcgaacactatagcaattccattaaagcttatcgggaacgcgctaagccatattattgtagggggagagcctatgctaacctccaacagtttgaaaatgccatcctggactatctcaagtatattcagctgtctactcggaaagatgttctcaattccgtctactttcatttagggcaagcatattttaagactcacaaatacgaggaagcactgaactacgtgaatctgcatattgagcgcttcgagatcactaaagcggtgatagccttgaaaaccgcctgtctgaacaatctaaataatctgaacaagcggtttgagttgaagatttacaaagacgcctccaaaatatacgacgtgattgagaaaaacgaaaacatttggtttgagtatcagaccatcgacagcgatgagtctgtgaaagttgctctggtatccctgatacccaagggtatcctcttcaacaaggagatcaattccctatcagttaagggctacaatttgattaacaagaaggaagagacatacctgatcgataacatcgctaatctcattaatgtccctaaggaaatctga

SEQ ID NO: 8815 - RNA, 1329 nt, synthetic construct
  source 1..1329: mol_type = other RNA
atgggttcctcatttttcaattttatgagtcgcaagttcacgatttcacagtttaggaagctgaacaacgattttttagacgtggagagtccgaataagctagccgaaatcttggggattaagacctcggtgttgattaagaacattaagtatcagcgctacaccagcttcaccagtatccataagggaaaaaaacgtattgtcgctgaacctaatttcgagcttaaacaaatccagcgcagactaaataactacctgcaagcaatctattactttaacaagcacgagaacgtgcacggttttgtgaaatgcgtgacaaacgaaaagattcggtattcaatcctgtccaacgcgctgcctcacgtgggcaaaagttacgtgattaacgcagacatcttcaggtttttcccctctattaccggcaagatggtcaaagatgttttccttggggagccttttttcttcgaggacaatttggctagcgccctcgccctgttatgtatacagaagaattggttgccaactggagcgcccactagcccagtaattagcaaccttgtatgtatggaactagatgaagaactcaatgtactggctaacaagaacaattactcttacacgaggtacgccgacgacatgaccttttccggggaaaataaacccgatgagaagtttaaggacgaactgacatccatcctggaatctttcggattcaaactgcataagaagaagtatcgtgttctcacaaagcacactaggcagactgttactggcatagttgtgaatgagaaattgaacgtgaagcgggagtataaaagaaatcttagagccctgcatcatgacatcaaggtaaatgggattgaaaatgcactccttaagaatagaagcgtccagatccttaccatccagggcatcgaatctttcaaaaatagcacactgtcaaagtcattattcgttgataaggtcgccgagtactctaaagccatctctaacgcaggcaacatagatggtgaggtcgagtatctgctgtttgctgacctcgagctcgatggctttatcatagatgtgttcgacaaccataagcaggccgtgaaaaaaatgcacgaactgtggcacttcattgcttccctgtggacgctcagccacaacgacatcgtcggaaaaatatccgcaatatcccaaaagcgctataggctgactgaagagacacggtatgagacaattggcctcgagggttgcagtaatgggttctacaccgtgggagtggtcaaactgaacaacaaatttacccaggaggagtacgagaaaaaacgagggcgaatccggtga

SEQ ID NO: 8816 - RNA, 1332 nt, synthetic construct
  source 1..1332: mol_type = other RNA
atggctaagcattacttaagagaactgcaacacatttacaatctcaagatcctgagccaatacctcggaaaagatgagtacgagctgcagaatctcctgtaccgaaaaacatattctagtttcctgatccctagaaaaaatggcaaacaccgttctatcaatgccccttcggacgaacttaagtacgtgttacagaaccttaataggttcttgagcgccatttataacgaaatgcagggccaggagcatcccgcccatggatttactcttggtaagggaatcttatcaaacgccaaaatacattccggcaaggcgtttgtgttaaacctcgacctaaaagatttcttcccctctataagccgaaaccgcatcaaagaggtgttttccagtgaaccattcatgctgaaaacggaaattgctgattatctatcggagctcgtgacctattatgatacacttccccaggggagccccgcatccccaatcatttctaatctcgtgtgttggaacctggacaaaactctgagcgactttgccaaaaagaaccttctcgtctataccaggtacgcagatgacttgagcttcagcagtaaccagaagatcgacaccgagataatcaaacaaatcgaggactatatccagaaggagggtttccagctgaacactgataagaccagaatccagaacaggacagagcgccaggtcgtgacaggggtaacggttaatgtcaaacctaatgtttcacggaagtttatacggaggattagggctattctgcactcctgggagacactggggtatgaggaagctgacaccatcttccagtcatcctataaaaggcgcaagggagtttttaaagcaccgtcactgaaatactatctgataggtaacattgcgtatattggacacatcagagggcaagatgacagtatctacaacaatttctgcatcaagctattccggctgtccgatcgcaaggtattcaagggccagattgaacgttttattcagagcttgcaatccgacatcgataatcagcaatttagtgaaaccaatttggagaatcggattttcaatctggcaaagaaggcctttgagcctcaccagatacgctataataacatcctcagaaagtactacacactgcgaaagaaaactaagatcaacataaccaaggggaaaaattactctagcctgtttttggcttctctggaaacttcaccagagttcaaggaactcctgtacgagtccggccggtttggcgacaaggagtactactctcagtacattaaagaagccaagagattgattcggaacaccaaccttatttga

SEQ ID NO: 8817 - RNA, 1029 nt, synthetic construct
  source 1..1029: mol_type = other RNA
atggccattaagacaatcgctcagttatgttccatgctgcaggtcacagcaaaagagtttcagcatatactggccctgcccgaatacgttagctactccatcccgaagaagtcaggaggaattagagctgtcgaggccccacagggtttactgcgtgagctccagggccgactcgcaaagtatatgcagccattttacacccaacacaagctgccgtgcgtccacggctttgttaaggctttcaataacgaacccaaatatggggtactcactaatgctaaacctcacctgaacaagccttgtgtgctgaacatggacatcaagaacttctttgacagtatatccgctaagcatgtgaagcaggccctgcagcagtaccccttcatggtgtcagatgaagtctctacagccattgccctgctttgcacacacaacaagaaactgcctactggggttaccacttctcctttacttagcaatatcgtgttctatagggttgataaggcacttatcgatctcgttaacgagatcaacagcacgaagtgcaaagacgacgtggcgatctattacactagatacgcggatgacctcactttttcgggggaggtaaaactcgtcaatgagatacaagcaagaattgtggagattctggccagctacggcttcgaagtcaacacaaaaaagactcgactgcagaagacgtacgctgcacaatgggtcaccggcatcaaagtgaataacaaaccaaatgtgagtaggctgtatgtaaggaatctacgggcgaccattcataacctacaaaacaacaccgctaccgatgccgtgaagaaacatttgggtaccacacccaataaggaaatcgacctctcagatgtacacacgatgttggcctctatccggtccaagattgcatgggtgggattggtgcgcggcaagaccgacgacgtgtatctgaagttgaaacggaatttcaaagaggccgaacagaaaatacttcttcacgaagtgccagagaaaaaacgcaattga

SEQ ID NO: 8818 - RNA, 1002 nt, synthetic construct
  source 1..1002: mol_type = other RNA
atgcgcagcctcgaggagctgcttaaaatcctggcgatttcaagtgagctgctccagcagcttctggccgctccagagtatacaatctaccacatttctaagaagtccggagggacccgaactatccaggcccctcaggggttgttacgccagactcaggtgctgctggcaaagtacctccagactgtgtacagccggcaccacctcccctgcatccatggattcgttccgtccgccggtcttttgaagtatggggttttgagtaacgccgtgccacatctcaataagcccttcgtgctgaacatggacatcaaaaacttcttcgagagcatcactgccaaaaaggtcaagaagtccctgtgcgagtttccatattattttaacgaagaagtggcaaccgccatagctctcctttgtacgtaccaaaaacaactaccgaccggtgctcctacaagtcctgtcttgtcaaatatggttttttacattcccgatgtggccttgctacagtggatcacggacgtaaatgagactaaacaaattgatgagacaggaataagctataccaggtacgccgatgacttaacattttctggctctgccaacctggtgctgtcactacaggctcgtataatttcctttttcgcaacagaaggctttgaaattaacgcaaagaagacccgggctcaaacccctcacggcccacagtgggtaaccgggattaaagtgaatgagcgactgaatatctccagatactatattcgcaatcttcgggcagtcatccatcaaatgagggttcatgctgcagaagcggtggtttgtagatacctgaagctgcccgcgaccactcagatcaatacggcccacgtcaaaaagatgctgagctctgtccagtcgaaaatcgcttgggtgggcatggtgaggggcaaagccgaccccatatatctcagattacagacacagttcaacgtggctagggaagtaatgctggtcaaggaaagctga

SEQ ID NO: 8819 - RNA, 1047 nt, synthetic construct
  source 1..1047: mol_type = other RNA
atgaacacaatcattctggacaacaataaccactgggattcccttctgttcattaatgcaaatacgctggataaaatggccttctcactgagctgccacctcagctttctgcagcgccaggtggaaagccccaagtatttccaattcaaagttagcaagaagagtggaggattccgtgaaattaatgctcctaacgctgagctgaagtacctccagcgaaacttgagctggaagtttaacaagatttattcttcacccgatggggtccatggcttcgttaagggcacctttttggagactaggcacatcgtcagtaatgctaaactccatatcgggaagaagtgggtatggaacttagacatagagtcctttttcagttccatcactacacaaatggtcattaaccgacttatggaggccccctttaacttcgacgaaaataaagccaagtacatctctctgctgataatctataagcggcaactgccgatgggctccccatgctcaccagtggtaagcaatcttgtttgtgaaaacatggacgcccagattaatcagtgggtcgcgaaccagaacaaatttcaacctgagatcaatcttgtgtactctcggtatgcggatgatattaccttttccactgacctcgcaatctctgatgagcacaaactcgagatctatgacatcctgaatcagtacgggtttgaggtgaatcgcaaaaaggaaagaatccaatccaacaagcagtcacagtgggtgaccggtattaagataaacgagaaacctaatgtcgacaggtcttacatcaggaacatcagagcagccctccatcagataagggctaagggattgcaggaggctgcaaccaatttcttcaatttgaaggagttagccaacacaacagagattgatagattcctacggatactacagggacgcatctcgcacgtgggctttgtgaaaggtaaagacgacagtgcctacctgaaatactggagagaactgggcgaagtgatggccccaattcagaaagaacccctgatttattga

SEQ ID NO: 8820 - RNA, 1002 nt, synthetic construct
  source 1..1002: mol_type = other RNA
atgaaaagcaaatacaagttcttagactcccagctggccatcgaagacattagcagtatattaaacatccgctttaccgaactcatcaagaacatcgaaaagcccaattatacgacatttcgaattccaaagaagtctggagggcatcgtgtagtgttcgccccgtgtagcgatcttatgaaaatccacaacatcgtcaacaataagctcagatctacctaccacatgatgcagccaaaggttgtgcatggattcacatataaaaccgccaaagagaaataccttgacatcggcattaaggcgaatgctaaaatgcacctcaataagaagtgcatcttgaacattgacatcaaagacttcttcccttccatttcaatcagtagagtgcgggcaatgtttgaatgcccccccttcaactacgaccataatctggcaactggcctggccctgctgttttgttataaagggcaactgcccgcaggggcacctacttcaccactcatctccaatttttattgcctgaaattggacgccgatgtcctggagctatccaactcagagaatatcacctacagtaggtatgccgatgatcttaccttttctagcaatgccattattgatacaaagttcgtcgtgaaggtgtccgaaatcctaaagaacttcggctttgagataaaccggaagaaacttaggaaggcctctaatttccaggctcaatatgtgactgggataaaggttaaccagacactgaatctgaatagaacctactatcgcaacctcagggcggtgctgcactcgatcgaacagattggtgtcagcgcttcaatgttgaaatacaaaggcaagaaacgctacattctgggagaggagcacaagtttttaagcagtgtacgaggaagaatagagtacctcggctatattcggggtaacaatgacgttctgtacaaggagctcaaaaacaagttcaacgctttgatagatagggctcctattaattactga

SEQ ID NO: 8821 - RNA, 993 nt, synthetic construct
  source 1..993: mol_type = other RNA
atgaaagagattacaaaaaaccggttcctgtcactgcagtttgttgatgaactgtcaatgattctgggaatgtccctgggcgattttacgagcgccatcgagaatgcgaactacaaaagctttgaaatcccaaagaaatcagggggaactcgcttaatctcctctcctgactcactcaccaggaagttacaaagcaaactatatgtgtacctgaagagctactatcactcagtccaccctaaatgtgtccatggtttcattccaaaattcaaggccaaggcgagtcaccatatcaaagccaacgcacaggtgcatctcgggatgccctacctcttgaatatagacatcaaggacttttttcacagtatcagtacaactagagtgaggtccctgtttgcaaactcccccttttactttagccacgaagtatccactgcacttgctctgctctgctgctacgaacggaaattgccgatgggcgcttgtaccagccccgtgatttctaatcttatctgtttgcagatggacgccctgttcatcaagtggagtaatgagcagaagataaagtacaccagatatgccgatgacatttccttctctagcatgatggctttcagccataagcagattgaggatatacgtaccattatccagaacgagcgcttcgagatcaacgaaaaaaagctcaggattcaatcgagatatacgtccatgtgggtaacagggatcaaggtgaatcagaagcttaacgttaaccggacctatattcgaaatctgcgagccatcctttacgacataaaaacaaatggctgggaaaaggcttgcaagaaacacttccatctcaacgagaacactaaaaacgaggaagagctgaagtctaagttttacttcaaaatcaagggcaagatccaacacattggatatgtgaagggttattctgatgaggtctactctaaattgaataatcagttcctgggcctacagatactgtga

SEQ ID NO: 8822 - RNA, 1029 nt, synthetic construct
  source 1..1029: mol_type = other RNA
atggagattaaaccatttcatcggaagatcacagatctccagatacagcagtttctgcacttcaattccgtgcatgacctcagtcacctcataaatatcgacacagacattatcgagcatgttttggacgaacctaagaggtaccacgagtttcctataccgaagagaaaagggggaaagcgccttattcactctccctcaagacccctcaaagacatccaaaaacgtttatccatttacttgacgcgcatctaccacgaatatgctccagcttacgtccacgggttcattagaagcaacaaaaagactagtagcaggaacatcctcacaaacgcgacccagcatctcgatcgtccatacgtgctaaacatagacatcgagaacttttttccctcaatcaacgccgaactgatcaagtcagcattcaacaaactgccgtttcagatgtattccgatgaaggtgcatctattatttctctgctgctgactaggaattggattctacccgccggctcgcctgctagtccaatcgtatccaatataatcttctacgagacagatattgccttacacaagtactgcatcaagaataagctggtttacactagatatgcagacgatctgaccttctctggagagctgatcaatgatcacatgaccgaagcgataaagaagataattatctaccacggcttcatgatcaacgataaaaaagtgcgacttcagagcaagcagagtgcccaatatgtgacgggaattaaggtgaacaacaagttgaacgtcaatcggaaatatattcggcagcttaggagcatcctgcatgactgggagtccaatgggatcgacattgcttcaacccgctattatgccggtaaactccatcggtaccaaaatcgcctggatatgtatactagctttaaggcaagcgtgcatggcaagttagccttcttgcaacagattaaacaggaggaacctgtccttcagggcctgtacaagcgattcatcgccctgaaaaatacctatatgtga

SEQ ID NO: 8823 - RNA, 1002 nt, synthetic construct
  source 1..1002: mol_type = other RNA
atgaatacacataggattgaaaagttcatcgctgcaaaatctatgcggcagctagaactgtcacttctcgcatcgaggaatgagttgaaacagtgggttcagaatccagattatcggacctttgagatccctaaaaagaagggaggcacgagacagctgcatgcacctgctccaccgttgaaacgcatccagcagagtataaacgagctgttacaaatcctgtatgtacctactcaaaatgcttatggtttcatgctgaaacaggctggtgaaattaaccggaatactctccaaaacgcgaactgccacctgcagcgcaattttgtctggaacctcgatattcaaaacttctttccaagtatcagcaccaagcgagtgaaggccatttttatggaaggacccttttacatgacagatgaaatagcaagctacgtagccctgttatgctgttaccagaagcagatacctgcaggggccccctcttcacccatgctttcccacttcgcctgtcttcagatggacaatagcttacagaagtttatagcccaggcggcctttaagccgtaccagatttcctacacgcgttatgctgatgatctgactttcagcttggacctactcccatctgacgagattaaaaatggcattgagtccattatcctggagcacggattcgtgttgaataccagtaaaaacaggatccaacataaacaccaagggcagtgggtgacaggaatcaaagttaaccagaagcccaacctggacaggaagtatatcagaaagcttcgagcgattatccatcacgtcgaagctaaggggatcattgccgccactgcccgctacctgacactcgcagaggaacagatcaaacagaaggagatatccttcttcctgaactcagtgagagggaaaatcaactacgtcggcgctgtgagaggcaaggaggacgtggtttttaagaaactcatcaccaccttcaattctgccatcaacggcatttga

SEQ ID NO: 8824 - RNA, 1131 nt, synthetic construct
  source 1..1131: mol_type = other RNA
atgtacttacagtcgtctgaaaacgtagccgacacgaaccctgactttccaagcgagaatcctgaagaagagaaaaggaaatttgcatgtctgttcctcatcatcaagcagttcaagatctacatgaacaaaaactacgacaacctggaacaactggcaaacattaaaacacccgatgagctgcttaacctgttagaagtgagcccctctagtctgattgctatggtggagaatcctcagtatgagacattccacatccccaagaaggccgggggttatcggtgcattgatgcaccctctgaagatctgaaaagagttcagcagaagctggcaagtcacctctcttaccttttcattaacttccagaccaggagtgtcatgggattcgttccccattataagggcataaataatccagcgggtattgtggagaacgctaaaaggcatattggacagccgatagtgttgaacattgacgtggcggactttttcccttccataaaaatctccagcatcaagaaaatgttcatgcaaaagccttttagcttcaacgatgagctcgcccacctgctcgctttgcttacctgctataaaggcaagctgccacagggagccccgacctcacctatcctgtccaatttttttctcctacgagctgatctcaagatcgagcgcattatgaagaaacgggaactaaattacacaagatacgccgatgacatcaccctgtccgggttcctttttccacaagataagttacccgacatcgtgcaggaaatcttgacaccatttgggctgcgtttgaacgagaaaaagataaggtaccaaacttttgtgggcagacaggaagtgaccgggatcaaagttaatgtcaaactgaatctcgacagacggtatattcgccgtataagggctattctgcactgttgggatgttaaaggaatcgaacatgctgccactgtatttcataagcgcaagatcaataacgccctagagtttacttcaacgatacgcggcatgattgcacacgtgggcaatgtccggggtaaggaggacgtgatcttccttcgatttcacgagaagttcaatagcttgtcaattttcgaggagatgaaggtcgtcgccatgtga

SEQ ID NO: 8825 - RNA, 1653 nt, synthetic construct
  source 1..1653: mol_type = other RNA
atggtcgacaacaaacatggagcactgctcgatattgagtcgaaagaagatttcgcctactacctggagaggcccattaaagatctgacaatgctcgcttatgccaagaatgggatccggtacaagaccttcgagatcggcaagaagcgtagcggggaaaaaagaacaatcgaagcccctgttgggtatttaaaggcagtgcagaggcaactgttggagctgtttaacgaggcctacagaccaccacagtgtgtgcacggcttcgtttctagctgttctattgctagcaacgccatgtcacacgtgaaaaaaagcgcagtggtaaacctcgatttgcgggatttttttcccagcatcaccggagataggatccacggactgtttagaaaggaccccttctcattccctgaagatgtcgcgaatctgcttaccgagttagtttgctataagggcagcttaccgcagggggccccaacttctcctatcctttccaacatgatttgctaccggcttgacaagcagctagtgtcctatgctgctaaaaataagcttgtctataccagatacgcggacgacattacgttttccagtactagccgatccgcaataaacaagctcttcaatgagtctgagttgggcattaacagtgtatccccggaggtgcggaacattataggatccaaccgcttcgagatcaatgagacgaaaattcatatagcccggaaatccagccggcagcaagtcactgggatcatcgtcaacgagaaatgcaacttcccccgtaaggaatacagaagtctaagggtgctgtttaataactgggctctcgtaggctttgaatacgctggcgcagagtacgctaaacgcaatcacagttacagctcaaagctcttcaacgaagccggtctgatatccgaaacactcctgaagaagcacattcgcgggagactggagtactacacaatgattaccggtcctaataagaaagcctcacagccactggccaagctgtggaatatgtatcatgacgtgaccggggagaaggtgccaatctcaacccccgagcgaactgtctgccagactgagatctgttattctcgacaaaatgatcagggcgacccaattcctttatgtgaaaatggcacttccttcctgacagacaagggttatcttttcacctgcgcccattgtttgtgcgacatacatcacgaatacaagaaaatcggtgacgaaaggtgttcttttcctacactgaaggtgttgtatgagcccgaattgagcgatttcctgatcgacaagaccctggacgtagcagcaatcaaagcccccccattcatgaaaaacgaggcctttgccctgaccaacggcaattatttcccccaaataggtgaatcagttaaggcatacggcttcgcggggggagactccagtattaggtgcatcgaggctgctgtggctgagacgctgaaagccggcagagtgcgcgtggatcgcccttttatccacggcatgtcaggtggacccgttttcaatactcgcggagaagcaatcggactactcacaggaggctctgcccctgatgactattcgcacgatggggaatttgtcctttttagtgctatttctgaacagctcccgaatgcgtttaggtga

SEQ ID NO: 8826 - RNA, 1650 nt, synthetic construct
  source 1..1650: mol_type = other RNA
atgcgcacacgggctgacgttgctgccttcctcggcgtgactccgcagcagctgggatttctggctttcagtagcgtaccaaaatacaccgtgttcaatatcaacaagaaacgtcctggtgagaaacgagaaatcaaggcacccatcctggtattaaagagggtccagaggagactcgctgatgtgatcgcctccatctatgagtccaacaacccacccaattctgtgcatggttttaggttgaacagatcaatcgcgaccaatgccaagtgccatgtccaccgggaagctgttttgaacattgatctggagaacttttttcccagtattaacggtggacgcattagggggctcttcctacacgagccctttaatttccctgaagaggttgcggatacacttacaaatctatgctgtgacgccggtggccttccacaaggtgctcctagcagccccgtgctctccaattgtatatgcaaaaggatggacaagcgcctgctgagctttgcgcgagaaaacgacctggtctacacgcggtacgccgacgacattactttctctgcctttaacaagaggagactgcggcacgcttgtttgagtgatggcagcccgtcccttcagctgtcctccgagctgctcaagattatcgaggggaatgggttctctgtcaacaccactaaaacccacttatcaacaaggtcttcacggcaggaggtcaccggcgtaatcgtgaacgaaaagtgcaattttaagcggagcgattacagagagttgcgcgtgctattacataattggttggacgtcggctacaaacatgctggcaaagagtacattaagcacaaacctgaaatagcactggccattgtagatgacgacgacacgatatctgagagaaaactgcgctcgcatatccgtggacggctggctttttacactatgctcgccaaccagaaccctgggatttctaagcccctgcgtagactttggaccatgtatgcaggggctacgaaagagattgtgcccaccgtggacccagagagcgcaatctggcaaattgtgacatattacgattatgtcagctcgaaggatggctcagtgaaaaatttctccaaggtgggcactgtcttcaaagcggacggcgaatgcttgataacagccgcccactgtgttgccgacctggatgaggtgaatgtgtgctccgaggccgtgtgtgaaatcgcatatgggcctgtgcctcagttctgcgagctcgggaacgtcgactggaatccaaagagcgattatgccgttctccacgagatgcccgaaatgctgaacaacatcacaggactgacttgtgatgggacctatagggcacaggttggggaaaccgtgtgggcttacggctatagcgatgccaagcctcaactccggtgcattgaagcacgcgttagtgaagttcatagtgatggtcgattctaccgagtagaccgcccgttcatcgagggcatgtccggaggaccaattataaattcaagaggatcagtgataggcatcgcagtgcacggctctgccccaagagaatatgtctacgacggagagtttctttcaatcgcccacgtgaatcttggaactaactaccagaccaatgaaagttgttctgcatcctga

SEQ ID NO: 8827 - RNA, 1650 nt, synthetic construct
  source 1..1650: mol_type = other RNA
atggcatcccaggaaataagttttaccagcattgctacaaacgcacaactagccgagtactgtggggtgtcctgggacgagctcaagatgttagcatatgccaacagaatcaagcggtataccgaatggctggtaccaaaacggaacggagaagggttccgcagaatatccagcccaatggccaacctgcgacgggtgcagcgagcgatcgctaacggactctcagagttctattcgcctttgaagtgcgtctatgggtttgtttgtgagaggaacgtggccatgaatgcattgcagcacgctaggaagagaacagtactcaccctggacttgaaagatttcttcccgagcatcagcgctcccagagtcagggggctgttcatgaaggccatggatttcccccaggatgtggctgacaccctgacaaatttagtgtgttacgagggcagcttgccgcaaggggctcctacatctcccgttatcagcaacatgatttgctttaagatggacagggccctgcttaactttgccgccaattcaggctttacgtatactcgatatgcagacgatctcgtgttttcatctacaagtgcctatagcgctcgaaagatggtggatcaaggcaaaaatgtcgttgacggcattaaccggttcataatcgataccatcgagtccaatggcttcgagatcaatgagagaaaggtacatgtggcaaacagaggatccaggcagatcgtcaacggaatcattgtcaatcagaaatgcaacattcgaaggagccagtacagagaattccgcgcgttgttccatcggtggattcgcgaaggatgttcaagcgcagcggcggcctattttgggaataaaaagaaccactgctacaaggcaaaactgtgtgacggcgatgaactctgcgatgaaaagagtttcgtacgccacattcgcggtcggctagattacttctccatggttgtcggcgtgaatgggcacccaacggagcctatggctaagctctggacactgtttcatcaggccgcccatgagagagtgccatacctcacttttgagaaaagtgctgttcagttaagttacgtgtttgactctaaggagaagaatgacgcagttgccgctgaatcttctggtgtgatcgtccgtgacattctgctgacttgtgctcacggacttccagaagaatcaactgatgctaatggcgatgcggtccctatcgagattcgtactgcctttgatgagaggttctatatcaaggcctcttctttccggaaatgcagcggttttgacttcgccttcgtgctgctcgacgccaaactgggcaatatgggagtgcgctccatcaataccgcatacctgcctcaggccggcgaaaccatctacgcctctggctacgctggtgggaagatgccctcacattgcgtgcaagcctccgtcctgcccaatcggtacggaaacggtagtattgttgtggatcgtgcctttattaagggcatgtccggaggcccagtgtttaacacccgccacgaagtgataggtatagtacttaaagggtcagacgagtccagttactcgagggacggagagtttcttcctttcagcgctatcgcagacctggagcccttcgcattgcttaaaaaatga

SEQ ID NO: 8828 - RNA, 1677 nt, synthetic construct
  source 1..1677: mol_type = other RNA
atggctctcaatttcggaaaggaaacgttcagtgacaatgtcaatattacaaacagtttcctcgaaattcagactcccgaggatctagctgcacacattgaggaaaatgtcaaagttctgaaaaagtatgcctatcccggaaaacgcatcttttacagcatcctgatcatccccaagaaagatcactccccacgactaattgaggctccctgcaatgacctgaagagaattctgcggaagatcacagatcaactgacatatatctaccaacctcctgcctgcgtgcatggttttgtatgctccaagagcgtggctacgaacgcccactcacatgtcaataaatactttgtgagcagctttgacataaagaacttctttcctagcatttctgccaagagagtgcgcggactcttcaagaacatctttttttacgctaacgacaatttgatcgacctgttaaccaatctggtgaccttgcataaacacttgccccagggctacccaacctcacccattatctccaatatgatttgtctgcaaatggataagcagatcactaagtactgtaaggaaaagcatttgttctactctaggtacgccgacgacatcacaatctctgggaattctaagcggctcatctccaatattttcatcagcagcaaagcagaggatttaacgttgtgtccagatttcagtaatatcattgagtccaacggcttttccctcaactctcagaagacacacattagctttaagtcggaccggcagaccgtgacccagataatcgtcaacaaaaagtgcaacattcctcgagaggtctacagatcacttagggttctgttctataattggcagaaaaacggttggcaatatgcagcgaacgagtatgcaaaattcatatccgaccatcattacatttctttcagaaacgacgtgaattcgcctatgctcacagatgaacagctgtttaagaaacacattcgcgggaggcttgcctattacaccatgatcgacgcgcagaacagtattccgtccaccccacttaccaagctgtgggaaatgtacctgcagtgcactaaagagcacgttcctatgagcctcatagagaataacgtgttccagctagaaatcacttatgactacgaaatcgatggtaagagcaataatttcactagttcctctaccgggtttttaactgagaaaggccttttcacctgcgttcacggcttaaaggagctcaaccagaaatatgatatcccggagaacaccaacgtggaggtagcctgcctcaacaaatcactgtctcgtaaattcccaagccaaataccaatcaaggattttctgctttgtgaagaagatgacatagccttctatcggtataagaacattaaacccctgtcaaacctggtcatcaactttaattacctaccgcagataagtgaacacgtcactgggtatggcatccccggaggagagactgatgtgtaccctattgaagcaatagttgacagcttcaagcttgacaaatcatgtgtacgcatcacaccaacattctacaagggaatgtccggcggccctgtgctgaatgctcgtcaggaggtgattgggatcatactggagggctcttcatttgacgatctgagtaggtgtgggttgtttattaggctcctgtcctga

SEQ ID NO: 8829 - RNA, 1626 nt, synthetic construct
  source 1..1626: mol_type = other RNA
atgctcaatgggtttcagtccaaagccgacctggcagggttcctggacctgagtctggagaagctggatctgttcgtgaatcctacctctatgtatcagctctacagaagtaggctcgttccaaaacgctgtgggggctacagggagttgctcattccccggtctgacctgaaaaaagcccaaagaattattgcctgtgaattagagaagtcttatagtcctctcccatgtgtgcacggtttcgtgaaagggagaagcataaagaccaacgctgaaacacacgtgggcagtcaggtgatcgtcggcctggacataaaggattttttcccctcaatatctagcaagcgggtgtacggactcctgattagcaaacggctgggtttaactcccgaggtcgccttctgtatatcacgactggttgctacaccaaaggggcttcctcaaggggctccaagttcaccggtgatctcgaatatgatctgtctgggaatggacaaacagctcatgcatctcttccatgagtaccattatcagtacagccgatacgccgacgaccttactttttctttcagatcctccttctttttctatcgccacttctatagtggaggcaagttgcgtcttcccaacaagctacgaaatgctattacaaactttcacggaatcgccagcttcgagctaaatgaggacaaaagtttctacagcttttccttttcaagacagctggtgaccggcgtagtctgcaacaaaaagacgaatatcaaaagggagcagtaccgccgcttgcggtcaacactgcatcgcctctccgtgggagattgcaatggggcaatgggatgctactatggtaagtctgtcggcgaaatcaccgatgctgaaattaggatgtttgaaccatcactcagaggtagccttgactattataagtcgctgatcaaggacccttggacaagtggccccttaatgcgtttgggtagcctctacaacaacagcaagcccgaggatgccccagtcttccctgtagcgctgcaccaggattctattctttatctggagggagtcgactgtgagcaaaatccttttgaaggtctggggttctacttaaccggatacgggttggtgactgcatggcacgtcatatgcgacgcagtgagccgggacatggaatctggagagattaggatcttttcgagcaataagactcctctagccagattcatctactccaacgatctgcttcaggaaaacaaaagggatgcagcgatccttaaggatgtaccctccgaaatgattaagaacaccccgcagttatcccccaatattgatctgcctaccaagggcgagaaaattactgcctaccaacatcacttctccgaatccggattttcatttgagctgcacggcggcgaattgctacgcctcggggatcccaacgaggaaggcactctgtgctataccaactgctcatttatgcacggcatgagcggcggcccggtttttaacgggatcggccaggttatcggaatcgtgcattctgctacagagcagggcaagctgggttcctttcttccattgcgggattgcttcaggtctacggacgtttatgggaaatggatcatcttctga

SEQ ID NO: 8830 - RNA, 1626 nt, synthetic construct
  source 1..1626: mol_type = other RNA
atggtggacgagcttcaaaccaagaaggagctggctgacttcttaaatctctcccttgataagctggactactttgtctcagctgacagtttttatagtctgtaccggcaccgactagtcccgaaaaggaacggcgggtttagagagctcctgatacctaggagtgacctgaagcgggttcagcgaataattgctaagcagttggagaaacactacaagccattgccttgtgtccatggttttgtgcgaggtcgttctattagaacgaatgcagatattcatgtgggaagtcaggtcatcgtgggccttgacatcaaagacttctttccctctatttcctccaagcgcgtgtatggtctgttaaagtcgaaaaaactgggcctgtcttcagaagttgcgttctgcttaagtcgcctcattagcactccaaagggattgccacagggcgcccctagcagtcccattatctctaatatgatctgtcttggtatggataaacagctcatgcacctctcccgggagtatcattaccagtattcccggtatgctgatgaccttactttctccttcgaatcaagttattggttttaccgtcacttttattctgacagaaagcttcgcattcccaacaagattagggtggctatcaccgaattccacggcaacaagtccttcgagatcaatgaaaacaaatctttctacagctgcaactacagccgccaggtggtgaccggcgttgtatgcaacaagaagacaaacattaaacgggaacagtacagacgcctgaggtccactctgcacagactgagcataggagatgaggaaggagccatgggatgttactacggcaagtccagttccgacctgtctgaagaggaaaagggaacattccgagcctctctccgtgggtccctcgatttttacaagtcactgttaaagaacccgtggagctctggaccgcttatgagattgggcagcctgtacaatcagtccaaagtggaaggagattcagtatttcctatcgcgttgcaccaagactcaatcctgtacctggagggaattaacagcaaagacgagccctttgagggcctaggcttttatttgccctcgtatgggctgctgaccgcctggcatgtgatctctgatgccgtattcgacgatagggagaagcggaacattggcgtgaaaagcagtgccaaaatctctctggggattttctcattcggaaaatcaacagtacaaacgggtaggcacgatgcagcaatcttaaatgatgtgccaccagagatcatccagtccttccctagggtgagcgtctccacagatctccctagcaaaggtgacaaagtttttgcataccaactgcatcatagcgaaaacggctttcgcttcgacctgttggatggagaactgctcgagatcgggtcaccctcggaggaagggaccctctgttataccaattgtctattccagcatgggatgagcgggggccccgtctttaatgggatggggaaggttgtcggcatagttcacagcgccactgaggacggtaagtgcgggagcttcctaccactcagagattgcatcaattctactgaggtgtatggcatatggaaaacattctga

SEQ ID NO: 8831 - RNA, 1713 nt, synthetic construct
  source 1..1713: mol_type = other RNA
atgtgttgcttgcacatcatcttttgttatgtcagcatcaaatacgactcaacggaagagcccgccataaacttcaaggagaatctgatgctcaatgagcttcagagtaaaaccgatctggccggcttcctgggtctgtcaattgagaaactcgactttttcgttaattcctcatccatgtatgacctctacaggaataagctgatccctaaacgaaacggcggttatcgggagctcttaatacctcgtagtgacctgaagaaagtgcagagaatcatcgctaaggaacttgagaagagttacaatcccctgccctgcgtgcacgggttcgtcaagggacgctctatccagaccaatgctgagacacacattggatcccaggtgatagccggaatcgatatcaaagatttcttcccgtcaattagctcaaagagagtgtatggactactggtgagtaagaaactgggtcttacccctgaggtcgctttctgtattagccgcctggttgctactcccaaaggcttaccacaaggtgcaccctcttccccactgatttccaacatggtttgtctggggatggataagcagcttatgcacctgagccacgagtaccattaccaatacaagagatatgcagacgacttaacgttttccttcaagtcaagcttctatttttaccggcacttctgctccgaggagaaactcaggctgcctaacaaaatacggaatgccatcaccgacttccacgggaccgaaagctttgagatcaacgaagacaaatctttctacagctgttctttctcacggcagctcgtgactggcgttgtatgcaaccagaagaccaacataaaacgagagcagtacaggcgtctgcgctctactctgcatcgtctctcaaacagtgatatcgaaggagccatgggatgttattatggcaaatctatcgccaagctaacagatgccgagagggggattttccaggcagcgttgcgagggagcctgaacttttacaagtcccttattaagaacccctggacaagcggacctctcctcagactcggcagcctatacaataagacaaaacctgaggacacacctgtatttcctgtggctttgcagcaagattcgctgctgtacttagaaggcgaggatgataaagaaactccatttgaaggacttggcttttacctcactggctacggcctggtgacagcatggcatgtcatatgcgacgctgtgtctcatgatatggaacgcagggagattaaggtgtcctccagtgacaagaccccattggcaaaatttaagttcagcaagtccattgtgcaagacaataagcgggacgccgttattctgcgggaagtcccgcaggaaattctaaagaagatcccgaagcttcccgcggtcatggatttgccagtaaagggagataaaatcagtgcgtatcagcaacacttttctgagtctagatttagcctggaattgcattctggggacttgctgcgcgtgggagatccatcggaagaggggactctttgctatacaaattgctctttccagcatgggatgagcggtgggcccgtgtttaacgacttgggccaagtaattggcattgtccacacggccaccgaacagggcaaactggggagtttcctcccactgagggattgcatcagatcctcggacgtgtatggtgagtggcaggttttttga

SEQ ID NO: 8832 - RNA, 1713 nt, synthetic construct
  source 1..1713: mol_type = other RNA
atgaagtttaaaaaaatcacagccaacagacggaactttatcaagtttatttcgccgagcgacaatgaagtgtatgacttcgacacggtgaaaaagcttagccagaacagacacaactactacaaaaaggtgaagattcccaaaaagaatggcggattccgagaaattctgattgtcaacggcgaaatcaaacggatacaggagaaaattcttgagttgctgcaatctgtgtacaacgattcatctactccaaaatgcgtaaacggctttgtcaaggggagatctatatatgataatgccgcaatacacaccaacaagaagcacgtcatcaacttcgatatcaaagacttcttcaaaagtgtgacattggagaaaatcaatacatacctgtcctataagcctataagtcttccaaggaaccaatatccaaacgtattaatctcctacttgtgcacgtatgatcgctatttgccccaaggggcccccacctcccctatactgtccaacatcgtgctgaagaactttgattacgccatgatcatgctcgccaagaaacataaactcgtgtacagccgctatgctgacgatctgacatttagtggtaatgaagacattgacttcttcagtttcaagaatacagttgctcaaaagcttaacaagcatggcttcgagatgaatatgaataaatcccgcatccagtacagctggcagcgccagattgtgactggactggtggtgaataacaaggtgaacattaagtcagagttcgttgctaccactaagtctatgatttacaactgggagaattatgggatcgatattgcgaaggaaaagtttaaccagcacaggaagcattctgatgggattcattttgagaatgtgctcagaggacgtattgacttcatcggatcaatacttaatcgatcaggggaatataagaaccctgtctttgcgcagctaaatctgaagtattggatcctgctgaattgtatcgactatagctttgtctcggagaagtctgtccgagacaaactctttaatcggaattacgaatctgagaaaatcgcatacgactctagcctgtatgagtcccaggaatatcggtttatcagctattgtttcaaggtatacactcagatggagataatttacaagtactacttctacctcaggtttaatggcgatttcatgaaaataggaatgttcatgtacgataactccaagaacattcgtaagcaatttaagcgcatgtttagtgagtgcgaagacgaggacaagaaaattaaattggctaaacagcgaatcagcggcatcaagaacctcaaagaaatttccaccttcaatatcgaaagcctgttcatggatcagttatacaggaaaaggaatagatcactgcccaaattctttaacttcatacgggagattcgcaattatcatgcccacgcaggtgaaaaaatcgttaagcagacattcgaagaggtgcagtcagacgtcaagtccatcatcgagagcaaaaatctgtcagaggtgactctcgaaagtaaaaccttcaccggtgttagccacgaggaactgcggaagattaatcactaccagttttacttatggttccagtccagtccttttgacgatgttagggagattctaaaagagctagcatttgaggtaaagctcatcgaaaacagaatcaaaaagaacgcccacaatacctga

SEQ ID NO: 8833 - RNA, 1032 nt, synthetic construct
  source 1..1032: mol_type = other RNA
atgatcaccgagaaccacattcaggctctcaaagcttcaaccgatgcggacagctttgtccaagctatgatgccaggcgttgattatctgatagatagcaagaggtccaaactcgagcattcggaaatcgtcaaggtggtgaagaacttcgagttattcactagcagcgcatccatacgccgctataggaccttcgagatcccaaagaaatcaggaggttcacggaagatcgaagcgccggtcttgccccttaagacccttcagcgattaatcctgctatttctggagtccgtgtatgacgccccagcccaggtgcatggctttgtaaaggaccggtccatcataacaaatgcaatgtcacatagcaacaaagcccacgtgctcaatatcgacattgaacagttcttcaattccgttagacagactagagtgagagcacttttcaataagcatctgggcttttcgcagtatagttctcttatgctgtccaaactcatgtgtcacagagggtgcttgcctatgggcgcccctacaagccctctggtcacaaatctgatttttcaaagggcagacaagcgcattttcgccgctagtaagaagatgaacgtgacatacactagatacgcagatgacttgtctttctcttgtgattctgttgagagtctgcaccgtaccaagcgactgatcgctgtaatcattcggcaggaaggtttcaaggtcaaccccaagaaaacgcggctcttgcacagggccgattgccagtcagtgacggggttagttgtgaatgataaagtgaacgtgctgcgcacctaccggaggactactcgagctatcaatcacaggctggagatcagcattaaagagcacagcggggacaccaatatggccctcattgccgcttctgaataccatgccatgaaaacaggccaaaacgacgcccgtccccctataagtcacctgaactttattaaaggacgccaggcatttgagtacggagtactaaaaagttctcaatcccccgaagaatcctga

SEQ ID NO: 8834 - RNA, 2367 nt, synthetic construct
  source 1..2367: mol_type = other RNA
atgaagtccctcctcaccccctgctccaagaaggatactccgcctgaagatttttccagtcagctgcaacgctggctgatcttccgcccggagttcgacattaaagtgttgcaaaagcagaactgttggccaatcacagggcaacattacaagtcctttaatgttcaaaagcggaacggaagcactagacagctggtgaccgtggataagaaattgaaaagcgttcagaggaacttgcttcactatttcgagcagtactacgatgtgagtaaacatgcatacggattcgtcggcgagacagctaacttcaaggtgaacaagaaaaacctgcggactcggggcgtgataacgaatgccctggcccacaccaacaagaaagtcgtgatttctctagacctggagaacttttttccaagtattacctttccccgagtcatgggcttactgaagagcaagccattcaacttctcaaacaaagaggctgccatcttagcatctttagtttgcctccctaaagccatcgatgataagcgtggcttgccacaaggtgccccaacgagccctattatcagtaacctaatttgcaagaagcttgattaccaggttggcaaaatggcccagaagtatgatttgatctataccagatacgcagacgacctcactataagtacaaataacctcaagaggatcaatgcaaataagatcatctcactggtaagggattgtgtggagcggaatgggtttagaattaataaggaaaagaccaaggtgatgtaccgtaatcagagacagatggtgacggggatcgtcgtaaatgaaggtctgaatcttcccaaaaagaacgtggacgcgctgaaggctaccctgcacaacctggaacatgtttacaaaaacattgacgaggcagttgatggatccaacaaaaataactacgattcattcacccctctcgtgtactgtggtgtcttctacaaaggcaggtatattcgaaccatttcacgcggtcagaaatctactaaacccacatctgataaggaattcaactatatctactccagacacatattggggcgagtcctatggtatggtcaggtggtcaccactggaatcaataccccctatgatttgtccaatagaaagcatatttcccccaagcagtacagtcgcattgttaagtttgaggaaatgcttagctccctatatcggatcagcatcaaattcaactggcccattgagcatattatcttccgactgtcgaataaactgagccacctgcagtctatcgtgaaaaccaatccggagctgtccttagagagtaccgaacctaataaagacgaaattgaactaaagcaccgctttagcaatcttaaaaacactaaagaggaccgcaaacagttttttgacgactctccttcgacactcaagcgggctctcattgtggagaacaggtcccacagcctcttttcatttaaaagcatcaaaaagcacgtcgaggacggctggtatataccaaccgtacagcaggaggtgttcaaggagctcgacaccggacaactctctgacctttttcatagatctgccaatgctcaaggacacaacgtgcttaatttgattctggagatcgtcaaggttgtcaagccacgtagcaggtacctgtctgaagaagtgaaggacaaaatagtgatggtacataaggaactgttgaaactgatccggtctgaaggggagggcgtgtgtatcgaatatagcaaagaatcaacatcaacaaagcttgctattcaggctatcaacgacctgaaactgagcactcgcttgtacgaggacgatacagacaatttttacaacaggatagtcctggatgcggtgaagcagagtggcactgaacatctggtgaatatcgatagacaaggtatggagactcggctggtgaccgatataaaggcatggagagactcaatcgtgcatattctgttctctataaagcagcacgccgataaatccgaagtcggaatcggcagtcctcagcctaagccatatacaataaaattcagggaggaaaaccccattacgaatatccctcgggccgtagagatttaccgactgaatgttgacctccccttcaacaaaaagctgaatattgcgtccaacatagagtatggactgatcgataaatggcttacggggagggacttattacttgccattaaacgctttatgcccatcggggacatcttcactcacgggaactatctcgactgcgacaactttacagtaaatctcacagagcactcattcaagaaggagaataacattacacacaaaagctatggcaagctgttcatctcgctccaggagataaacaattga

SEQ ID NO: 8835 - RNA, 2361 nt, synthetic construct
  source 1..2361: mol_type = other RNA
atgcggaatctgctgaccccactatctaaaaagacatccccgcaggaagacttcttcagtctcctacagctttggctgacttcccgacccgaattcgacatcaaagtattacagaaacagaactgctggccgatcacagagcagcattataagctctttaccgtcgagaaaagaaacggaaaaacaaggactttggttacagtggacaaacaactgaaatctgttcagcgaaacctgctacagtatttcgagaagaagtacgaagtctcacaatacgcctacgggtttgttgggggaacatctaatttccaagctaacacaaaacacctgaggaccaggggcgttgtgactaatgctctggtgcacaccaacaagaagctggtcatatctttagatctggaggacttttttccaagcattaccttcccacgcgtgatgggactactcaaaagcaaaccctttgacttcagcaacaaacagagcgctatactcgctagcctgatctgcctcccaaaggggatcgatgataaaagaggtcttccccaaggcgcacccacttccccaattattagcaaccttatctgcaagaaactggactaccagctgggcaagatggccaagaagtacgacctgagttactcacggtatgctgatgaccttacgatctcgactaacaatctgaagaagataaacgcgaacaaggtaatatctattgttaaatcccacgtggagagaaatggcttccgtattaattccgagaagacgaaggtaatgtattgtaatcagaggcagatggtgacagggatactggtgaatgaaggtttaaatctgcccaagaagcaggtggactcgttaaaggctactctccataaccttgagaatgtgtacaagaacgtgaacgagtccgtgaagggagcaaacaagaacaaatatgattctttctcccctgtgggattttataagggcggctaccgcggtaggtatatccggtcaattggaaagggcaagaaaagtaacaagcctacctccgataaagagtttaactacatctactctaggcatatcctgggccgggtcctgtggtacggtcaagtggtgactacaggtattaacaccccttacgacttgagtaaacggaagtacattagtcccaagcaatatagcagaattatcaagtttgaggagatgctgtcaagcttgtataggatatcgatcaagttcaattggtcaatggaacacatcatatttcgcttctctaatagactctctcatctgcagagctccgttaaaatgaacccggaactgcttattgaacccattgagtttaacacagaagaagtcgagcttaacaaccgattctccaagttgaaaaaaaataacgaggagtgcaaggtgttttttgacaattgtccagcctctctccagcgcgcactaattgtcgaaaataggagccggtcacggttcttatacgggtccatagagaagtatatcgaaagtggatggtacatccctgccatgcaacaggaggtgtttaaagatctcgacaacggccagctgtcagatctttttcacaagtcttcgaatgaaaaagggcacaatgtccaccgtctactgctggacatggtcaagttggtcaaaccccgcatcagatatcttagcgaggaaatgaaggacaaaatcctgattgtccacaaggagttactgaagctgatgcgctcagagggcgagtccgtgtgtattgagttcgggaaggatagcgaaaagtctaagctcgcactgcaggccatatccgatctcaagctctcaactagactgtatgaggacgacaccgacaatttctataatagaattgtgctcgatgccgttaaacaaagtggtacagagaacttggtaaatattgatcgattgggaatggaggcccgtatcgtcacagacatcaaagcatggcgggacagcatcgttcatgtattgatctccattaaacagcactccgaaaaaaccgaattgaatttggggagcagtcagcagaaaccatatacgatcaagctgcgagatgaaaatcccataactcatgaacctcgcgccattgaaatttacaggctgaatgtgagtctgcctttcaaaaaagagctgaacatcaataccgagagcggcctcattagtaaatggctgacgggcagagacttgctccttgcgaccaaaaagttcatgcctatcggagatgtgttttcacatggcaacttcattgattgtgaagattttgtagtgaacctcaccacccacaattacatcaagaaggagaatatcatcagcgacgattacgggaaacttttcatctctctcgaggaaatcaagaactga

SEQ ID NO: 8836 - RNA, 2361 nt, synthetic construct
  source 1..2361: mol_type = other RNA
atgaaatcacttcagacccccctcagcaaaaaggccgtgtccagcactgatctgtcaagcttgtttcagaggcttttaactactcggcctgaatttgacacaaagagcctgcgggaacagaattgctggcccatcaccggccgtcactataaagagttcaccgtgcagaaaaggaatgggtccaccaggagactcgtcaccgtagataaacgcctcaaatctattcaacgcaatctgcagcagtacctagaacagaacttcgaggtaagtcagtacgcttatggttttattggggaagccacccagtctcataaaggtagacaggatttacgagcccggggagtggtgtcgaacgccttagcacataccaataaaaaggtggtgattagcatcgacctcgaggactttttcccgtcaattacatttcctcgcgttctcggattactcaaaagtcagccctacagcttcagtaacaaacaggccgccgtcctcgcatccctgatatgcctccctaaatccattgatgataaacgagggcttccacagggagctcccaccagcccacttatatcaaacctcatctgcaaaaagttggactaccaagtaggactgcttgccaaaaagtatgacctagtgtacactcggtatgcagatgatctgacaatcagtaccaataatgtcaacaaggtgccgcccatcaagatcctctccttagtgaaatcgtgtattgaaagaaacggtttcaaggtgaatagcaaaaagacaaaggtgatgtaccccaatcagcgacaaatggtgacggggctcgtagtcaacgaggggcttaatttaccaaagaagcaggttagttcactgaaagccacactgcataatttggagttcaagtataagaacgtcgacgatgcggtaaaggattccaataagaacaactacgattcctttaaccccgtcggctactattctggactgcatagagggcggtatattaagtctgtggcaaaaggacgtaagtccacaaaacctacaagtgagaaagagttcaactacatctactcgagacacatccttggcagggtgttgtggtatggccaagtcgttactaccggcatcaataccccttatgacctgtccaaacggcagcacatttctccaaaacagtacgttcgaatcatcaagtttgaagagatgctgagtagtctgtaccgcatctctatcaaatacgactggtctattgagcacatcatcctgaggttttccaacaagctgtcacacctaaagtcaagcctccgtctgatgcccaattacagcctcaacaccatcgagcctccacaggaagaagttgaattgaaagagcgtctgctcaacttgaagaatactcaggaggaaaggaagaaattcttcgataacgctcccacttctcttcagaggacacttacagtcgacaacaagtccagaaaggagataagttttgtgagcattaagaatcgcatcgacaatgggtggtataagccagatttccaacaagagctgttcaaggagcttgaccatggccggctgtcggatctcttccacagaagctcaaacgacaagggccacagcgtgcaggagctgctagtcgaaatcgtgaacgtcgtacgcccacgccttcggtatttatccaaagagatgcgcgagaggatcgtcaccgtgcaccgcgaattgctgaaactaatgttgtctgagggagagggggcctatatagagtatggcaaggacagctcagctaagcctattatccaggctatttcttctctcaaactggcaaccaggctgtatgaggatgataccgacaatttctacaacaagattgttctggacgccgttaagcagtctggtacggagaactatataaatatcgatagaagcgacatggagctaaggttggttacggacatcaaggcatggcgagattctctcgtgcacattctgttcagtataaagcaacatctggacaagacagagctggacatcgactcactgagtcataaaccctacactattgtgttcagagatgaaaatccaatttcaagcgaacctcgggctgtcgaaatataccggtccaatgaatctctgccgtataagaaaaagctggaaattcctctgaacagcgattccggctttctggataaatgggtgacgggcagagatttgctgctggcgattgagaagtttatgagcgtgggcgacgtgtttgtgcatggaaattttaaagactgtgacaagtacaaggtcaacctgactgaacactcctacataaaggaagacaatgctacttccaaggtttacggtaagctgttctttacattgcaagagaacaaatga

SEQ ID NO: 8837 - RNA, 2361 nt, synthetic construct
  source 1..2361: mol_type = other RNA
atgaagtctctgcaaaccccccctccctccaagaacattagccatgtggatttatccagtttgtttcagaggtggctgataagtcgtcccgaatttgataccaaagcactgcagcaacaaaactgctggcccataactggccgccattacaaagagtttgttgtacagaaaaggaatgggaatacccgccggttagttaccgtagacaaaaaactcaagtccattcagcagaatctgctgcagtacttcgagaagaagtacgaggtatctcagtacgcatacggtttcgtgggcgaagtccctcgcgtgcagacaaataagcagaatgtgcggaccagaggagtcgtttctaacgccctcgcccacgccaataagaaagtagtcattagtttggatctcgaggatttcttccccagtatcacttttcctagggtgatcgggcttcttaaaagccaaccctatggattctctaataagcaaagtgtggtactcgcctcttgtctgtgcctccctaaatcaatcgacgagaatagaggactacctcagggcagccccacaagcccgattattagcaacctaatatgtaagaagctcgactaccaggtgggccgactcgctaagaaatacgattttgtctacactcgttatgcagacgaccttaccattagcaccaataacattaacaagatctctgctaaggaaatcatctcaatcattaagtcatgtatcgaaaggaatggctttaggttaaacaaggaaaagacaaagatcatgtacagaaaccagagacagatggtgaccggaatcatagtcaatgagggtctaaatctcccaaaaaagcaagtcgacgctcttaaagccaccttacacaatttggagtacaaatataagagcgtggacgaggcggtgaaagggagtaacaagcataactacgatagctttaatccagtgggatactatcgagggctgaataaaggccggtatatcaaaagcattagcaagggtcgcaaatctacgaagccgacttccgacaaggaattcaataagatttattcccgacacatcctaggacgtgtgctgtggtatgggcaggtcgttacaacggggattaacacaccctatgacctgtcaaaccgtaaacacatttcgcctaagcagtactctagaataatcaagttcgaggaaatgctctcctcactgtacaaaatatcttccaagttccactggaagatggaacacatcattcatagattctctaataagctcagccatctgaaaagctcgctgcgcttgatacccgatttctccctgtcatccctcgagctgaacagtgaggatatggacctgaagactaggctccctacactgaagtctactttagaagagaggaaggacttcttcgatctgtgcccaaaaagcttgcaaaggacacttgtcattgacaacaagtcccgaaagaaattcaagatctcctcccttgaaaacagaatcaacaatgggtggtataagccagaagtgcagaaggagctgtttaaggagctggacaacgggcggctgagcgatctgtttcatagatcatccaacgaacagggacactcagtgcaggatttgttgtttgaaatcattgactcggtccgcccccgactgaggtatctgagcgaggaggttaaagagaaaatcgtggtagttcatcgcgaactgcttaaactcatgttgctggaaggcgagaattcccacattgagtatggtaaagacagttcaacaaaaccagctattcaggcaatcaatgatctgaagctgagtaccagactgtacgaggacgacactgataatgtgtacaataaaatcgtgcaggctgctgtcaaacaaagcggcactgagaatctaattaacattgatcggtccgacatggaaacccggcttgtgacggatatcaaggcctggcgggacagtctcgttcacattttgtttagcattgaacagcacgccgacaaaaccgagcttgatagcgccgccctgcaccagaagccgtatacagttgtgttcagagacgagaaccctattacccaagagccacgcgcaatcgaaatataccggttgaacaaagacctcccatttaagaaaaacctgaacatcgcgcctaattcatcctctggcttcatcgataggtggcttacaggccgggatatcctcttagcgacagagaagttcataagtatcggtgacgtgtttgtgcacggaaacttccgcgattgcgagtgttatacggtcaacctaactgaacattcttacatcaaggaacagaaaccaaactcctcaaactatggcaaactgtttatctctctgcaggagataaaatga

SEQ ID NO: 8838 - RNA, 2406 nt, synthetic construct
  source 1..2406: mol_type = other RNA
atgaagaacctcagcataccttcccccaagataaaccctacacaggactcattcctgtccatgttttttaggcagtttgatagtaatcccgaattcgacaccactgttctgaagaagcagaaatgctggccaatcaccactgagcactatcgaccctttacaatcaggaaacgtaatgggaccctgagagaactcgtcacagtcgacaagaacctgaagaaaatccagtccaacctgttgatatacttctctaagaactacgaggtcagcaaatacgcccacggctttgtggcaaaagagattgaaaatcagtttcccaacaacaaagaagaatatttggtggggggcagactgagggcgaaaggagttatcaccaatgctctcagccatactaacaaaaaagtggtgatctcactggacttaaaagacttctttccctcaatcacttttccgcgtgtaatgggccttctaaaatccaagtcattcgactatagcaacaaacaggctgctattctggccacactcacctgtctgccgtcatccgtagacacgaagcggggtttgccacaaggcgcgccaacctcccctatcattagcaacctcatctgcaaaaagctcgattatcagctgggaaaaatagccagtaagtatgatctcacatatagtcggtacgcggacgaccttacctttagcaccaataatctgaaacggatttccgccaataagattatctcccgcgtcacagagtgcgtgaagcgaaacggcttcgtgattaacaatccgaagacgaaaataatgtacaacaaccaacgccagatggtcactggtattatagtgaatgacggactcaatttacccaaaaaggaggtggatgctattcgcgcaactatccacaacctggagaataaatataaatccgtggatgacgctgtaaaagggtttggaaagctaaagaacaagaatccttacgatagcttcgtcccactggggtattacacggggggctataaaggaaggtacattaggaatgcccgcaagggcaagaaagcaaataagccaacaaccaataaggagttcgactcgatatatgctcttcacattttaggacgtatcctttggtatggccaggtggtgacaactggagtgtctactccatacgacctctcaaagcgaaagaatattagccctaaacagtattcccggattaacaaatacgaggagatactggcctctttttatagagtttctatgcgcttcaactggcctgtggagcatatcatcttgcgactggccaataatctgcctcatcttcagagtctggtgaagatgagtccacagttcctgctagagccaatctttttaaatagcgaagagacataccttaagaattcgatcagcaagctcaagaaagagaaatctgactacatcaagtttttcgagtctgccccagagagtcttcaacgagtcttagtggtagagaattgttctcatgacaacttcatcttcaacaccattaaaaagtgtgtggaaaaaggttgggaggttcccagcattcagcaggagctgtttaaagacctgaacaccggtgatttgtcagatctgttccacaagagttacgacagtaccggccattccgtgaaaaagcttattatcgacctggttagagtcgttaaacctagactcagatacctgagtagttccatccagaataagatcatcctggtacacaaggaactgctcgatttgatgcggtctgaaggcgaggacgtgcggatagagtatgggaacgaatccacaaagaccaagcaagctttgcaagccattagagatcttaggcttgccgttcgcctgcacgacgatgacacctataacttttacaacaaggttgtgctagaagccgtcaatcggagcggcacgtctgatctcgtgaatattgatagggatgatatggagtgtagaatggtgtcagacatcaacgcttggagagatagcctgactaaagtgttgatgtctatcaaacagcacgcagatacaacggaaaaagagctatcgccctcacagcataagccctacactatcaaattcaaagatgagaaccccatcaatggtgagtctcggagggtagaaatttaccgcctggaagtcaccctgcctttcaaggagaagctcgaaatcgataccgattttaacgaaggaatcatttctaagtggaaagtggggggagattttaactcagcaattaagcgctttctcgcaattggggacatcttcgttcatgggaacttcatagactgcgaaaattgcacagtcaacttcactgagcacagctacaagttagaaaagaatatcgtcaggaagaaccacggcaagttgttcatttccttccaagaaataaagagcaagtga

SEQ ID NO: 8839 - RNA, 2388 nt, synthetic construct
  source 1..2388: mol_type = other RNA
atgacgaccaagttttctcacccacagaagagaaacttcaattctttcattaggctcaacttcttctcaactaacgcccctgagttctcaactaccgaactaaaaaagaataagtgttggccgattacagaaaaacactacaagagtttcacgatcactaaacgaaataaaacagagcgcgagctggtgactgtggacaagaacctgaaggttatccagagcaatttatacgacttcttcaaacagaagtacaacatcagcaaatacgcccatgggttcgtagctaaagatcctttaatcttgtctctcctgaaagagcaagataagccactgcgcagtaagggcgtgataactaatgcactgtcacacacaaataagaaagtggtgattagtcttgacctgaaggatttttttcccagcatcactctgcctagagtgatcggccttttaaagacgcagccttataacttcagtaacaagcaggcggcgatcctggcatcgcttatttgcctccccaaaaacatcgacaaaaaacaaggtcttcctcagggtgcccccacatccccgatcatcagcaatttaatatgcaagaaactggactatcagctcggcctgatttctaagaagtacgatatcacgtataccaggtacgccgatgaccttaccttttcaacaaataatctgaagaggatatccgcaaccagaatagttgagaaggtcgctgagtgtgtgaaacggaacgggttcaagattaacgacagtaaaaccaagattatgttctccaaccaaaagcagatggttaccggtatcctggttaatgaaggcctgaacctgcccaagaaggacgttgacgctctccgcgccaccctctataacctggacaaagtgtatacttctactgacgatgcagtaaaggggttctggaagttgaaaggcaagaacccttacgacacctttaccccagttgggttttacctaggtgggtttaaaggaaggtacataaaatctccctcaaaaggcattaaaagcactaagcccacaatcgagaaagagttcgaaaaaatatacgcccagcaccttttaggccggatcacctggtatggacaggtggtgacaacagcaattaacaaaccttatgacttggtgaagaaacagcacataagcccaaagcagttttcgcggattaagaaatacgaagagatgctcgcaaccttctatcgaatctccatcaagcgaaagtggccaattgaacacattgtgctgaggagagcctacaatctcccacacctccagtctctgatgaagatgaatcccatttatcttctagatgcaactttcctcgatgagaataaggaaatcgagcagttgaaaaacaaggtgtctgagctcaaaaccgacaaggaaaaatataccgaattctttcgttccgctcccaggagcctgcagcgcgtactcagacatgagaaccggagccacaacaatttttctctggagagcattaagaagttcaccaattttgggtggcaggatcccattaagcagaaaaaagtctttaatgccatcgacaacggcgagctgagtgatatctttcatcaatcaatcaacagagatggggataatatcaaggagactatcatcaagttcgtcacagtggttggaccacagctaatttacttgtccaaggacgtgaagaataagctcatcaatgtccataaggaattgctggccctgttaattagtgaaggagagtccttcaacatagatttttacaaagagaacccaaagacagagcaagccttgcaggccgtgcgcgacctgaaatcagctattcggctttatgaaggcaactccgaaaacttttacactaagattgtactggaagctcttaaaataaccgagactatcgatatggtcgctattgacaagagagacatggcccctcgtatggtgacagacattaatgcttggaggaatgctctgattaaagtgttgatgtccataaagcaacataccgacgaaacagaaaaacacagcaacgcccagaaacaaaaacccttcaccataatgtttcgcgagcacgatgacgatgaaaacatcacaacggcgatcgagatctatcggctgaattccgagctcccgttcaaaaaggagctaaaaatagatactgaggtcaagaatggcaatgtaaaaaaatggaagacgggaggagatcttaagtccgcggtcagcaactttctgagcatcggagacatttttatccatggtaagttcaacgattgcaaggatatcacctttaatctgacagagcatgtctataaagtcaataaggagatcaaggaaaacgaatacgggaaattgtttattacactcgaagagctgaataactga

SEQ ID NO: 8840 - RNA, 2397 nt, synthetic construct
  source 1..2397: mol_type = other RNA
atgaacaagacatctatctcaagcccaaaggcaaagacggtggacctaaaatcaattttcatggccttcgagaaatggagatctaatagacctgagttcgacaccgccgctctgcgcaaaaggaaatgctggcctgttaccgctaagcattataagaaattcaccctcaagaaacgcaatggaagcatgagacaactcgtagtggtcgacaaaaatttgaaggagattcagagctctctggccatccatttcagccaaaactataaagcaagtgagtacgcatacggattcgtggccaaggagagtgagcttacggccgccaagacccagccagagctttctctcgataaactaaggccaaaaggtgtcatcaccaacgctctcgctcataccaataaaaagctggtcatatcgatggatctgaaggagtttttcccaaccataactttccctcgcgtgatgggattgttgaaaagcgaaccctataaatttagcaataaggaagcgtctatcttggcctccatgatctgtctgccaaaggaaattgatgacaagcggggccttcctcaaggggcgcctacatcccccattatatccaacctgctgtgtaagaaacttgactttcagttaggccgcatagcccagaagtacgatttgaattacactcgttacgcagacgatctgacattctccactaataacctgaaacggatttccgctaacaagatcattcatgaagcgacgaaatgtgtggagcgtaacggctttcacgtgaatgtcgacaagactaaagttatgtacagcaatcagagacagatggttacaggaattctggtgaacgaaggcctaaatctgcctaagaaacaggtggatgcgattcgggccacactccataatctggaaaagaagtataagaccgttgatgagagcattacatctttctggaagattggcaaaaagaactcctacgattccttcgtcccactgggctactacgccgggggatacaaggggaggtttatcaaatccgcctctaaaggttataagggaaataagccaactaccgaaagggagtttaactacatttactcaatgcacttactggggcggatcctttggtacgggcaggttgtcacaacatcgatcaatgagccctatgaccttaagaagagaaaattcatttcccctaaacagcactcacgcataatcaagtttgaagaaatgctcgtgagctattaccgcatctccattaaatacaagtggccggtggagcatataattctgcgcctcgctaacaaattgccccacctgcagtcattaatcaagatgaaccccggctttctgctggactcattactgctgtctgtggaggagcacgagcttatagaacggtttcgaaagttagggcgagataaggaagagtataccaggtttttcaagagctccccccctgatctgcagagggtgctacgggtcgcaaatagatcccataacaatttctcacactcaactatcaaagagtgcgtcgagaatgggtggcaatttcccaacaagcagcaattcctttttaacgagctgaacactggcaacttgagtgacctgtttcacaaatctctagacaagaagggacacaacgtggagaagctgctctccgatctcgtccttgtttgcagaccccggctgcgatatctgagccccaacattaagagcaaaatagtggctgtgcacagggaactgttggatctcatccgaaccgagggtggagatgtgtttatcgatctcgagaacgaaactaaaaaaaccgaactggcactccaagctatcagggaccttaaaagtgaaatccgtctgtatgacggtgattctgacaacttctaccagaaaattgtgcgagtagcactgaaccggagtggcgactctaacatctttgccatcgacatggatggcatggcaagtcgcatggtaacagacattaaagcttggcaggatgccctcacaaaggttctcatcagtattgtacagcacacgaagtcacttgacgataaggcccagggtcaggccctctatactattaagttcagggatcgtaatcccatcaattgcaagccgagagctatcgaaatctaccggctcaattatgaactgccattcaagcagaaactggacatcgacgccaatagcaattgtgggcaggtgatgaagtggctaaccggaggtgacctgaccctcgcaattaagagctttttaagtgttggcgacatcttcgtgcatgggaaatttttggattgcgacgatgtaactgtcaacttgacggagcaccagtatatcagagaaaaacacgaaccgatagacaaactgggcaagttattcatcacattgcaagagatatcggagtga

SEQ ID NO: 8841 - RNA, 1239 nt, synthetic construct
  source 1..1239: mol_type = other RNA
atgaacaatgccagtatcagctctcataagccaagcaatagggacctggattcaattttcatggcgttcgaaaagtggctcaagaataggcccgaattcgacacggccatcttgcgaaagcgtaaatgctggccaatcaccgccaagcactacaagaaattcaccataaagaaacggaatgggtccaatcgtgaactcgttgtggtggacaagaaccttaaagagctgcagtccaatctggcagcctactttgcacagaactatgaggttagcgactatgcctacggctttgtaccgaaagagcctgagcggagaattggcggaaaggaacagtccgagcttctggtggagaagttaaggcccaaaggtgtaataacaaacgcactgtctcatactaacaagaaactcgtgattagcatggatctaaaggatttttttcccactataacgtttcctagggtgatgggtctgctgaaaagccaaccctacaacttcacaaacaagcaggcttcaatccttgcttccatggtgtgtctcccaaaagatgtggacgataagagaggactccctcaaggcgctccaacctcgccgatgatcagtaacctgatctgtaaaaaactggacttccagttggggaaaatggctaagaagtatgacgtgtcttacactagatatgcagacgatctgacctttagtaccaataatctgaaacgcgtgagtgcgaacaaaattgttcacgaagccaccaagtgcgtggagagaaatggatttcgggtcaatgtagataagacaaaggtcatgtactcaaaccagcgccagatggtgactggtatcctggtcaacgaggggctcaacctgcctaaaaagcacgtagactcgattcgagccacccttaataacctggaacacaaatataagtctgtcgatgaagccgttgtcggcttctggaaaattgggaagaagaattcctatgactcattcgttccactcgggtattatatcggcggctacaaggggaggtacataaaggccgtgaacaaaggctttaagggaaacaagcccacaagcgataaagaattcaataaagtctacgcactacaccttttgggccgcatcttatggtacggacaggtcgtgacaacttctatcggagagccttacgctttgacaaaacggaaatatatttctcccaagcaacattcccgcatcattaagttcgaggagatgttagctagctga

SEQ ID NO: 8842 - RNA, 2424 nt, synthetic construct
  source 1..2424: mol_type = other RNA
atggctcagctgctgaacatgaacaatatccaaaaggatcctagtcaggataagaacacaactgtggactcttttctggagatgtttgaacgatggcttctgacacgcccagagtttgatatagccgccctgggtaaacgtaagtgttggccaattacatctgggcattatcacaggttttccatcaagaagcgcaacgggtccaaaagagagctggttagcgtggacaagaaccttaaggccttacaagccaacctcgccacttactttgaagaaaccttcgagatctctaagtacgcacacgcttttgtgccaaaggaaagtgcagataaggctacctttaagcagcaggaaggactgctcgtgaataaattgaggcccaagggggtcgtctcaaatgctcttgcccataagaacaaaaaagtggtgatcagcatcgatttgaaggagttcttccctaccattaccttcccccggattatggggatgttgaaaagtaaaccctacaacttctccaataagcaggcggcagtgttggcatcgttaatctgcttacctaaagacatcgacgacaaaaggggtcttcctcaaggggccccaacgagcccaatcatgtccaatcttatctgtaaaaagctcgactatcagctcgcgaagatggccagcaagtatgatattacgtatacccggtacgcggacgatctgacatttagcaccaataacctaaagagaattcccgccaaagagatagtgtcaatcgttaccaaatatgtggagagaaacggcttccaggtgaacacaaccaagacgaagatcatgtttaaaaatcaacggcagatggtgacaggcatacttgttaatgagggtctgaaccttcctaaaaagcaaatcgatgccctgcgagctaccttatacaatctggagcatgagcacaattccgttgaagattcagtgattgaattctgggggctcaaaaacaaacagccgtacgactctttcatccctgtcggattttataacggaggctaccgcggaagatttattaagagcaacaagaagggcgtcaaggcccacaagccaacctccaagaaagagttcgataaaatttatgccctacacttgttgggccggattctctggtacggacaggtagtcacgaccactatagacgccccttatgatttgtccaaacgccagtacattagccccaagcagtttagcagaatcaacaagtacgaagagatgctcgctagcttttaccgtatttcaatcaagttcagttggcctgtgcagcacattatcctaagactggctaataaactgccgcatctgcagagccttgttaaaatgaagagtatatctgagctggatccaaccattctcgacgaagtggggatcgaattacacggtcaggtcctgaaattgcggacagagaaagagaaatacaccgaattcttcaattccgctcccctgagcctgcaacgggttctccgagtccacaaccagtcacatatcaatttcgacctggacattataaagaaatgcataagcagtggctgggaggaaccctttaagcagcagaaggtgttcaaagaaatcaacaacgcggacctgtctgacctgttccacaagagttctaatcgtaaaggccacaacgctaaaaaactgctgaacgagatcgtgcgcgtggtgcagccacaaactaggtacttgtcagataacgttaggatcaagattactaaggtgtattctgagttactcacactcattagacttgaaggcgattcagtatgcatagacctggaaaacgagaatacaaaaaccgaacaggcccttcaggccatccgcgatctgaagtcagagatcaggctgtatgacaatcataccgacaatttttatcagcgggtggtgctgcccgcagttaagaattcggagacatccagtctggtagccattgacaaaaaagatatgaatcccagcatagtgactgatattaatgcatggcgggtagcactgacaaaggtcctaattagcatcaaacagcactgcgacaagacggagctgatggaggatacctcttcccatcgaccgttcactatcacttttcgagacgataatccagttactggagctcctcgcgtcatcgaaatccataggctcaacctagacttgcccttcaagaagaagctcgaagtagatacaactatggtggaggggaaggtcatgagatggcttactaacggagatctctcctccgcagtcagggagttcctacccattggtgacatatttgtccacggcaacttcaaagactgtgagaacgcaaccgtaaatctcacagagcatttctacaagattaatgacgaactgaaggtgtcggactacggcaaactctttttctctctgcaagagatcaaagaatga

SEQ ID NO: 8843 - RNA, 2424 nt, synthetic construct
  source 1..2424: mol_type = other RNA
atggctcagctgtttaatatgcagaacatccaggccggcagcagcaaaccaaagaacacaaatttctctagtttcctgaaactgttcgaacactggttgaaaactagaccagagtttgacattaagacactcaaggagaggaaatgctggcctatcaccgcaggtcactaccatcggttcagtataaagaaaaggaatggctccaagagggagctggtgagcgtcgataagaacttgaaagagatgcagagcaatctcgcaacctattttgagaaaacgttcgagattagcaaatacgcttacgccttcgtgcccaaggagtccgaaaagaaggcgactattaagcagcaagagacactccttctcgacaagctccgaccaaagggggttgtctctaacgccttagcccaccagaacaagaaagtcgtaatttccatcgatttgaaagacttcttcccaacgatcacttttccgagaatcatgggcatgctgaagaccaccccctacgatttttccaataaacaatctgccgtgttggcctcccttatctgcctgcccaaagacatcgatgagaagcgcggtcttcctcaaggagcaccaacttccccaatcatttctaaccttatctgcaagaagctggattatcagctggctaaaatggcacggaagtacgacattacttacacacgttatgctgacgatctgacctttagcaccaacaacctgaaaaggatcagtgcagaagagatagtgtcgtccgtgacacagtatgtcgaaagaaatggcttcaaagtgaacgagactaagacaaagatcatgttcaagaaccagaggcaaatggtgacttccatactggtgaacgaaggcttaaatttgccaaaaaagcaaatcgatgccctgagagctacactacataaccttgagcatgagtacaatagtgttgaagaggctgtcaatgagttctggagtctgaaaaataagcaaccgtttgatagtttcatccctgtggcgttctatcccggaggctaccgcgggagattcatcaagtctaataagaaggggttgaaggccaacaaaccaacccccaagaaagaatttgacaagatctacgccctgcacttgctcggccggattttgtggtacggtcaggtcgtatcaaccactatttctgtcccgtacgacttgtctaagcgacagtacatctctcccaagcaatattcacgtatcaagaagtatgagcagatgctggcgtccttttaccgcatttcgattaaatttaactggtccgttgagcatatagtgtttagactggctaataaactgcctcatctccagtctctgattaaggtgaagtcaaaatcagagctcgaccctacaatcctggacaaaattggcaaggagctgcagggaaaggtgagccggctccgctctgagaaggaagagtataccgaatttttcaattctgcccctcgttcgctgcagcgagtgctacgggtacaaaaccagtcacacattagttttgacctcgacaccctaaaaaaatgtgtggaattcggatggaacgaaccccttaaacagaagaagctgttcaaggagataaatacgagcatgcttagcgacttatttcacaagtcctcaaacgggaaaggccacaatgcggagaagctcctcaatgagatcgttagagttgtcaagcctcaggtacgctacctgagcgataacgtcagggttaaactgactaaagtgcacagcgaattactcaccctagtgcagctggaagggaaaaacgtgtgcatcgacttagagaacgaaaatattaagaccgagaaagcccttcaggctatccgggactttaaatcagaggttcggctctatgataacgacacggataatttttatcagaaagtggtccttcctgcagtgaaatcaagcgaaacttctggtctagtaacaatcgataaaaaagacatggacccctcaattgtgacagatatcaacgcatggagagaagctctaaccaaagttctgataagcattaagcagcattgtgataagaccgagctgatggaagacgcatccagtcacatgccctttacaataaaattccgcgacgaaaatcccgtgaacggggccccaaggacagtagaaatttacaggctcaacagtaagctgccttttaagaagaaactcgaggtcgatacagccatagtcgagggaaaggttatgcgatggctgttcaatggggatcttagctccgccgtgcgcgaattcttacctgtaggagatattttcgtgcacggaaagttcaaggattgtgaagacgtgaccgtcaatctgactgagcatttttataaagtggacaaaaccttgaaggttaatccgtatggcaaactgtttttcacgctgcaggaaatgaaggaatga

SEQ ID NO: 8844 - RNA, 2376 nt, synthetic construct
  source 1..2376: mol_type = other RNA
atgaacaataagcgcaccgcaaagaataataacttcctcgcatattggctgggcattaaatctcccgagctggatatcaaggtcctaaagaacatcaagtgctggcccattactgccaaccactacaaccgattcaccattaaaaaacgtaatggctccaagcgcgagctggtcagcgttaacaaaagcctgaaaactgtgcagtccgatcttgccgagtacttcgccgtgacctatggcatctcaaagtatgcccacgcgtttatctctaaggaacctgagacactcagcgtgttttcacaggaggcaatcctggttgacaaactgaggcccaaaggaatagttagtaatgctctcccacataccaacaaacgtgtcgtcatatcactggatcttaaggattttttccccacaataacgtttcccagagtgatgggaatgctcaaaggtgaaccatataacttttccaacaaacaagccgcagtcattagtagcctgatatgcctcccgaaagatattgatgaaaatcaggggcttccccaaggcgctccaacatcgcctgtgatcagcaatctcatttgcaacaagttagactaccagttgggaaagatgtccaagaagtatgacattacctacactcggtatgctgacgacctgaccttctccacaaataacctcaaaagaatttcagctgaagaaatcgtaagccttgccactcaatacgtggatcgaaatggctttaaggtcaatgaggctaagacaaagatcatgtttaaaaaccagcgccagatggtgacttcaatcttggtaaacgaaggtttgaacctacctaaaaaacaggtcgacgctctgagggcaacactctataatctggagaacacgtataacaacgtggaggatgctgtggacaagttctggaatatgaagaataaaaaggcgtacgactccctggttcctgtggggttctataaaggcggttatcgcggtcgctttatcaaatccaagaataagggcttaaagggaaacaaacccgtgtctaagaaagaatttgacaagatttacgccctgcatcttctcgggagaattttgtggtacgggcagattacgaccacagcaatcaataccccctacgacctttcgaagaggcaatacatttcaccgaagcaacacagtaggattaacaagtacgaggagatgctcgcagctttctaccgcatctcgatgaaattcaattggagtgtagagcatatcgttctacggctggccaacaaactgcctcacttgcagtctctggtcaagatgaacccaaactttctcctggaacacatcctgttggacgacctcgagttagaattgcgagataaggtttcaaagctgaggattgagaaggaaaagtatacggagtttttcgatagtgctcctagaagtctgcagagggtcctcagggtctttaatagaagccacaatagtttcgccctgaataagatcaagtcctgtgtggaatcaggctggccagttccgttaaagcaacagatcctgttcgagaagcttgctacagaagaactcagcgacttattccataagagcactaacattaaagggcacaacgtaaaaacactgctggaagacatcgttaaagtggtaagacctgagttgatttacctcagcgacaatgtccgggtgaaaatcacccgggtgcatagagaattactctccctgatgcgcacagagggagatggagtgtgtattgatttcgaaaatgaaaccgcgaagactgagcaggccgttcaggcgatccgggatctgaagtctgaggtgcgactgtacgagagcgatatcgacaacttttatctgaagattgttctaccagccgtaaaaaactctagaaccctgaatatagtggatatcgacaaagatgacatgaatccatcaatcgtgaccgacatatatgcctggcgggaagcccttaccaaagtgctcatctccattaaacagcatatagacaaatccgaaagcattggcaatagctccgggaagaagcctttcctgatcaagttgcgtgacgagcaccccacaagctctctgcctcgggccattgagatctaccggagggacgtggagcttccctttaacaaaaagttggatatcgacgtgaattctgcagagggcaaagtcatgaagtggcttactgggggtgatttgtcttctgccgtgaaagcatttcttccaataggcgatatatttgtgcacggaaatttcaaggattgtgagaacgtgactgtcaacctgaccgaacatttctacaaggtagaggacaatctggagatcagtgggaacggaaaactattcttctctctacaggagataaaagaatga

SEQ ID NO: 8845 - RNA, 2376 nt, synthetic construct
  source 1..2376: mol_type = other RNA
atgaacaacaagcgcaatgtgaagaatatcaacttcttctccttttggctcggcatcaaagaccctgagttcgacattaagaagttaaaagacatcaagtgctggcccattaccaagaaccattataatccgtttacgatcaaaaagaggaacggctcaaaacgcaacctcgtgagtgtcaacaagaacttgaaaacagtgcagtccgacctcgcagagtatttcaccaaaaactacaagagctctaagtacgcacatgcttttatctgtaaggaaccagagtctctgagcattctgaagcaggaagcgttactgatcgacaaactaagaccaaaaggcataatcagcaacgccctcgctcacaccaacaagcaagttgttataagcctggatctgaaggactttttcccttctattacatttcccagggtcatgggaatgcttaaagggcagccttataatttctccaataagcaggctgccattattgcctccttgatatgtctcccaaaagggatagacgaaaatcagggactccctcagggtgctcccacttcaccagttataagcaatctgatctgcaacaagctagattatcagctgggtaaaatgtccaagaagtatgacatcacctatactcgatacgccgacgatctgaccttctctacaaacaacttaaaacggatctcagccgataagatagtttccctggcgactcagtacgtagatagaaacgggtttaagatcaatgaggccaagacaaaaatcatgtataagaaccaatgccagatggtcactggaattctggtgaatgaaggcctcaacctgccaaaaaaacaaaacgatgcgctccgtgcaacgctgtacaacctggaaaacaaaaacaacaaagtggaggaggctgttgcaaaattctggggaataaagtcaaagcaggcctacgatagtctcgtgccagttggtttttataaatggggctatcggggcaggttcattaagtctaagaacaagggcctgaagaccaccaaacctgcactaaaaaacgagttcgataaaatctacgcactgcacttgcttggtcgcatcctgtggtacggtcaggtggctacaaccggcattaatactccatacgatctttctaagaagcagtatatttcccccaagcaacatagcaggatcaataagtatgaagaaatgcttgccgctttttaccgtatcagcatgaaattcaactggtcagtagaacatatagttctgcgccttgccaataagcttccccatctgcaatctcttgtaaagatgaatccgaatttcagcctggaacatatccttttagacaagctggaattggatctccgggataaggtcagcaaactgcgcaacgagaaagagaagtataccgaattctttttcagtgcccctcggtccctgcagagagtgctcaaggtgagcaacagatcacaccacaatttcacactgatcaagatcaaaagctacgttgaaagtgggtggcctgtgcccctgaagcagaaagcagtctttgatgagattgccaccggagacttatcgaatctctttcacaagtccactaacataaacggccacagcgtgaaaaatctgctgaaagatattgtgaggatcgtccggcccgagctgatctatctgagtgataatttccgaacaaaaatcacacgtgtgcaccgagaacttttgaacttaatgagaaccgagggcgacggggtatacattgacatcgagaatgtgacaccaaagactgaacaggccgtgcaggctatcgtcgacctaaaatcggacatccggttgtttgagaatgacattgacaacttctacttgaagatcgtcctcccagccgtgaaaaattccggaactctgaacatggtcgacattgataaggatgatatgaatcccaacatcgtgacggatatttacgcgtggcgcgaggccctgacaaaggtcctcatttcaattaaacaacactctgacaagtccgagagtatagggaacatacaggggaaaaggccttttattattaagttcatcgacgagaacccggtgaatggctcacccagagctatcgagatttacagaaggaatattcaacttccctttaacaagaagctcgagattgacatcaatagttcggaaggaaaagtggataaatggctcaccgggggagacttgtcttttgccgtaaaggagttcctacctattggtgatatatttgcacacgggaattttaatgactgtaataatgctaccgtgaatttgacggagaatttgtacaaaatcgatggcaagttgaaactgaatgacagtggaaagctgttcttctctctacaggagatcaaagaatga

SEQ ID NO: 8846 - RNA, 2391 nt, synthetic construct
  source 1..2391: mol_type = other RNA
atgaagaccactccgattttgagttctaaagttgactctgacgacaagtttccattcttctccatattggaatcgtggggggtcaattctccagagttcgatacagttgtgctgaaaaaactcaagtgttggcccgtcagcaaaaagcattacaaaccattcaccattgaaaagagaaacggtactgagagacacctcgtggctgtagataagaacctcaagctgatgcagcagagactcgccgtttactttgaacgcgcctatccagtatctaaatacgcccacgcattcatacctaagaggagtaaatttgcctacgagctcaattcatccccccagattaggcccacaggcgtcataactaacgccctggcgcacaccaataaaaaggtggtgatcagtatagacatcaaagacttctttccgaacattaccttcccacgcgtcctggggcttctaaaaagcaaaccctacgatctgagcaataggcaagcagctattcttgcgtccttaatctgcttgcctaagggaatcgatgaaaacaggggccttccacagggtgctcccacctcacccatcatcagcaatctgctgtgcaagaagctggataatcaattgggtgccttctccaaaaagaatggcatcacttacactagatacgctgatgatctcacgttctccacgaataacttaaagcacataagtacgtccaagattgtcgagcacgtgacaaatttcgtggaacggaacggatttaacattaacaccctcaaaaccaaggtgatgtataagaatcagaggcagatggttactggcattgttgtgaacgatggattgaacctgccaaagaagcaggtcgacgcaatccgagccacacttcataatctggagcacaattataagagcgtaagcgaggccgtatacgacttttggctcgtgaagggcaaaaatgcttatgatcagttcgtgcccctggacttttaccctgggggttacaagggtcggtacatcaagtcaaagaataatggcgaaaagcgtaataaacccacttccgacattgagtttaacaagatctacgccctgcatatcctggggagaattctgtggtacggacaggtggtgaccactgcggtcaacgaaccttatgatctcagcaaacggaagtacatttcccctaagcaacacttgcggatcaataaatatgaagagatgttggccactttctatcgcatcagcatgaaattcaactggcctattgagcatatcatcctaagactcgccaataaatttccgaatctgcagagcttggtaaagatgaaccccatgttcttacttgagccagtgactttagacgctaacgagctggccatcaaggacaaagtcaactctcttcgttctgataaacttgagtacacggcattttttgaatcagcccctgattcgctgaaacgggtgctgcgcgttgagaacaggtcccataccaactttgaccttaagaacattaagcagtgtgtggaatacggatgggagacaccaaccaaattgagggaagttttcaatgaattcgataacgggaagcttgctgatctctttcacaaatcaagtgatagaaaggggcacaaagtcgtggacctgcttaaagagttggtgtctttcgtgaaaccacggatccgctactttcccgcaagagtcaaacgtaaaattatcgtggtccagaaggaattactccacctaatccgggccgagggagaggaggtatatattgacctggagaacgaaaccacggttaccaaaaaagcatctcaggctatcagggacctgaaattcgcaattcggctatatgacagtgacacagataacctgtataatagagtggtcctggaagccatcaaaagctccgataccctcgagctgatcaacatagacaaggacaatatgaatccccgaatttataccgatatagacgcatggagggagtcactgacaaaagtgctgatctctataaaacaacacacacatgatgatgaacgcgtgatagaccagaagcaactaaagcccttcactatctgttttcgagaagagaaccctctgacaggaagcccgattgcgattgagatttataaggccaatagtaagatccctttcaaaaagaagctgaacatttcggaaaaatctaactcagggctcgtgaataagtggatcaccgggggcgacttacagcgagctgtgcgagattttatgcctgttggcgacatctttgttcatggcgactttatagactgcaagaacatcaccgtgaatctgacagagcacagctataagaaggagaagacagtctatcataacaagtacggcacactcttcatttccctgcaagagcttcgcgcttga

SEQ ID NO: 8847 - RNA, 2409 nt, synthetic construct
  source 1..2409: mol_type = other RNA
atgaagaagaacaatcagaagaaagtgaaagaagagtcagctacagatttctttgactttatcaaggacttgctggcgcgcagaccagagttcgatacaaaaaaactggccgataaaggttgttggcctattagtaaatctcactatcaccacttcagtattaagaagcgaaatggttcttaccggcagctcgtgaccgtcgactatcgtctgaaagagtttcagtcaaatctgaggaggtacttcgagaaatacttcactatttcgaagcacgctcacgggttcgtgtctacatccacaagccaggtgggcgccactgacctggaaaaggagtttttgtctgaacttaaccggcctaaaggggtggttacgaacgcccttgctcacacgggtaagaaggtggtcattagcatcgaccttaaggactttttcccaagtattacatttccacgcgtattgggaatgctgcgaaagtcaccttacgatctgagcaataaacaggcagcagtgattgcctccctggtttgtcttccgaaagatatggatgaagatcgcggacttccccaaggtgctccgacctcccccatcatctctaatctcatttgcaacaaactggactaccagctgggccggttcgctaagaaatatgacttgaagtatactcgctacgcggacgatctaactctaagcacaaacaatcttaagcgtataacccccaaaaagattattgacgaagtgacccgacacgtagagcgcaacggatttcaaattaatgacgcaaagacgaaggtcatgtaccagaactccagacaaatggttactggtatcctggtcaatgatgggctcaacctccacaagaaacatgtggatgcattgagggcaacattgcataatctcgaaaacaagtacgattcagtagagagggccataaatgagttctggaccttaaaagataagcagccgtttgacgccttcgtgcctttggggtattacaattccggaattagaggcagatacatttcttcctcgaagaagggtattaaacggcccatgcccatcaccaaacaggagatgcacaagatctatgccttacatctcctggggcgcatcctgtggtatggccaagtggtaaccactgctgtgcaaagcccctatgacctgtataagaggccccacatatctcccaaacagtactccaggatcaaaaactatgaagaaatgctggctagcttttatcgggtgtccatcaagttcaagtggccagtagagcacataatccttaggctttcgaatcgtttcaaacacctgcagagtctggtggcaatgcagccaaatctgctcgtagagccaattgtgctgaacgacgccgaacagaagctgaaagttgatgttctgaagttgagaaagaaggaggactatctcgaatttttccgcacgtctcccgagagcttaaagagagccatctggagcatctcatccagccctagtaaccatagcctggaggacataaagcagtatgtgaatcatggctggcctgtcccagagatccagcgagaggtcttcaaacagctcgataccggcacactgtctaatttgtttcacaagagctacgagagcggcggacactccgtgaacgaactcctagaggaaatcgtgaaagtcgtgaagacaaggttaagatacctgagtccagtcgtgaggcgcaagattctgtccgtccataaagagctgctggccatctttagactggaaggaaatgacgtgcggatcgatctcgaaaagaaggtcaaatcacatgaatcagccctccaagcgattagagatctaaaagccgccgttaggttatacgaggatgacaccgagaatttctacaacaagatagtgctgccagccgtgaaggagtctgggatgagtaacttcgtgaaaatcgataacaatgacatggaggtccgcctgatcaccgacatcgccgcttggaagaacgcactcattaaagtgctggactctgtcaaggaacatatggaatcaagtgagcgggtcagaaaggctagcgagcagttcccttttactctcaagtttcgagaagctaaccctgagactgaggagcctatggcactggagctctaccggaccaacgccgagattgggttcaagaaaatacccgatttggagacaaacaaatcccatggccttgtgaaaaagcggctgactggaggcgacttatcactagcggttaaagaatttcttccgataggagatatctatgttctcggcaaatttgaacgtaagggggaatgcatcaaggacatctctataaacctaaccgactttagtttcgttaagtgcaagagcgttaaacattccaaatacggccagcttatgttcagcttggtagaaaaagaatcctga

SEQ ID NO: 8848 - RNA, 2181 nt, synthetic construct
  source 1..2181: mol_type = other RNA
atggtcagcgttgactccaagctcaagtctattcagacttctatcaaagaagagcttgaggagaagtatccaactagtaagttcgcccacgcctttatctccaacaatctggataccctcgatgatattgtgcgtccgaaaggagttattagcaatgcactcgcccacaccaacaaaaaagtcgtaattagcattgacttgaaggacttctttcctacgatctcctttcccagggtgctggggatgttcaagcagcagccttacttcttttcaaataagcaggcgagtatcctggctagcctcgtgtgtctccctaaaggtgttgatgcgaacaggggtctaccacaaggagcccccagttcgccattgatctcgaatttaatctgcaacaagatcgacaagcaactgggccagctcgccaaaaagctcgattgcatttacactagatacgctgacgacataacgttctcaaccaacaatatcaacagggtgaaaccctctgcgttggtgaatgagatccggaagcacgtggtccgtaatggtttcgaggtcaatgaggaaaagaccaagattatgttctcaaatcaacgacagatggtaacaggcatagtcgttaacgatggactgaatctccataaaagacacgtcgatgcacttagggcaaccctttataacctggaattcaagtataagaccacttctcaggggattaaggccttctggaagcttggatctctgagaagctttgattcgctggtcccagtagggtttattaagggggaaacacccattcgcttcgtgaaaagtgcttcaaaagaggatggaaaaaagcggttaatcaagacaacaggcaagtaccaggtgaaaacatatgctttgcatatcctgggccgaatcttgtggtacgggcaggtggtgactaccgccatcagtgatccctactcactctcaaagaattcttacataagccctaagcaagagcgcaggatcaaaaaatttgaagagatgctcgccgcctattatcggattgccgataagttgaactggccggtgaagcatatcatactcaggctggctaataagtatcctcacctgcagagtttaatacattttgacccgcggtacaccttaaagaatatcgctctattggtggctgagtctgaccttattacaaaggtgaacaagctgggtaaggataatcaagagtatctggacttttacaaagagtcacctgagacgttccagcgtcaccttctactgcgctccagattcaagcaatcctttaagatccatgacatacgcaccctggccgagaatgggtgggttgacccaaagttgcagaacgagttgttcgaagagctgaacactagaaaactggccgacctgttccacaaaagcgatgatggcaaggggcataaagtcgaggagatcctcttagaacttgttaaagtggttgctcccaaactgcgctacctctccagtaatgtccgaactaaagtgctgcaggtccacaaggagtttgtgggcctgatcggggcagaaggcaaagacgtgaaactagacctggagattgagactgacctgacaaagagcgctattcaggctattcgagacttgaaaaacgcgaccagactgtacgaacataataacgacaccttttatagtaggatagtactgcctagcattaatgattctgatacaacaaagctggtggatattaacacttccggtatggcaccccggctgatcacagaaattggcgcatggaagaaagcactgaccaaggtcctgcagagcataaaagaatccgcctccaaagtgaacttagactccaagcagaaaccctttaagatcaaattcaaagacgccaacccagtgaccggagaacccgttacgctcgaaattttcaaagttggccacgacaatccattcggcaagaatctgaaccttccagaaaactcctcttcaggatttatccagaagaaccttcttggtcgggatctgacaaacgcaatagaacagtttctccctgtaggcgatatctatgtacaaggaaactttaaagacgtggacaacgccaagatcaatctaacccgccacaagtttgaaagaatcgaggagatgtctaaagacaacaaagaaagcctgttcttcgtgctcaaagagtaccagagcaagtga

SEQ ID NO: 8849 - RNA, 2697 nt, synthetic construct
  source 1..2697: mol_type = other RNA
atgtccgacaccaccgaacctaaagagcccgcagctctcaccttagccgcactgattgaccgggacgaacagagcgccgcaggagacgaacagagaaagattgacagccggcgcgatctggcaagatacatcgggatccccctgcgacatcttgccgatgtactgtacgaggccgacaggtccagattctacacagtaaagactattccaaaggcctcgggaggtaccagaacactccacgccgtttccggaaagctaaaagatgtgcagcggaaagcgctggacaaacttcagcggaaattccctccatctgaccgtgcacatggcttcgtcccgggcaggagtatcatcactaatgctatcccccaccgacgaaaaaagcttgtggtgaaactggatattgtcgatttttttcccagcatacgggtggcaagagttttcgggatgtttcaggctccgcccttccgtttcggcagagaagctgccatgacccttgcgcaattggcctgtgtccctgagcacaatggtcctctcccacagggcggggtgctttctccatatgtggcaaacgtgatttgtcgcagaatggaccaacgcctggcgtcaattgcccggcaacatagatgtaatttcacacgctatgccgatgatcttacattttctaccaatgatgccaatcgcttagatgctgacagactgatcgctaaggttcgggaagttgtggagggagagggctttgcgatcaatgacgccaaaacacgtgtgctgcggcagagtgaccgtcagatcgtcactggcatcgtggtcaatgacgggctgaacgttacaaggcgatatttgcggagcctgagggctatcttgcacaacatggagaaagagggcatcgaggctcaactcattaagggctctggtttaaaggatagacgggcgtcccgcttagaactcgtgcccgacggggatggctatagattaggcaaccacaaactgacaaaggagcaggccgtagaacgctttctgcagcatttggtgggtcgatttgctttcgtgggccaagtcgtcaacgctgaagggcaggataatcagcagattaggtacagacgggtggtgctgtataagaggctgctcaacagatttagacgcagtgtcaggtctgcagttcatgcaggactgggcgacggacccaaacattgcgagagggccatacggtctttgatggaacgttatgccagcgtggagcaggagtccgagtggtataggagagcgaaggagaggcgagaaagcgagctggagcgctggagggaaagtaaagagggccggaggatctcagctgccttggccagaacaacgaacgccagtgagctatgcagattcgtgcaaaaggaggctaagagcgacgttcgatactggccggtgaactgtggcgataatcccgaggccctgagggttcgagtggaggagaacgctcgctacccttccctgaaccggggaaccaccaggcaagtggtgaatgggtttaaggatactagcgatctgggagggcttactcacaggggcgatgcaacacctgcgagcttgcttcagattctactcgaccgctacgagcctcactactatgagctgccgaacgccctccggaaactggtggaccccatgtcagcagcactccgggatatagtcttgcaagacggagaggacgtaagcctggatctctttaaagaccctagactggatcgtcacgtcaagcagctaaaggagggaacgcgcctcatcgcccctggttcaaagaaggacgagggcaaacctatcaccgaactgttgaccgatgcctacgaaaaagggctggaaagggccgagaagaagcccggaacctccgtgccatggaaggaccggtttataagcccacatcaggctatctacacggtcgtacctgccctttggattagtctagtggacatctttcactcaatcggaattcatagtgaacatagggaaatcgaggtggaaacttacataaccgaacagggctgcttccagatccgcatttctgacgctaatagttcagggctcgaaattccaccagccagggacttcgctcacgggaagatacgacacgccgcgttcgaacttttcgctatagccggctattggatttttacgcggtttgaagacggtgcagtgcaccgtgtggatatgctcaccggtaagactgcacgcgcaactgatgctagatatcccggatttactcatctgattgttctgcccaatgaaaaaggcttcatcgaggaaccatcggttggggatgccgcaactgggtctgattccgccgctacaccgagaaggaccgttcgagtactgataattgacaataacgagcagagaaggaacgataacgtacagtgctggtcatctctcccagatgtggagttagatgcagtcgctcagattgaccgcgagtcctaccgctgccgtgagctggacctcgtgctagtacacgagtccaacccagagtcagaatggatccatcaggacgttgaagaccggtggcctgtcgtcttcttctctggtaacaatacactggattgcgaagtccacgagggcaggtggttcgtgtcccccgtgtttttgcgcgaacacttcgggaagctcgtggataagatcgtccacgagggagggaaagactgtgtcggtctgagctga

SEQ ID NO: 8850 - RNA, 2634 nt, synthetic construct
  source 1..2634: mol_type = other RNA
atggaaaagatgactaccagaaccaaaatctactggaggagagacttagcccagtatattggcgtccctctccaggacctgctggaaatcctttataaggagaatagacgagattactatcgaatccgctcaatccctaaagcatcaggggggacacgaaccatccatgcggtatccggaaagctgaaagatattcagagaaaagtcctggacaagctgcaagcagactttccaccgagctctagggcacatggctttgtacctaagaggagcataattaccaatgccattccacatcgcaggaaaaaggtgctggtgaagctggacattcgagacttcttccccagtatcagatttgcccgtgtcatggggctctttcaatccgcgccattccattttggtcgcgaggctgctattaccctggcgcaaattatatgtgtcccaggtgataacggacctcttcctcagggtggcgtgctctccccctatgtggcaaatgtcatttgtcggaggctagatcagaaactggccgccatagctcgggagcacagatgccattttacccggtatgccgatgatttgacatttagtacaaacgacgtcaaatgtctcaaccgcgagcagtttatcgccagagtggaagcggcggtggcaaacgaggggttcacgataaacagtaagaaaacacgcgtcttaaggcagagcgatcgtcagatcgtgaccgggatcgtggtgaatgacggtctgaatgtgacaagaaagtacattcgcaatctcagggcgattctccacaatattgaaaaaaacgggctagaaacccagttgattaaggacggaggcttccacgataggcgggcctcaaggctggagctcaaacgcgacggggacgggtacaggctaggcacacgccagctgaccaaggaggaatcgatcgagagattcctgcaacaccttgtcggccgcttcgcttttgtcggccaggttgttaatgcagagggccaggagaatagacagatcagataccgcagggtggtgctgtacaaaaggcttctgaagcgcttttacatttgcatatgccgcatagagaagaatgagaatcttgggaaaggacccgaaaaatgcaagtcaacactggagaagctgatgaaaaaatacagctcatttgaccagcagagcgagtggtataatcgtgccaaggaatgtaggcaatctaaattggagcagtggcaaaacagcaaggaagctcagactatcagagacgagctggcctgcattacgacattagaagacgcacggaggtttctcaccgctcaggcttgttctgatgtgagatattggattgagtgcagcggaaacttcgaggatatcaaaattaagttggcaaagttcgctcagtatcccgcctttaattttttcgacacacggcaggtgttgcatggtttcaaggacactcaggatttgggtgcactgacccaccacggatccactcccgctcacctcctgaatatcctacttaagagatacgagcctcactattataagcttcccgattacgaaccgccctactccctgcggggactggtggatcccatgtcagatgctctgcgaaacatagttctggaggatggagaagatgtgtttctggatttcaacgaccctcggatcgagtccaaggttgccaagttgaaacaggggacaagattatcagcccgccaaggccaagcacacatcgggaccatgattgaggaaatgctccagagtgcctacgaggagggacttaagagggctaaccagactccgaagaaatccgtcccatggaagggccggttgcagaacccacgggaagatatttatactgtcatccccgccctccaaggcagtttagtggacatcttcgagtctatgtacagaaaccgaaagtccggccaaatcgaggtcgagacgtccgtgactgagtctggctgcttccagatccgtatagccgacgtcgatggcgcttccctgcgcgtaccacctggtagagacttcgcccatgggaaactcagaagggccacccggagcctgttcgtgatcgctggatactggatattcgcccggttcaacgacggcagcgttcaccgagtgaacatgcttaccggagaaacggtaaaggtggctgatgaccggtactctgggttcacccacgtcctcgtgctgccaaataacgagggcaggatcgatccgccttctgttggaaaaagctccctcgacgtgtcggtggccaagacaagccggcgtactctgcgggtactggttatagacaacaatgatcaggaacggtatgataacgaactgcggtggcagactttgccagacctcgaactgaaaaccgtagcagccattgaccgtgagacttgtgccagttacgcacctgatatcgttttcgttcatttcaacaatgacgaacgaaaatggattacgcaagaaaacactaatctttgccccatcgtgctattcagcggcgaatttatgtctgaatgtatgatccacgagggttgctggtgtgttagtcgtacatttctcaaggaacgatttggagacttaatcgatcagatcgtgaggaaagagcgcaaggactgcgtaggcttgtcttga

SEQ ID NO: 8851 - RNA, 2646 nt, synthetic construct
  source 1..2646: mol_type = other RNA
atggaattcacaactaccccgtcatctctgaacagcaggaaagatttggcggactacatcgggcttccactgggtgagcttaacaatatactgtacgctggcaatagatcccgattctacaaagtgaagatgataccgaaagctagcggcggagaacgcaagctgcacgccatttcaggcgaactgaagtcactgcaaaggatggccctggacaaactgcagacagattatccccccagtcctagagcacacggattcgtaccagagagatctattattaccaatgccaggcatcacaccaacaagaagttggtgatcaagctggatttactggatttcttccctactattcattatggaagagttgtaggaatgtttcagaaaccccccttctctttcgggtacgaggtggcaaaaaccctcgctcaaattagctgcctctcacaggaagaggccggcatcttaccccaaggcggagccatgggtccatacattgctaacgtcatatgcagacgaatggacaagagattggcaagcgtggcaagaaaccaccggtgtaatttcaccaggtacgccgacgatctcacattcagtaccaacgacgtgcgccggcttgagattcctcagcttattacagaggtgtccggaattgtggagtcagaaggattcaaggtgaacagcgaaaagacacgggtgctcaggccatccgatcgccaaatcgtgacgggtatcgtcgttaatgatggtttgaatgtacctaggaagtacattaactcgctgcgggcgattctgcacaacatggagaaagaaggcattgaaaagcagctagtgaaaggtaagctgttcggggccaataatcctaagattagccgcctggaatttgaactagttggtgaagggtacagactcggctcacgcgcctattctaaagacgaggccgtggatctctttcttcggcatctgctcgggcggttcgccttcgtagggcaggtcgtgaacgctaatggccaacaggaacgtcagattaagtttaagcgcgttattctctataagcgactcctcaagcgcttccactcttgtgtcattgacccacgtaataacggtctgggcaatgggcccaagaagtgcgccagggcaattgttcgaatgatgaagcagtactcttcctttgaccaggagtccaaatgggacaggcggatcaaagaagtgcgtaagtctaaactggagtcctggcaacagagtggcgacgggcgaaaagtttgtaaggctttggatcgcatcaacaacttgtccgacttgaaagttttcctagagaacgagtcgaaaagggatatacggtattggtgggtgtgcggacgcgactttgttaccgacaaagaacaagctctgaaatacgcatcttatccgcctgtagactatcgttggacgcggcaagtcctgtgcggcatcaaaaacactcagggaaagaatctagggattctgactcactatggggacgatggccacgcaaatactcccgcgaagctgctagaagtgttagccgagaattatgagccctactattattggttgcccattaggcttcgtaaaatcatcgaccccgtgtcagatgcactgcgcaatatagtcctgcaggacggcgagaatgcttccttggataattttggtgatatcaggttagagccagtaattaagacattcaaactagagacacgactctccaacagcgacagagcagccgatggaacatacatctttcaactgttaaaagatgcacatgaggctgggcagagacaggccaacagaaaggaaatcaagagtcttagcctcgtgatgcaccagaagatgcctagcaaacagtacaccgtggttccttcacttcgcatcgctctgatcgacatattccacagcatgtatgtgaactcagagtctgatggtatcagcgtggatactaggataacccatagaaggtgttttcagatccgggtcaccggcccgctgcatcatccactgctgtgtagaccaagcagaaactttgcgcatgggaagctgtccagggctgcccgtgaactttttgggatagccggctactggatctgctccacatttgaagacggccgggagtacagaatagacatgttgactggcaaggctgccctgatctctaacgagcataaactgagtttcagccacatcatcgtgtttccaaatgacaacgatgagatcgatgagagtatacacggcgttgaggtcatagactctgtccctgaaaacgcacctcagcagaaaattcgggtcctcttaatcgataacaatgaccgccggcgcgatgaaaacgtgaagaggtggcgagccctcaaaaatgttgacatcaaggctgtcgcccgaattgatcgggcgagttatgagaagctcgacctggacctcgtgctgatccacgagtccaaccccgaggtggaaaccaatgagcttgtgtttgacgatcagacgcggatcattgtgtttagtagcggaaataagactgaagattgtgtgacggacgagggactcttttacgtctccagtatcttcttacagaaaaatctggccaagcttatcgacaagatcgtcgtcgagggacagaaagattgcgtagacttgtcgtga

SEQ ID NO: 8852 - RNA, 1905 nt, synthetic construct
  source 1..1905: mol_type = other RNA
atggagattcccctgaaacgtctcacatactgcctgtataaaacttccagagagagtgcttatacaaggaaggatcttcctaaaagcaacgggggcgttaggacgattcatgccgttagcggcccaataaaagggctgcagagaaccgctctggacaaattacaggaagatttcaagccgaccgcatacgcacacggattcactcctgaaaagtctattctcaccaacgcttatgtgcaccaggggtccaaaatcatactgagaatagatctgaaggactttttccccagcatcaactttggccgggtgcgaggcatgtttatgagcccccccttcaagttcggcgaacaagccgcgacggcaatggcccagatgtcttgccttgcaggaagcgaagacgtgctacctcagggcggcgtgctgtctccttatatagcaaatatgctctgtcgccgcttggatgctcgcctagccggtctgtcaaggacatggaaatgtagatttaccagatacgccgacgattgtgtattcagcactaatgacaccaaaagactgaatgccgaaaaatttgtggcccaggtggaagaaattattcgggaggaggggtttcaaatcaacccagacaaaacacgggtgatgtacccgcacgagagacaaatggtcacgggtgtcgttgtcaacgacgggatcaacatcaacagacggtactatcgatcactgcgggctctcctgcacaactggaagaagtacggaatctcaagtcagttggtgaaaagtggaggttttaaagatgaacgcaatcccggaccaagatttgaaagagatggggacatctttaggctgaatggttgggagtttagtaaagagcaggctgaagagaagtttgcaagacatgttctgggccgcattttgttcttgcttcaggcgaccaatttcgtaccaccttctactgagggatacctggagggagaaaaggacgagactgctaagaaaatggtggccaaacgaaaggaagcactggctgagaaaccgcgttctcaagccgcacagaagctccttttaaaatatttccacctcgtgagcaagcggaagcatctggatgacttgaagaacgccgcttaccgacagcttcagcggtatcctattagggaactcgtcgcgaggcacccccacttgaaaatagagctcaggagtggcatctcacgctaccaaatccgagctcaggccttgcaggaatatcagaagcgacctgagacaaggaagtgcgtggaacgcatccatgaatgcgacgatctggccgaggccgggggattacttgacgagctggcgaataccgacgtgcgcttcgcaggtttgccacgcggggaccttcgggtcctcctgaaggagatgaccaagtttgcttcgtaccctgccttcggagcgaaccacgcacgttccttcttcgcatcactaagggattccgagacaggtttaggccagattcttcaccacccagagcacagcatgtccgatctgaatgaatccatgggcaagttcgtggaccccgttttctggtggttacccttcgggctcagggaggacattgataagattgatgacctcttggagggcgtgtcgcggcaactaggggacgatgctaaaatcgactggctggcccatgagctcactgaaaaggagacactcaagctgaagaaggatacaagatttcatcggaaggaaggcacccggctgcatgaggccgtaaatgaggtagtgaaaagggtcgccaaaacctacgaccgtgagctgccagagatttgtaacgagctgtccgataagtccactgcctatacccatgttaggtctgtccgcctggccctggacgaaatcatcctttctatgatcactcacagcgataagtga

SEQ ID NO: 8853 - RNA, 2751 nt, synthetic construct
  source 1..2751: mol_type = other RNA
atgcccaagatcttcttaaaaaaacaccagacagagtatatcatcaagaaccgagcaaccaatcgcaagagtatcgtcgcgataatggcaggcaaaaagatgaagaatatgttgagtggcgacaagattaagaaagcgtataagaagttcactatcgccaaagctaagaagggtacccggactttgcacgctccctcgactgagctcaaggacctgcaaaggacaatcctggataaactgcagaaacctttcagacctagtatatacgcccacggcttcgtgaaatcaacaagcaataaagccaggtccatcataacaaacgcctcctaccataagtctaagaagtacataatcaagaccgacatcaaaaacttctttccttccatcaaaaaggagcaaattacacaaatgcttgtgaacgaaccattcgagtttacgatcaaaaccgctgaaaaaattagctctctggcatgcttagatggtaagaagaaggttttgccccagggtggagtcctctctccatatctgtctaatatgctttgctgcaacctggatgacaaactctcgggattggctaccaaaaatcactgcaacttcactcgatacgccgacgacattacctttagcacaaatgataagaagatcaagttcaagcccctaattcagcaaatttacaagatcgtggaatcctatgggttcgtggtgaaccgcgggaaaacaaaggtgttgacccctgcagaccggcaagttgtaaccggcatcattactaatgacggcattaatgtcaatcggaagtattaccgaaacctgcgggccattatacacaactgcgaggacgagtctctgaacatctttaacatagatactatcgccggacagattgggcggttcatcaagtacaagatacagaaaagaaacaagaacaacgccatagaactcaaatactcctggtcttttaaagattctcgctgtagcagaccaaacattttttcagacagcgtcatgcgttccgaatacatactgttgaacaaaaaagttggagtccaggatgtaaaacttatgagagactatggcggagtcaaccttcaggttccatttctgaaaggcgagtttctcaaccagctgtttggcaccgacaaattcaaaaacaatgagaagtacgcgatgaggctttacaagtataattcagatatcgagtctctgagtactggaaggctctaccttaaaaacaaaaagtatgccgagattctactcgacggcaaatggattggttgtgagaaatataccgaaaagaatccgaaaatctacaacatactcgaaaacaagttcaaggttctgcaagaaaagcataaggacaacgaccgattcttctataagtccgtgatctacaacaagggtttcgaagagaaagaatacatgctcgagaattttgccctcacaaaaatcaacacccagcagcagacaattcagtacgagaactacaataaagtcgataagaaccatacaggcgattatcacatcgctgtgaaaaagaattatgccgtgcattcttttttcaagcatttactgggaagattcgtattttatggctccgtggtcctgtccaacaatcaggacaagaattatgatagatacaagcgtgtgggcgcatacgaaaaactgctgtatcggttctacaagttggtggaaaagcattgtaacaaaagcctgcagaaacagaccttaaatcttatcaagaagacgccgaaactgaaggatgactttaacgtcttgaagaaaatgaccgatgattacaagaaacagaaagagaaatctctcgaaaagtttcactatgactcaaagtatgccactgaaattgataacactgagagtattgaggctctcgatgatattgctaagaagctaagcaagaaggacgtgagatttttccgtattgacaaataccacaaagacgagcccaaggactatcaaaattacctcatggcaattttgaagaagcccgcaattgatctgaaaaaaaccatgggtgtgcttctcagttttaagggcagccaggatggcctcggggttatcactcacgacactgagaaactgaactcaaagcagatatttgagacggtgaataagtgtttcacgcagtactactattatttacctcagggaattagggaagaattcgacaattacatagatgccctgaataatcaagacgggcggcagtcacagcgctttcaaagccaggccgaaaaactgaaaaagaataccaggtttgggaataattcagatgaggaatttctgctgaaagacagtgtcgatgaggctatcctaaacgctaagaaagaggttaagaagtccgatatcaagattcacaatgagattaaaagggcaagcttttatactcatgtaccaaccattaagcaggtgttcgagaaaatcatccacagcctgtataagaattccaaaggttccgagattacaattagctgtgaccataaggacgatgagaaaaagtaccaagtaatcatcacagacaacagcgacgctaacatcaccaataatgggcgcgaattcgtgaacggaaagcttagttcagtgatggggttaacatttgggctgtgcgattacttcatcgaaacggagttcaataaaaagcgcaaaaccatcaatatgcacaacggagaattcctgaagacgctacctactcataagaaagggttcacccacatactgcagtttgcgacaaagatctga

SEQ ID NO: 8854 - RNA, 1473 nt, synthetic construct
  source 1..1473: mol_type = other RNA
atgactaatgatattatccaggagatcctccgtaagagaaagatcaaccgatctactccactgatgcagaagatcaacaataaaaaggacctactatcctttttcggagacgagatcgggcaagagaacttcgacaacgtgctgtacggagaggaaaaggagcagtacaaaaagttcgtaattaataaggccacaggtaagcctcggaccctccacgctgtgcccccaaaattgaaacacattcagagaatcgccttagataagttgcagagtgtcaaacagtaccagccttcaagctatgctcatgggttcgtgttgaagagatccatcattactaatgccatcccccacaggagaaagaagaggatcataaagatggacctgaaggattttttcccgtctatccatgaggacagggtgcgcgatatgtttatggggaagccgtttagcttcggaaaagaggcagctactattatggcccatttgagttgcctcaacgacggttcaggaattctgcctcaggggggcgtacttagcccatatgtagcaaatatgctttgtctgaaactcgacaaaaaattagcgaaggtcgcaataaagaatcattgcaactttacccggtatgcagacgacattaccttctccacgaatgatgtgagcgaggacagtatatccaatctgattaaagagacgtccaacataattgagagtgaaggttttgtggtgaacaccgagaagaccaaggtgctgacccccaatcgaaggcaggtggtgaccggcattatcgtgaacgatggggtcaacgtgaaccgcaggtacattagaaaccttcgtgccgctataaaaaactgtgaagaacagggcataggatcacaaatgcagcggttcgtctttaaggaccaccgctgctctggccctgataagttcgatgggacaaatggcgaaatccggaattattttctccaccacctgtttggcaaaattacattctttggcaatgttgtcctgtctaataaccaagacctgaaaaacaagaagaattcggatacatacagaagggtacaaacctacgaggaaatcctctatcggttctatgaccttatcaagaacgtcaaaacttctcggcgattcaagaaaagtgttgtggcggctgtcaacaacaggccaaacctctccaaacgtctgagcttcgcgcaacagggagtctccattcgcggcaaagccctcaagaaataccgctcaacttacaaagccaaaaagttaaaggatgatctggagctggttaccaatatcaatcagcttagaagcttcatcggggacgttgctgagacaaacccatcttttttcaatacagccatccctgttgatctagatgaagcaaaagaaaaactgggtacacgcctgagctttccccccgtgaatctggacatcgccacgggagtgctgcagtcattggttgaagacgaaggctga

SEQ ID NO: 8855 - RNA, 2493 nt, synthetic construct
  source 1..2493: mol_type = other RNA
atgcccaaagagagcaagaacaacaaaatgaccgtgtcttctagatctgacttggcagattttttcggggtgaagaacaagtatattaattgggtgctctacgcggataaatctgccagcggttacaagaaattcactattaacaaggctagtggcaagatccgcactctgcatgcggtgacaaaaaaactaaagaagcttcagcggattgccctggatcacttgcaagctgataaacgatttcaacctacagcctacagtcatggcttcacacaacaaaagagcattatcacgaatgcagcctaccacaagcggagtaagcgcatcattaagatggatatcaaagacttcttccccactatccactttgggcgcgtgcagggtatgttcatggctccaccctttaaattcggtaaggaagccgcaacagtgatggctcagatgagctgtctggatgatggttccggcgcactacctcagggaggcgtgttgtccccttacatcgccaatatgatgtgccgtcgcatggacaaacgactggctgcggtagcacggaaccacagctgcagattcactcgctatgcagacgatctgacattctccactaattgcatcagcgatgagaatattggtaagttggttcaggaggcctcggctattgtggaagcagaacactttattgtcaataaggagaaaaccaaagtccttaccccgaaagaccgccaagttgtgacaggcattgttgtcaatgacgggctcaatgtgaatcggaagtacatcagaaacctgcgagccatcattaggaattgtgaacagtttggaatcaaatcacagattgtcaagctcggcggatttaaggacaaccgcaactcaagaatttcaatcaaaggcgaagagaacctttccgaggaacggtttctgaggcacatcctgggcaaactaaattttatgggcgacgtagtgttcgctaacttaaacgacaaagacgggaagaagatagatgacaatagtgtgaacatgaatcggatggtaagaattaaaacccacgctgacctgctcactcggttttacaagctggtggctaacgaatctggggtggacggcgtatatgacaagatcgagatcagcattgttaataacggcaagaaaaatccatactgtaagattatggacctcatatccgagataaataatcaggctaggaagtacctggatgagtttgaaaggctcgaaggggttaccaggattgtggatgaaaaaaagtatccactggtagacaaaaaacagacacgggtgttccttgattcttttaggaattctatcaacggaatgggagcattcacccatgcacacggtgaggagttcacgatccacaaagccatgggcattttattaaagaagtgtcatccggccatatactatctccctgaggccttcaagaaggaaatctactcatatattcactacatcaccaatatcggaataaagaacggcgctaactatagttggaatgtcatgagcgacactaagtcagttgcgttgaagcgggccactaggttcgattctatggagaactccctgtccagcaccgtcgacagctgcataagatatgtcaagaaacagaacaacatctcctctgaccttaacgttatcaactgcataaagaacaaccagctgttacagatctatacctttgtacccggcatcgagtccgccctgaacaatataatccattccatgttgaagaacacggaagcccagataaataagtatatcctaatcgacgtgaaccaggccactgatctgatcgagataattgtcagatcggaggatattatgatctcatcgttcgtgcccgaagacaagcatggaaaactcacactggcaactaaaagcacaaaagggctttgtgactactgggtggaagttgattcagtgagtctcgatctgaccaacaaacgagtctgcttcgacatgcatacaggaaaaatcatcgacggaattattcctagtttctccagtggatttgtgcacaagctccgattcgatacggccgataaaataagggataccgatgtcgagaacagagagatctcagctatcaccccaatcgagaataagatcgattacctgtacaaggtcctcttactcgaccataatattgacgataggcgtgagattaagcgcaatcttctggaaattgacggtgtgtctgagcagtcactgactattttgaagaatataagccaagtggactttgaatctatgaagcttgacatcgcctttatccacaaaaataacaaagagacatccaacattgcactgtgggagacaagtgggatcaaagtcatttttttttccggggagatacgtcagaattccaccataaacgccgagaagagccagttcatggttaaggaagaaaccatgaagagcgccgcgagactgaaatcttatttcgagaagaaactgagcgggaaaattaccacgtga

SEQ ID NO: 8856 - RNA, 2193 nt, synthetic construct
  source 1..2193: mol_type = other RNA
atggagataatttttggctcgaagacacctgggccgactactgttctagctaaacagattggatttcctgcaaataagctgcgggacatattgtatggaccaaacaatcgctctgcgcactataagcgaattgccatacccaagaattcctctacccccgctaatcctaagatcagggtgttacacgcagtatccaaagacttaaaaaacctgcagcgcgccacgtatgattacctggccgccatttattcccccactaaatatgccaaaggatttgtcatcggagagtctatacttaccaacgcatggccacacaggcgacaggccgtcctcctgaagtttgatatcaaagactttttcccaagcatcaacttttaccgggtaagggggatgtttatggcgtggccattcaatttctcccctgccactgcgactatctatgcacagatatgttgcatggacaacggccccatagcccagggtgcggttacgtcaccctacataagtaatatgatttgcaggcgcttggacaaacggctgtcacagttcgcccagaaacatcacctggtttttacccgatatgctgatgatattaccctgagtagcaatagcaagcatctggctatcaagaaggtccaacaggaagttgtggagatgatcgagtcagagaagttcattgtcaataaagagaagagcaaggtgttattccctagccagcgccagatggtgacaggcatagttgtcaatgacggggtgaacgtgcccaggaagtacatcaagcaggttagagccatcctgtataaatgtgaaaccctgggcgtggccagagtagtgagcgagcatttgacccatgtgaagccaggtcaaccctgcgcacctatccatagggaactgaaacctacaggcgagtacctggacgtcgatgtccctattaacagagatgtgtacatgagaaacggtaccgataaggaaatttccttctaccaggttactctcatctttctcagccatcttcgcgggaggattctctacatcggccaggtggcaaaggccaatcatgaatctatttgggaggtgagttacgctagcgccaacagccctaggggatatccggaacgtacagtttacctcaagcgctacaaaatttatcgggaactgctggaccggtacaactccattgtgaacttcgaggactatggcaaagagcttagtattaaggtgaagtctctggagtctagatacatggaggaggaagagatagatttctttatggctagagatatcgaacagattaagtcagacatgtcagagcgagccgaaaccgaggctcggttcttctattccatctcacccgcaatgctggagaacgacatcaaggacaaattgttaatcatgctgaataggtttcccccggatatcatcaccactcgcgctgtgctacagagcgcgcaggacactgggagcatgatcatgagattgcttcacaatgaagtgatccaaagagaggagttcgacgattactttaatgagtatctgacggtgaaggaaaaattgccatacagactcgaaaaggagattacggcttttcttaaagaagcttcctatctcttcagacgagagaacatcgatgagtataacttctacctagacgagcaattcaatcgggatcgcgtgatcccatttaagaataactctaggttcgtgttgaacccacgaaaaacaagcggcggtactgatgcctacgagatgatcaagggaattgtccattctcgtgccgtgcgggacaaaatgaatgagaactccgtacggattatgattcccgaagaccaaaatgagtggcgtatcgacctctacacccacgtgtctagtgtaaagtggtcacttcacagaatcatcgaaagtatggtcgtaaactcgcaagataccatcatacacatcacctttgaattccagcgcgaaggcttttccacactcagggtttacaatgaggatgtcacagaaattgctaataccccatcccgggcacttgctcacgggaaactgaaaaaagcaatggagtacctggacggcctggcagaatattatatagaggccaactttgccggaacagggtggagttcagtcaacatgtacacaaaccaatctcaggaaattgaaagtctcattggtttcacacaccgtatcgtgttctga

SEQ ID NO: 8857 - RNA, 2040 nt, synthetic construct
  source 1..2040: mol_type = other RNA
atgaaagcacacatatttgaagttgctcaggagttaaatgttaaaccaggtgtgattcgaactgctttgtacgtaggcaataggggggactactacactcttaacgaaattcctaagagaaatggaggagtgaggaccatccatgcggtgaatggacgcttgagggtcctgcagaaggtcgcgtacaattggctgtccaataattatagcccccgccatgaagccaaagggttcgtgatcggaggcggcattattgagaacgctaagattcatcggaacaaaaagctggttatatgttacgatctcaaagactttttccctagtatcacatttgcaagggtccaggggatgtttatgtcttttcctttcgagtttgccaagcccaaggctacgttgttcgcccagatttgttgcctcccagacgagaacggacctattccacaaggcggcgttacctcccccttcgtaagtaacatgatttgccgaagattagacactcgcctgcataagctcgccattaagaaacggatgcactactcaagatacgccgatgatcttacattctccacagatgataatgtgggctatgaaaagtttaccaagattgttcgggaaattatcgaggacgagcacttcgaactaaatgaagagaagtctagaattcggaccaagtctacgaggcaggtggtgaccggtatcgtcgtgaatgaaggactgaatgtaaaccggaaatatattcgcagcctgagagctgcacttcacaattgctatgtgcacggcgtgctgagtcagattgacaagaaaacgaaatataaggatccctggaacacctgcccacccataaagaagatcgccaacaaaaattatgtgctgtacaagaatggtgccagtatcgagatcaaggatgcaaaatataagtttctggagcacttatttgggcgaatacagtttataggtcacgtcgccaaaagcaatgagcatctcaaccctgtgcaccacaacaaacgcgtggagatctacaacaatctgctcgagatgttcgaaaaggtccgggagaacgagaagataactggcaagctcaaaatccaagcaaagaaggccctataccagcagcaggataacgcgttgcttgagtcaattaaacgatacactctcgatgaattgaacgaatttgtagatgagcaaaaacagactgatccaaggtatttcacatatagcttctctgagggagatatcatggagtacagggacgaagtgggtaatctcgctcagtatccgagccccacaaacgaaatggtaatgcaatacctaaactccctgaaggactcagaaaataagatcctgggcaagcttgtccatgacactactatctcattcggagaattcaacaacttccgcatgcagtttgaaaaagataaaatcgagctcccgaaactgctgagagatcgtttggatgggttcatcaataccgacatcatgaattttatcaaggataaagacgtgaacttcaacatatttagcgacataacattcgtcgaaaagtccatcaacaagctgaaaaaggcaacaagattcttcaacgggacagggaatatcggcgacgacgaaactgatctcgtcaagatgatcgagtccgtttttaaaaacgcccgtaaccccaacaatctgaacttgaaaatcgacaggctgaatacctttggtgcttataccgacgttcagtccgtgaagtacgccctgtcactgattattgacagtatgatcgacaacagcaacggatctacggtgttttgtaaaaccgacaaacagaacaaggtgattgagttattcgacgacaactctgagccactggacattctccctaatcgtgattttgtgaatgggaaacttcggaagaccatattcacactaaccgcactgtgtgagtacagcatcatcgctaacttcaagaaagggggctggaaaaatatcaatatgatgaagggcgaggtcattgagtcggaagagtatccgggctttacccatcaacttacattcagatga

SEQ ID NO: 8858 - RNA, 1149 nt, synthetic construct
  source 1..1149: mol_type = other RNA
atgaaagacttaaatttgaacctgatcaccattatcatcatctttatcgtcatcatcatcacgatttttaaggggaaactgagtgtctttaacaaaaagaaacggaacttcaacctgaaattccttaacaagattcccattctgaaccctgattacaatacattctatatacccaaacgggatggtagcgaaaggcaaattgacgctccgaatacccagcttaaaaacatccagaaaaacattcttcgggaactcaacaaaacttatctgtttccatctttcgtaagtggctttaagaagaacgccagcattaagaataatgcgagcaagcatactaacaagaagatcatcatcaatatcgacatagaggacttctttcactctataactgagaataagatccgcaagactctcagggcctacaaagaactgcagaatgaggaaatcgagaagttgataaacctagttacatacaggggccgtttagcacaaggagccccaacctcgccttttattgctaatctcgtgttcctgggcatcgacaacatcataatcaaactcttgaagaagtacgacaagaaggtgtcctacacacgctatgctgatgatataactttctccagtaacaacaccaaaattaagaacgctattcgcataatagtcgatagcatcttgcctaaatatgggtacgtggccaaaaaaaagaaaacgaccatttacagagcccatacaaagcagattgtgaccgggctagtagtgaataaacgggtttcatatcccaggaacaaatatatgaaactgagagcaatggtgttcaatttcctgtccaagggagatggaaatattaacatcattaagggccacctgtctttccttaaatcagtcgaccgaaagaaatacctgaagctgaagttctattacagacgaaattttaaggagaacaacaactacaaggtgctcttcaacaagcagaaaaaaaaacacaagaaggcctcctttacaaatccacataccggcaaaagagaagttaagtttgattactcaggtaagaagatcgagaaaaacgactataagtatgagtccgcatttgagaacatcaagaaaagcaagaagaacaatgacgatgataaaaacgacctcattatttga

SEQ ID NO: 8859 - RNA, 1026 nt, synthetic construct
  source 1..1026: mol_type = other RNA
atgctaatcacaatcatcgttattatcagcatcatcgttttcttcatcacgagcaaaatatggatcggcgcaaaaaagaagtggattatgaagatgtctgatttgttcaaacgggtcctggaatttgacgctcctgatctgtcctataccacatttacaatccctaagaaagattggacttctagacagatcgaagcacctaacgcccagcttaaaaagactcagcagactcttctccatttgctctcaaataacattattctcccatggtatgtgactgggtttcggaagaaattctccatcaaaacaaacgctaagaaacacgtgggtagggaggtcgtaattaacctggacataaaggacttcttcaccaatgtaaccacgcaaaagctgaggcagcgcttagagtacctcaaagtggataatgaaatcatatcccgctttgaaaagctatgctttaacaattggcatttgccccaatgggcccccacaagcccatttcttgctaatttcattttcgtgccgatcgatgaggcaatcattaaaaccgccaagaagtatgacaagaacattatttactccaggtacgccgataacattaccttaagtagtaacgtgaagaacataagtaacctcatcaggataatctcagagtggattatgccaaagttcggatacaccattaatagcaaggttaatctgtcgcgcaaacacaccagacagaccgtcacctggatcacagtgaatgagaagatatctatgccccgtcataaatatatgttactcagagcccaagtgcacgcttatcttactaaatggacgtggaatactctggagattgcctggcgattggcgtttctgtatctgctggacaaaaagaagtactggaaactgcagaagtactacaagaaaaagttctgggagactcaggaactgtcagcggtgtttagacgaaaccctaagaaagtcaaactggacatctacaagaagtggtttattaatccccggacatggcagaaattctga

SEQ ID NO: 8860 - RNA, 1338 nt, synthetic construct
  source 1..1338: mol_type = other RNA
atgaagaaagattttacgaacatctcgacatatcaggagtttatcgagtatatcaaaagctttagcgaatatcagtacttaactcgtactctaagcaaagactttctccaaagaataaatgaaacgcagaatatgggcgacttctatacgaccaagatgatttccaaaaaagcaggtggcaacagggaattagcaatacctattgaagagcttaagcacttgcagaaagctctgctcggcgtgctgaagaaataccagagactgtccattagaaaaagcaaatggtctagcaattacgactatatatccccagcctttaaatccatcaaaatcggttcccacaacaagttctatgtgaataagctagaccttaagaatcggcatactaaggggataccttcacacgtcgtacatgcttctcatcacaccaacaagaaactggtgatcaccttcgactttgagaatttcttcactacaattaggccaaatcgcattaggggcattttcaagggatacttcaaattctcagatttcgtgtgcacccttctgacatctattactactcactttaaggtaggccttcctcaaggagctcccaccagtccgtacctctcaaatctggccacctatgagtttgacaaagcgtttcacaaagaatgtaagaagctggggatctattacagtcgctatgccgatgacgtcgccctgagtaccaacaattattccgttttgtacaacaacagcattttttctgagaagccaaagaatggaaagcggctgcaattttgcgattatctcaacaatctattggagcagaatcacctcaccatcaaaggttctaagacaagggttatgagctactggaatcgacaggtcgtgacaggcatcgttgtgaataagaaaatcagtattgggaaggatgagctggtccgcgcacgttcggtcctgatcaatattggaaaaaccctcactatcctcgactaccggatggggataatagccgtggataagcagattaagaaattctacgacgagtaccaattgcggaactcccatgaggaagagcttcagaccataagagatgataatgaacgctcactctgtatgctgtgcatcgctttgctcacaattcattccctgatcgagtactacagtcaggtgatgcccacaaacagcaaactgatcaagattaaggaactttacaactctatccagtacaacctgttttacaacaagaactatcgacacatcattatcaagaacaaccacttgttcaagttcaacctgcattcattccccatcttcttaattgaaaagctgaacttccagtctcattga

SEQ ID NO: 8861 - RNA, 963 nt, synthetic construct
  source 1..963: mol_type = other RNA
atgtctaaactcagcagcattaacaatgttgcttctttggtcaaggtgatcaatcacaagttgtacatcaaaaagtacgaacccatcaccattgacttcctgaaaaagaacatacataagtatgtggacagaaacattcctaaaaagaggggcgggtttagaacactgaacatccctaacgaccaattactacacgttcaggagatccttctagagttgttctatgaaagtcaggatagaatcgtccgagaaaataaatggatcagccagatcgaccgctccgcacccgcctataagccatctaactattacttgaacaagccagcacattggattcacgcccagaaccatgtgaacaaagccataattgtctcgttcgactttcatgatttttttggatccctctattccggccgtatttacagcgtgttcataaagtacttcaaatgcaataaggcagtagctactattctcactaatctcactaccttcaatcattctctccctcagggggcgcccacaagtccatttctgagtaacctggttatgtactatttcgacaaaacgatgatcaagataagccgggagaacagcgtccggtattccaggtatgctgacgacgtgattctgtcaagtaacgattcacagttccttgataataccaactttttcgagaagtcctttaataatggccagaatatcgaattttccgagcaaatcagcaaactccttctgggttaccacctgtcacttaatccgaataaaacacgggtgtacaattactggaatcaacagaagatcacaggaattgtagtcaatcaccacaccaacatttctaggcgcaagttagtggtgcaccgatcaatcctgatcaacctgattaaagccatagataccaaagatttcgataacatcaagggttacgagcagctgaagattaacataaataaggccctgtcgtga

SEQ ID NO: 8862 - RNA, 2514 nt, synthetic construct
  source 1..2514: mol_type = other RNA
atgaatctcttcaaaatcacaagttctgagtttctgaacttcatattcgctaatttagagtcctctaaaggcattgacaaggatttcatcaccctggtgaagaacatcattaactaccagtacaagttctaccagatctttttgattcgaaaagcaaatggaaagctccggcccatcgccgctccgtatcctgaactgaagagcatacagaaatctatcgtcaagtacctggacctgaattttattccccatcctaacagttttggattccagaaaaacaaggacattaaaggtaacgcgaagatgcaccttaataataagtttgtcttcaacgctgacatcaaggattttttcgtgtcaattaagttctctcacttccgaaaaaagatgctgccaaacgagaatatattcagcgacgattccaatcccctgtcaattcttcgtgtgttctgttttatctctgacgctgaaaataaacaactgagcaaggaggacactcactacttccttccccaaggggctcctacaagccccatcctatccaacatatacttctacgacctcgatgaaaaaattttcgacctgtgcaagcagctcaacattaattattctcggtatgtggatgacctgacattttccagcaacgaaaactacttcgaaaacaactccgattttaggaataagctggtgtcaatcctcaactctgatggtttgagcctgaatgagtccaagaacaagctctattacaaatacaacacacagatcgtcacaggactgattgtgaaccaaaagttaaacgttcatcagcgggtgatcaaagacctgcgaaaatggatctatatttacgaaaggtacggcatcgagaagcttaatctaattttcgagaacgactatcactctaaaaatagaaactccaggaacttcaagataaatacattttcagccctcgagagtaaggtggcctacgtcggctatattaaaggctatagagacagtacgtacctcatcttgaaagagaagatcgggaatatcctcaaacacaaagtaatcgagtcaaatgaggaaaagtcattaataatcctggacagcagtttcttcattcacgggaaaaaaagctacaggctgaaattctacgatggccttaatataccaattgacgagataacagtgaccaagaactattttaagaagaacaagtggaagttcaagaagatactgagtgactggggaatctcgaaccagagcgtctattttcggatcgtgatcaataacccaatcaacatagacttgaataccgccttagtcgttaagaagggtgacaccatctattatgaatatgaggataccgaattcaacaactctagcaagcggaccgacgacaactttgagatccaggttgtggcttataacattactgacgagaacggctacatcactattgtaagcatcgatactcccaacgcaattaagtcagtagtcgctacgatcccaactgtgaatgtgaatcaaacctcggaacaacagaaacacttgaaggatttaagagcgagattcctcaaggataaaacctttatcccagtcaaagtgagtaatacgtcctccattaccgattataggtatggccttttttccgaggaaaaatccacccatcgtcaagtaactgaagaggatctgttgaacccgaaggccattgtgggtattttgagcaccccatggaatagcgagaaaggcgagcaggccactgtctttatcaaaaaggaacaggttcagctcccataccctgcccccattgcacagacagggtcagttgtgctgctcattgataatcagatccatgtgctgcataccaagaagattaaagatgtacccgtgaagtacaaacaactgaccaaactgttgaagcagtttgcctcggaagcgaatgcagatgtgcgcaacgggatttggaagcaactaatcggaagagggagtaccgatggaatagtgatctatagaacagaaaacagcaatattgacgtagagcggcagggagaggtcgtgaataatcgcggcattggtcctcagttgttttacaatcctgacactaatacgatcatctacgaggggaaacgctacaatgtgaatgaggaaaacatcaacgacattatcgacgacctcgctgagcgccgcgttcacattgaagaagcccttgtcgaaacttcaaaagattacaagaaggatatcgtggagtacctaactactgacctggctgagctgaacacaaagactggaacatatcagatagcacctacaatttataccgaaataggcaatgtggaggttcaggataatacgaagacggaggtcaaacttacaccacaggaagagcaggccgccctgtttgattttcttccgtccgttgcaaaggaaaccaaagaagttgtcaaccccaaaaccgaggaggcctctgaaacaaccatcgcaaaaaggatactgcctaaagccgatggggaggatatgtctgacatcctgtga

SEQ ID NO: 8863 - RNA, 1269 nt, synthetic construct
  source 1..1269: mol_type = other RNA
atgaaaaatctcatgattaaggataaggagaacatactcatccagcctggcatctttttctacactcatggctactatagcgcaacccacgcccttgacttcattcattctgcggactcctataagaagattagtatccctaaacggaacggcaaaattcggactgtgtatcagccccacccgaagctgcacgccatgcagagcacaatcaagccgttcttacacaaggtgtactttaagatctgtcagaaacacgggatgatttcctacgagaagcggagtcatatgtcaaaacaggcttggaacaggcatatcgaattacggcgaaggttcccaaccatagaggactttgccgatcacatcgatgagttgttcgacgagtattctgatgaggccgataagcgctatggcaaagaaaaccccaatgataaactccatatgtcctctatgcttcttgatttcgactacgattttttttgctacaagggcatcgaccctgagctcagctacaagaaaaccttcaaatactacggtagtgtggtgcagcatgccagaaacgctgttcgcaaaccttacctgttcaagtgtgatatcaaggatttctacccctccatcacggataagaagctatatcgcatcctgtcaagcgaaccatataacacctacatcagccccgagattgccgcactgatcgtgtctgtatgtacacacagatcgagactagttcagggggcatgcacatccccaatcctggcgaacatgtttatgattcatgccgacaactttttctccaagaacttgaaaaagagctgcacatataatcgttatagtcgatacgtggacgatctcattttcgcgtcagaccagccaatagacgctgccgagatatctaagcagatttctggatacttgagttcaatgggactgcagttgcaccccaaaaaaactcgctacctgctgccacatcaaaaaaaaatcgtgaccggtgtcgtcgttaatcagaagataaatatcgacaggcgatatattcggtgtatcagagccatgctgcacgacgctgaagcccaagggatagagcacgcagcacttagacacgcttccggaaagcatggaaaaattgaagctattgacccccagtactttctgaagcgtctgcaagggatgattagctgggtccagtatgtaaggagccctcacgaaaataattgccaacagctgatcaataggtttaacaatctccagaagaaatgggaacaatcaaaatattga

SEQ ID NO: 8864 - RNA, 1635 nt, synthetic construct
  source 1..1635: mol_type = other RNA
atgaaaaaagaacgcatcaatacagtgaatgattggaacaagctcaacaaattgtctggcaacaaggagatacttagtcacctctataagatcttatctcggttcgccgacacattgaagaatgagattattgcagaaatcgagaagaagaataagcctaaggccgaacagattaaactctcgaaatggtctatttcaatcgatcgactgctttacctgtcaggccaggataacctcaagaagcagtatcataaagtggagatccccaaaaaacggggtggagtgcgcatcctgaacatcccatccaagaagctgcgttttgtgcaaagactccttctagactttctgtccgaaaatttcgaaacacacaaatgcgcctacggctttgtgaaagggaaaagcattgttgataatgccaagctgcatgtgaataaaaaacacgtcgtgtgctatgatatcaaggatttctttccatccattaccggccgtcggatttacggtatgttgcaacagtatccatttaatgcaaataaggacgtagctaggattatcgctaatattgcaacgtattacgatgatgagaaaagcgagaaaattctgccacagggctcccctacatctccctacctcgctaacatgatatgtaggaaaatggacagcagaattttcaacttcttcaaggagaagaacatacattatactagatacgcggacgatctcaccttttctactaatgactccaagaaaatagagctgattctgaagaacgtgcctcgcttcataaaggaggaagggttcgagctaaataattcaaagacccgggtgcagaattattataagcgacagatagtgacggggattatcgtaaataagaaaatatccctgcctcgcgagtacattagaggcctgagggccctcctacacaacgtcgagaagtacggatgggaaagtcaagtgaacagaaaaattatctccttcgagagtgacgattacctcaaattcatcaacttccagaaagagacaaataacgaagaggagaacaaaaagttacaaaagctgaccaagagcaagtttgacgaatataataaaacccagaacaacgagcacaaattgatccatggaaagaactacatagatctgaggttaaaatctcagaagtacccgagccagaggtacactcaggtcgacatgatgaaagagatcataaagggaaagatcgaattttggggtatggttcgcaatatcagggataaagaggggaaaattatcaaaaccgataacacctacaagaatctgaaagacgaatttgaacttctgaacctgatgcaaagaaaggaagacgtccagtacatcaaggttagtcggaagttcgagaacatcattaagagctatgagaacaataagtcaatcgacgagaagactaagaaggagatcattgacaacattaatagcttgaagaagcttaagaacgaaaatctgagcgaaatcgttaaaaacatggtatcacccatccttcacaatcccaaacgaaccagtgaaatcttgatcaaatttcacaaggacgataatgtcctgaagtatacaaaccatgactgggataaagaagacgacaacatgaaatttctgactaactga

SEQ ID NO: 8865 - RNA, 2151 nt, synthetic construct
  source 1..2151: mol_type = other RNA
atgcgcttgcccgactgggataaggcgaccgtgaaggcatacgaaactaggtggagtgccttgaaagccagcgggcccactgatgtgtattcagccgtcgccacacttctgagcacacaatccgataaccctgtgccagaagacttaatacgtcatctggtgggatccaagaacaggaaaagacactaccacaccgtggagattcctaaaagaagggggggtgttcgaactctgaccgtcccctctgacacaatgaagtgggttcagagaggcctcttgcaagtgcttacccatttattcccccggcaccggtgtgccgtaggtttcgagcggggagagtcccccctaacccatgctagacaccatgtgcgaaaaagattcgtgtatgtggtggacatcgaggacttctttccaagcatcacctgggctaggatctacggcatgttacaggcatatcccttcgaactgcctccacacgccgctcgcgttctggctaacttagccacttacgatggagccttgccccagggagctccctcaagtcccatactggctaatttgctctgtcggaaactggacagccgcctctttaagtgggccagaacgaatggttaccagtacagtaggtatgctgacgacctcgcattttctaccaacaagaatgagttcccggtgagtgataggaaattcatcgaacaggtaattcaagaggaaggattcagcattaacgccgaaaagtcaaggctgatgccttacagccgccgacagatggtcacaggcctgattgtgaacaagaagcctaacctcccacggtcctatgtcaggggccttagagcactgttgcacaatgtggagaggcacggctgggaaagtcaggtcgggcgtactccggtgtttaaaagggcgtatgagtggacgctgtaccgggataagaaaatgagccctgaaaaactccttggcatccagctcgaccagatcttctatgatcatctggttcatccaacagcagtcctgcacaaggcccgagatgtggcctcacttcagcgggtggtccagggaaggatcgcatacctgggcttggtacgcgggaaggattgtccaatctaccagagaatgcgggatcaatatttagccctcgtccgtcaagagtcagaaatggcccgagggagagcaatttatcaggaaaaggctcgcgaggtagaatccacccctgatgagcctaaaggccccaatagatatgccgagataaaaaaatacgagcagctgcccgaaccggagtaccgctccaagctccaggaactgggagtgcggacgcttgaatatctcttcctactgagaacaaaccagagttttgaggacctaaaaaaggtggctgctcgtattgcatactctacaactacatcccctgaggaaaccgcccgcttctttgccgaatttgacgacgataagaccttccgcgggttgctccacgaaccgatcgggctggagctctctccgggtgaactggtaggagcctgcgaagaggcactttccaggtataagctgccaaataagctgcgtaagcggactgaggagttactggaggagtgccgggtactgctgcacgctaaccccgacgtttatccatggaagaatgacaatcttcgggacaaagtcctgttgccatacaaaaaggacacgcggtttgatgtcgcgcatggccttacactgaaggagagactcgaggagcatatacagatcctggaaaagcgctacgacaagttttttgaggtggatgcagatctaatgctccgaacatttgtgccagacgtcctcaacgctatcaagatcctgttgatctcaatggcgcagcacacatcggccggaaagattcacattcaggttccagaggttctggggcaagggccaatagagatccacatttttgatgaggacagcgtgatgcaatgcgctcctgatctgctgaaaggtgttctaaaaggcgaatctgccggcgcactccgcagacttaggggctacgcatattggaccattaccgctccttttagcgacggctcgtcttacactttcaacgttatgaccaatgagaaattcaaagcgcccgaacccgcctctggtgtccgacataccctgactttccctcaggtgtga

SEQ ID NO: 8866 - RNA, 1083 nt, synthetic construct
  source 1..1083: mol_type = other RNA
atggtaactctcggaagacgtatcaccagccggcaccggaacattaaacccgtttttacgctaaaacatctgtctgccctgtccggtgtggactacgggttcctgaggcacacagttgggagaaatacagatgcctacaccgagtttaagataaaaaagcgctcttcatctgatgtcaagaaaaattaccgtacaatttgtgtccctagccccgccctcatgaaggttcagagatggatcgccggcaacatcctgtcccatgtttccgcccacccatgctcagtggcattctccgtcggagacaggcttttcgacgcggtcgcaccccactgcccttccaagtggttagttaagctggacgtaaggaacttctttgagtctattaaggaagtgtcagtgtaccatgtgtttctgcagctggggttcgaaccgcttatcgccttcgagatgacacgcctgtgtacctacgtcgcttcgaatgcaagcaataacaacgacagatggcatgatagctttttcctccctgaacatgtgattactctgtatcaatatccagagcaaggtcacttgccgcagggagcacctacgagtccaatgcttgccaacctcgcttcgcgaagcctggatgagcgattggccgcgcttgctgacgagaatttggtacgctatacccgatacgctgacgacatgacattttctagcgacgacgtggatttcggccggaaaagagctggcctactcataaaacgggtgtaccaacagctggatcggcagagcctgtcacccaataccgctaaaactaccgtcattccacctggtgcacgtaagttagtgctgggactcagtgtggaggaaaccgtccctaggctgactcgccagttcaagaacagtttcaggcagcacatccactatttattgcgcgatgatgtggggcccaccaaacacgccgcagctagaaagtttgcctccactacaggcctccgccatcacctggagggccttctagcgtttgccgctcagatcgaacccatgtgggcagccgctcagcggaataggttgcaagccgtgagttggccatattga

SEQ ID NO: 8867 - RNA, 1152 nt, synthetic construct
  source 1..1152: mol_type = other RNA
atggagcactggaatccacaactctttagaaaccaggctgcaggggttcctcccgagctggttgcacatatggtcacggtaggcaggaggattaccagctgccaccgggctgtgcagcctgtgtttaccttgaagcatctcgcagttctgtccggggtggattacggcttcctccgccatacagtcggcagacggacggatgtttacaccgaattcaggatccggaagaggcctagcgcaaacgggcaaaatagatacaggactatatgtgtgcccagtcctgccctgatgaaagtgcaacgatggatcgcccgcaacatactgagccatgtccccgcacacccatgttccgtggcattcagcgctggcgacagcctgtttaaggccgtcgctcctcattgtccctccaaatggctcgtaaagttggacatccgcaattttttcgaatctattgaggaaacctcagtatacaatgtgtttcatcagttggggttcgagccactcattgcgtttgagatgacacgcctatgcacctatgctaggtctgaccctagtttgggaccaaaccatcggaccgacggactgttcttacccgagcggatcatcacactgtatcagcacccagcccagggttacctcccgcaaggtgctcccacttcccctatgctggcaaacctagtttgccggactttagatgatagactctcaacccttgcggacgagcactcagtccgatatactcgctatgccgacgatatgaccttcagcactgacaaggtagacttcggacgtgagtctgccggcgtgctaatcaagctggtctaccagcagcttgcccgtcaggccctgagtccgaatacagccaaaacaaccgtggtgccgccaggagcgcgaaaactggtccttgggttaggcgtggaagaggctgctcccagactgacacgccagttcaaagatttgctgagacagcacattcactatctgctccatgatgacgtgggacctattaaacacgctgccgccaggaagtttgcctcgacaacgggtctgcgacaccaccttgaaggccttctggccttcgctgcccagatcgaaccatcttgggcagcgactcagagatcacgttttaacactgtgtcctggccctactga

SEQ ID NO: 8868 - RNA, 1152 nt, synthetic construct
  source 1..1152: mol_type = other RNA
atggaacggtggaatagccagatcttcaggaataatgcagtcggcgtccctccagaattggtggttcatatgaccgctgttggaaaaagaatcacctcatataatcgcgaagtccagcccgtattcactctgaagcatctcgccgtgttgtcaggcgtagactacggtttcctgcgccacacagtgtctagggatactaacgcgtacacagagtttcggatcagaaagaggtcctctgtgcacgggcagacccactatcggactatttgcgtgccaagcccttccttaatgaaggtgcaacgctggatcgctcgcaacatactgtctcacgtgcccgctcatccttgctccgttgccttctctacaggagatagtctgtttaaagcagtcgctccccactgcccgtctaaatggctcgttaagctcgatatacgatcattttttgagtcgattgacgagatctccgtctaccatgtgtttaagcaactgggctttgagtcccttatcgccttcgagatggcccgtttatgtacgcatgtaggggcggaacccagccacgaaccagatatgggccacgactcgcacgtgctgcccgaaagaatcataaagctttatcagcacagtagacaagggcacctgccccaaggggctccaacctcacctatgctagcaaacctggtgtgtagaagtctggatgagcgacttagcacgattgccgacaaacatagtgtacgttatactcggtacgccgacgacatgactttcagcagtaacgaggttgactttggaagagagagggctggacgtttaattcagctcgtgtaccagcagcttaaccgccaggccctgaggcctaatactgctaagaccacagtcgttagccctggtgcgcgcaaactggtgcttggtttgagcgtggaggaggatgtcccacggctcacccgacagttcaaggaatcactgaggcagcacatctactatctcctccacgacgatatagggcccgccaagcatgcagcaacaaggaaattcgcctccaccattggcctgagaaaccatattgagggcttgctggctttcgcctctcagattgaaccgacctgggccgcactacaaatctcccggtttcagacagtgagctggccacattga

SEQ ID NO: 8869 - RNA, 1149 nt, synthetic construct
  source 1..1149: mol_type = other RNA
atgcagcgttggaatccacagttattcaggaaacaggcgtccggcgtgaaacccgaacttcttgcccatctggtgaaggtgggacgcagaattactcaagcacatcgcgatgtgcagcctgtctttaccctgagacacctggccgctctgtctgaagttgattatggcttccttcgacagacggtggcccggagaactgaggcatacgctgaatttaagatcaaaaagcgggggagcgagcaccttagcccccagtaccgcacaatctgcgcgccttcaccttccctaatgaaggtgcagaggtggatcacacagaacatcttggctcacgttccagctcacaattgctccgtggccttctcaaaaggtgacagtctctacaaggcggtagagccccattgcctagccaaatggcttgtgaagatagacgtgcagtcattttttgagtctatttcagagagtacagtttaccggttgtttaacaatctgggttttgaaccactcgttgcattcgagatggcccggctctgtacgagggatcagcacgatgcccaacacaagaaggagcagtggaaagattattcccctgctagcctgtatgtcattgagcagtatatgcatagcgtacaaggccatctgccgcaaggggctccgacctctccaatgctcgccaacctcgtgtgtcgggcactggatgaacgcctggcggccattgccgaggaacagaacctgaattacacccgatatgcagacgacatcacatttagctctctggaccccaacttcgagagggaaatggcaaaggctctcatccagagagtctacagggaattggcccgtcagggactgaaacctaatactgccaaaaccactgtcgtgcccccctcggccagaaagatcgtcctcgggctatccgtagaggaggaaacacctaggttagcaagacacttcaaggacttgctgcgtcaacacattcactacctgacccacccagaggtgggcccaataaagcatgctactgctcgaaagttcgcaagtgtcgtggggctccgccatcatgttggcggattattgacctatgccgcccagatagagccggactgggctgctaaacaacggatgcgcttcctggaagtcaaatggccctga

SEQ ID NO: 8870 - RNA, 1155 nt, synthetic construct
  source 1..1155: mol_type = other RNA
atggagcgttggaacccgcagctgttccgaaagcaagctagtgttgtcgcgccagatgtgctcgcacaatgcatcgcagtggggaggagaatcactgccctccaccgcgatgtgcagcccgtgtttaccctcaaacacctggcagtgttgtcagaggtagactttgggttcattcgacagacagtcgctcgcaggaccgacgcgtatacagaattccgggtgaagaaacggtctactcaaaatggtgacccacgatacaggaccatatgcgtccccagccctggcctgatgaaggtccagagatggattgctcagaatatactggcccacgttccagcacatgcctgttcagtagccttctccaagggagatagcttgtataaggccgtggagcctcactgtagcgctaagtggcttgtcaagctggatattcggaacttttttgaaagcatctccgaggcctccatttacctgacactccagagtttaggctttgaacctttgattgcattcgagatcgcgaggctgtgcacccgagtggtggatgacggcatgcaccggaacgacaggtggctcaataacttcaagcatctgagtccctatgtcatcgcgcaatatacacagacacagcaagggcaccttccccagggcgctcctacttctcccatgcttgctaaccttgtttgccgcgcactggatgagcgtctacttgccgtagccgaaagagctgacgtccgttacacgagatacgcagatgacatgaccttttcctctgacgatgcctccttcggaagagacagagctcaaaaactgattcaggccgtgtacaaacagctcgcttgtcagagtctgtcgcctaatatggcaaaaactaccatcgtgccacctgccgctcggaaagttgttctgggcttgagcgtggaagaggcagagccgcgcctgacgagacagtttaaggccctgttgcggcagcacatatactacctgtcaaggcgggacgtaggagtgatcaagcatgcctcagcccgcggattcacttctgtgaccgggttaaggcatcacctcgagggtttactagcgttcgccgcccagattgaaccaaaatgggctgccatccagcgcagccattttcaggcaatcaaatggccctattga

SEQ ID NO: 8871 - RNA, 1152 nt, synthetic construct
  source 1..1152: mol_type = other RNA
atggagaggtggagccctaggcagtttcgcaaagaggcaaaagacgtcgaccccgacgtcctccaaagagccattgccgtgggaaacaggattgttgagctaaatcgtgaagtccagcccgtgtttactctgaagcatctctctgttctctcaggtgtaggctacggctttctacgccagactgtggcgagacgcaccgaatcctatacggcattccgtatccagaagcgacccacccctgacggagaaaggcggtaccgtactatttgcgtgccaactcccgcactgatgaaggtgcagcgctggatcgcgcaaaacatactgaagcacgtgccagcgcacgatgcctctgtagctttcagtaaggatgatacactgtataaggctgtggagcctcattgtagtgccaagtggctggtgaagctggatatcagaaaattcttcgagtcgatttctgaagcttcagtgtatcttgtgtttaggagcttgggctttgagccactcatctcattcgagctggcacgactgtgtaccagggtcgtggacgcaccgatgtaccgcagcgatgcctggctcaatgcccattggaatgatgaatatgtcatcgagcagtaccgccaagtatggcagggtcacttaccgcaaggggccccaacctcacctatgcttgctaacctggtgtgccgcaagcttgacgagagactggctagcattagcgaatcgttcagcgtgcagtacacacggtacgccgacgacatgacgttctctagtgtagatcgatcctttgatagagcccgggccatgaaacttatcggcaaagcttacgagcagctgagcttacagggtctggggcccaataaaaccaagacatccgttacaccaccagggggaaggaaggtggtcctcggattgttggtggaggaggaaaaaccccggctgacacgggaattcaaagccatgctgcggcaacatttctattacatgctccgagaagacgttggagtcgttagacacgcttcctccagaggcttcataagtatcaccgggctgaggaaccaccttcaggggttattgggctttgccgcacagatagagcctgagtatgcagctagacagcgggaaaaattttctcgggtttcctggcctttgtga

SEQ ID NO: 8872 - RNA, 1161 nt, synthetic construct
  source 1..1161: mol_type = other RNA
atggagcgttggagcagccatcaatacaagaaggtggctcatgagagaggcgtgccatctgccgttgttgagaacgcggtcgctattggaagagagatagtaagaaagaaccctaacgtgcagcccgtgttcacactgaggcacttggccgagctctgtgaagtggactacgccctgctgagacagtacgtttcacgagggtttgacccctacgagagtttcagagtcaggaagaggcccggccctaatggtgagcgccggtacaggatcatatgcgtacccaacccgcctctaatgaaggcacagcgctggatcacacagaatgtgctgcagtatggggtggttcacaacgcttccgtggccttcgctcctaagtctaaactcttacatgcaacagagccccactgcaatgcccggtggctgatcaaattggacatcaaacggttttttgagagtattcccgaaaggtttgtgtatcgggtctttagggacttcggttaccaggcgctcgtcgcgttcgagatggctaggctgtgtacaagactttatcctggccccctgtttgattcccgcaaatggactagcagcggactgcgggaaagcccgtataagattcacgcttacgatcaatcttggcaaggacacttacctcagggagccccaacctccccgatgctagctaacctggtctgctacaagctcgatgagctcctcgcagatttggcagattcagacggcctgcagtacaccagatatgccgacgatctgaccttcagcaccaattctaaggaatttagtcgcgaacaggcagcagcagtggtaggtaaagttttccagcatctcgctcagatgggcttctcccctaatagatctaaaacttcagtgatcccaccacggggacggaaagttgtgcttgggctacttgtggatggctcccgcccacgattgtcaagggaattcaaagccagtctgcgtcaacatttgtactatctgacgcttgacgggtggggaccagtcaagcacgccaaagtccgaggctttgcctcgctcgtaggtttacgtgaccacgtgctggggctgattggctatgccgggcagatcgagccagcctatgcccttgctcgccgacgcgaattcgaaactattaagtggcccatctga

SEQ ID NO: 8873 - RNA, 1188 nt, synthetic construct
  source 1..1188: mol_type = other RNA
atgtcagattggaggccccaacattaccgcaagaatgcaccggcagggagcccagcaagcactatcgatgccgcactggaagttgcaagtattacctccacggccaatagcaggttaccccccattttctctttgagacacctggcccattatacatccattaactacaacattctgcgcgctgctatctctcgtagtggacccgaaccttatcgatctttccgaatccggaaacgtacagagaaatcctctgagcggtaccggcacatatccgtaccttcccacgccttgatgtgtgttcaaagatggattaaccagcggatccttcaacagtgccaggtcgacgacgccagtactgcgtttgcgaaagactcaaagctcatcgaggccgccaccatccactgcaaaagcaggtggctggtcaaaattgacgtgaggaactttttcgactcgataaacgagataagcatctatcgggtgttcaatagtctggggtaccagcctttagtggcttttgaactggcaaggttatgcactcggaaaagcgcacgacattccaagaattggctgaattttagaccggaaaccagggatgtctgggccgccccagatgacgaggggaaagcttggtctagcgatatggtcatcaagtcatatgacgctctacaccagggttacctcccacagggagccccaacctccccaatgctgagtaacctagccatgcgttcgtttgatgagaaggtgcgcgacttggcactcaagcgcggcttcttttacacccgatatgctgacgatatttcactgagcacggagcgcacatcttcacgcgtgacctgtgtcgaactgattagagatgtgcaccagctgcttcacgaggagggactgagtccgaacttcgctaagactaaaatcgttcctccaggcgcgaagaagattgtgcttggccttttggtgaacggagaaaaaccccggctcacaagagaattccgcctcagactgagacaacatttgcactttcttgagaagcctaatggtcccgtagagcatgccgctaagcggaagttcgcgtccgtgtctggcctgagacaccatctgctaggcctcgccgcttatgctgcccagatagaacccgagtacgggcaggacatccagcagaggctcaggaatatcccttggcctagctga

SEQ ID NO: 8874 - RNA, 1191 nt, synthetic construct
  source 1..1191: mol_type = other RNA
atgagcgactggaggccgcagcattacaggaagcatgctccatgcggactggggagcggagtactggacgctgcaattaaggtagcagctggcacccgacaagcaaatgccaagctcccccccatcttctctttgcggcacttagcacattatagcggaatcaactattatgtcctgcgggccgctgtgagcagatctggggtcgagccatacagatcctttcgcatccacaagcgacctccgtcacatgtgagacgttaccggcacatttcaatccccagcccggcactcatgcaagtgcagaggtggatcaaccagcgcattcttcagcagtgcgaggtcgatgaggcctctgtggccttcgccgaaaattgtaaaatctttgacgcggcaaagctgcactcccagtcgaggtggctgattaaaatcgatgtgagggattttttcgactccattaacgaaatttccgtgttccacgtctttaataggcttggctaccagcctctggttgccttcgagctcgcccgattgtgcactcgggaaagtcaccatcgtaaggggaagaactggaagaactttcgactgaaggataacgagatacccagtctgtgggatgagtccgagcctagatggaaatccaacatggtgataaaatcatacgactctcagcaccagggctatcttcctcaaggcgcccccacgagtccaatgttgagcaatctagtgatgaaagactttgacgagaaagttggggcgctcgctagtgaaaatggctttttttacaccagatacgcggatgatataactctgtccacagctgatcagtctagtcggacagactgtgtccaactcatgagggcggtgtatcaactgttacacgaaaagggtctgagcccaaacgtcgccaaggctaagatcgtgcctcctggggccaaaaagattgtgctgggactgctagtaaatggtgacaaaccacgcttgacacgcgaattcagactgcggcttcgccagcatttattcttcttggagaaagagaatggtccagttgaacacgcaaaacgtcggaaattcgcctctgttagcggcctcagacatcacctcatgggactggccgcctatgctgctcagatcgaacccgcatacggccttaagatacagcagcgcctaatgaccatctcatggccctcatga

SEQ ID NO: 8875 - RNA, 1191 nt, synthetic construct
  source 1..1191: mol_type = other RNA
atgagcgattggcactcccagcggtaccgaaaagcagcgcctgctggacagagttccgcagtgattgacgcagctattcagactgctagtatcaccaagcaggtaaacgctaaattacctcctatttttagtcttcgccatttgagccactacactagcatcaattataatatcctccgggccgtggtttcgcgttccagaagagagagctaccgctctttccagattcaaaagcgatcaggacggggcgcctcccgatttcgcagtatttctgtgcccagcccagccctgatgcaggtgcaacgctggatcaatcaacgtattctgcagcagtgtaaggtcgacgaggcctcagtggccttcgccaaacacgccacactgacagaggccgccaaaatccactgccaatctcgttggctgataaagatagacgtccgaaatttcttccattctatcaacgagatctccgtgtaccgggttttcaaatcactcggctaccaacccctggtagcatttgagctagctaggctgtgcactagacagtcactcattggccccgggaaacaatgggaaaatttcaggagcacgaaggacgacatccaggctgccctggacgataagccagtgatgtggagttctgatatggtgataaagagctacgattctccgagacagggatatctcccccagggtgcaccgacctcccctatgctgagcaaccttgtcatgaggagctttgatcagaagctgcgcgacctggcttccgaaagtcagttttactatacgaggtatgcggatgacattactttatcaaccaccgaaccctcctctagggcaacctgtctcgccctcatgaggaaggtatatcagttattgcacgatgaaggcctgtcgccaaacgccgctaaagtccagatcgtgccacccggagcaaaaaaaatcgttctagggcttttggtgaacggtgatacacctagactgacacgcgaattccggttgagactccggcatcacctgtactatctggagaagcccaacggccctgttgagcatgccgccaagagggacttcgcttctgtctccggtcttagacatcacttgtttgggcttgcagcctatgcgtcacagatcgagccggcgtacggggctcaaatacagcagcggctgaggagcattccatggccagcatga

SEQ ID NO: 8876 - RNA, 1194 nt, synthetic construct
  source 1..1194: mol_type = other RNA
atgacaagatggaggccccagcgctatagggctggagcagtagcgaaaggcattagccctcagatagtggagcacgcactccgtaccgcagagatcacccacgccgtgaacggtaagctgccacccatactgacactccgccatctggctgagtatacgggcgtcgactacgggactctccggagtgtggcccgtcgaagcgatgaagtcagttatcgggtcttcaggatccgtaaacgccctgcacataagggggagagacggtttcgagtcattgctgtgccgtcagcacccctaatgcagatccaacgctggataaacaagagggtgcttatgcacgccgatgtacatcccgctagcgtggccttcgccgaagacgacaatattagggaggcggctgcggttcactgccagtgtaagtggcttattaagttggacgtgttaaacttctttgagtccatcagcgagatcagtatctataaagtctttagaagcctcggctatcaaccgctcatctctttcgaattatcccgcatctgcacgcgcatatctaaatccaccgccaatcggtcctctgaacggtggattaatttcagacctggatccgccgttgataccgatggcgtgtcatctattagtggtatgaccatccgggcctacgacgaataccgcatcgggcaccttcctcaaggagcccccactagcccaatgctggccaacctggctatgagggaactggaccagaatctcacagaagttgccaaggtgcacggacttttctatacccgatacgcagacgatctgactttctcgacaagggaggactcggatagacgtaaatgccaacacattattggccagatttatagagcactcgctaacgtgggtctgtccccaaatcgatgtaagacaagaatcatccccccaggtggccggaaaatcgtgttgggattgctggttactggacctgaaccaagactaatgcgagattttaaggctaggttgagacagcatttttactacctggagaggccgaatttcgggccttctcagcatgcgcggaagctgggctttagctcagtcatcgggtttagacaccatctggccggcttagtatcatacgccgctcagattgagccagagtacgggcagaggatgcggaaccgcctgaagaacataaaatggcccatttga

SEQ ID NO: 8877 - RNA, 1179 nt, synthetic construct
  source 1..1179: mol_type = other RNA
atgactacctggcgtcctcaacactttaggtctgccgcaacagccgccggacgagatcccagtaccatcagaaatgccctagccgtggctgagaatataagacgtcataaccccgccctccctcccatctttagcctgaaacacatggccgaattaacagggaacgactatggtgtgctccggtcgattgttaagcgggacgagcccgacccttacagaatcttcacaattcggaagcgacctagcttcgacggagagaggcggttccgcctgattacagtgccacggccagccctgcttcggactcaaaagtggatctgtcagcagatccttgctaaggcaaccccccacgggtcctcagtggccttctccaaagggaatacgctctttgacgctgctaggccacattgcgaatccagatggcttatcaagatggacgtgcgcaacttctttgagtcaatcaatgaaatagccgtctacagagtattccgcagcctgggatatcagcccctggtgtccttcgagctggctcgagtttgcacgcgattgggtggccctactccgttgcggagtactccgagatggcactacgatcccaagaattggccaagcatctctgcataccaggtctaccgatacgggtatggccctagaatgggccatcttccacagggagcaccaacctcacccatgttggctaatctggctatgcgtgaatttgatcatgctgtggatgaaattgcggcgcgccacggcctcagatatacacgctatgctgacgacctcaccttctctacagattctgacgatttcgatcgcggaaaagcggggcacttcatcggtctggtttacaaggagatgggcaaggtgggcctgtcaccaaacataaccaaaactcgcgtcgcaagtcccggcgccaggaaagtggtgttaggtctgttagttgatgggaagaggcctaaactgcctagggagtttaaacaaaacatgcgccggcacattttttgtcttacccatgagggactggggccagtacggcatgcccaggaacgtggatttagctccgtcaggggcttcaggaggcacattcagggcctcctggcctttgcaaaccagattgagccggaatatgcggcaggttgcaggcagcaactaagaggcgtagtctggcctttgtga

SEQ ID NO: 8878 - RNA, 1179 nt, synthetic construct
  source 1..1179: mol_type = other RNA
atgacctcttggcgcccccagcattttcgaagtgcagctgcggcagccggaagggacccatcaacaatccagaacgccctggcaatcgcgcaggggattaggcagcataatgccatcctgccacccatcttcacactcaaacatctggcagagcttaccggcaccgagtatgctgcactcaggtccatcgtcaaacgagatgagcccgacccttataggatctttactatccgaaaacggccgtcctacgatggggaaaggaggttcagactcattactgttccaagaccttctctcctgcgtacccagaagtggatttgccagcagatcttggccaacattgtgccacactctagctcagtagcattctcgaagggcgatacggtttacgatgctgctaatcctcactgtgaatcacgctggctgataaaaatggatgtccggaattttttcgagagtatcaacgagatatccgtgtatcggatcttccgcagcgtgggttatcaaccccttctgagctttgagttagcacgaatttgcacaagactagggggcgcaacaccactgagaatgaccccccggtggaattacaacagccggcaatggagtgccatcagctcttaccaagtgtacagatacggacacggtcctcgtgtggggcaccttcctcagggagcgccaacttccccgatgcttgctaatctcgccatgagagaatttgaccgcagagtagaccacctggccactcatcacgggttgagatataccagatatgctgacgacttgaccttctcgactgtgtctgacgatttcgaccgcggcctggccagccacttcattggcttagtctacgccgagatgggcaaggttggactgtcccccaatgttaccaaaacacgggtggctagtcccggtgcccgcaagattgtgctcggccttctcgtggacggcaaagctcctaagttaactcgagagtttaagcagaacatgcggaggcacattttttgcctgacacacgaggggctaggtccaacgcggcatgccgaagaacgtggattcagctccgtcaggggactgcgccgccatatacagggcctgctggcctacgctaagcaaatagaacccgattatgccgcgaactgtaggcggcagttgcagtcagtggtctggcctttgtga

SEQ ID NO: 8879 - RNA, 1173 nt, synthetic construct
  source 1..1173: mol_type = other RNA
atgactagctggtcacctcaacacttccagacagtagctgacagcgctgaaagagatcccaaggtgattcagaacgcccttaccgccgcaagagtcattcgtagcaccaatccagccctgcctcctgtgttcacgctgggccaccttgcacacctgaccggaagcgaattttttcagctccggagcgtggcccggagagatgaaccggacccataccggctgtttcggatccggaaacgaccgagctttgagggcgagcggcgatttcgaattatcaccgtgcctcaaccacacctacttagggtccagcgctggataacacaggcaatcctggcgaacgctttaccccatcaggcttccgttgcattctctaagggtaataggttgagggacgccgccgctgttcattgtaattcatcttggctcatcaaactggatgtcacgaacttcttcgagtctatttcagaaatttcagtgtacaggatctttcgtagtctgggatatcagccactgataagtttcgagatggccagaatatgtactcgcctcggcggccccacaaccaggaaacgaggggaaagatggagagtgcactttaaacctcgggagattaagtcctacgatgtatatagaccctttggaggcgcccgtgtggggcatctaccccaaggtgcccccacctctcctatgctcgctaatctggccatgagaagttttgacactgaggtggataagctcgccgttgagcatgggctgaggtatacacgctatgcggacgacttaactttctcgacaaagggggaattctcccgcgatcaggccgcacacgtaatcggcctcgcttacaaggccatggggagagtcggcctgtcgccaaacgccactaaatcccgagttgctccacctggatcccgcaaaatggtgttgggtctgctggtcgatggcgctgaaccgcgccttccacgggagttcaaggaatctatgcggaggcacttatattacttgtgccgcacagacatagggcctgtggcacatgcgagggctcgtggtttcgccagtaccatcggaatgaggcatcacattgagggattgctcagcttcgcgaagcagatcgagccctcctacgcagcagagtgcaagcgcaaatttgcaaacatcgactggcccatctga

SEQ ID NO: 8880 - RNA, 1119 nt, synthetic construct
  source 1..1119: mol_type = other RNA
atggcaaatgctttggccactgccagccagctcaagatcccttcacttcctccagtgtttacccttgcccaccttgctcagcaggcaggagtggactacggcgtgctgcgacgtgttgctcagaggagcccaaacgaaggttaccgcgtgttccggataaggaaacgcccagcttatactggcgagcggagataccggcagatagcggtgcccagtccacagctaatgaaggtccagcggtggatcacccaagcgattctcagcaaagctgccgcccactcagcatcagtagccttttccaagggagataagttagcagacgcggcagcccctcattgcggttgtaagtggttaataaagatggacgtgagaaatttcttcgagagcatcaacgaaattgcagcatatcgcgtttttagatctttaggctaccagcccctcgtgagtttggagatggcccgcatctccacgaggctagccggatggagtccaagacgagccaccaacaggtggcgcgtagaagactggcggcacatggagcgccgatggtccgaaatcgaggcctaccaagcatatcgagacgatagcggaccccttctcggccacttgccccaaggagccccaacctctcctatgctggccaatctggctatgcgggaatttgatgctcaggccgccgcaatcgctgagcagaatgggatgatctataccagatacgctgacgatctgtcattctctacggatcagcccatcactaaagctgattgcaggcgtcttattgggacaatttacaatctgatgggcactattgggctgtcgcccaacgtgacaaagacaagagtttcccccccgggagccagaaaaattgtcttggggctgctggtagacggtaagaaacctcggctctcccgagagtttcgtgcgctgatgaggcagcacctgcattatctcatgaaggatggggttggccctgtgaggcatgccagggctaggggtttcgtctctgtggctgggttccggaaccatctgagaggcctcgcgacatatgcacgccaaattgacgtcgtctacggcgatggactgctgagagagctggacaaagtgagctggccggtctga

SEQ ID NO: 8881 - RNA, 1152 nt, synthetic construct
  source 1..1152: mol_type = other RNA
atgtcccggtggagcccccagcaataccgaagtaatgcccagaatatcgacccagacatagtggcgcacgccatagaaacggcccgcctcattcacgaagtgaacgccgagattacacctgtcttcactctcaggcacctcgcctatgcgaccgacgtagattatggcttactgagggcaatcgcctccagagctcatggagagccataccgcctgttcgtgatcaaaaaacggcctagcaggtcaggggagaagagatttcgggtgattgcggttccttctccagggttaatgaaagttcagcgttggatcacccaccggatcctgggccatatacgcccccaccccgctagtgtggctttttctaagggcgataagattgtgtctgcagtccgccctcactgtggagcacgatgggtaatcaaaatggatgtccgaaacttctttgagagcataaacgagatctccatttaccgtgtgttccgcagtctgggattccaaagactaataagcctggagatggcaagaatttgcacgagactgggcacacctactatctcaagactgcatcagcgttggaagagcaattatcagagggagactatccacgtgtatggcgctgggagaatggggcatctaccccagggcgctccaacctctcccatgctcgccaacttggcggtccggaaactggacgagcttattgaagaaattgcaaccaagtgcggcatgatctataccagatacgctgacgatttgacactctctacaaaggatatgacctttaatcgggaccaggcagggatcgttatcggcaagatctacgccgctatgggactttacgggctgagcccgaatatcactaagacaaacattttgagtccgggaagccgaaaaatcgtcctgggtcttctggtggacggtgaaaagcctaggctttcccgggatttcaggaatctcatgaggcagcatctgcactacctcggatcattaaagcatgggccagccgagcatgcctccaagaggggattttcctcaatacgcggtatgaaacaccacatttatggtctggcaacttacgcccgccaaatcgaagaatcgtatggcattgaatgtattgccgctttgaacaaaattgagtggcccatctga

SEQ ID NO: 8882 - RNA, 1152 nt, synthetic construct
  source 1..1152: mol_type = other RNA
atgagtaggtggagccctcaacaatataggcgctccgcgaaggacacagaccctgggattgttgcaaacgccatagagacagcaaaactgatccatgccgtcaatgccgatgtggccccagtgttcacactgagacacctggctcacgccgcggatgtggactatggactgctgagagctattactagtcgggccgacggcgagccataccgattgttcctgatcagaaagcggcccagccacactggcgaaaagcggtttagagttattgctgtcccctcgccggcactgatgaaagtacagcggtggatcacgcaccgcatcctgggacatgtgaggccccactcagcaagtgtcgcctttagcaaaggggataccctagtggcagctgctgaaccacactgtggcgccagatggattgtgaaaatggacgtgcggaatttctttgagtccattaacgaaatttccgtgtatagggtgttccagtccctgggcttccagcgcctgatatctctcgagttagcacgtatctgtacccgcctgggctctcttacaacgtctcgaaaaaatcctagatggtggtctaatagagagcgtgaaacaattaaggtttatggtgctaggcgcatgggacatctcccgcagggtgctcctacttccccaatgctcgctaacctcgctgtaaggaaattggacgagttgatcgaagagatcgcggcaaaacacgggatgatctatacccgatacgccgatgatttgacagtctcaaccaaggacaagaccttcaaccgggataaatgccgagctgtgatcggagaaatatacgcagccatggccaagcacggcctttcaccaaacaccgccaagactatcattctgagccccggcagtcgcaagatcgttttaggactcctcgtagacggagaggaaccccgcctacagagggactttcgtattttaatgcgacagcatctctactacctgactagccctaagcacgggcctgccgatcatgccaggatcaggggcttttcctctatacggggtatgcggcatcacatacatgggctggcgacctttgccagacaggtcgagaagccatacggggaagagtgccttagcgcacttaataaagtgaactggcccgtctga

SEQ ID NO: 8883 - RNA, 1158 nt, synthetic construct
  source 1..1158: mol_type = other RNA
atgacgagatggaacccccagcaatttaagcgggacgctgaaagggccggacttgaccctgctgttacagctaatgccattagaacggcccgtctcgtgacttccgtagatccagatcttcccccagtcttgacactgcgccatctggccgcccttacccgaagtgactacctgatgatgcgcggcatcgccatgcgaagccagaacgagcattacaggctctttcgtattagaaagaaacctgcgcatgacggagagaagcgcttccgcgtgattgcagtccccgaaccggggttgatgagagcacagcggtggattgcccagaggatcttggcacgaattcggccacacggggcctctgtagcctttagtaagggagacaagctggtggaagcggctagaccacactgcggtgcccgatggctgataaagctggacgtgagcaacttttttgagtcgattaatgaaactgccgtgtatcgggtgtttcgcagcctgggctatcaacctttagtgtgcatggaaatggcgaggctatgtacccggctcggcacaaccactcattaccggagtcgccctcggtggctgttaacccgtgaaagatccactatagaggtgtattcacgcaggagaatgggccatctcccccaaggggctcccacatcaccaatgcttgccaatctcgcggttaggctgttcgatgaggccatacaggaattagcagatgcaaatgacctggccttcacaaggtacgctgacgacatcgcactgagctctcaggacgcaaaatttggtcgggacagatgtgccgctgtgatcggaaaggtctacgctaagatgggcgagttcggtctgtcacccaatgccaccaaaaccagggttgcatccccgggcgctcggaaagtggtcttgggactcctggtcgatggcgacgagcctcgactgcctagagatttccgtgcaaacatgcggagacacctacactatctctgtgtacccggggccgatatcgcagttcacgcggctgccagggggttcgattctatctctggcatgaaaaaccacgtgttcggacttgcaatgttcgctaggcagatcgagcgcgattacggggatgagtgcttgtccaaactgaacgctgtcgcctggccacgctga

SEQ ID NO: 8884 - RNA, 1155 nt, synthetic construct
  source 1..1155: mol_type = other RNA
atggaagattggcttcctcaattgtaccaaaaacagggcactgaagccgggattgcccccagggtcctggcaaatgctaacttgacagcgaagagtatccgagccgttaacagacacgtaccaattcttttttcacttaaccacttggccgtgcgttgtggcgtgccttacagctttctgagggccgtggtggagaggcatgattttcaattctaccggtccttcaggatccggaaacgcccactgaagggcagagtgagattccggctgattagcgcccctgtccccttcctgatgcgcgttcagaggtggatagcacaggagatcctatctaatggctacccgcacgaaacctcaaccgcctatgcgaagcggtcctctcctttgaaggctgccgctttacattgcgacgcacgatggctcatcaagatagacgtgatgaatttcttcgaatcaatcaccgaagtcagtgcctatcgagctttccggaggctcggatatcagccactattgtcatttgaaatggcgcgccttagcacaagggttcggagcgccttacgacagctgccgtctccctactggcacactcaggctcatcgctggccaaagatcgaaagttatcagtgttggagaaagggcgggctgccccaaggtgctcctacttccccgatgttagcaaacctggccagtattgctctcgacgaatgcctggcagaggtggcacgcaaatatcggctgacctattcccgctacgcagatgatctgtgcttttccacaagcggcgatttctccaggaaagattgtgctggtgttatttccgaggtgtacgccggactgcgcaaatttgggctcagaccccagaccatgaaaacaacggtgtctccacctggtgcccgaaaggtggtgctggggctcctggtcgacaggaatactccccacctaacgcgggagtttaaggcacgtctgaggcagcacctgcactacctcagaaaagccgacgtaggaccagctagacatgcagagcgccgtggattttcgtctgtcatcgggcttcggcatcacgttgagggactcgtcgagtatgctagctctgtagacgcggtgtacggcgagagcagaagacgtgagctcgccgaggtcagctggcccttctga

SEQ ID NO: 8885 - RNA, 1152 nt, synthetic construct
  source 1..1152: mol_type = other RNA
atggagaattggttgagtcaacggtatagaatggatgctaacaagcagggtgtggacccagaggttgtagagcacgcagtggcaacagcagagaatatcagaagtattaacccgaacgtgcctctcctgttttctctgaaacatctcgccttgcgggcgggcgtcccatatgagtttctgcgcgccgtggttgaacgccaggagagacatttctaccggacattccggattcgaaagaggccgctggagggcagaatccgcttcaggttgattgcggctcctgtaccccctttgatgtccgtccagaggtggatcgccactcagattctgagcgaggggcacccccatgaagctagcgttgcctacgctcgtcactcatctcccctgaaggctgcttcattccactgcaacgccaggtggcttatcaagatcgacgtgatgaatttctttgaatccattaccgaagtggctgcatatagggcttttcgcagattcggttaccaacctctgctctcctttgaaatggggcgtctatgcacaagggtgcgaagctggcgaagacaggcacccccttactggcaaagtaaatcttggcgctggggaaagatagattcatacaagttctctaccaagggcgcactcccacaaggtgcgccaacgagcccaatgctcgcgaacctgaccgcgctagagcttgacgctctggttacaaggcttgccaataagcacggattagtgtacactcgctatgcagatgacctgtgcttttccactccaggcgaattttctagagcccagtgttcgcagctggtcggcgaggtatataaagccctgcgtcgctttggcttacggccgcagaccatgaaaaccgtgatcgccccacccggagcccgaaaagtcgtgctagggttgcttgtggatggacagaaacctcggctgcccagggagttcaaggccagactgcggcagcatcttcacttcctcacgcaccctagcgtcggacctgcattacacgccgccaggagaggttttgctagtataatagggctccggcatcatgtcagcgggctgatcgaatacgctgcctccgttgaacccgcctatggcgcacgatgtcgctcacagttcgccaatgtgcagtggcccttctga

SEQ ID NO: 8886 - RNA, 1158 nt, synthetic construct
  source 1..1158: mol_type = other RNA
atgactcattggtccccacagcgatacagaagtttggggcaacgccggggaatcgacccatcggtactggagaatgcagttcgcactggtaatatcacctgcgcagcaaacccccatgtccccaccctcttctcactgaaacacctcgcatatcgatctggagtggattactccctcctcagagcgattgtagagcggagggaccctgagccataccgaacgtttaaggtcaggaaaagaagcagttcaccgcagcatgctcggtaccgggtgattgccgtgccgtctccagctcttatgcgggtgcagaagtggatcgcccagagaattctcgcagtggcccctgcccattctgcttctaccgcttacggcaagaactgtaacatcagcgacgccgtcttgccccactgttcttccagatggctcatcaagcttgacgtgaggagcttcttcgaaagcataagtgaatccgccgcatatggcgtcttcagaaagcttggatatcaacccctgatctcctttgagctagcaaggatttgcacacgtgtatatagcaaaacacgcctgcgctcgtataaatactgggatgtcgaacctgcccgctggtccgcaattcctagttatcagtactttcgaaaaggttccctgccacagggggcccctacaagccctatgttggccaacctggctgtgcgtcaattcgatgccaatatcaccgctatagctgagaagtacggcctgatctacactcggtacgcggatgaccttgcgcttagtacttcaggcgaattcagcaggcaaaaatgccactcagtgattcagaaggtttatggagaaatgagagctttcggtctgtctcccaacgcaacgaaaaccgctatatcaccaccgggcgccagaaagctcttactggggctgctggttgataccgaccggcccaaactgacaagggagttcagggcgaagctgcgtcagcacgtgttttttttacagagcccaaaagctggacccgttaagcatgcccgccacctggggttccagtccttgattgggtttaggcaccacatacacggcctagtgaattatgcctatgagatcgagcctgcctttggcgagcgctacaaggaagccttgaaggccgtggaatggcccttatga

SEQ ID NO: 8887 - RNA, 1152 nt, synthetic construct
  source 1..1152: mol_type = other RNA
atgactatgtggcggcctcagtcttaccaacggcgcggcaaggagctgggcatagaggaaactctcctagctcgagcatgcgctattgggtcagcagtaatcgccgttaaccctgctctgccacctgtctttacacttcgccatctcgcctatcaggtggatgccgattacggtcttctcagggctatcatttcccgctctttaagggatccttataaggtgttcagaatccgtaagcggcccagcaccgtgggagaaaagagattccgagtgatctgtgtgccagaccccgagctgatgcgcgtacaaagatggatttctcagcgaatcctcagccacgccaatccccatagcgcgtccgtcgcctacgccaaaggttccactatacttgccggggcagagcctcattgtgggtgcagatggctaatcaaacttgacgttcggaatttctttgaaactatctcagagatagctgtgtatcgcgtctttcgaagcctggggtatcaggccttagtggccttcgagctgacacggttgtgcacccggctcggcacgaaaaccccgctgagaattgggcagagatggcaggttcatttcggtaggcacatggtgatcggcgattattcggcctctcgtatgggccatctgccacagggagcacccaccagcccaatgctggcaaatttggctgtgctggcttttgacggcgaagtcaacgaaattgcgaacaagcacggtctgatctacacacgatatgcagacgatatcgctctaagtacaaccgacaagacgttctcccgcaccgtagccgccaaggtcattggggaggtgtacgccgcgatgggccgttacggactcagtcccaacgtcaccaagactagggtgagttccccagcatcaagaaaggttgtcctcggactgctggtggatggaaacgctccgaggttgacacgcgagttcaaagcaaatctccggagacacctgcactacttggggcggcctgacgtaggcccagccaaacacgcagctgctaggggctttgcagccattgcgggcttaaggcaccacgttgagggactggtggcgtttgccaggcaaatagaacccgaatacggagagaggtcagccaaattgcttgtggacagactgtga

SEQ ID NO: 8888 - RNA, 1167 nt, synthetic construct
  source 1..1167: mol_type = other RNA
atgaaggattggacaccccagcactataggagggcacccggtgcggccaatttgcctgcttccgtaatggaagctgcaatcgctgcctccggcaagaccgttgcggtccactcttctcttccgccgatcctgacccttaatcacctggcacacctgacacaagtgccttataagcaccttcgcgattacgtgactcgagagatagaaagctacaagatcttcagagtccgaaaacgagctcgtccaggcaaacctaccacgtttcgagtgatctgtgtacctcccccatcattggcaacggctcaacgatggatcgcccagcatgtactctctaaagccaggcctaacgccgctagcacagccttcgctccaggaagtaaactggtggacgctaccgctccgcattgcgcatcccggtggttaataaaagtggacgttcagagattcttcgagtctatcagcgaggttgattgctatcgggtgttccggtccctgggttatcagcctctcgtcgccttcgaattgtctaggctctgtactagaacggggaacttttccaggcttcatcgggcgattaaatggcggcgcaaaatttcactgagcaagtcgaagataccagggtacgcaagtcgcgacattggacacgtcccacagggcgctgctacttccccaatgctggccaatttggttatgcgggaggccgacacattgatgacaagcctcgcagatcgcctgggcctaacttacaccaggtatgccgacgatctgacattctcaacttcagatcccaaatttgatcggcagactgcaattaagaccgtgaatgaagcctacgcgatactgagacgctttggtttcacccccaacattgcaaagaccacaattgccagtcctagaagccgtaaaattgtgctgggccttcaggtggaccaggacaagccccgcctaacccgtgcctttaagatgaagatgagaatgcatatgtactatctggaaaggagagacatcggcccattagtgcatgccgaacgccggggatttagtgccgtcgccgggatgagaaaccacctgatgggactggcggcctatgcaatccaaatcgagcccgagtacgggaggaacttaagagagaggctcgaggctctcgactggcccgtgctctactga

SEQ ID NO: 8889 - RNA, 1167 nt, synthetic construct
  source 1..1167: mol_type = other RNA
atgaaagactggacccctcagcattaccgtcgagctcaaggcgcctcctctatagcaccgctggtgatggacgctgcaatcgtaacgagtcagaaaactgtcgccgtgcaccccagccttccaccaatactaaccttgaagcacctggcccacttaactcaagtgccatataagcacctgcgagattatgttacccgggaggtggagagttacaaagtgtttcgtgtgcgtaagagaggtcggctgggtcagccaacatcgtttagagtgatttgcgttccccctcccagcctcagtgtcgctcaacagtggatcgcccaacatgtcctcgccaaggccaaaccacacgctgctagcaccgcttttgccccaaactgccgcttgatcgacgcagcatccccgcactgtacctccaggtggctgattaaggtagatgtgaagcgctttttcgaatctattagcgaaatcgattgttacagagtatttcgatctctgggatatcagcctctcgtctccttcgaactctcaaggctttgcacgcggaccggcaacttcagccgaatcagacgcacagttaagtggcggaggaaagttagcctgtccaagtctaagatccctaattatgcttcaagagacattggacatctgccgcagggcgccgcaacaagtcccatgctggcgaatttggctatgcgcgaggcagatattttgctcactgagctggccgagcggctcggactcacgtacactaggtacgccgatgatctgacactatcaaccaccgacgtcaccttcgaccgcgagcaggcgagacggacagtgaatgaggtttaccgaatcctgcagcggttcgggttgaatcccaacttagctaaaactacaatcgcctcccctaggtctaggaaaattgtgctcggactgcatgtgcaccaggaaacaccccgcctgactcgggcattcagaatgaaaatacgcatgcatcttcattacctggaaagaaaggacgtaggcccccttaaacacgcggagaggaggggtttttcagccgtcgccgggatgagaaaccacctaatgggcttagcagcttacgccatccagattgagcctgactatgggcgcgaagtgaaggcgaggcttgaagccgtggagtggcctgtcctgtattga

SEQ ID NO: 8890 - RNA, 1167 nt, synthetic construct
  source 1..1167: mol_type = other RNA
atgaaggattggaccccacagcactaccggcggtctaaaggagctagtaatgttccaacagcagtgatgaacgcggcgatcgcaacatcccagaaaactgtggccatcaatcctagcctacctccgattcttactttgaatcacctggcacatatgactcaggtcccttataaacatctgagggactatgtcgccagggacgtggaatcctacaagacttttagagtacgcaaacgggccaggccgggtcgaccaacatcattccgcgtgatctgtgtgcccccacctagtttggccgtcgctcagagatggatagctcagcacgtgctcgccaaagctagaccccatgcagcctctacagcgtttgcacccaagtgcaagctgatcgaggccgcagcccctcactgtagctctaggtggttaatcaaggttgacgttcagcgattcttcgagagtatttcagagatagactgctatagggtcttccggtctttaggctatcaaccccttgtgtcacttgagctcagccgactgtgcaccagggttggccatttctccagaatgaggcgcgctattaagtggcgtcgtaaagccccactggctaagtcgaagatactcaagtacgcgtccagagccctaggacatctgcctcaaggcgccgctacctcacccatgcttgctaatctggtgatgcgggaagctgataccttgctgaccagcctcgccgatcggtttgggctgacatacaccaggtatgccgacgatctgaccttttctaccgcagatactgcatttgaccgcaaaagtgcacggaacgccgtgaacgaggtctatgggatcctgcggcgattcgggctcacgcctaacctgttcaaaacaaacattgtttccccccgaagcagaaagatcgtattgggtctgcaggtaggccaagatgtgccccgcctaacgagagcattcaagatgaagatgcgcatgcacctctactacctggagagagaagacgtgggaccattagcccacgccgagagaaggggatttagcgctgtcgccggcatgcgcaatcaccttatggggctcgccgcttatgctattcagattgaaccagagtacggcatgggtgtgaaagcgcgtctggaagcagtccagtggcccatcttgtactga

SEQ ID NO: 8891 - RNA, 1167 nt, synthetic construct
  source 1..1167: mol_type = other RNA
atgaaggattggaagccacaacattacagaagagctcccggagcatccaaagttagcgtacccgtgctagccgcggccatcgctacaagcgaaaaaacggtcgccgtacacccgtcattgcctccaatacttactctgaaacatttagcccacctgaccggcgtgccctataaacacttgcgggactatgtcagcagggacacagaggcctacaagatattccgagtgcgaaaaagggctaggcccgggaccctgaccagttttcgggttatttgtgttcccccacctagtctagcaattgcgcagaaatggatagcacagcatgtgctggccaaggcaaaaccgcactccgcatctaccgctttcgcccccaattgtcgcctggttgacgcagcaaagccacattgcgctagccgttggctgattaaggtggatgtgcagagattctttgagtccatctccgaaatcgattgctaccgggtgttccgctccttggggtatcaacctctcgtctcgctggagctctctaggctctgcactagggtcgggcggttcaatggcatgcgccatggcatcaaatggagacgcaaagctagtatcaagaagagcaagattgtacgatacgccctgctgcggcttggacacttgccacagggtgccgcgacttcaccaatgcttgctaatttggttatgagagatgctgacgaactgctcactagcatggctgaccagcttggcatgacctacaccaggtatgccgacgacctgacgttttcaaccgcgtctcccgtgttcgagcggcaaacagccaggcgcgtgattaacgagatctaccaggtgctcagaagatatggtctgacacctaacttagccaaaaccacaattgtccctccacgcagtagaaaaatcgtgctgggtctgcaggtggatcaggacgaacctcggctcactagggcctttaagatgaagatgaggatgcatttacactacctagagcgagaggatgtcggaccccttaagcacgccgaacgacgtgggttttcagcagtggcaggcatgcggaaccacctgatgggactggccgcttatgcctctcagatcgaacctacatacggccgtgatctgaaggaccgcttggagaagctcgattggccggtcctctattga

SEQ ID NO: 8892 - RNA, 1167 nt, synthetic construct
  source 1..1167: mol_type = other RNA
atgaaggactggaaacctcagcactatcgcagggctcctggtgcagccgacgttccagccagcgttatggctgccgcaatcgccaccggcgctaaaatcgtcgccgtgcaaagaagtcttccgcccatcttcacactgaagcacctggctctgttgacgcaggttccataccctcacttgcgcgactatattactcgcaagaccgatgcgtacaagatttttagagtgaggaagcgagctaggcccggccagcctacctcgttcagagtgatttgtgttcctccccactcacttgctgtggcgcagcattggatagccaaacacgtcctcgccaaaggggtgccacattccgccagcacagcctttgcacccgactgccggctcattgatgccgccgcaccgcactgcgcttctagatggttaataaaggtcgatgtgcagcgtttctttgagtcaattagcgaggtcgactgttatagggtgttccgatcattgggataccagcccctcgtatcccttgaactgagtcggatctgcaccagaatcggccccttgaatagccttcgtcgctctgccaaatggttcagaaaagcacctctcgctaaatccaagatccggagctatgcagtgccgaggatcgggcatctgccacaaggagcagctacttctcctatgctggccaacctggccatgaaggaagctgatgtactgctcactgccttagcaaatagatattctctgaattacacccgatacgcagacgatttgacgtttagtactgcagaccacagcttcaagcgcaacgatgcccgaatggctgtgcatgagatttacggtgtcctgaggcggtttggacttgcacccaacctcacaaagaccgctatcgtaagtccacggtccagaaagatcgtcctgggactgcaggtgaaccaggatgtgccacgcctaacacgggactttaagatgaaaatcagaatgcacctgcattatctcgagcgcgaagacgtcgggccattaaagcatgccgagaggcgtgggttctccgctgttgcgggcatgcggaatcacctaatgggtctggccgcctacgccgctcagatagaacctgcatatggccaagccattaaagcgaggttcgagcggatagcgtggcccgtgctgtactga

SEQ ID NO: 8893 - RNA, 1167 nt, synthetic construct
  source 1..1167: mol_type = other RNA
atgaaggactggaaacctcaacactaccgtagagccgctggcgcagtcggagttccagcaccagtgatggccgcagcaatagcaaccggccagaagacagttgctattcacccctccctgcctccaatcctcactctcaaacatctagctcatctcacacaggtcccgtatttacacttgcgggattacattgctagagagatcgacgcctacaaaattttcagagtacgcaagagggcccgacccggacagcctacaagtttcagggtgatatgcgtgccgcctcactcactcgctgttgcacaacagtggattagccagaatgtgctggccaagggcaaaccacatcatgccagcaccgcctttgcccccaattgtcggctggtggatgccactgcccctcattgcagcagcaggtggctgattaaggtcgacgtacaacggtttttcgaatccatctccgaagtcgactgctatagggtctttaggtccttaggctatcagcctctggtttccctggaactttctaggctctgtactagagtcggaccattcaacgggctacggcgatcaagaaagtggtttcggaaagcccctatcgagaaatctaagataagaccctatgcggtgagtcgactgggccacctgccacaaggggcctctactagtccgatgttggctaacctggccatgcgggaggtggatgggcttatgacggcgatggctgaccgttacggtctgacatatacccgctacgcagacgatttaacattgagcacctcggatcccgaattccagcggaaggacgcacgaaaagctatttacgagatctatggcatcttgcgcagatttgggctgaatcccaacctgaccaagaccgccatcgtgtcacccaggtctaggaagatcgttctcgggctgcaggtggatcgtgatgagccccgccttacgcgcgcgttcaagatgaaattgcgcatgcacctccactacctagagcacgaagacattggtcctctcaagcatgcggagcggcgcggattttctgctgtggtgggtatgaggaaccaccttatgggcctggccgcttacgcaatccagatagagcccgattatggaaaggacatcaaaatgagactggaacgagtgaaatggccagtactttactga

SEQ ID NO: 8894 - RNA, 1167 nt, synthetic construct
  source 1..1167: mol_type = other RNA
atgaaggactggaagcctcaacactatagaaggtcccctggtgctagcgctgtgagttcctccgtaatggccgctgccatcgccactgcgcaaaaaaccgtggccgtgcacagtagtctacctcccattctgacgctgaagcatctcgcacacctgacccaggtgccatacctgcatttaagggactacgtgtctcgggaagtggaagcctacaaaatctttagggtccgcaagcgggcaaggcctgatcagcccacctcttttcgtgtcatatgcgttccaccccagagtctcgcagtcgcccagcgatggattgcgcagcatgtgctggctaaagggaagacgcacccggcttccacagccttcgcacctaattgtcgactggtcgatgccgccgctccccattgtgcctccagatggctgataaaagtggatgtacagaggttctttgagagcatcagcgaggtggactgctatagggtcttccgctcactgggataccagcccctgatgtcacttgagttatctaggctatgcactcgggtcggacctttcaatggcatgcggaggtcccgtaagtggtttagaaaaccgccactgtcgcgatctaaaatcaagagctacgcggtgtggcgcttgggacacctcccacagggtgctgcaacatcacctatgctggctaacttggccatgagagacgtggatgtccttatgacaggcctcgcggatcggtacgggctcacttacactcggtatgctgatgaccttacattctcaaccgcagatccgggctttgagagagaggacgcccgcaaagccatttacgaggtttatggagtactgcgacgattcgggttgaccccaaacctggcaaaaactacagtggcgagcccccgttctcggaagatcgttttaggcctccaagtggatcaagacgctcccagactcccccgcgccttcaagcttaagatgcggatgcatctatattatttggagagagacgacgttggccctctgaagcacgcagaacgcagggggtttagcgccgtgaccggtatgcgcaaccacttgatggggctcgctgcatacgccattcagattgaaccagcctacggcaaggacatcaaagcaagactggaaagagttaagtggccagtactttattga

SEQ ID NO: 8895 - RNA, 1170 nt, synthetic construct
  source 1..1170: mol_type = other RNA
atgaccgactggaagcctcagccataccggcgggcagcagaggatctgggcatttctaaggccgtgctcgatgcttccatagcagcttctctcgccgtggtggacgtcaatccaagcttgcctccgatcctaacattgaaacatctttctcacctcagtggggtgccttatcaggacctgcgcttgatagtaagcagagagaacgccgacccatacaaaattttcagaatccggaaaagacccagacgagatggactgacacagtttcgcgtgatttgcatccctgaggtgaagctggctgaggttcagcagtggatcgcaaggaaggtgctagcccatggcagaccccactcagcctcgaccgcattcgctcctggctcacgcctcgtcgatgccgtccaaccccactgtgggtcacgctggataattaaggtcgacgtaaggcggttcttcgaatccgtaagcgaaattgctgcatatcgggtgtttagacgactgggttaccaaccattaatgagcctggaactggcgaggttgtgcacgagggtaggaccaattaccaaacttcgacggactcgacactggacacgggtggctccattggatgccgccactatccgatcctacgccgtcaggcacctaggtcacctgccccaaggagcgtccacttcacccatgttagctaatctggttatgtgtgacgccgacgccgagctcaccaaagcagctgaatcctttcatctgatttacacaagatacgctgacgatctgacctttagcacgcggaacgccgcctttgatagaagtgcggcagtgaccctcatcaagcaggtttatcgtgttcttggcaggtttggattggagcccaatcttgcgaaaacacaggtcgtgcctccgagggcgcggaaaatcgtgctgggcttactggctgaccaggatgttccccgccttactcgcgaattcaagaagaagatgagaatgcacctgtactatctggagcgtgctgacgtgggccctgtgaggcatgctcaacagcgcggattcagcgccgttgcagggcttcgcaaccatctcctcggtctggccgcctatgccagtcaggtcgaaccaatgtatggggccgagctgcgtaagaggctcatggcagtctcttggcccatcgtgtactga

SEQ ID NO: 8896 - RNA, 1170 nt, synthetic construct
  source 1..1170: mol_type = other RNA
atgacggattggaaaccccagccctacaggagagcagcccagagcctgggcatctctgaagcagtgcttgacgctagcgtagcagcctcccaagccgtggtggcaatcaatccttcactcccgcccatcctcacactaaagcacctgagttatttaactggaactccctaccagtacctccggcaggtggttagtcgcgatgagctcaatccatatagagtcttccgagtgagaaagcgcccgactccttgcggccgtgtgcagtttagggttatttgcgtgccagatatcaaactggcgattgttcaacgatggattgctcgaaaggttctggcgctgggtcggccccattctgctaacaccgcgtttgcccctggaagcagacttgtggacgctgtggagccccattgtggttcccgatggatcgttaaggtggacgtacgtagattttttgagagcatttctgagataagcgcctatcacgcattcaggcttctggggtaccaacctctgatgtcattggagctggccagactgtgtacaagggtcggcaactttagtaaactgcgacggcagagacgttggattcgcttggctccacgccatgtcgctaaaataagtagctatgccgtcccaaggctcggacacctcccacagggagcacctacatccccaatgctggctaaccttacgatgtgcgaagcagacgccgtgctgaccaaagccgccgaatcattcgggatggtatacacccggtacgccgatgatctgaccttctctacctcgaaggattccttcgacaggaaggacgccaaggtgctaataaagcagatttaccagatcctaggccggtttggcctcgtccccaatcttgccaaaactcaggtcgtgcctcctcgggcacggaaaattgttctcggacttctggtagatcagtcaacccctcgcctgacacgcgagttcaaaaacaagatgcggatgcatttgtattacttggagagggcggacatcggtcccatccaacacgcccaaaagagggggttctccgctgtcgtgggcttacgcaatcacctgatggggctggctgcctatgcttgtcaggtggaaccgaaatacggggacgaattgaagaagagattaaaggcagtcccctggccagtggtctattga

SEQ ID NO: 8897 - RNA, 1170 nt, synthetic construct
  source 1..1170: mol_type = other RNA
atggatgactggaagccccagccatatatccggcaagcccagcagttgggtgtggcccagtccattctggacgccgcagtcgccgcatcagaggctgttgtagccgcacaccctagcctccccccgatactgaccctgcgacacctcgcccacctgacggacaccagctaccttaaactgcgggattgggttagccgcgaaatagaagatccctacagagtcttccggatcaagaaacgtccggtcgcccctaattgcactgcctttcgaactatttgtgtgccagacgtggaactagcttttctccagaggtggctgtctcgcaatgtgttgagctggggaagacctcattctgcatccacagcgtttgccccaggcagcaccttgcttgcggctgtagagccacattgcggatcgaggtggctggtgaagttggacgtgcgtaggtttttcgagtcaattagcgaagtgtccgtctataaagcgtttcgccggttgggataccaacccttagttagtctcgagttagcacggctttgtacacgcgtcgggcctgcaagtcggctgtatgccaatgcccgctggactaggcgagccccaagatacgtagcagctattagaaagtacgctgttgtccggttcggccacttaccccaaggcgcaccaacatcacctatgcttgccaacctagtgatgagggatgtggatgaggagctgacgaaggttgctaagctgcacggcatgacctatactcgctacgccgacgatctgaccttctctaccccccggagggattttgggagagaaatcgccgtggagctgatccagaaggtgtatcgatccctgggcagattcggactgcagccgaatctggcgaagacacaggtcgttcctcccagaagtcgcaaagtcgtgttgggactgctcgtggacgggaaggagcccaggctgactagagaattcaaaaacaaaatgcggcagcacctctactacctcgaaagacctgacgtaggtgccgtgcgtcatgcccaagctcgagggttctctgcggttgcaggtcttaggaaccatcttctggggctagctgcttacgcttcccaggtggagcctcagtatggcgctgagctcgcaaggcgcctcaacgctgtgtcatggccagtggtctattga

SEQ ID NO: 8898 - RNA, 1173 nt, synthetic construct
  source 1..1173: mol_type = other RNA
atgaacgattggaagcctcagccctatcgtcgggaggcacaacggaggggggtatctcccgaggtgttagccgctgccatcgccgcttcagaagccgtcgtggccgtgaaccctagtctgccgcccatattgtccctacgacacctctcgcatcttaccggcgtcccttaccagttgattagagcttgggtaactcgtgaaggcgccggcgagtctccctacaagactttttccatccgcaaaagacctaaaaaggatggcaccaaacagttccggttcatctgtgtaccacagcatgacctgggactgacgcagaggtggattgcaagtaaggtcttagccctcggtagacctcattctgcatcaacagcctttgcacccaagtcaaagctgttcgaagcagtggaaccgcactgcgagtgtaaatggctcattaaggttgacgtccaacgcttcttcgaaagtatcaccgagattgctgtgtaccaagtgtttagaaagctcggataccaacccctggtgagcttagagctcgcccggatttgcactcgtctgggtccaccaggccggtataggcctccagcacgatggagaagacacgccccattggacgcgcacattataaattcttattccactcgagccctgggacatctacctcagggcgcttccaccagcccaatgctaagcaatctcgttatggtggatctggacgaaaaactgagcaagctcgcttctagtgtcaacatgacctatacacggtacgcggatgatttcacttttagctcacacgcaacggacttcaacagggaggctgcagaacgctttataaaggacatctatcacgcgttgggacagtttgggctcaaagctaatctggccaaaacacagatcatcccaccgagggcccgcaaagttgtgctgggtctgcttgtggatggaaagacacctcggctgacaaggaagttcaaggccaaaatgcgaatgcacctttactacttgaagcatgcagaggttgggccccttaggcatgctgagcgcaggggttttagctccatagcgggcctgagaaatcaccttttggggctggccgcctatgctatccagatcgaaatggagtacgggctggagctcaaaacccgcctggaggctattcagtggccccttctgtga

SEQ ID NO: 8899 - RNA, 1170 nt, synthetic construct
  source 1..1170: mol_type = other RNA
atgacggactggaaacctcagccctataggcgggccgctgaggaattgggcgtgtctgaagctgtgctggaggccgcaattgcagctagcgaggctgttgtagctgtccacacatccctcccgcctattctgaccctcgggcacctgagccatctatccggggtgagttatcaggacctgaggtcctttgtcagccgtgacgagccggacccatacaaggtgttccgagtgcgtaagcgaccccagcctgatggtcgccttaggtttcgggtgatctgcgtccctgacgctcggctgggagatgcacagcgatggattgcgcgacatgtcttagttcacgggcggcctcacagtgccagtactgccttcgcccctaaagctagattaatcgacgcagtgcgcccacactgtgggtcgagatggctgatcaagattgatgtgagacgtttcttcgagtctatcagcgagatctcagtatacaaggtgttcaggcgcctgggataccagccactggtttcactggaattagccaggctatgcacccgagtaggtcccaacacatggctcactagaacacagagatggtggagacgcgccccattgcacgtctctacgatcaggaactatgcactccctcgccttggccatcttccccaaggcgccccaacctcccccatgttggctaatctcgtcatgcgggaggctgacatagaactcagcaagatagctaagagctatggcctgaatttcactagatacgcagatgacctgactttttccaccacaaaacccaaatttgatagggccgcagccggtagtctcattcaacaagtttaccaggtcctgggccgctttgggctagagcccaacctggccaagacacaagtagtgccaccccgcgcccggaagattgtgcttggattgctcgcggaccgggatgcaccatgtctgaccagggaatttaagaataaaatgcgcatgcatctgcactacttggaacacgaggatatcggccctgtgaggcatgctcagcatagaggcttctctgcggttgcaggactgcggaaccacctcctgggacttgccgcctatgcgtcacagatagagccagtgtatggtgccgaaatcaaaaccagattgatggccgtgccctggccgattatctactga

SEQ ID NO: 8900 - RNA, 1173 nt, synthetic construct
  source 1..1173: mol_type = other RNA
atgaaggattggaagccccaaccttacaggagaatagcgcaggaactgggagtctctgatgctgtcctgcgctcagctctggcagcaagcgaagccgtcgtggccgtacaccccaagctacctcctgttctgacattgaagcacctgagccggctctctggggtgggatatatggacctccgcagatacgtttcccgagaagacccccacacatacaaagtgttctgcattcgtaagcgaccccagccggacggtaggattagattccgggaaatatgtgtgccagagcatagcttatgcgacgtgcagcagtggattgtgaggcacattctcgttcacggacgtccccactcagcatcaaccgcctttgcaccgggcgccaagctcatcgatgctgtgcagccccactgtggtagtcgttggatcatcaagcttgacgtccgaaggttctttgagtctatatccgagattagtgtgtataacgtattcagatccctgggataccaacccctagtgagttttgagctggcgaggatttgcaccagaatcggctcagacaaaacttggctctccaagactcgaagatggcggaggaaagctcctttgcatgtagcagccattcgaaattacagcgcgaaacagctgggttatctggcccagggggcccctacttctccgatgatcgctaatttggtcatgcgcgctgctgatgccgagatcagcgccctctcggagccatttggtatcacgtacacccggtatgcggacgatctgacttttagcaccaatagtgcccatttcgatcggaccaccgccagcgccctcatcaggaaagtctaccagacactgggccgcttcgggctgcaaccaaaccttgcaaaaacacaggtggtatctccacgggctcgcaaagtggttctcggccttctggctgatggagtctcccctcgcttgacgcgcgaattcaaaggaaagcttagaatgcatctgcattacttagagcatgtggacgttggccctatcaagcacgctcagagacggggcttttccgctgttgcagggctaaggaaccacttactggggttggccgcatatgccatacaaattgaaccagagtacggctatgcagtgaaggcccggcttatggccgtgcattggccaatcatctattga

SEQ ID NO: 8901 - RNA, 1170 nt, synthetic construct
  source 1..1170: mol_type = other RNA
atggagaattggaggagccaacactaccaatcagtgggacggtcacagggaatcgcacccgagatcctgaacgctgcaactcagaccgggactgccattgttaggacgaacgcaaggctgcagccagtccttaccctccgtcacctcgcctacttggctgactgtgattatggcttccttcgggctgtcgtgggtcgagccatcgagaatccgtaccgcgtgttcgcaattcacaaaagacctgcaccatctggcaatgccaggttccgcacaatctgcgcccctgatccccgcttactgggagtccagagatggctggtgaccaatgtgctgaaccacgcccccacagtacatccagcctctaaagcctttgccccggaatgcacattggtcaaggccgcagagcctcactgtggggctcgatggctcgtgaaggtggatgtgcggaacttcttcgaatcaatcagcgagatagctgcctaccgggcttttagagcgctgggctatcaggccctcgttgcctttgaactcgcccggttatgcactcgcttgggcaggttcacacctcgaaggagccatccacagtggctacggaagcgtaatagaatctataggatcgcctcgtacaaccatgctgagggaagaatagggcatttacctcagggcgcacccacttcccctatgctcgctaatattgcaatgcaagctgctgacgctgaatttgacatgcttgcgtcctccgcgggtatggtgtataccaggtatgccgatgacattgtgtttagcacgaaggataaagatttcacaagggacctggccgcagggctggttggatctgcctatagaattctgggaaagtacgggtttagtccaaacgtcgcaaagacagaaatcatacccccccgcgcccgtaaagtcgtacttggcctgctagttgatgacctgaccccccggctgccaagagagtttaaggagaaaatgagaatgcacctgtactaccttaagcgagatgacattggccctgtgagacatgcaaaaaagcgaggcttcatcgcggtggcgagtctccgcaacgtactgtatgggttggcagctttcgccacccagatagagcccacttacggttcccgtatccgccgggacttggacgctattgaatggccaacctga

SEQ ID NO: 8902 - RNA, 1176 nt, synthetic construct
  source 1..1176: mol_type = other RNA
atggagaactggcatccacaacactaccaggccgtcgggcattcccaaggcattagtccggacgtgctggccgcagccatgcagacagccaaagtgatcttgcgagtaaaccctcgattacagcccgtgcttactctgaggcacctcgcctatctgacggactgtgattatggctatcttagggccgtgattggacggggcatcgaaaatccgtaccgggttttcaccatccacaagcggccaggtccttctggaaatgcgcgtttccgcacaatttgcgctcccgacagccagctgctgaaagtccaacggtggttagtgaccaacattttgaatcatgccactgctgctgtgcactcaactagcaaggccttcgcccccggatgtactctcatgaaggctgcagaagcacactgtggcgcccgctggctaatcaaggtggatgtgcagaacttttttgagtccgtgagtgaaattgcggcctatcgagccttccgtaatttgggttaccaagctttagtttcatttgagctggctcgtctgtgcacccgcctgggtcacaacacacctcgaagaggacacgcacagtggctcaggaaaaaagcaggggtggcctataagatatctaaatacaaccactcgatggggaggatcggacatctgccacagggcgctcctaccagtcccatgcttgcaaatttggctatgagagccgcggacgcggagttcgataatctggcccggatcgacggcatgacgtacacacgctacgccgacgacctagtattttctacctgcgattctggatttacacgggataaggcgtccgcaatcgttggctccgtttatcgcatactcgggaagtacggcttcagcccaaatgtggctaagaccgaaatcgtccccccgagagctaggaagatagtactcgggcttcttgtcgacgagccctcccctagactgcctagagagttcaaagagaaaatgcgcatgcatctgtactatctcaagaaggatggcatcggcccagctaggcatgcatcaaaaagaggattcatttcagtcgctgggatgagaaacgtcctgtacggtctggcagcctttgcaactcaggtggaaccaacatacgggagcagcttgaggcaggatctcgacgccattccttggcccacctga

SEQ ID NO: 8903 - RNA, 1173 nt, synthetic construct
  source 1..1173: mol_type = other RNA
atggaaaactggagaagtcagcactatcggaactttggcacccgcaagggagttagccctgaaatcctggaggctgccgtgcagactggcgaagcaatcgtgcgtactaacgcaagactgcagcccgtgttcacccttcgtcatctcgcctatctgacagactgcgattacggactgctgagggccatagttggaagatctctgcagaacccctacagagtcttcaggattcataagcgcccacggtccgatgggctaaaccgttatcgaacaatttgcgtccccgatccacaactgctagccgtgcaacgctggctggcatccaatatccttaatcacgccgctagtagcattcacgccgcgtcaacagctttcgccccagggtgtactctgttgcgagctgccgaaccacactgcggtgctaaatggcttataaaggttgacgtgcaaaacttcttcgagtcagtgtcagaaatcgcagcctatcgcgcgttccgcaggttaggatatcaggccctcctggcttttgagtttgcccgcttgtgtaccagattgggaaatagaacgcttagacggtcgcaccagcagtggagaagggatccttggcgccgctacgagattgcggcttacaatcactctcagggcaggatcggtcatctccctcaaggggcgccgacctcacctatgctggctaatatcgcgatgcacactaccgacgttgacctggatgcactggcactttcttttaggctgacatacacaaggtacgcagacgacttggtgtttagtactactgacccagctttcacacggaagctcgcatccagcttcgtgggcagcgtgtatggcatcctcggcaaatacgggtttagcccgaatgtcgccaaaacccagattgtccctccccgggctcgaaaggtcgtgctaggcctgttagtagatgagccatcccccaggctgccccgggaatttcgagagaaaatgaggatgcatttgtactatctcaagaaggacggggtagggcctgctcgacatgccgtaaaacggggttttaccgcagtcgcctccctccggaatgtgttatacggtctggccgctttcgccacgcagatcgagccgcagtacggagcaggcattagagccgagctcgattctataaactggcccacctga

SEQ ID NO: 8904 - RNA, 1173 nt, synthetic construct
  source 1..1173: mol_type = other RNA
atgggaaactggcggcctcagcactaccgtactatagggtccgagaagggtgtgccacgcgacgtactggacgctgccgtgcaaacaggtaaggccatcgtgcgcacagacgctcagttagagccggtgttcacgttgaggcacctggcctatctgacggattgtgattatggcttactcagggctatcgtagggaggagtatccaaaatccttatagagtattccgggtgcataaaagacccgggcccgacggccagaaacggtacagaacaatttgtgctccggacccccagctccttaccgtccaacgatggttatccaccaacgtcctgaatcatgcctcatctagcattcacgctgcctccactgcatttgctcctggctgcacactgctgaacgcagccgagcctcattgcggagcacgctggctgataaaggtggatgtccagaacttcttcgagtcaatcagcgaaatagccgcataccgcgcctttcggggtcttggctatcagcccctggtggcgttcgagtttgcgcgcctgtgcactaggctaggtcggaagacttctaggcggtcacacgcccagtggagaagagctccatggagacgatataagattgcggcgtacaatcacgaccagtatcgaatcgggcatcttccacagggcgcccctacctcgccaatgcttgctaatattgccatgcacggcgcagacgaagctttgcacgcactagcccgtagtagcggactgacctacacaaggtacgccgatgatcttacatttagcaccaccgcactggactttaacagggaactcgctagcattgtcgttcgctccgtctacagaatcctgggcgaatatgggttctctccaaacgttgcaaaaacccagattatccctccccgagccaggaagattgtgctcggcctcctggttgacgaaccaaatcccagactgcccagagagtttagggaaaagatgcgcatgcatttgtactacatcaaaaaagatggagttgggcctgcccggcacgctgctaatcgtggattcactgcagtggccagtctgcgaaacgtgttgtacggactcgccgcattcgcgacccaaatcgagccacagtatggcttgtctatacggaaagagctcgatgccgtggcatggcccacttga

SEQ ID NO: 8905 - RNA, 1170 nt, synthetic construct
  source 1..1170: mol_type = other RNA
atggcggattggaaaccccagccatatagggccaaagctcagtctctcgaagtcgaccccacaatcctggacgctgctgtagctgccggaaacgaggtggttgccattcacccctccctgccccctatcttcaccctcaaacacctggcttatcttaccgacaccaaatactcggtgcttcgcatgatggtcggtagacacattgaggagccttacagggtgttcaagatccgcaaacggcccggtcctgatggagcagccagatttagggttatttgcgcaccatcacccaccctgctggccgttcagagctggcttgctcgcaaggtgctcgttcacgcgaggactaaggtacattcagcttccacggcctatgcacccggatgcagtattcttgaggccgcctccccacactgtggatgtcgctggctcatcaaggtcgatataaagaattttttcgagagcgtgtctgaaattagcgcctaccacgccttccgatccttaggctaccagcctttagtgtctttcgaattggcacgtctgtgcacccgagtcgggagccagacacggcacagagctcatcgtcaatggcagaggcatctcccctcaacgaaaagcaagatacacgactacgtgtattggaggttggggcatttgcctcagggagctccaactagtcctatgctggcaaacatcgccatgtataaggcagatggcgaactcacagcatggggcctcaaacatggcttggtgtatactcgctatgctgacgacatgacattttctatctcagatgagggctttaatagaaacaaagccgccgcggtaatacgagggatctaccggatcatcggcaaatacgggtttgctccaaacgtcacaaagactcaggttgtccctccacgggcaagaaaggtggtactgggcctgctggttgatcaaaatgaaccgcggctgcctcgggagttcaagatgggggtgcgcatgcatctgcactacttaaagagtccaaaatttggaccggcggtgcatgccgccaataggggtttcaccgcggtcgctgggctaagaaaccacctgttcggcctagtggcctacgcagcccaagtggagccggcatacggtactagaattaagtccgagctggaagccgtgaagtggcccatttga

SEQ ID NO: 8906 - RNA, 1161 nt, synthetic construct
  source 1..1161: mol_type = other RNA
atgttgaccaaacggcctcaacattatagatccctaggtagatgtgcagggatcgacgatgtcattatagagcgcgccctggccactgccgccattcaagacagggtgggaggtagaattcctactattctgactctgcgccatcttgctgagcttgccggggtgccttacggcttcttacgcggcgtagcggcccgtagatttcccgacccctatacaacatttcaggtgcgaaaaatcgctcgtcctggtgaagagggatatcgaacaatcaccgtgccaccaccgctgctcatgtcagtccagaggtggatctccgggaacatactggtacacggacgcccacatgccgcctctaccgcttatgctcccggcagttcagtagtcaaagctgctgaacggcactgcggttgtagatggctaatcaaactggatgctaggcgtttcttcgagtctatttccgagatcgcagcatacagggtttttaccactgatttcgcattccaaccactggtggcgctggagttggcaagaatctgcactcggctcccggaaaacgcacggaccaacagggcccgacgatggttagccaaagtgagcgggtacggagccatcctggactaccacgctgcgcagctcggccatttgcctcagggagctccatccagccccatgcttgccaacctggcggttcgcgagttcgatgacgagatggctaggaccgctcagcagcaccgaatgacgtacacaagatacgcagatgacattgcactgtcgaccagcgaccccgcattcacgcggtctagggccagcgacgtggttctggcggcctatgcagccatgggcaggcatggcctctcaccgaatacaaccaagactaatgtggtccctcccggcgcacggaagttggtgcttggactattggttgatggcgaccgccccagactcacacgggaatttaaggattctctccgcatgcactttcactactgccttatgcctgatgttgggcccgtcgcccatgccgaaaagcggaattttgtgtcagtgattgggctgaggcaccacctggggggattagtcgccttcgccagtcagatagaaccagagtatggcgctagcctcagtgaacagatgaagaagatcgtgtggccactgtga

SEQ ID NO: 8907 - RNA, 924 nt, synthetic construct
  source 1..924: mol_type = other RNA
atgcttgcaaaaggaggcaccccctctcgaggctatcgtatgatcagtgttccacggcctgatctcaaacacgtccagcgctggatttgtgataatattctggcgttggagaagcctcacagcgcaagtaaggcctataccccaaagagtacactggttgaagctgtggaaccgcatttaggatgccgctggcttataaagctggacctgcacgccttcttcgactcaattcccgagacttctgtgtacaaggttttcgagggcatcgggtaccaacccttggtggctatagaattagctcgcatctgcacaaggctatccccagattcacgatggcgcgcgcatagcagatggcaatccaggaggccagaaagatattctaatgtgaaaggctatgctgtgaagcgccttgggtacctcccacagggagctcccacatcccccatgctctcaaacctggtaatgagggtgtttgacgctgatctgacggccgccgcagtgaagcgaggcttccagtacactagatatgcagacgacttagccttcagcactaaggagatgtcttcgcggaacctgtgtggtgccctgatcaccgacgtatacaagctgattgccaaatatgggctggcccccaatctgtccaaaacagcggtcacccctcctgggggtaggaaactgttgctaggtctgttgatcgatggagagaagcctagactcacgaaagaatttcgggaggagctcaacaggcatctctactttatagataaatacggcgtccagagccacgcagaccacagaaagtttgagagcatctacggcctccgtcatcacctttttgggttggcctactacgcccggcagattgacccgacctatggacaggctgtgctggcacggcttaacgcagtcccttggccaatctga

SEQ ID NO: 8908 - RNA, 1161 nt, synthetic construct
  source 1..1161: mol_type = other RNA
atgtgtagttggtgcccccagcaattccggaaggaagccttaaaaaacaatatcgacctcaacatcatcgagcacgcgattaaaaacgccgagctggtatccgctgtgtctagcgagctccctcccctgttctctctccggcacctgtcacaccttaccggcgtggactatgtcgttctgcgcccagtggtggaacgcaactactcaaatccctacaagatctttcgactgaaaaagggcgttaaaggtcaccagaacagggggtttcggataatctgtgtaccagacgcatctattatgaaagcgcagcgctggattgcaaagaatatcctgagctgcggcgaagcatcatctgcatcctttgcttacgccaaaagttcaaaaattatcgacgcagccaaactgcactgcggctgcaggtggatgctgaaactagatgtgagaaatttcttcgagtctttctctgagattgcggcctatcgtgtgttcaggagttttgggtaccaacctctaatcagttttgaactgtcgcgcatctgtactcgattagggaaccagacaaagactcattcccaccctaaatggatggctaccaacaagaactacaccgtgatcaataaatatatcagccgtagaatagggcactttccgcagggcgctcctaccagcccaatgttaagcaatctcgctatgaagctgtttgataatgaggtgatcggtattgcaacaaagcatggtttggtctattccagatattccgatgatctgtgtctcagcacagctgacaagaagttcaaccgggagaaagccaagacgatcataaacgctatttacaaggaaatgatgaagattggactcgcgccaaatattaccaaaacacagataattccgcccggtgcacggaagatcgttttgggacttttggtcgatggggaagcccccaagctttccagggccttccgatccaagttgagaatgcatttctattacctcaagcatgttgatattggcccacccctgcacgccaaaaataggggatttgagagcgtcatgggcctgaagaaccatatccagggactgatagcctatgccagacaaattgaccctgcctacgctagttcatgcactgaccagatgaatggaatagactggcctctttga

SEQ ID NO: 8909 - RNA, 1164 nt, synthetic construct
  source 1..1164: mol_type = other RNA
atgcatatctggtgtcctcagcaattccgtaaggccggcgaggccaacaatgttgaccctaaggtgattgagaacgccatccaggttgccagtgcggtccaggcagtcgataagcggctgccacctatcttttccctgcgccatatttcccaccttaccggggtcgactattttgtgcttaggtcgctggtagaaagaaactacattgagccctacaaggtgtttaaactggataagaagaacaaacgctcaggaaacaggggataccggatcatcagtattccctccccacaattgatgatcgtgcaaaagtggattgctaagaatatcctgaaatttggcgaagtgcacaccgcctcttttgcctatgcagagaacagtaagatcattcaggccgctaccctacattgcaattgcacttggatgattaaactcgatgtgagcaacttcttcgaatccttctccgagattgctgcttatcgagtgttccgcaccctgggctaccagcctcttataagctttgaaatgagccggctgtgcaccaaactcggcacggagactcgcttgcgtcgacacccggcttggcaatcttctagcttcagtaaataccacaaaattagccgctataggaatagagccattggccacctgccacagggtgctcctacatctcctatgttgtccaacttagctatgaaaaactttgactcagccgtgtcaaaaatcgcactagacaacaatctcgtctattcacgatatgcagacgacctctgtctgagtacaaacgataagagcttcgatcgtacaatagctaggaaggtaataatctcgatctacgagaagatgaatgcgatagggcttaagccaaacctgactaagacgcagattgttcccccaggcgcacggaagatcgtgctgggtttactcgttgacggaaattcacccaaattgtctagagaatttagagccaaactgaggatgcacttccatttcctctgtcggtccgatatcgggccggcaaagcatgcggagagaagagggtttgaaagcgtcatgggtctgaaaaatcacatacagggattaatcgcatacgccaggcagatcgatcccacatacgcctctagctgcgacgagcacatggacaatattaattggcccttctga

SEQ ID NO: 8910 - RNA, 1161 nt, synthetic construct
  source 1..1161: mol_type = other RNA
atgcacagctggtgtcctcagcagttcaagaagaacggaattaaacagggagttaacccagaagtgattgaacatgcagtacagaacgcggccctcgtcaaggcagtgtccaataacctgcctcctatttttagcctacggcacctctctaatcttgtcggcgtggaatattccctgctgagggctgtcgtagagcgtcagcagttggacccttataaagtctttaaactgaaaaagcggtctaaaaggacctcatcacaccccttcaggataatatgtgtgcccgacgagttcatcatgaagacacaaaaatggatcgcacaacatattctaagtcagggcagcgttcatcacgcctccaaggcgtatgctaagaatagtaatatcgtggatgctgccaatttgcatgtggaatgccggtgggttatcaagctggacgtcaacaatttctttgagagcttcagcgagatctccgcctacaggattttccgatctttcgggtatcagccactgattagtttcgaattatccagactgtgcactaggttgggaccccacactaagctgcggagcaattcgtactggactgccacacgacacaagtacaagatcattaagcgttacaaaaaccataggatcggacatcttccccaaggcgcaccgacctctccgatgctcagtaatttagctatgaagggctttgacaaggaggtgagtgtgatagccgagaatgccggccttatctacacacgctatgcggatgacctgtgtctctctaccacctccgaagacttctctaagtccaaagcacagatcgtcattaacaacatatacgagaaaatgcgcaacatcgggcttagaccaaacataacgaaaacccagattctgcctcccggggctagaaaaatcgtgctcgggttgctcgttgacggtgataagccccggctctcaagagattttcgctcaaaaatgcgcatgcacctgtactatatgatgagagaggatatcggtccagtgctgcacgctaagaatcgcggttttgaaagcgtgatcggcctgcgaaaccacatccagggactgattgcctatgccaaacaagtagatgagtcatacgggttagtttgcgcctgcaagtttgagacaattaaatggccaatgtga

SEQ ID NO: 8911 - RNA, 1155 nt, synthetic construct
  source 1..1155: mol_type = other RNA
atgcaccggtggaaccctcagcaattccgaaaggccgcagaggaacagggagtggctccaaaggtcgtggaaaatgcaattagctgcgctgagattacacggtcagtggaccctaggctgccacccctgtttagtctgaggcaccttgcgcactacgtggaagctgactatagcctattgcgcaaagccgtggccagatccggcgacgagccctataccacttttaaactgaagaaaaacggcaagagagcctatagaatcatttgcgtccctgatatcttcctgctggaggtccagaggtggatcgcccagaatatcctggcctttggtaccccacaccattcatccgtggcctacgctaaaaattgtaacattgtcgacgccgctagcgtacattgcggctgcaggtggctgatcaaactggacgtcgccaactttttcgagtctttttcagagatcgccgtgtatcgcgtgttccgatctttgggctatcaggcactcataagcttcgagatggcccgcctctgtacacgtttaggagcccatacaaagaccagatcgggcaatcgatgggaggttcgagatgatcggatttacaaaatcgatggctacaagaactgtaggatcggccatgtgccgcaaggggcacctacttccccaatgttaaccaatctggctcttcgcgaattcgataaggatatcggtgatatcgctgcagagtatggcatgtactacacccggtacgctgacgacatgttctttagcactaaagacctcagtttcaatcgcgaaataggaaagaagctcatatctcgtctttacgggagaatgaaagcggagggcttccggcccaacatttccaagacacgcattcaccctccaggggcaaggaagctagttctcggactgttggtggatggagctgtgccgaagctcacgcgggaatttagaagtaaaattcggatgcacctttactacatgaacaagcagcacatagggcccgcgctgcatgcccaaaacaggggattcgactctgtaatgggtttaaaaaatcacgttgaagggttgatcaattatgcacatcaggttcagcccgacctcggtgcaaggctgagagccgaatttaaaaagattgcgtggggggcttccgtatga

SEQ ID NO: 8912 - RNA, 1104 nt, synthetic construct
  source 1..1104: mol_type = other RNA
atgtccagaaagcattcacagctgctgcccctgcaaggactccagcctgcaagtgcttcaacaggtgcatgtttcccggtcatcaattctctgaaacagctggcggacatgactgagacggactacgcaatcctgcgccagttcgtggcaaggcagcaacccgagccctataaaacttttcgaatcaggaaaaagagcggggggtttaggatcattgcgatcccagacgagaacctgttaaaggtgcaacagtggatttaccgtcagatactgactctcgtaaggcctagtccagtgtcttatgcattccagaagggtaagtcaattcaaaacgctgccagtgtgcactgtggctgccgctggttgatcaagctggacctgtacaactttttttcagcgatctctgagatcgatgtctaccgggtctttagaagcttaggctatcagccactgatcgccttcgaattggctaggctctgcacacggctaggctctctcacagctttccgacgccgaaaccggtggcagatagcagaccactatgccgtgatttcgcagtaccacggccaacgcatgggccatctgccacaaggagccccgacgagtccagcattgtccaatctagtgatggtcaactttgatagaaaggtcctctgccttgctgccgaggaacagctcacctattccaggtacgctgatgacctttgttttagcacacctttacgcgatttctccagagccagagcccgtgccttcattcaccagatctacaggctgatgcggtcccatggacagagccctaatatgtccaagaccgttatagtgccccccggtgcccggaaaatagtactagggctgcttgttgatggggaacagccacggctccagaagcaggtgcgcaataaaatccgacagcacattttccatcttaatcatgctgacattggccctgagaaacacgcccagaagcgtgggtttcacagcaccgccggcttcaaaaaatacctcgatggattgctgtcttatgttagcgacattgaccccgatctggaacagacctatagacaccaacttgctggagtgagatggcctttggaaacctga

SEQ ID NO: 8913 - RNA, 1095 nt, synthetic construct
  source 1..1095: mol_type = other RNA
atggggagaaagcactcgcaattgttctttacacacgactctcaagagattagtgccagctccaattgccttccaccgattaagagcttaaaacatctcgcagatttgactgaaaccagctatcgggatcttaggaaaataatcacccgtcagtcccccgaaccctataaggtctttaggatcaggaagaagagcggcggattccggattatcgctatcccagacgaatcattacttaaggtccagcagtggatatatcgtcacatcctgagtcaagcacaaccctcccctgtttcatacgcgtttcaaaaaggaaagtcaatccgagacgcagcttctgtgcactgcggctgtcgctggttgattaagttggatctgtacaatttcttcggcgccatcagcgagattgatgtgtacagagtcttttactcactgggatatcagccgctcatagccttcgaactggccagactatgtactcgcctgggctcactgactgcgttccgacataggcatcgatgggagatcgagggcaacagcaccatcatcagccagtatcagggccagcggatgggtcatctgcctcaaggggcccctacttccccagcactgtctaacctcgccatggtggctttcgatcggaagatcatgaacctggctgccgaggagcagctgacatacagtcgctacgccgacgacctgtcttttagtacacccttgacgagtttttctcgcgagctcgctaaggcctttattcacagagtgttccggttaatgcgcacctacgggcagagccccaacatgacgaaaaccaaaataataacaccaggagctaggaaaattgtacttggtctactagttgatggagaagagcctagactccagaaatctgtgaggaaccacattcgccagcacattttctatctgaatcattccgacgtcgggctgcagaaacatgcccagaagcggggttttctttccaccgacggcttcaaagctcatctggatggggtactctcctatgttcacgacatcgatccttcgctcgcgcagaattacagacaccagctggcagacgtgtaccgtctcgtgtga

SEQ ID NO: 8914 - RNA, 1203 nt, synthetic construct
  source 1..1203: mol_type = other RNA
atgaagacgtggtcaccacaaaatttccagagccgagccaaagagaagagcggtcaggctgttatcggcaacgcccagaagatagccaagcagattcagactattaacccgaagctgccagtgatcttcacattaaagcatctgagtgtgagagcccggatttcatacggctttgtgcgcagcgtcgtctctaggaatccttcagaaccctataggagtttttccatacgcaaacgtattagcgcgccccgtggcaaaacatccaaaaggaaagcgatgggggtgaaacacgaggtcggggagcactcttttagaaggatatgtgtacctacaccccgcttaatgcagttgcagcggtggatagataaaaatattctgagcgtcgctcctcctcacaccgcaagcgttgcttattctcagggcaagaagctgatcgacgctgcccaactgcattgtggttcgacatggctcgtcaagttggacgtgaagaacttcttcgagtctattaccgaaatcgatgtctaccgcgttttcctgagtctgggttatcccgccctgttgtccttcgagctcgcccgaatctgcaccaggctcggcatcgattccaagtacgcccggaaggatgtttttgcagtgcggcggctggcacggagaaaaggccacgtggcagcttactttgggtcgcgcatggggagactgcctcaaggagcgcctacctctccaaagctctcaaacctagtgatgcgctccttcgacgaagatatgaccaatcttgcccagaaagaaggaatgacatacactcgctatgccgacgacctctgctttagtacccggtccagaacttatacccgtgataaagcaacgaaattgatcaggagtgtgtatgacgctcttggagctactgggctaggcccaaatcggacaaagacggtggttgtgccacccggagcccgaaaggtggtacttgggcttacagtgaacgacgtaaggcccagactgccggccgagctgaagtccagaatgagggtccatctccactacctgaaattgttcggtcccaccgagcacgccaaacgatctggattcagctcaactttaggcatgtacagacatcttgcaggaatctgcgcatttgctcaacagattgaaccagatgtagctaaggactggctcactaagctgcagggcatcagctggatctga

SEQ ID NO: 8915 - RNA, 1158 nt, synthetic construct
  source 1..1158: mol_type = other RNA
atgactccttggcgatcccaagcttttcgagctgaggcgatagcaggtggcggcagtgcaggcgtgattactaatgcggtcgcaacagccgctgccctgcataaacacacccccgacgctcctcctgtgttcacattaggacacctggcccatttgaccgatgtgcactaccgtttcctgaggcaagtagtggagcgacaggatcctgaacgctaccgcaggtttagaattctcaaaagaactagtggtgccggcggagcgcctcgctatagaatcatttgtgtgcccgacccccgccttatgagggttcagagatggattaacgctaatgtactggcactcgggcacgtgcacaaggccagcaccgcatttaaagcaggcgataatattgtcgccgctgctggggtacactgcgacgctaagtggatgatcaagatcgatatcctgaacttcttcgagtccgtgtccgaacagtctgtctaccatgtttttcgaggcctcggatatcagccactcatcagctttgaactggcccggctttgcacacggagaggggaatccagtaacgctcgtcgcggcaaaaggtgggcccactctgtcggccatgcaaagcggataacaaattatcattcctcggtgctgggacatctaccccagggtgcccctacctcaccgatgctggctaaccttgcgatgaaaggctttgacgaggccgtgagccggcttgccgatacctacgacctgtcatatactaggtatgccgacgacttaacattgagcagcttgggcctattcgacaggagccgtgcccagaccatcgtctctgaggtttacgaccagctgcgctgttgggggttcagacccaatctcgccaagacgctgattgtgccaccaggggccagaaaggtggttctgggactgcttgttgacagacaggtgccacggttgacgaaggccttcagggcaaggatgcggcgccacctctacttcttgtcacacccacagcatgggcccgtcaaacacgcagctgccttaggttttgcctcagtatatgggctccggaaccatgtgtctggactgatcgcctacgcgcaacaagtggatgctaactttgctgcagatgcatggggaaagttcgatgccatagtctggccgtga

SEQ ID NO: 8916 - RNA, 1161 nt, synthetic construct
  source 1..1161: mol_type = other RNA
atgacaccatggcgatcacggtcttacgttgacagcggatctaccgctggctgcgatgaaacaattgtgaaaaacgccgcagaaacgggcaaaatgctcctggaacgaacacccggcgcacctccaatcttcacactcaagcacctgtcccagctcactggagttaattatagcttcctgaggcggtgtgtggaaagggtcgagagcgagccttaccggagatttcgaatccgcaaacgccagaaccctaatgagaagaaacagcgctatcgcattatctgcgtcccagatcctaggttgatggcagtccatcgctggatcaatactaacatcttgcaactagtacctccccacgctgcctctgtggcctttggcaaagggaataatatcgcagaggccgccgctaaccactgcgcttctaagtggctcattaagcttgacattgtgaacttcttcgaaagcatttcagagcagagcgtataccatgtgttttccagaatcggataccagccgctgatagcattcgaattagccagactgtgtaccaggttgggacaaccaagctatgctcgctggtcaaggagatggagtgctcggagttatcggtttgagaaaatttcctcctaccaaaaggaacagttgggtcacttaccccaaggggcccccaccagtcctatgctcgccaatctatccatgaccgctttcgatgcgtcgattagacaggtcgccaatgactttgacctggcgtatacacggtacgcagatgatctgactttttctaccacgtcagtggaattcaacagaaataagagtcagactgttattcccaaaatttacgcagagcttctgaagtacggcttcaaaccgaacctcactaagaccaagatctcctccccgggcagccgtaaagtcgtgctggggttactggtggacggagccgagccaaggcttaccaaaaagttcagggacaacatacgtcagcatctgtatttcatcaaccaccccaatatcggtcccgtgcaacatgcgaacaagaaggggtttaagtctatatatgggcttagaaaccacgtgcagggtctgatcgctcacgccagtcagatagataaggagtacgctaacgccgcctgggagcagtttaatcatgttctgtggccatga

SEQ ID NO: 8917 - RNA, 1176 nt, synthetic construct
  source 1..1176: mol_type = other RNA
atggaaccttggcgcagccagcacttcaaaaaattcgctatttccaaaggttccgacctcgcaaccgtcgatgccgccatagccatcgggaaggccctgcaggtgaagtcacccaattgccagccaattttctctctaaagcatttggcctacagcgctgacgtgaaatacaaatttttgcgtgaggtggttgaacgctccactgaggataagtatagggtcttcaagattcataaacggggaatacccggtcagacttccaagcgatttcggattatttgcgcccctgacccgcaacttatgaaaatgcagaaatggatcgcacgcaatatccttgcacatgggcgaacacacgacgcgtcagttgcataccaggcaggatccaatattgtggatgcagcttcgctgcattgtggctgtaggtggctgattaagctcgacatcatcaacttctttgagagcgttaccgaacagaacgtcttccgcgtgttcagtgacatgggttatcagcccctcgtcgcctttgagttagcccggatctgcacgagaaaagggtcggccacatggagaagaaacagagcttataagaagtggaggacgcggaaccacatttacaccagcatccatgcttatagcgccgtggatatccttgggcacctgcctcaaggcgcccctaccagtccaatgctggcaaatcttgctatggtggactttgataagagtgtggaggatgtagctaatagttttggcctaacctacacacggtacgccgacgatctgacatttagcactaagtcagacgcattctctagggaggtagctcagaaagtgatctctgaagtgtacaaagtcatcaggcggttctcttttgaacccaatctcaccaagacacaggttgtgcctccaggagctcgtagagttgtcttgggcctgctggtggatggaccaactccgcaactcagcaaaaagtttcgcaaccagctgagaaggcatctgcaccacgtttccgcggattggcccggcgtcgtggaacatgcagaaaaaaaccactttcaatctgtattcgggctgcgaaaccacatagagggcttaatagcgttcgctcactcagtggacccagagtatgccaagaaggcctgggagaagttcgccaagatcgactggccccaggcgtga

SEQ ID NO: 8918 - RNA, 1143 nt, synthetic construct
  source 1..1143: mol_type = other RNA
atgtggcacccacattccttcaaatatcagggaaagaaagaagctgttgacgacggtatcgtgcagaccgctatcgagattgccgataaaacaagttcagtccatcctgagctccccccaatcttttcattgcgacacctggcgcatctgaccaacgtgagctacgggttcctgcgtcacattgtgtgcaggaacatcgatgaaccctatgaagtgttccagatacggaaaagaatctatagcaagaagaaagcctaccggattgtttgcgtaccctctccagatctaatgtgtgtgcagcgctggatagcccacaagattctgcgcttaggggacacccaccctgctagcatggcctatgctccagatagtaagatttaccgggcagcgctgcagcattgtgagtgtaaatggttagtcaaaatcgacgtaaagcggttttttgaatctatcagcgaaatgaagatctatcacgtgttcctccaattcggctaccacccgctggtggcttttgagatggcaagaatttgcacgagagtaggtaagggctccactttttggaggaaacctcagtggatccctcagagacacgtgtactacaagattactgattatatgagcgatcgacttggccatctcccacaaggagccccatcatcccctatgctggcaaacctcgcaatgaagtccctggaccaaaaactccagcgcattgcagacaagtttcaggtttcttacacccggtacgccgacgacctcactttctctaccaaagataaggtcttcgggaagcacaatagcagaaaaatcgtgcgtaaagtctatgacgtgcttcgcgcccatggcctcttgcccaacacactgaagactacaatatcacaccctggagccaggaaggttgtcctaggtcttctggttgacgggcccaagcccagactgtcccgccaatttaggtctaggatcaggcagcacctgtactacctgcagaaagatcccatagctcatgcccgagcgcgtggatttatctcggtctggggcttgcggaatcacattcagggccttttggcccataccaaggagatagatacggatttctatgacaagacaagtagtgagttcaatctggtggactggccgttatga

SEQ ID NO: 8919 - RNA, 1278 nt, synthetic construct
  source 1..1278: mol_type = other RNA
atggcatggaacagtcagcggttcgtgagggcaggagaactggccggagtggacgctgacattctcaacaacgccgtgatcatcgctgaacaaacactccgagtccagtcatccggccctccaatactaaccctggggcacctcgcgcacttgtcaggtcagtccgtaaaatatctgagaagtctcgtctcccgcgagggcgaggatccgtacagacagttcaccattagaaagcgcccagtccccaaccaatctccacggctccgcttcatcgctgtacccgagcctcagctgatgtcccttcttcgttggattctgtccgaaatcttggaaaaggctccctgccatcccgccagctctgcctttgccccagaaagcaaactctttaatgccgctttcaaacaccggggggcccagtggctgattaaggtggacgtgagagactttttcgagtccatcacggaaattgatgtgtacagggtctttcttgagcgcggctatcagccattaacagcgcttgagttggcacggatctgtactagactgagggatgtgcatcgggaaaaagggagcattgctacaaggaatcgacgatcaagtatgaggaccccaaacgggataggcgagtataatagccgcatcatgggaacactcgcccagggagctcctacctcacccatgcttgccaatctggcagtgagggccttggacgagaagctccagggagtctctgagaagttcggtgtgcggtacacaagatacgccgatgacatcattctttctactaccgacaaaactttcggtagacaacgctcaattcagttagtcggagagatatatgcagccctagggctgtatgggctcgcccctaataccagcaagacgctgatcgttcctccaggtgcgaggaaggtggttctagggttgctggtagatggcagtaagcccaagctgactcgggaattcagggcaaaaatgcgcatgcatctgcactttttgctccacgagggagtgggaccgagggcacatgcagctaatcggggcttcagctcggttgagggcctccgacagcacttgctggggctgatcgcttttgctggccaggttgatctgccctacgcccttaggtacaagaacttatttcgctccatagacctggaacgtcgaagacatctaacctcttctcaaagcgagagccctctgcggctgggctggaaacacctgttagaacccgcgggcgccactctgggttcgatcagacgtagtcaccctacatga

SEQ ID NO: 8920 - RNA, 1164 nt, synthetic construct
  source 1..1164: mol_type = other RNA
atggcctggaactcgcagagatttgttagagctggtgagctggccgggatcgaggctgaaattttggagaacgctgtcgcggtggcagagcatacgcttggagtgcgaagccctggacccccgatcctgacactcggacacctagggcacctcacgggccttagcgtcaaatacttaagaagtctggtggcaagggacggcgacgatccttaccggcagttcaccataaggaagcgtcctgtaccgggccaaccaccaaggttccgattcattgcagttcctgagccccagctgatgggcctgcagcgatggattttgtctgaaattttggagcgcgcaccatgccatcctgccagcgttgcctatgtgcctggatcccggctgtttaaggctgccaaccaacatagacgagcgcagtggctgataaagatcgatgttagggattttttcgagagtattaccgagatcgatgtgtatagagtgttccttgggcggggttatcagcccctcacagcgctcgaatttgcccggatctgtactagactgcgggataatctcagagaaagtggtgcccccgcacctaggaagaggcgaacaaagatgcgcggcagcgaatcagtcgctgcttactactccgctgtgatgggaacactaccccagggggccccaacctctccaatgttggccaacttggccgtgcagggcctggatgaaaagctgcaggcgatcgcagataaagtcggcttacgctacactagatacgctgacgacctcatctttagcacctctgacaagtccttcggaagggagcgctctatccaattcattggggaagcttatagtgccctgggggagcacggtctgaccccaaatacctctaaaactctcatcgtgccacccggcgcccgtaaagtggtacttggtcttctggtcgacggagctaagccccgcctcactcgtgactttcgggccaaaatgcggatgcatctccacttcttactgcacaaaaacatcgggcccaaggcccatgcatccaatcggggcttttcctcaatagaaggacttcgccaacacctactgggcctgatttcattcgcagcacagatagacaggagcttcgccaatgagtgcaggcgccagtttagactggtagagtggtcatga

SEQ ID NO: 8921 - RNA, 1164 nt, synthetic construct
  source 1..1164: mol_type = other RNA
atggtgtggaatagccagagatttgtaaaggctggggtgctagccggcgtctctacagaaattctggacaatgccgttacgatagcagagcatactctctcctttagaagccccggacctcctatccttactctgggacatctggggcacctgaccggccttagcgtcaagtatttacgtggcctcgttgctcgggatggagaagatccgtacaggcagttcaccatccggaaaaggccaatacccgggcaacctccccgatttcgtttcatagcggtaccagagcctcagttgatggatctacagagatggatcctgagcgagattctgcagcacgctgattgtcacccggcctccgtggcattcgctcctggttctcgcctgagaacggcggcctatgaacatcgcagggcccaatggttggttaagattgatgtgagggatttcttcgagagcatcacagaaatcgatgtgtaccgtgtgttcctggcaagagggtaccaacctctgaccgcgttggagctcgccagaatttgcactcgactacgcgacgtgcacagagagaagggctcccccgcaccaaggaattggcgcacccgaatgcgcgctcccaacagtgttggcgcatactacagtgcagtcatgggcactctgccgcagggagcacccacatctccaatgttggcgaaccttgccgtgaaggacctcgacgacaaacttcaggccatcgccaacaaggtgggtttgcggtatacacggtacgccgacgacctcaccttctcaacaacggacaagacattcggacgagagaggagtgtgcagctggtcggcgaggtgtataccacattgggcctccatggtttagccccaaacacctccaaaactctgatcgtccctccaggcgcccggaaagtagtcctgggtcttctcgttgatggatcgaagccccggctgactagggactttagggcaaaaatgcggatgcacctgcactttctccttcacgaagatgtgggcccaaccgctcatgctattcatagagggttctcatccgtcgaagggctgcgccaacacctgttaggactcattgcctttgccgggcagatcgaccgctcttttgctgaagagtgcaaagtgaagctgcggtcagctaattggccctga

SEQ ID NO: 8922 - RNA, 1179 nt, synthetic construct
  source 1..1179: mol_type = other RNA
atgaggacttggaacagccagcggtactttgccgagggccttgctgcaggcgtggatgagtctatactcaacaacgccattgcaaccgcagaacacaccctgagacagccttccccaggaccgcctattctcaccctcggccacttgggtcatttagcgggggtggatgtggggatactgaaaacgtacgcatcacgccaggatgccgacccatatcgcgagttctccatcagaaaacggcctattcctggacagccgcctcgttaccgcactatcgctgtcccagaacctcccctgctgcgagtccagacctggattgcatcggaggtactcaggcacgcgccatgccatagtgccagcacggcttttgcacccggaagtcgcttagcacaggctgccgcgagacattgtcgagccgtgtggatggtgaagatcgaccttcgaaatttcttcgagtcactgaccgaaatcgatgtacaccgtgtgttcctggagcgaggctaccagccactggttgccttcgaacttgccagactatgtacaagactgcgcgacaagcaccgaaatgacactgccgtgctgccccaaagaaggacccccaaattccggcattcctccttgacaagcctttaccccagggacttattgggagttctcccccaaggcgcccccacatccccaatgctcgctaacctcgcagtgagggacttggacgagcgcctcactgctattgccaagacctttggtgttcgttatagcagatatgctgatgacctgacattctctaccacacggaagtcatttggaaggtctagggcccacgatctggttggccgcgtgtatgaaacactggctgcccggggcctagctcctaatcagtccaagactacaatcgtcagcccaggcgcccggaaagtggtattggggttgctggtcgacggggacacgcccaagctaactagagattttcggtctaggcttagaaagcacctgtaccacataagcgcccctgatcaaggtccggtgcaacatgcagctaggcgcggatttgcctcagtcgaggggctgcggcagcatctgcttgggctgatcgctttcgccggtcagattgatcccgtctatgcagcgaaatgccgggcgatcctcgactctagtgattggagtcagaccaggcgttga

SEQ ID NO: 8923 - RNA, 1173 nt, synthetic construct
  source 1..1173: mol_type = other RNA
atgaacgattggcacagccaacactatcttgacgctggtcgccaggcagggattgatgaagaattactgcagagggctgtggccgctgcggagtacacgcttacaagacccaaccacggtcctcctgtgcttaccattggacatctagcacaattgtgcggagtggaaactgggctgcttcacgcctacgtcgctcgggaaggggacgatccgtaccgcgagttcactatcagaaaaagacccataccaggggaggctcccaggtacagattcattgccgtgccagagcctcgtctgctgcaggttcagacctggatcgcaacggagatcctgcggcaggccccatgtcatggtgcatctaaggcctttgctcctggtaatcggttgataacagcagcaggagtccattgtcgggcccagtggatgattaaaatcgatgtaagggacttcttcgagtcgatcaccgagatcgatgttcaccgggtgttccgtgaaagggggtaccagccgctcgttgcatttgagctggcccggatttgcacccgtctgagagacgatcatcgacacccaacaagcttcctcccacagagacgcaagccaaagtattatggcgggtcaggctactctgtctaccctcgcaccctaattggcgtgttgcctcaaggagctcccacatcccccatgctagctaacctcgccgtgcgggacttggacgaagtcttaacttcattggcgtcacagttcggcctgagatattccagatatgccgacgacctcactttcagcacccgacgaaaaagttttggccgcgcacgtgccaaggatgccatcggacagatatatcaggccctgataaatcgcggcctgagcccgaatagagcgaagaccgctattgtgtcccctggggctaggaagatcgtcctgggactcttagtagatggcacacggcccaggctcagtcgcgagtttaggtcccgactgaggatgcacctgtactttgtggcccacccagatcatggccccgcgcaacacgctaaaatgcgcggctttgcgtctgttgagggccttaggcagcatctcctgggtctgatcgccttcgccggacaaatcgacgcactgtttgccgactggtgccgggcagaaatgaggcgagccaactggcccctcacttga

SEQ ID NO: 8924 - RNA, 1218 nt, synthetic construct
  source 1..1218: mol_type = other RNA
atggatcgagcagttccacggtgcgctgcatttcttcacggcgctattcgtactactctggctgagagcaaacagatgaccctgtggcggtcccagccttttctcacagccgcgaaaaaagatggcagagaagatcaggtggtcaagaacgctaccaagatcgctacccatctaattcggaagtctccaggggttgagcccatcctgtccctcaggcacttggggcacctgaccggcactccatataacatgctgaggtccgtggtgcgcagggacgaacccgaaccctacaggatctttagaattcggaagcgtcctctggccaatgagaagttgcgtttccgaacgatcgccgtaccagccccctggttaatggagctgcaaagatggctgaatgtgtgcattctagaacacatttcaccgcactctgccagcatggctttcagccggggtaattctatccgagatgcagcggcaccacattgtggcgcgaggtggcttatcaagatggacattatgaactttttcgagtcagtcacagaacgccaggtcttccgggtttttgaggatataggttacgaaccactggtggcctttgagcttgcacggctctgtactaggttgggcaccagatcgacacatgccggacaccccagatatagatccagtctgaaccggatggagatcaaggactattctgaccccttaatgggacagcttccccagggggcacctacgagtcctcgactggccaatctcgtgagcagggacctggacaaggctctgacaaaactcgctgatgagagaggattcgtgtacactcggtacgccgacgacctaaccttctccagtagggaagctcttaacagaacagcaattaaacctatcatcggcgccattagtggtataatcggcgataatggattctcaccgaacgtggcaaaaacaaccgtctcaagccctggagcccgcaagattgtgctgggcttactcatagacggggatgaacccaggctgagccgcgagtttaaacaaaaactgcgccagcatctctactatttgcgcgaacacgggcctgttatacatgccggacgaaacggtaatgccaccacttttgggcttagacgccacgtattcggcttgctgcagcatgcgcgccaaatcgagccagtctacgggaattcttgcctcgaggagttcgccaagatccagtggtga

SEQ ID NO: 8925 - RNA, 1143 nt, synthetic construct
  source 1..1143: mol_type = other RNA
atgactgcgtggaggcctcagcggtttaaagccgccgctggtaaggccggctgtgaacagaacgttgtgtcacatgccgtcacagtggcaagtcacgtacttatacgatcaccaggtgtcgagcccatcttaagccttcgccatctggggcatctcactgacaccccttactacagactgaggcgccttgtgagaagggaagatcccgagccgtactccgtatttcggatcagaaaacggccattgcccaacgaaaaattgcgattccgtacgattgttgtgccatctccgtggctcatggacctgcagaggtggctcaatgtcaacgtgttagagcatgtcccacctcacccagcctctgtggcttttagccgtggcaactctgtgctcgaagcagctgcacctcactgcggggccagatggctgattaagatggatattaagaacttcttcgagtccatcactgaacgacaggtgtaccgggtcttcgacgacatcggatatgagccccttgtcgccttcgaactagcacgcctatgtacaagagttggtaatcggacctcgcgcaagtaccatcagcggtatcactctccttggcaggcgagagagatctcagagtatacgaacgccttcatggggcacctgcctcaaggcgctcctaccagtccccgcgttgctaatctggctgctagagatttagataaggcattgtccaacctggcagatgcgcgaaggtttacctatacacggtacgccgacgacctgactttctccaccagcaagaaaatagatcgcgccgacgtgaggcccatcctgggagaaatttccaagattgtatcagaaaacggtttcagccctaatgtggcaaaaaccacagtgagcagccccggcgccagaaaggtcgtgcttggactcctggtagatggcgaggagccccgcctgactagggagtttaaacagcgtctgagacaacacctctatcatctccggaagcatggcccagccattcactgcctgcacaatggaaatgccacaccgtttggcataaggaatcacgttttggggctggtgatgcacgctaggcaaatcgagcgaccatacggggacgcttgcttgcaggagtttaatagtatcggatggtga

SEQ ID NO: 8926 - RNA, 1176 nt, synthetic construct
  source 1..1176: mol_type = other RNA
atgaggcgcgaccccccacatcagaggtggagcaaacaaatgactagttggcggccgcagcccttctctacaatggctcgggctcaaggccgagactctgcaaccattcaaaattctatcgatgcggcacagagattagctgaaataactcctaatgctgaacctattttcaccctgaagcacttggctcacttgacaggggcaccatacgtattgctccgcggaattgtttctcgacacgaaccagacccttatcgcgtgttcaaaatacacaagaggcccctccctggcgaggtgaccagattcaggaccatcgtgattcctaaccagtcccttatggatgtccagcgctggatcaacgtccacattctggaacacgtcaagccacaccgtgcatcagccgcttttaccagaggagatagcatcaagagagcggctgagaggcattgcggtgcacgctggctaattaagatggatcttcggaactttttcgaatcggtgactgagcggcaggtctacagggtgtacctctcaatcggctaccagcccttggttgcctttgagcttgcacggctgtgcacgcgagttgcctcctcccacgcgagactgagtagatatcacgccccgtggggatggaaaacaatcgagggatacagacatccgacgatgggccatctgcctcaaggtgcgccaaccagccccaagttagccaatctggttgcccgggagttagacgagaatctggaacagctcgcccggtctaacggatttgtgtatacacggtatgccgatgacttgacattcagtacactgggggcctcctccaggtgtgcagtgaggtcatttataggggatgtgtccgagagtattgcccaggctggcttcactccaaaccaagccaaaactcaggtgagcccccctgggagcagaaaggtcgtgctgggtctgctcgtagaccgtgacgagccccgacttagtcgcgagtttaagtctcagctgaggcagcatcttttttacctgaaacgacatggcgcctcagctcatgcctcccgtcaagggtcagcaaccatcttcggtctgagacgccatatactgggcctaatccagcacgcccgccagatcgaagaacagtatggaaatagccagctcaaaagcttcaaggagctccactggtga

SEQ ID NO: 8927 - RNA, 1017 nt, synthetic construct
  source 1..1017: mol_type = other RNA
atgaggcatttgtccgtgagggctggtgtgccatatgcctatctgcgggaaatcgtggagagaaatgctacaagggattatcggttgtttcgcatacgaaaacgtcctgtgcggaatcaacgccttcggtacagaatcattactgttccagaagctagattgaagaaggtgcaacagtggatagatcggcacgtgctctgcgctgccgagcctgatgaggcctcagtggcattcaccaaaagatcttctgtgtatgcagccgcctcaattcactgcggcgctcgctggatgatcaagatagacatccgcgcctttttcgaaagtatttctgagcgccaggtctaccacgtctttcacgaaattgggtaccagcctcttgtagctttcgaactggcacgcctgtgtacccggttaaggaggcgagccccgccattgaagagatggagcctcggcttcgatcgtagatatgagatttccgcttacatcaacggccaggttggacacgtcccccaaggtgccccaacgagtcctagactctccaacctggtagttcgggaactcgacgaggacatccgtaccatcgccgcttcggcagggctaacatatactcgctacgcggatgacctgacactcagcaaaaccactgatgacttcagcagggctgccgccgtcaaagtgattcggaaaatctacagggtactgggggcccatggctttgcgcccaatctagccaaaacccagatcgtgcccccgcgcgcacgtaagattgttctgggccttcttgtcgacggagacagaccccgactgcagagggagtttaaggcgaggattagacagcatctgcactacctgatgcatcctaagttcggacccgcgaagcatgcaaaggcccagggcaacgctacaatatatgggctgcgaaatcacatcaagggattactggccttcgcacacggtgtcgaccccgagtacgcacggaaacagacggagctctttaaccgagtgcattggccatga

SEQ ID NO: 8928 - RNA, 1122 nt, synthetic construct
  source 1..1122: mol_type = other RNA
atgatcagtagctctaagcgtaatccctggcacccgtcagagtttctagaggcctgccagcgaaagggagctatctccactgtcgccggtccagctctcgaaatagctcaacgcataaaagcacagggacctaacttgcccgttctgttgtccttggctcacctggctgctacggtggacgtgccgatcggcctactactgtcctacgtagagagagacaaggatccctaccgggtgttttcagtgagcaagctcggccctaatggcgagacaagtaataggagaaccatttgtgtacccgagcctcttttgagcaaaacacagtcttggatcgcagttcaactgctgaataactgcaccccacatgccgcttccacagcctacgcgcccggatcatctctttacaaagccgtcagacagcattgtggggcacgatggttgctgaaaatcgacctgaaaaacttcttcgagtccataaacgaaatgatggtgttcgatacttttatcagcctggggtatccccgcccaatctgtttccagctcgcacggctgtgcaccagggtctttggtgccgcccaggacgacttcgccagaatgaggttaggggtgcttccacaaggagcaccctcttctcctatgctggccaatctggctgtttataagctcgacgttagcctttctgaaatagccgctaaaaatgggtggatttacacaagatatgcagacgatttagccttttccacccgtagcgtgtctagtcgccacgagactaaggaactgatgtggtcgatcctcgaccagattcgatcctttggcctgacgcctaataagagaaagacttccattagtccaccaggcgcacggaagatcctcctcgggcttaacgtcgataccgatcggcctaggctgactcggagcttcaaaaacaacgtggagacacacgtgtacgcgatcaccaaccctgcaatcggattcaataagcacttagaagctcgcggcttcgaatcgggcccctcaatgattcggcatattgcgggtctgattgcctatgccaggagtattgagccagattatgccgatagcctctacaaaaggctgaccacagaagcggtccgctcatga

SEQ ID NO: 8929 - RNA, 1122 nt, synthetic construct
  source 1..1122: mol_type = other RNA
atgacctccagtagcaatcgcaacccctggcacccatccgaatttatagatgcctgccaaagggagggggccgtgtccaatgttgctggacccgctctggatatcgctcaacggattaaagctcagggccaggacttgccggtacttttctcactggagcatctcgctgcaaccgtcgacgtgcccatcggtttactgctgagctacgtgcagagagggaaagatccatatagggtgtttagcgtgtccaagcaaggctctaagggactcaggtctaaccggcgcaccatttgcgtcccagaacctctccttagtaaaacgcagagctggatcgcagcccagctgctaaacaattgtacgcctcaccctgcttcaacagcatacgcgccgggcagctctcttgcaaaagccgtaagaccacattgtgaggcccgatggctgttgaaagttgacctgaaaaacttctttgagagcattgacgaactgaaagtgtttgatacatttgtcagtatggggtaccctcgcccaatctgctttcagatggcacgcctgtgtactagagtgttcggagccgagcgtggagataacgcttcaacccgtttaggtgtattgccccagggcgctccgtcatcccctatgctggccaatctcagtgtttatagattagacgtctccttgtccgaaattgcgtcgcggtcgggatggaattatagtcgctacgccgacgacctggcattctctactaggctcgagtcaagccggcacgccaccaaggatctaatgtggtctattttcgacgaaatcaggtcattcggcctgactaccaataagcgcaagactatcatttctcccccaggcacaagaaaggtgctgctgggcctgaacgtggatacagataggcctcgattgacaaggtcttttaagaataacgtcgagacacacgtgtacgccatcactaatcccgagatcggtttcaacaagcatcttgaagcaagagggttccgaagtgggcctagcatgattagacacatagccggtcttatcgcgtatgcccgttccatagagcccgactacgctgagaagctctataagcggctcaccaccgaagccgttcggagctga

SEQ ID NO: 8930 - RNA, 1125 nt, synthetic construct
  source 1..1125: mol_type = other RNA
atgaccggctggtcccgacgcaatccttggtcccccaccgcatttatgcaggcctgccgcagggaaggcgaggttgaaaccatcgccgaaccggctctgggtattgctagacggataaaagcccaaggtccagatctgcctgtgctcttttccctcgagcatctcgcagctacggtggatgtgcctatcggactgttactcagttacgtggaccgggagaaagatccctaccgcgtattttccatctcgaagaagaggggccccaagtccgaagcaagtaacagaaggacgatctgcgttccagaacctcttctaagcaaaacacagtgctggatagcggcacagatactgaacaattgtaagccgcacagtagcagcacagcgtatgccccggggagctctctggtcaatgccgttaaagaacattgtggagcccggtggcttctgaaggttgatgtgaagaatttcttcgagagtatcaacgagcttatggtgttcgaaaccttttcctctttaggctacccaagacctctgtgcttccagatggcacgcatctgtactcgtgtcttcggaactgctcagtttgaggtgtctaaagctcgcttgggggtattaccccagggtgcccccagttcccctatgctcgcgaatctcgcggtgaacgagctggatgaggccataagcgagatcgctatccggcgtgggtggatttatactagatatgccgacgacctagctttttcaactaagcgcgagtcttcaaggcacgaggccaaggagctgattttctcaattgtcgacgaaattaggtcttttgggttgtcaccaaataacaggaagacaacaattagcccacctggcgcccggaaggtccttttgggcctgaacgtggacaccagcagaccacgactgacacgacgtttcaaaaataacttggagactcacgtctacgccatcaccaacccctccatcggaatcaaaaaacattcggaggcaagacagttccgaagcgaacaatctatgattaagcacattgcagggctgattgcctatgccaggtctatagaacccgagtacgcagacaaactgtacagacggctcacagctgatgctatctcaacctga

SEQ ID NO: 8931 - RNA, 1158 nt, synthetic construct
  source 1..1158: mol_type = other RNA
atgcggtcttggcgtcctcagaacttcgtacgagaggggcagctacggggggtcgacgatgacgtcattaataatgctgttttaactgccgcaagacttaggcagcgcagtccagtgttgcctcccatattttcactgggacatctcgcctggctcgttggcgcaagttacgaactgttgcgggacgtcgtgtccagatatactgtggacccctaccggtcctttcagatacgcaaaaggcctctaccaggacaaggcaagaggtttcggaggatctgcgtgcccgatacatttctgatgttaacccaaaagtggattgcctccaacctgctggtgagggtcccagctcactccgcgtcagtcgccttctctaagggagatcgcatcgttgacgccgtgcagccacactgtgagagtacctggctgatcaaaatggatgtggtgaacttcttcgagtcaattgacgaacgtgtggtgtaccgcgtattccgcaggatgggttaccagccgctggtgagcttcgagttggcgcgattgtgcacaagaatcggtgctccaaccgcagcaagacgcggtcggagatggaatcctattaggaattcagagtccaagattagctcgtatgaagctccgcgactcggacacctccctcaaggagcaccaacgtcgcctatgttagcaaacctcgcagttatcgagatggatgagcgactgagcgaagtggcaggcaaggctggatttgtgtactcccgttatgccgacgatcttgctttttctagcaggcggcagctggacaggaaatcttgtcgtgaagtcatcgcgagtgctagcgcgatcctggacgtcttcggctttagcgtaaactctgccaaaaccagcgtacggccacctgggagcagaaaagtgctgttgggcctcaatgccaactctgtgcagccccgcctgagtcgagaacttagagatcgcctgctccggcatagatatttcctgctgcacccccaaattggtcccgccaagcatgccaagagactggggtttgactcaacaataggctttaagaatcacctattcggccttgttgcttacgccgcccaggttgagcccgggttcgctatggtccttaaagaggatctcgcccagatctcctggcccctttga

SEQ ID NO: 8932 - RNA, 1155 nt, synthetic construct
  source 1..1155: mol_type = other RNA
atgtcttcttggcgcccccacctgtacaagagcaatgggatagcccaagggagagcgcgggtgacactgctgaatgctattgtacaagcccagaaagtgcaggcccgggggttgcctgccattctcaccctgggacaccttagcaagcatgttggcgtcccctatctgctcctgcgggaagtggtaagaaggaaacgcgatactgcttacagagagtttcccgtcgcgaagagatctggcggttggcgtcgaatctatgtgcccgagccactgctgttgaggacccagagatggataagccggtatgtactcgccaatttgacaccgcattccgccagtgtcgcatatgtgagagagtccagtgtattcaaagctgcagaaatgcattgtcgatgccagtggctgatcaaggtggatatccaggacttctttgagtccatttcggaaagacaggtttacctggtctatctgcaggcagggtaccagccgttggtcgctttcgagttggcccgcctatgtacttgggtttttgacgagcagtcactcaggtacaggcggaagcggtggcgaacctcccctgaaaggcgcagcgttccaggcgagatcggaggataccgagacagtaggatcggccaccttcctcagggtgccccgacatcacccatgctgtcaaacttagttatggccaagttcgatgcggcagctgaagccattgccctctcagaagggtgcgtgtatactcgctactccgacgatctttccatcagtagcgatgccagcgactttggacgttcaagagctgagaacgtggtgcgcgagctatttgcacttatgaggggatctggcttcgagccaaaccccgagaaaacggtgatcgctccacctggcgcacggaaaattgtgctcggtctattagtggattctgacaggcctcggttacggcgcgaattcaagtctaggctcgaagctcacgtccacggactggtcaagtttggcccagtgcagcatgcgcgtcaacgcgactttaaaagtatattcggcatgaagagacacctgtacgggctgctgacctatgcagaacaaattgattccgctttcgccgagcctcttcgaaagaaactcgacagcgtggtttggccaggtgtggagccctga

SEQ ID NO: 8933 - RNA, 1167 nt, synthetic construct
  source 1..1167: mol_type = other RNA
atgtcccggtggagcagccagccctacctcaaggctggaaggaaggcgggcgtacctggggatgttctcaagaatgcggtgaagacagcaaaacaagtgaagcagggctgccctcctatactgactttaaatcatctaagccaccttactggggtcccacactctttcctccacaggatggtgagccggacatacagaaccgaagcctataacgtctttaaactgcggaagcccaatgtcgggcactctgcggaccggttcaggtggatctgcgcaccttcagaagagctgctcagagtgcagcgttggattaacacacatattctcagtaaggttgagccccacgaagcctcctatgcttacgacaatcgccacggtgtacttgacgccgccgagttacattgcggagcccagtggctgattaagctggatctgacgaactttttcgagtccgtgctggagccccgggtgtatgagcttttcaggtcgttcggctaccagccacttgtggccttcgagctggccaggttgtgtaccagagtgcgcgcatctggcaaccctgaccgacgatttgggaatagagaactgcccgccggactcccatatccagctgaccctcgcatcggccatcttccgcaaggggctgccacctctccccgtatcgccaatttggtgatgcagagcctcgacgaaagcctgcacgactacgcctgtgacaacgagcttgtttactcaaggtacgcagatgatctggtctttagtagtaagaatgcgtttgatcgccaggaagcaattcagcacatcaaactgattggcaagtgtctaatcgaagagggcttctggctaaacgaggctaaaaccaagatcgtaccacccggagcaagaaaaatcgtgttgggtctgttggtggatggggatgagccccgcctgagtaagtcttacaaaaaatatgtctccgaccaactctactatttgtcccatccaaaaatcgcaccaatggcccacgctaagcgacatggctttcagtcactgcaaggcttaattaaccatgtctctggaaagatagcttatggtttctcaattgaaccggattgggctaaaaaacaggggaaacagctcaagggaatctccggtaaactggagctggaccacgttatatttccttga

SEQ ID NO: 8934 - RNA, 1167 nt, synthetic construct
  source 1..1167: mol_type = other RNA
atgaaccgctggtcaagccagctgtacctgaaaaccggtagagaggtgtctgtccccgatgatacgcttcagaacgccgtcaagaccgctaaacagatgaagcacggatgtcctcctatctttacactaaagcatctggcacacgtggctaacgtgccctaccctttcctgcataggaccataagcaggacataccgcactgaagcctacaatgtattcaagttgcgtaaaccgaatgtcggacatagccctgacagattccgatggatatgcgccccctccgaggacctcttacgcgttcagagatggatcaataccaatatactttcccgagtggagccacacgaagctagttacgcttatgacaagcgtcacggcgttctggaggcggccgaactccattgcggagctgagtggctgatcaagctggatctaacaaatttcttcgaaagcatactagagccccgcgtctacgatctgtttagatcctttggttatcagcccctcgtggcttttgaactggcacggctgtgtactcgggttaggtcatccggaaaccctgaccgacggttcggcaatggagagcttccagctgggcttccataccctgccgacccaaggattggccatgtaccccagggggcagcgacaagtcctaggattgccaatctggtgatgcaatctctcgacgagtctctccaagattacgctctcgaaaaagacttggtctatagcagatatgccgatgatctggtgttttctagtaagaaggcattcgaccggtcccacgcccaccagcacattaaatcaattaacgcccgcctgatcgagggggggttttggttgaacgaagccaagacgaagatcattgccccaggggccagaaagatcgtgttagggttgctggtggatggtgacaccccacggctgccgaaatcatataaaaagttcgtgtctgaccatctgtattacctctcgcatccggcaatcgatgcgaaaactcatgcaaagcaccggggctttcaaagccttcaaggcctgattaaccacgtaagtggcaaaatcgcgtatggctacagcattgaacaggactgggcaaaaaagcagggtgataggttgaaggagatctgctccaaaaacgagttagaccacgttctcttcccctga

SEQ ID NO: 8935 - RNA, 1167 nt, synthetic construct
  source 1..1167: mol_type = other RNA
atgtcccgatggagcagccagctctacctaacaacaggccgtaaagcaggcgtgccgggcgacatcttacagaatgccgtgcaaacagccaaacagatggaacacggctgtccaccgatcctgactctcaatcatctagcccatctggcaggcgtgccttatcctttcctgcatcgcacgatctcaaggacttaccgcaccgaggcgtataacgtgttcaagttgagaaaggcaaatgtgggccactctccagatcggtttaggtggatctgtgcgccatctgaggacctactgcgcgtgcagcgttggattaacgttcatattcttagtaaggttgacccccatgaggcttcatatgcatatgacaaacgacatggtgtactggaggccgccgttctgcactgcggagctgagtggctcatcaagctggacctgaccaattttttcgaaagcatactcgagccacgggtctacaaactgtttcggagctttgggtaccagcccctggtcgctttcgaattggcgcgtctttgtaccagagtacggaagtcggggaaccctgacaggaggttcggaaacactaccctgccagtcgggcttccctactccggtgaccccaggattgggcacctgcctcagggagctgctaccagccccagagtcgccaatcttgtcatgcagtcactggatgagaaccttcaggaatatgctcgggaaaacgagctcgtgtactcacgctacgctgatgacctcgtgttcagctccaaaaatgctttcgacagatctcaagtagccttgcacatcaaaatgatcaacgcatgcttgattaaggagggtttctggttaaacgaagccaagactaagatcatacctcccggggcaagaaaaattgtgctgggactcctcgttgatggcgatcggccgagactcacgaagtcctacaaaaagtacgtgacagaccatctgtattatcttgcccaccccaatattgatgccatgacccacgcccgacaccgcggttttcaatccttgcaaggattaataaaccacgtgagtggaaagatcgcgtacgggttttctgtggaaccagattgggcccgcgtcaatggcgcaaggctgaaagagatatgcagtaagattcaggttgattatgtcctgtttccttga

SEQ ID NO: 8936 - RNA, 1167 nt, synthetic construct
  source 1..1167: mol_type = other RNA
atgacccgatggtctagccagccttatttaaaagaggggagagggctcggcgtcccgcaagatattctgcaaaatgctgttaaaactgcgaagcgcatgaaacatggctatcccccaattctgacactgaatcaccttgcacacctcacaggtgtcccgtacccttttttgcaccggaccgtgtctaggacacatgagaaggaagcgtacaacctcttcgccctgaaaaagccaaacgttggtcattcacccgatagactacgctggatcagtgcaccatgcgaggacttgcttagggtgcaacgatggatcaatgctaatatcctcagccatgcagagtcacacgaagcatcttatgcttacgataaacgtcacggcgtcctggaggccgcagaactgcattgcggcgccgaatggttaataaagctcgacctgaccaattttttcgagagtatactcgagcccagagtctataaactgttccggagcttcggctaccagcgtctggtggcatttgagctggccagattatgcacgaggatacgcgtatcaggtaaccccgaccgaaggttcgaccaccggactctaccagctgggtttccatatcccgctgatcctagaatcggacacctgccacagggagcagccacgtcccctaagatcgccaacctggtgatgtacagcctggacgaacagctacaggcctacgcgacaaagaatgaacttgcctacagccgctatgctgatgacctcgttttttcctccagtaatccattcgatcgcccccaggccatcgaacatgtgaaagcgatcaacgagtgtttgatcaaggccggattttggctcaacaaggccaaaaccaagattatcccgcctggtgctaggaaggtagtgttgggactgctcatcgacggggagcagcctagactgactaaagcttacaggaagtacatatcagatcacctgtacttcttgtctcaccccgacatcgatgccattacccacgctgaacaccggggatttaagtcccttcagggccttattaaccatatttccgggaagattgcctatgggtattcgattgaccctgactgggccaaggagcatggcaaccggcttaaaatgatttgtcgggcactggaggtggatcacgtgatcttcccctga

SEQ ID NO: 8937 - RNA, 1167 nt, synthetic construct
  source 1..1167: mol_type = other RNA
atgaacagatggtcgtcacagccgtatctgaaagcagggaggaagagcggcgtgccggaagacattctgaaaaacgcagtcaagactgcaaatcagatgaaacacggctgccctccgctactgaccctgaatcatctgagtcatctcacaggtgttccttaccccttcctgcatagaacaatttctcgtacttataagaccgaggcatacaacgtgttcaaactgcgcaaacctaacgctggccactctctagatcggttcagatggatctgtgcgccttccgaggatctcttaaggatccagcgatggatcaatgtgcacatcctcagcaaggtggagcctcacgaagccagctacgcctacgacaatcggcatggcgtgcttgaggcagcggctttgcattgtcgcgccgagtggctgatcaagctggatctcacaaactttttcgagtctatccttgaaccacgagtttacgagttattcagaagcttcggataccagccactcgtcgcctttgaattgagtcggctctgcactagaattcgcgccagtggcaaccccgatcgcaggtttggaaataaaaccctaccagctgggctgccatatcatgcggacgccaggattggccacctgccccaaggagctgcaacctcaccacggatagccaacctggtcatgcaaagcctggacgaaaacctccaggcctatgccactgaaaacgaattagtgtacagcagatatgccgacgaccttgttttttcatcccgaaatgccttcgacaggagtgaggcgatacaacacatacaatccatcaatgagtgtttggtcgaagagggattttggctgaacaaggctaagacgcggatcaccccccctggtgctaggaaggtggtgcttgggctcttggttgacggtgaaaagccccgcctgcctaaaatttacaaaaagtacgtatccgaccacctgtactatcttgcacaccccgagatcgatgccatgacacacgccaagcatcgtgggtttcagtcattgcagggccttattaatcacgtctctggaaaaattgcttatggtttttccatcgagcccgattgggctaagaagcagggggcacagctgaaggctgtgtgcaaaacgatagaggtggatcatgtagtattcccatga

SEQ ID NO: 8938 - RNA, 1167 nt, synthetic construct
  source 1..1167: mol_type = other RNA
atgaacagatggagtccccaacgctatcttaaagccggccgacaagagggagttagtgaggccacgctccagaatgctatcgatactgctaaacagatgaagcatggctgccctccgatattcagcctgaatcatctgtctcacctcatagggactacgtacccttttctccacgaaaccgtctctcgggagaatgaggaggaagcctacaaggtgttccggctgaaaaagccaaacgtaggtcatagccccgatcgctttcggtacatatgtgcaccatgcgaagacttgttgagggtccaacggtggatcaacaaccatatactgagccgcattgaaccccatgaggcttcctatgcgtacgacaatcgacacggggttctggatgcagccgcccttcactgtggtgctcggtggctgatcaaactagacctgactaacttcttcgagtccatcctggagcctcaggtttacgagctcttcaagtcattgggataccagcccctggtggccttcgaattagcacgcctatgcacacggctaagagttagcggcaacccagaccgacgctataagaacaaaaccccaccagaagggctcccttacaccggagatacccgtatcggacacttgccccaaggagcagcctcatcccctcgtattgccaatctggtgatgaggtccctcgatgaatcccttcagtattttgctagtgagaatgacctcacctattcaaggtatgcggacgaccttgtgtttagttccagagccgaatttgatagatctcaggcaacacagcacattaaagccatcaacaatagactggtcgacgaaggtttctggttgaacaaagcaaagaccaagattgtgactccgggcacaaggaaaattgtccttggcctgctggtggatggaaagaagccacgcctgcccaagtcatataagaagtacgtgagcgaccacctgtactacctcagccatcccacaatcgacgccatggcgcacgctgagtctagggggtttcagtcggtgcagggtctgatcaatcacgtcagcggcaagattgcttatgggttttctatcgagcctgtgtgggggaaagaacagggcgatagattacgtggcgtgtgtagggagttagacctggatcatgtaattttcccgtga

SEQ ID NO: 8939 - RNA, 1167 nt, synthetic construct
  source 1..1167: mol_type = other RNA
atgactcgttggtcgtctcaaccttacctaaaggccgggcgtcaggctggagttagcgagtccatcctccagaacgccgttcagactgcaaaacagatgaaacacagctgccccccaattttcacgttaaaacatctggctcacctcaccgatgtcccctaccctttcctgcacagaacaatctctcgcaagtacagagccgaagcttataacgtgtttaagctgaaaaagcagaatgctggccacagtccagataggtttaggtggatctgtgcccctaccgaagacctgcttcgcgtgcaaagatggataaacacccacatcctgagtaaaattcagccccacgaggcgagcttcgcgtacgacaatcgcaacggagtgctagaaacagcacagctccactgtggtgcaacctggttgatcaagcttgatctgacgaactttttcgaaagcattctcgaacctcaagtatatgagctgttccggtcatttggttatcagccgctggtcgcctttgagcttagtcgcctctgcacaagggtgcgagcaagcggcaacccagatcagcgacatggcaataagccactacctcccgggctcccgtacagtggtgacaccaggatcggacacctgccccaaggcgcagctacctctcccagaattgctaatctggttatgcagtccctcgacgagacattgcagacctatgccactgagaatgatcttatgtattcaagatacgctgacgacctggtcttttcctctaagggcgtcttcgacaggccccaagccactcagcacattaaggccattaacaagtgcattgcagaggaggggttctggttgaatactgccaaaactaaaatcgtgacaccaggggcccgaaagatagtgctgggcctgttaatagacgggggcaccccgcggttgtcaaaagcctataagaagcacgtgtcagatcacctgtactacttagcccatcctaagatcgacgctatggcccatgctacacggcggggatttcatagcctccagggcctgattaaccacatctccggtaaaatcgcgtatggattctccatcgaacctgattgggccaatgagcatggaaaacggcttaaagggatatgtgcaaagttgcatgtagatcatgtgctgttcccatga

SEQ ID NO: 8940 - RNA, 1116 nt, synthetic construct
  source 1..1116: mol_type = other RNA
atgccagaggatgttttacagaacgccgtcaagaccgcaaaacagatgaaacacggctgtcctcccattttgactcttaaccatctcgcgcatctcacaggggtcccctacccgttcctgcataggacgatctctcgaacgtacaggaaagaggcctacaatgtttttacactgaggaagcccaactcaggccattctcccgatcgagtgagatggatatgtgctccatccgaagatcttctgcgattgcagagatggataaataccaacatcttatccaaagtggagccacacgaagcgtcatatgcctatgattcgcggcacggtgtgcgcgaagctgctgaactccactgcgaagctcagtggctgattaagctcgacctaactaactttttcgaaagcatactggagccgcgtgtgtacgagctatttcgctccttcggctaccagcctcttgttgccttcgagctggcacgtctgtgcacacgcattagagccagacggaatcctgaccagcgccacggaaataagagcctgcctcccggtctgccatattcacgggactctagaatcggacacttgccacagggggctgcgaccagtcctaagattagtaatcttgtcatgcagtcactcgacgaaactctgcaggcctacgcagaggataatgagctcgtgtactctaggtatgccgatgacctggtgtttagcagtaggaaacctttcgacaggtcccaagccctgcaacatgtgaagtccatcaaccaatgtctggtcgaggaaggtttttggctaaacaaggcaaagaccaaggtaatcacacctggcgcacggaaggtcgtactgggactccttattaatggcaagaaaccccggctgactaaagcatacaagaaatatgtgagcgatcacctgtatttcttggcccatccggacatcgatgccatcacccacgcagagcaccgggggttcaaatccttgcaggggttaatcaaccatatcagcggaaaaatcgcttatggctacagcattgaacccgactgggctcgcgagcaagggaatagactcaaggtgatatgcgccgctcatgaggtggaccacgttatttttccatga

SEQ ID NO: 8941 - RNA, 1164 nt, synthetic construct
  source 1..1164: mol_type = other RNA
atgaagcgttggagtcctcaggcgtatttaaaggccggacgggcagccgggatacctgaagacgtgctgcagtctgccgtaaaaatcgccgctcagatgcatgaaggctgtccccccattttttccctcaaacacctggccaacttaaccggagtgccctacccatttctccaccgcaccatctctcgaacttataagactgaggcttatactgtgttcatggtgcacaagacaaacgtcggacattcaccagatcgcttcagaacgatttgtgctccctcacctgagctcttgaaggctcagcgatggatcaataaatacatcctctcgaatatcccgtcacaccacgcatcttacgcctatgagggccgcaacggtgtactggaggccgctaatgtccattgccaggcaacttggctgatcaaacttgatctgactaacttttttgagagtattctggagcctaaagtgtttacccttttccgcagcctgggttaccaacccctggtggcattcgagctggccagattgtgcaccagaacaaggaagaccggcaaccccagagtcatgtctcgggctggtggtggctcccctgcactaccatataagaatagcctaattggacatctcccccaaggggcggcaaccagccctaagattgcgaatcttgttatgcggtcccttgatgaaaaactgtttaagttcgcccaagataacgacctgatctacacacggtacgctgacgatttaatcttctccagccgccagccgtttgataggaccgtcccttctgcttacatcttggctattaaccagctgctgcgggccgaaggctattggccaaatagagccaaaacgaaagtggtgacacctggcactaggaaggtggtgttggggctgctagtagacgggagtgagccccgactgacaaaaacatacaaaaagtacgttagggaccatctgtattacctctcacatccggaaatcagcccagagctgcacgccaaacgtaagggattcaggagtcttcagggattgataaatcacgtttccgggaaaattgcatatggcattagcatagaaccagaatgggggaccgcccaaggcgaaaagctcaaggagatatgccagaagtggcaggtcgaccacgttctcttcccatga

SEQ ID NO: 8942 - RNA, 1164 nt, synthetic construct
  source 1..1164: mol_type = other RNA
atgaagcgctggtccccacagtcgtaccttaaagcaggccacgcagccggcatacccgaggatgtgttacaaaacgccgtgaagatagccggacagatgctcgacggatgcccgccaatttttagcctgaaacacctcgctacactgaccggtgtcccgtatcctttcctgcaccgcacaatcgaccggacttatcagactgaggcatacacggtgtttcgtttgcagaaagcttcagtgggccactccccagaccgttttcgttacatctgtgcgccatgtccagaattattgagagcccaacggctgattaataagtacattctgagcaatctcaccccccaccacgcgagttatgcatacgatgggcgaaatggggtactggaagctgcttccgtacattgccaagccacatggctgatcaagctcgacctgacgaactttttcgaatctattctggagccccaggttttcaagcttttccggagtatcggctaccagcctttggttgccttcgagctgagtcgcttgtgtacccgggtcagagtgcgggggaaccctgacactaaattttggagcggggagttgtcatcttctttcccctataaagatagcaggatcggccaccttcctcagggagcagcgacaagcccgaaaatcgccaatctcgtgatgcgctcccttgatgagaagctatatgacctggcctcgaagaatgagctgatatacaccaggtatgctgatgatctgatattctcatctaggcagacctttgacagggccctggcatcccgccatattcgggctgtgaatcaggtcttgcgcgaagaggggtattggcttaaccgagctaaaactaagatcgtgcctccaggaacaagaaaggtcgttctgggtttactagtggatggtcccgttcctaggctgaccaaatcttacaagaaatacgtcagtgaccatctctactacctctctcaccctgaagtaagcgcagaggcgcatgccgctagaagaggatttaactccctccagggtctgatcaaccatattagcggcaagatcgcctatggaatctcaattgaacccctttggggcgccgaacaggggcaacgactcagacagatttgcggcaggctgctagtggaccatgtgatgttcccctga

SEQ ID NO: 8943 - RNA, 1164 nt, synthetic construct
  source 1..1164: mol_type = other RNA
atgaaccgctggagtccacagcactaccttaaagctggacgcgccgctgggattccagaggatgtactgcaaaatgccgtgagcatagctgcgcagatgcacgagggttgccctcctatttttagcctcaaacacctcgcaaacctgacctcagtgccctacccttttctgcatcgcaccatctcccggacttatcagacagaggcttatactgtcttcagactgcagaaagccaacattggccacagcccagaccggtaccgttacgtctgtgccccctcacccgaaatgctgaggacacaaaggtggatccacaagcatatcttggcctccctgaaaccacaccattcaagctacgcatatgaaaagagaaatggagtattcgaggccgcaagtctgcattgtcagtgcatctggctcatcaagctcgatctgaccaatttctttgaaaccatcctggaaccgcgggtgtataaactgtttcgatctctgggctaccaacccctggtggctttcgaactaacacgactttgcacccgtatcagacccagaggcaaccctgagaatcggttgtggaggggcgagctgacagaaaatcttccttacataggttctgcagttggacacttgccacagggggcagcgacttctccaaaaattgccaatctggtgatgaaatcccttgacgaaaagttatatgagttcgcgtcactcaacgagctcacatatacgcgctatgccgatgaccttattttcagttccaccaagagcttcgaccgagcactggcaagcaaacacattgagactatcaacaagttactgcgggatgaggggttttggattaatagggccaagaccaaagtggtcacgcctggagcgagaaaggttgttttgggcttattggtggacggcgccgaaccgcggctgactaaggactacaagaagtacgtctctgatcatctttatttcctctcccgcctagacatcgatgctgaggcccacgccaagaggaaacgttttgactctgtgcagggcctgctcaaccatctgtcgggaaagatcgcttacggtatcagtatagagcccaagtggggggctgaaagggggacaaaactccgccagatatgtgatagattgtccctagaccatattttatttccctga

SEQ ID NO: 8944 - RNA, 1149 nt, synthetic construct
  source 1..1149: mol_type = other RNA
atgaatcgttggagcccccagcgctacaagtcagaggggctcaaccagggcgtggatcaaaacaccctctccaatgcattgtcgacagccgaactgcttcgtgcaaactcccctaaactgccaccgatttttactctgagacacttagctcacgaagcaggtgtgccctatgccctgttgcgggctgtcgtggccaggtctgaaagggcagaagcttacaaggtattcaagttgaaaaaagcggtagcctcatttggcgcgaatagattccgatatatctgtgttccacatccatccctactgaaggtccagcgatggattcacaagcacattctcatgcaggtggacgctcatcctgccagttacgcgtataaggagaaaaccagcccctgtgacgccgctacaatgcatgcgggatgcacgtggatgatcaagctggacgccaccaattttttcgagtccatcctggagccagacgtgtatttcgtttttcgcgatatgggttaccaagccctcgtcgcattcgagctggccaggctctgcaccagggttaggcctaccggtaaccccgtcaaagctaacagagtgaaagagggacaaggcaacctgccataccgcaccatcaaaatcgggcaccttccacagggagctgcaacgtcacctcttttgagcaaccttgtggctcggaaactggactgcgccctcacaggtctggcaaacgataggggattgacttatacccggtacgctgacgatttaactttcagctctttcggggactttgatcgcgacattagtacaaatctggtcagagagatttacgagatcatgagaactcatggcctgtggccaaataagtctaagaccaagatcatacctcccggagcaagaaaagtggtgctgggccttctggtggatggccctgtaccccgtctcactaaggagtttaaagccgaagtccgaacgcatattcacttcatgttacggcccgatgttggggtgcggaagcacctccgcgccagaaaattcgatacaccctgggggatgcagaattatctgtttggcaagctggcttacgcccagccgatagaacctcgatggactgcccgcatgagggacctactacggaagatagactggacaagttga

SEQ ID NO: 8945 - RNA, 1149 nt, synthetic construct
  source 1..1149: mol_type = other RNA
atgaaccgatggtcaccgcaaaggtacaagtccgcaggattgaaccagaatgttgataagggcgtgctgaacaatgcactgcggaccgcgcagcttcttcacgccaacttccccttgttatcccccatcctcaccttgcggcatctggctcacgaggccggagtatcttatgggttcctgcgcggagtagctgcgagatctgagcgggtcgagccctacaaagtgttcaagctcaagaaaaacgtggtgtcttttggagctaacaggttccggtacatatgcgccccacatccctccctgctgaaaatgcagcgctggatccacaagaacattttgatgcacgttcacagtcatccagcaagctatgcctataaggaaaaaacatcccctcgtgatgctgcggcaatgcacgccggttgtaaatggatgataaagctagatgcgacgaattttttcgagtccattctggaaccagacgtatatcgcgtcttccgggagatgggctatcaggccctcgtggccttcgaactcgctagaatctgcactcgcgtgaggcctagtggtaatccagttaagacggaccgtttcaaggatgggatggggaatttaccttataaaaacgtcgccattggccatttgccacaaggagctgctacatcgcctcttctgtctaatctggtcgcacgcacactggatcatagcctggccgagtttgctaattcaaaggacctcgcctacacacgttacgccgacgatctgactttttcaagctttggtacctttaacagagatggggctgagaatatcgtgagggagatctacgaaataatgagagcccatgggctttggccgaacaagagcaaaactaagattattcctcccggggctcggaaagttgtcctaggcctcctcgtggacggtcacgtccccaagctgagcaaggaatttaaagcagaagtgaggacccacatccattttatgctgcgacctgacgtgggcgtgtcaaaccacagaaaagcacgaaaatttgacaattcctggggcttaaaaaatttcatcttcggcaagctggcatacgcccaggccattgagccaatctggaccagtagaatgagggaccttttcatgaagattgactgggatagctga

SEQ ID NO: 8946 - RNA, 1149 nt, synthetic construct
  source 1..1149: mol_type = other RNA
atgaatagatggtcttcacagcactatattcgcattggtaatgaccaaggagtcgctccggctatcttgaagaccgctgccgaaaccgccaagcacctgcataaatgcaatccaaactttccacccgtcttcaccctgaggcatctggctcattacactggcgtcccttacggcttcctccggatggtggtggcgcgcaataagcaggttgagccgtacagggtgtttaaactgaagaaacaagtgcgtagttttggacgcgaacggttccgatttgtctgtgccccccatccctacctgttaaaggcccagcgctggataaaccgagagattttggccaaaattcctggtcacgaggcctcgtacgcatattcacccgggagctccgtctacgacgcagcaagcatgcacgccgggtgtcggtggcttatcaagttggacgcgactaacttcttcgagagcatacttgagcccaaaatctatgagatttttaggacgatcggataccagcctttggtggcattcgagcttgctcgtgtttgcacaagaacccgacctagtgggaaccctgtatactccaacagggctgaccccaataagaaaggcctgccatataacactgtacagatcgggcatctgccacaaggggccgccacaagtccccatctctccaacctggctgcacgcgatctggatgaaagcctcaagaacttcgctctccttaaccagttaatatatacgcggtacgccgacgatctgaccttttcttcaaccgaagaatttgtcagagaagacgttgtgaagaagatccacgaaatatatgggtttatgagagcaaatggactctggccaaataagtcaaaaactcagatcgtgcctcctggtgccagaaagatcgtactgggcttgctggtggatggcgcccaaccaaggcttacaaaagaattcaaacaggagattaggacacacctccactttctacagcgttctgatatcggtgtgcggaaacacctaaaagcgcggggcttcgattccttctggggactgcgcaatttcttagtgggcaagctgtcctatgcaaaatctgttgagcccgagtgggagagcaagatgaatagactctttgtgaagattaactgggacacatga

SEQ ID NO: 8947 - RNA, 1128 nt, synthetic construct
  source 1..1128: mol_type = other RNA
atgacacggtggagttctcagttgtacattaaggaaggtagatcaaaggatgtcccaagagacatcttgcgggatgctgccagaaccgccgagcttttgatttcaccagacctgccccctgtttttaccttgcgacatatcgctcatctgacaggagtcccttacaatttcctgcgggaggtcgttagtaggagctccgatccctatcgagtattcaagctgaagaagaacagcccaaatctggtcggtaggtaccggtatatatgcgccccacacccaaaactgctcaaggtgcagcgctggatcaaccgtgagatactcgaaagtcttcagccccatgaagcctcatacgcttatacaaaaggcgccggcgtgctgaaggctgcagaagtccacagtgggtgcaggtggatgattaagctcgacgtaactaacttttttgagtctatcctcgagccccgcatttacaagattttccggggactcgggtaccagcccctcgtttccctggagctggcgagactgtgtacgcgagtccgcccgtacggaaacccagtgtacaggaataaacaggacgcaaaccttcccggcctcccttatatggtggccgagatcggacacctccctcaaggcgcagcaactagccctctgctgtccaatctggcggtgtacgagttagataaggaactttcctcttattccatcgaacacgaacttacctattctagatatgccgatgacatggtgtttagcagcgaagctaaatttagccgttcggctgttctggtgatggtacacgagctttacgacattgttaggaaacatgggttatggcccaatagggtgaagaccaagatagtgtcccctggggcgagaaaagtggtgttgggtctgttggtagacggcaaaaaaccgagattgacatctgagtacaagcaggaagtgcgcactcacctgcatttcctgctaagggaagacatcggggtcgagaaacacctagtgaagcgcggtttcgattcacgctttggcttacgtaatttcctgctgggcaagatcgcctatgcccaacacattgagcccaaatgggcaggagagatgcggaacatgctccatctagtgaaatggtga

SEQ ID NO: 8948 - RNA, 1167 nt, synthetic construct
  source 1..1167: mol_type = other RNA
atgaactcgtggaatagtcaattgtttaagactgagggccgggctcgggggattcctaatgagatcctcgacaatgctacgaagatcgctaaacagctgaaatatgccggcctgccccctatctttactcttaaccacctgagtcacctctgcggagtgaagtacagcactctgaggtatattgtcgaacggaaacataacgatgacgcctataaggtttttaagctgaagaaatccggggtcgggttttccgacgaaagagtccgttttgtatctgtgcctaatagtgaactgttcaaggtgcagcggtggatacataacaatatcctcaagctgatccccgcccacgaaaacagctttgcctttcatagcaatggcggcatactaaaggctgcatacccccactgcaataagaaatggatgattaagctggacgtgtcaaattacttcgagtctattctcgagcccacagtgtataatgccttcttaaaaatgggctatgagccattggtcagtttcgaactggcacgcatatgcaccagggtaaaaccacatcataacccagtgaaaaaaaacaggatcaactggctcttaaacaccgatcttccgtacaagactatcgagattggacacctacctcagggtgcgcccacctctccactactgagcaacgtctgttctatcaaattggatgagctgttgtctgacttcgccggcgttaataacctcacctacacacgctatgccgatgacattgtgttcagctccgcagacttttttaatcgtgacctttgtaatgggtacataaagtccgtgtactcaattatgagagagaataacctgtggcctaaccgaacgaagacaaaaattatccctccgggagctcgaaagatcgttctcggtctgttagtggacacagatagaccaaggctgaccaaggagtacaaaaaggaaattctgacccacctgtactatattttcaacgagtccataggactcgaaaagcactgcaaagccagagggttcgattcagtgtatggtttcttgaacttcatcaacggaaaacttacatacgcgaatttcatcgatcccgaatggagcaaaccactgatctacaagcttaagtgtgttgcacgcccctatatcgatcttgactcctcatgttga

SEQ ID NO: 8949 - RNA, 1158 nt, synthetic construct
  source 1..1158: mol_type = other RNA
atgaagatttggtcaccgcacttatatatttcccagggaatagccgacggggttagccctgacgtattgaatagtgcagtggcaacagccaaaaaattgagatatctcgacctgcctccggtgttcaccctgaagcacctgtccgttttatcaggcgtctcatatagctcgctaaggttcattgtacagcgccgggacccatcctctaattacaaaaccttcaagctcaagaaatccaacgccggctttcacccagatcgagtcagattcatctcggtgcccgaaccatctctgctgatcgtgcagaaatggatccacgagcacatcctcaagaagattccccactctaaatccaccatggcttttcatgccgatggcggcatcttgaaggcagccatcccacattgtggtaataactggatgatcaagattgacatcaaaaactacttcgagagcattagtgaggtcaaagtgtacgatgcgtttgtccaagccgggtaccagcctcttatctcatttgaaatggctcggctctgtactcgagtcaggaataaaagtaatcccatcaagatgtatcgtcatgacgataccttaggaactcaacttccctataccacggtggagataggacacctgccacagggtgctcctacgtctcccctgctgtctaacatttgcacaaagaagctcgatgcgagcttctttgaatttagcattgcccatggcattaactatacaaggtacgctgacgacataattttcagctccagatccttcttctcaagggacatttgcgtgtcccttataaaggagatcaagtatatcctgaacaaaaatggcttttggccaaacgaggctaaaactaaaatcgttacacccggcgcacgcaaaatcgtgctcggactgttggtagatggtcctgtgcctaaacttacaagcgaatacaaaaaggagatcctgatgcatctacattttgcatctcggaaggatattgggataatttctcactgcaatagacgcgggtttaagagcgttaccgggtttctgaattacctggagggaaagataagtttcgctagtagcatcgaacccctctgggcccggaaggtgaatgccactttcgtgtacatcaagaacaagtacaacaacactatctga

SEQ ID NO: 8950 - RNA, 1149 nt, synthetic construct
  source 1..1149: mol_type = other RNA
atgacgaattggtcacctcaacattatgtggagactggcgaacaacatcacgtgtccgccgcggtgctaaacgcagcacttaaaacagcctcggtcattcgcagcagaaacaaggatgttcccataatttttaccctcggacatcttgccgcgctgacaggagtccctcatagtttcctgcgggctgttatcaccagggatgacttcgccccctataaggtctttaaactccggaagaggtccgccggatttgccaaagataggttccgttttatttgcgctccccaccctaaactgctccgcgtgcagcggtggataaacgagagaatcctgaagcacatcccaatcgacatcgcgagctacgcgtaccgagaaaacacttctatccaggacgcagctatacagcactgtgagtgcaactggttgatcaagctggacatgtctaatttttttgagtctatcttggagcccaagatctacagagtctttagagagctgggttacaaccggctcctttctctggagctcgcccgcctgtgtactaggattcgtcatttcggtaatcccagcatgccaaaggagaagaagttactgaaaaagttcccataccgcaaaagtcgcttcattggacacgtcccccagggcgctgctacttcaccactgctagctaatattgtgtcaaggggcctagacgcctctattagagaattctcccggacaatgaatattacctacacccgttatgccgacgatttaatcttctcctccaaaagcaagtttgatcgacagggtgcacacagcctggtgaaggatctgtacgaacttataaaagctcacgggtattggccgaatctgaccaaaaccaaagtgagtccaccgggcgccagaaagatcgtattggggttactggttgatgggcgaacacctcggctcacgaaggaatttaagagtgagattaaaacacacatccacttcatcaccagaccagacgtgggcattgcaaagcatatgcttaatagggggtttgactccactgctgggttgaggaacttcctctatggcaaattgtcattcgccgcacatgtagaacctctgtgggccgcaaagatgcgaagcaaactcgaccaggtgaactggcctaagcgctga

SEQ ID NO: 8951 - RNA, 1149 nt, synthetic construct
  source 1..1149: mol_type = other RNA
atgactaactggagtccacagcgctttctggaaaccggcaaacaacgcctcgcatcgcctttggtgttggaagccgccctgcagtccgctaagctgatcaaaagcaggaataagaacgttcccgtgattttcacactcgggcacattagcgcgcataccaaagttccttaccatttcttaagggaagtgatcacccgcgaaaatctcaagtactacaaggttttcaaacttcagaaaaggaatgccggttttaccaagaagcaggtgaggttcatttgtgcaccccatccctatctgctgcgtgtgcagagatggattaatgaacggatcctgaagcacatccccatcgatgattccagctacgcttaccgggccaataccagcatagcggatgctgcctttcagcattgcgagtgccgatggctgattaaactggaccttagtaacttttttgagagtatcctggaaccaaaggtctataaggtgtttcgtgagcttggctataaccgcctactcagcttggagctggcccggctttgcacccgtacaaggaattacggcaatcctagcatcagtagagaaaagatctcacaaaaaaagctgccctatataaagaacaagtatattggccacgtcccgcagggagctgctacgtctcctctgttagcaaatattatctctagagacttggacgtctccctaaagcagttctccaagaacttgggactggtctatacgcgatacgcagacgaccttatattctctacaaaaactgacctgactcgggcacagctgaaccaacacattaacgagctctataagatcatcaaatcacacggttactggccaaacttcacaaaaactaaaatatcccccccaggcgcccggaagatcgtgttagggctgctcgtaaacggggtaacaccaaggctgcctaaagagtttaaagccgagataaagactcacattcacttcatttctagatcagacatcggagtcgctcaacatatggcgaatagaggattcgaatctgctgagggcttcagaaactttctttacggtaagctctcatttgccaatcacatcgagccggattgggccgcacggcgaaaatgtgagctcgatcgcgtggattgggccgggctatga

SEQ ID NO: 8952 - RNA, 1167 nt, synthetic construct
  source 1..1167: mol_type = other RNA
atggttaattggcggtcacagcatttcattaatgagggacgtcagcagggcatcgctgagcctctgctgcgcaacgcaactcttatcgcaaggcgcatccaggccgtgaatgccgatttaccacccctttttacccttagacacctctctcatgaggtgggcgtgccgtacctggcactgcgatcaatcgtgagccggaagtttacctgtgaaccctatcgtgtattctcgctgaggaaaaaaaatgtcggccacggctctaggcgattccgcgtgatttgcgtgcctgatcccgccctgctgaagacccaacgctggatacattcaaggatcctcaagttcggcagatgccacgaggctagcggggcttatagtaaaggaagtggcatttatgacgtggctagtacacactgtaatgcccggtggctggtgaagctggatgtcacaaatttcttcgatgctatcttggaaccgaaagtttaccaggtattcgctcggttaggataccaacctctaatggcatttgaattggcaagactctgcaccagactgagacacgacggcaacccaaaacggaagtccaaaacagggtatagaaaaatttggacatacggaagctccgtggtgggacatcttccccagggagctcctactagcccgctcctggcgaacttggtggcctacgacctagattcagaattgtttgccttagccgaaaacgcaaacgttcgctataccaggtacgccgacgacatcgtcttttcttcttccgagaaggccttcacgcggtccgatgcggaggggttgatccgtggggcttacgcctgtctcgaacgacacgggctttgggccaatcgggccaagactcacgtggtaagcccagcggcccgcaagatagttctgggtctgctcgtcgacggtccagtcccaaaactgcagagagagtttaaagacaagcttaggatgcatattcactatctgcatcacccccaaattggtcccgttgagcacgcaaggcgacgcggattcgacaacgtcctggggctgcaacggcatctcctcggcctagctgcctttgctatggggatcgagcctgcgtggggcagacagcagatggatgaaattaagagggcaaactggcccataggtataccaccttttaagtga

SEQ ID NO: 8953 - RNA, 1167 nt, synthetic construct
  source 1..1167: mol_type = other RNA
atggtaaactggcgggcccaacagtttataaacgagggaagacagagaggagtgagtgctccaatactgcagaatgctgtccagatcgctagacagatccagagcgtgtccaatgacctgcccccattgttcactctgaggcatctggcccacgaagttggagtgccttatctggcgcttagagggattgtgagtcgtcaatttattgatgaggcataccgcgttttcaccctgagaaagcggaatgtcggccatgactctaggagattccgagtgatctgtgtacccaacccagccctcttaaagacacagcggtggattcattcaaaaatactcaaacttgggcgctgccacgaagcatccggtgcctatagcaaagaatcccgcatttacgatgtggcatctattcattgcaacgcccggtggctggttaagctggatgtgaaagatttctttgacagcatcctcgaacccaaagtctatcaggtcttcatcaagctggggtatcaaccactggtggcctttgaattagcgaggctctgtactcgaacgcggtataccggaaatccgaagcgccgctccaagcgccaataccccaaaatccagggctaccggaaccctgtcgtagggcacttaccgcagggcgcacctacgtcgccactgcttgccaatctggtggcttatgatctagactcagagctgctagccctggctgggaagaccaatgttagatacacccgttacgctgacgacattgtcttctcaagcgcggacaaggcttttactagggccgatgccgagaagcttatagatgagacatacgcttgcctcaagcagcatgggttgtaccccaacagggccaagacaaatatcgtgagtccatctgcccgcaagattgtgctcggtttgttggtggatggccctacccctcgactgcagcgtgagtttaaagacagactgcggatgcacatccactatctgcatcaccctcagttcggccccgttgagcacgctaaacgaaggggatttgacaacgtgctaggacttcaaaggcacctcctcggcttggcagcattcgccatcggtattgagcccgtctggggccggcagcagatggaagagatcaaaagggcaacatggcccattggcatccctccattcaagtga

SEQ ID NO: 8954 - RNA, 1173 nt, synthetic construct
  source 1..1173: mol_type = other RNA
atgaatcattggaactcgcagaggtacctggcatctggccgcagtcagaagagggcagctaatgtgttggctaatgcggcatcaacagccgagctcatcagaaaagccgcccctggtgccgccatcctctttaccctcaatcatcttgccagggaaaccggcgtcccctatcattacttacggtcggtgacagagcgcggcggactgaatagcaacactttctacagagtcttttccttgaagaagcacaacggcgggttcaggggtaagcgtactcgaactatttgcgcacccgaaccattgttaatgaaaacacagcgttggattcacgaacacattctgaccaagggatgtccccactccgcgtcctccgcctacagaccagggagcaggataagagacgcagctgagcagcataggaatgcacgctggctcgtcaagatggatgtgactaacttttttgagagcatcctggagcccaaagtctatgaagtgttcaggagcttcggttaccagcctctcatggctttcgagctcacccggctgtgcacccgcattcgaaagggtgggccgaaacggcacaaagtgaacgatacggctcgcattggccgctattcaagtggaagcctcggtcacttgccccagggagcaccaacctctccgttgctagccaatctggccgcctttgacctggattgtgagctcaacagtttagcaacatctaacggaatggtgtacacaagatacgccgacgacatcgtgctatcctcaagcgcggaggactggagtaagtctaaggccgtgacccttctgaagcagggccatgacatcctgaaagcacacgggtttcaacctaaccttgccaaagctacgatagcgggccctggcgggcgaaaactagttctcggactgtcagtatctggagccgaacctcgactgactcgggattttaagaataagctgagagcccacatccattacctgcaaaagtatcagagccaaggaatccctccccatgagaagctgaaattcgattctcggcttgggctgcagcggcacgtattcggcctggcttattatgctatcgggatagaaagagcttggggcgctgcgcgtcttgccgagttgaaagctctgccatggccagttgaacacgggatttccttcgtttga

SEQ ID NO: 8955 - RNA, 1170 nt, synthetic construct
  source 1..1170: mol_type = other RNA
atgaatcattggcagtcccagcgttatcttaaagaggggctggcgactaataaaaacatcgggctgctgaatagagccatcgctaccgcagaagctatcagggctgttaacccgcacgcccctcctattcttactctcaatcacttggcccacgagacaggcgtcccttacgattttttgcggggcgttgtgacacgcgggggttcttctgatcactccttttatcacgtgttcactgtgaaaaagaataacgtgggtcatgcccacggacgcacccgaacaatctgtgtgccccaccccatgctcattaaggcgcagcgttggattcacgagaatattctacagtttggcaggtttcatgaggcggcatgcgcttacaggcccggtagcaaaattgtggacactgcttcccttcattgcgaagcccggtggatggtgaagatggatgtaactaacttctttgagagtattctggagacaaaggtttacaaggtgttccggagcttcggctatcagcccttggtcgcttttgagctgaccaggatctgtacccgaataagaaaagaatcacctcggcgcatccagccttctaaagccggtatcagcagctacgccaacaactacgtcggccatctcccccagggagcaccaacgtcacctctactggccaatctggctgtgtacgatctggataaggaattatctttgctggccagacaaaacggaatgatatatacccgctacgccgacgacatcacgttctcgtcagtgacctccacttggtcacgggcgaaagctgttcagttgctctgcgacggccacgccaagcttaaatctcatggattctggccaaatcacgccaaggcacatattgtcagtccaggaagtagaaagattgtacttgggttaaccgtagatgggaccgcaccacggctgacaaaacaattcaagaacacactgcgagcccatatccactacctggaaagattccaactgagcaaccgcccaccccaccaagtgctcggcttcgactccatcctcggcctgcagaggcatgtctttggactcgcctattatgcaatggggatagagagggggtggggagcagctagactggctgagttaaagagtatcagctggccggcagaacacggcatagcctttgactga

SEQ ID NO: 8956 - RNA, 1152 nt, synthetic construct
  source 1..1152: mol_type = other RNA
atgacttcatgggatagccagcactacctctcctctggccttgtggccggtattgatgcaggcctgctcgcgagggtagacgctacagcaagacggatgctggccgtgaacccaaccgctactgtgatcgtatccctcggacacctggccagcctgtgtgacgtcccttacggctacctccggcgagtgataagaagagacgcaacactggaaccatatcgcgtgttcgctctggctagaggaggtcacgggcctacccgaaggccacgaaccatctgcgcgcctgagcctttgctattgcgtgctcaaagatggatccacgctaacgtgctgcagcacgccaaggcacatgcggcctccacagcttatgcaaagggatgctcagttgtggaagccgcccgggttcattgcggggcttcatggctcataaaactggacgtcagtaacttctttgacagcattttagaacccaagatctaccaggtgttcctcgcccaggggtatcagccacttgttgcatttgagctagcgcggttgtgtacaagggtcagaagcaaggggaatgtagcacgctctacgggttctggcgttcccggaccctatgtctacccgtctatcggacatctgccccaaggggctcccaccagcccattgctggctaacctcgttagttttgccttcgacgaggaagtctcgcaattggcaaggagattctgtcttaggtacactagatacgccgatgatatgaccctgagttttcgcggcaccggttttgatcggactaaagcgcgggaggtcatcggcgcatgctatcgcatcatgcttgatcactccctttggccgaatcgcacgaaaacccaggtgattccccccggcgcccgtaaactggtgttagggctgctggtggacggaaataggcctgccctaactagggaattcagggagcaaatgcgcatgcatcttcacttcctcgagacacagggacctgtctcacatgcccagcaccgcgggtttggatccgtaattggcctgcagaatcacctctttggcctggcagcccatgccatgggcgtgaacaaggccattggtcgtgactggatgtatcggttacagcgactgccttggccggctgccttcgagatgccagtgtga

SEQ ID NO: 8957 - RNA, 1209 nt, synthetic construct
  source 1..1209: mol_type = other RNA
atgacacactggcagagccagctgtttgaggttgacgctccccccgatgcaccagtggatgctgccctggcaattgctaatgctatacgcagtatcaaccctcttcttccacccctgtttacactgtctcacttggcccatgagacaggagtgccttataagtacctcaggaataccgttgcccgcgggaaggtggacgaacagtattccgtatttcgaatccagaaaagagcccccagcgcaacaatacaatatagatggatcgccgctccgcacccgctgttgcttaaaacccagagatggatcaacactaacatcctcaagaatattgccgtgcataacgccgcattcgcatacatcaaggagggaagcgcttataaggcggcctgcttacacaatcaagcaaagtggctggtcaaagtggacattaggaacttcttcgagtccattctggagactaagatctgcaaggtcttcgagacagcagggtaccagccacttctggcctttgagctatctcgcatatgtaccaggatcgccaccccagagatggaaagagcgctggcccccaacggacgtgtgcctaattcactgaaaggcctaaaatatagcatctctgcctacaactcctttgctctcggccatctgccccaaggcgctcctacgtcccctatgctggctaacattgtagcgaaagaaatcgacgacgagatcagcagtctcgcagaaaaatataagttgcgatactcaaggtactcagatgatatagttctgagtactcccagcactcagttcggcaaagagatgtgcaaagaagtcgtcggtaagttataccgcattctgctttctgctgggtaccagccgaatgtcgaaaagactaagatttctggtcctggttccaagatgattgtgctggggttactcgtggacggcaaaacgccacggctgaccagtgaatttaaaagtaagctgaggatgcacctcttctactgtcggacccggtcacctcaacagcacgcagttaagcgtaaattcgcgagcctcctcggactaaagaatcatttgattggcttgatttcctacgccggaacaatcgacgccgcctttgcctccaaatgttatgccgagcttaatgcttgctcttggccaatattcgatagcgcagacttcgattcaatcatcgaatcgaccgtgaagattctccggtga

SEQ ID NO: 8958 - RNA, 1200 nt, synthetic construct
  source 1..1200: mol_type = other RNA
atgtccaactggcaatcccagctttttaagcaagatgcacctcctggggctcctgtgagtgctgccatagccatcgccagcgagatccgctccactaacccctttctaccaccccttttcaccctggcacacctcgcccatgaaaccggagttccatataaattcctcagatccgtggtcgcaaggacgggggccactgaacactacaccgttttcaaaattaagaagcgcagccagaatgccattaagcagtatcggtggatagccgcaccccacccatttctgcttagagtacagcgctggattaatgataacatcctgaagaagctgccagttaatgaagccgcctttgcttatctggaagatcgaagtgcctacaaggctgctatcgtgcacaaaaacgcaaaatggctgatgaaagtagacatcgaaaatttcttcgagacagtgctggaaacacgtatttacaaaattttcctggacgccggctaccagcctctattgagctttgaactgagcagaatctgtactcggatcgccaatccggaactcgagcgtgcatattccataaacggatttgcaaaagtgaagacaaaggggacaaaatacgtcatcgaggcttacgcttcttcggctttgggtcatcttcctcagggcgcaccaacctcgcccatgctggcaaatttaatagccaaagacattgacgagaaaatcgcggagctggcagatagatttgatctcaggtatacccgatatagcgacgacatcgtgctgagctcaaaatcaaatgactttggcaaggccaacgccgctaaggctatcggccaattatacgctatactgcgcagggccggcttccagcccaacatggagaaaacgaaagtcagcggtccagggtccaagatgatcgcgcttggtctgctggtcgacggaaacaaaccgaggctgactagtgagttcaaggataagttaaagatgcacttgtacttttgccggacaagatcacctcaggcgcatgcggtggctcggaagttcgactctgtgattggcctcaagaatcatctcttggggctgatttcttatgcaaggatggtcgactcttctttcgccgatgagtgcctagcccagatgaactcttgtcactggcccatcaccggacccattgatctctcattgattctcgagagtcttaaggcgtga

SEQ ID NO: 8959 - RNA, 918 nt, synthetic construct
  source 1..918: mol_type = other RNA
atggccgccccacacccgctcttactcagggtccagagatggatcaacaccgagattttatctaagctgcagcaacatccagctagctacgcctatcgtagcggacgctgcgcctttgatgctgcccgtaggcatcagagagctaggtggctcgtgaaagcagacgtgactaattttttcgaatcaatcttagagccagacgtctactcgattttcaggtctgccgggtaccagcctctcatcgccttcgagttggcccggatttgcaccagagttcgaaccgtggacgaaataaatcccaaggaccttcgcacatccagaacgaagagcgccgcatacaaaattcaggcctatcgctccgcatacataggacacctgccacagggcgccgcaacaagccctttgctggctaacctggtggctaatcccctggacgttacactgtctcaggtcgcaactcggactggcttcaggtatacccggtatacagatgacatcgcattttcaagtgcatcacttgataccacacgagcggatgcagtatctgtcgccggcgctatccattccgcgctatataaacatggattcagtcctaacctcgctaagtccgtaattcgcggtcccggccacagacgcattgtcctgggcctgctggttgatggagatcggccccgactgacgagtgagtttaaagacactctgaccctgcacctgagacacttggaaatgtcaggtcctattgaacacgctaaggccaggggcttccactccatcgtggggttgaaacaccatatagatggtctgatcgcctacgctaaaggggtggacgaggcgtttgcagcgaagtgtgcccaaaagctagggcgggtgagctggccgcttctcactcctcttgacctcgatgctatcgtgccctga

SEQ ID NO: 8960 - RNA, 1092 nt, synthetic construct
  source 1..1092: mol_type = other RNA
atggagtccaaaggcgttgctgtcgtcctgtccctgtcccatctcagcaagcttacaggagccagctattggtcactccgccaggtgataagtagacacggagacatgccatacagaccttttaggatccctaagcgttccggtggcgctaggctgattttcgagccgcaccctatgctgcgccatgttcagcgatggattcttgatagcattctctctaaagtccgccccaacgataacgcctatgcattcgtgcaggggagaaatgccatcgatgctgcccgaaaacattgcggggcaaaatggttggtgaaggccgacattgtaaatttcttcgagagtatccaggagtttaagatctttaaagtctttgccgacatcggctacggtccactggtggggtttgaactgtcgcggctttgcacttatccatatagggtgggccacccccggtatgaacagccagagtggacccaccgtttaggccaggagcacggagagaacggctacataggctcttatttcggatcttactttgacagcagaatcgggcacttaccacagggagcgcctacctcacccgcactctcaaatttcacatgcaagtggctcgaccaaaagttggcccggtatgcagaaatgcacgaatgggagtacacccggtacgccgatgacatcgtgctcagtaaggtggctgctaaccgcgcagaagcaattgaggccctaaattacgtgagatgggtagcggcacggtctggcttcatgcttaactccaagaaaactaagattgtaccccctggggctcgaaagattgtgctggggctgttggttgatggtgacaggccccgcctgacgaagaaattccaaaacgatctggatatgcattgtcactacggtctaaagctgggcgccaaaagacattctgaacgccgtcactttcggagtgtcttgtcatttctcgaccatgttcagggcaagataagcttcgccttccaagtggatccgctgagggcggagggatgggcttcgaaatttctgatcatcaggagcgaatacttagctagcgtggggtccgacgtctgtaatggatga

SEQ ID NO: 8961 - RNA, 1164 nt, synthetic construct
  source 1..1164: mol_type = other RNA
atgtccgctccctcgcctcagcggtatgcctctggtgccagcaggcagggaatcgatgctgtgactctggagaacgcactcgctactcttgcgcggatacgggctacagacccacgtatcaccccagtgctgaccttgcggcatttttctgtcttgacagagctgccttatcttttcctgcgtaggactgtggcaagaagagggcacgccgaataccgattcgtcctcttgaaaaaacgcatccctggtcgaagtgcaaaacgcatgatctccattccccccaaaagtctagccgtggcccagcggtggttagtggatcatgtactgagatacgccccggttcacccagtgtccttcgctttccatcccgagagcagccctgtccaagcagcggaacagcaccctaataccaagtggttgctgaaggtcgacatcgaagacttttttcactctgttagtgaggggaccgtgtctgccattttcacccgcctcggcttcccaaagctgctggcatttgaatttgccagactctgtacaattggactcgatagaggtccaggaaagaatcccgctccccacgctggaccaataagcttctatgctcttgggtatgagggcttcttgccgcagggagcgccgacatcccctatgctagcaaacctggcaatgttacgaattgacaccctgctcgcatcactggctgaggagcggggactgcggtatagcagatacgccgacgacctcactttttctacagatacggacaggacgctggtggaaatgaggcgcttacagcgcgacgtctgcgggattctgaacgatagtgggtttaggcataatcagcggaagactggcataaggggcccaggcacaaggaggatcgttcttggcatgttggtagatgggcctatgcctcgactccagcgagcctacaaggacatgattcgcctgcacctgcactacctttcatcacccgcctacggtccagctaagcatgccctagcacgcaaaaccggcgttagctccctttaccatcacgtgagaggcctgatttcctgggcgcagcaagtggagcctgcctttggccagcaagccctggagcagttcgcctcagccgattggccccccatccaaccccgtcagatcgaaggaagactcgggtga

SEQ ID NO: 8962 - RNA, 1167 nt, synthetic construct
  source 1..1167: mol_type = other RNA
atgagcacacctagtcctcaacgttacgcgtcaggcgcacggcagagaggagtggaccctgcaaccctcaaaaacgcgttggctactttcgcccgcatccgcacgacagacccacggatcactcctgtcctgacactgcgccacttttctgtgctcaccgagctgccctatcgctttctccggggaacagtagcaaggagtgggctagtggaatatcgaactgtctacctgaagaagaggattcccggacggtctgctaagcgaatgatttctatacccccgccatccttagcctccgcccagagatggatcgtggatcatattctcagatacgcccgggtgcaccccgcctcatttgctttccaccccgactcctcaccagtacatgccgctgagcagcatccaaacactaagtggctcctcaaagtggatattgaggatttctttcattcagtgagcgagggaaccgtgagcgcaatattcttcaggctcggcttccctaagctgctggccttcgagtttgcaagactgtgtacgatctccattgacagaggcagatcgcgcaatccggctccgcatgccggacctataactgcgtatgcgtacggttatgaagggtttcttcctcaaggcgcaccaaccagtccaatgttggccaacctggctatgttgcgtgtcgatgctcttctggccgatctggcagaggagcgcgggttacgctactctcgatacgccgatgacctggcctttagcgctgataacaatcgaagccttgcagaaatgcataggctacagagagacgtctgccagatcctgaatgacgcaggttttcagcataataggcgcaaaacagttatccgaggccctgggacacggaggattatcctagggatgctggttgacggacccaccccacgtcttcagagggcgtacaaggatattatcaggttacacctccactatttggcaagccctgcctacgggccagctaaacacgctcttgcccggaaaaccggtatctcttccctgtatcaccacgttcggggcctgatagcctgggcccaacacgtggaacccgccttcggcaggcaggctttggagaagttcacctccgtcaattggcccaccatccagcccagatgggttgaaagaggcagtaacgactga

SEQ ID NO: 8963 - RNA, 1170 nt, synthetic construct
  source 1..1170: mol_type = other RNA
atggccgccccttctccccaacgctacttgtcaggtggcaggcgtcaaggcgtggcaaccgtcacccttgacaatgcactggctgctttcgcacgcctgagggagacagatccgagaatcacccccgtcctcactttacggcacttcagtgtggtaactggcttgccgtacttcttcctgcgaagaagtgtcgcccggagggcgcacatcggctataggtttgtgtacttaaggaagagaatcccaggtagatcttctatgcgtatgatctctattccacctcccagcttggcagctgctcagcgatggctggttgacaacgtgcttaggtatgttgaaccacaccctgccagttttgccttccatcctgacagctcacccgtcttggccgccgagcaacaccctgatactcagtggctgctgaaagtggacattgaagatttcttccattccgtcagcgagagacacgtctccgcgatttttgcaagtctcggattccctaagctgctggcttttgaatttgcaaggctctgcactattggcctggatcgcgggcccggaagaaatcctgcccctcaccccagccccatcgctctttatcagtccaacttcgaaggatttctgccacagggagctcccaccagcccgatggtagccaacctggccatggttcgcacagacgagtttctatctatgcttgcggaagctcgcgggttccgctattctcgctacgcagacgatttagctttctcgtccgacaagtcgcggacaatcgctgagatgcgagggctgcagcgagaagtgtgtcggatactgaacgaggccgggttccggcccaatcatcgcaaaacagttataagagggccaggtacccgaagagtagtgcttgggctcctcgtgaatggccccacgccaaggctatcccgggcatttaaagacaacatccggctgcacctccactacttgacgagcccagatcatggaccggccaagcatgctctggcaaggaagaccggcacctcaagcctgtaccatcacgtgcgtggcctcattgcctgggccacacaggtggagccagcctttggagctgccgcgctacggacttttagatcagcctcctggccactcatacagcctcaggaggtgggtgaggaagatgactggctgtga

SEQ ID NO: 8964 - RNA, 1185 nt, synthetic construct
  source 1..1185: mol_type = other RNA
atgcccgtgccatctccccagaggtatgcctccggtggaaggcgccagggaatcgactcacagaccctagacaatgccattgcggcaatcacacggataagggcaactgatccacgcatcacgccagtccttacactcagacaccttagtgtgttaaccgagctgccttttttgtttttacgacgaaaagtcgctcggcaggaacgtgtgggctatcggacaatattcctgaagaagcgaattccaggtagatcatccatgcgccgcatcagtatcccgcccaagagcctggcacatgtccagaactggctggttcagaacgtactgcaatacacaagtgctcaccccgcaagtttcgcttttcaccctgactcttcgcccatcttggctgcggagcagcacccaaataccaagtggcttctgaaagtagatattcaggatttcttccactcaataagcgaggggactgttgcctccatcttttctaggttgggttttccgaagctccttgcattcgagctggggaggttgtgcactattccctgtaaccggggcccctctagaaatcctaaaccacatccatcccccatcgagttttaccgttccgacttcgaggggtatctgcctcaaggcgccgccacaagtcccatgctggccaatctcgctatgtccatgaccgatcaaagactgtcggccctggcagaaaaattcggattccgctacagccgttacgctgacgatctcgctttctcaagcccaaacgatcacgccttagccgacctccagaagcttaaacgcaacgtgtttcacattctcaacagctccggattcaggcctaatttgagaaaaaccgtcattcgcggccctggggcacgaaggattgtgctcggcatgctggtggatggtaaggaacccaggctgagcaaggagtttaaggacaacatccggctgcatctgtattaccttaccagccctcagcatgggcctcagaagcacgccctatctagaaagacgggcgtgtcatccatgtaccatcatgttagaggcctgattgcctgggcccggcaagtcgaaaaaacttatggagaggaagcgctggctaagtttaaaagcgtgaattggccacctatccagccgcggatggtgcactgctctctcgacgatctaagagataaagacgactga

SEQ ID NO: 8965 - RNA, 1035 nt, synthetic construct
  source 1..1035: mol_type = other RNA
atgcgacacctgtccgcactcactggccttccatttctgtttttgaggcgcaccgtggcccgaaaggagcacgtgaactaccggaaggtgtacctgaaaaagagaattcctggacggtctaccaaacggctgatcctgatccctccgaaatcactagcggtagcacaaggttggctggtccaaaacgtcctcagatatacagtcgctcatccagcaagctttgcgttccatccagaaagcagtcccgtgcaagccgcagaacagcacccttctacgaagtggctgctcaaggttgacatacaggatttctttcatagtgtctcagagggacgtgtctctgctatctttgccggtctaggcttccctaaattgttggccttcgagttagccaggctttgcacagttgctgccgaccgtggcgcgggaaggaatcctcaaccgttcgcgggacccattaactattatgacaatcccttcgaagggtttctgcctcagggtgctgccacaagtcccatgttagctaacctcgccatgctgtccgtggacgaagccctttccgggatcgccaaacgcaccgggttccgctactcccgctacgctgacgatctggctttcagcaccaagaaagactccagcgtagctcagatgaatcgactcaaaagggaggtgattgcagtgctgaacgataatggctttcgccctaatctgaggaagaccgtgataagagggcccggcagcaggagaatcattcttggaatgcttgttgatgggcccgaccccagactcagcaaggagtacaaggataacatacggctgcacttatacttcctgacttcacagaagcacggcccacagaagcatgctctatcaagaaaaacaggtgtgtcgtctttgtatcaccatgttcggggcctgatcagttgggccaaacaggtggagccagcatatgggcagttggcactcgagaagtttcagactgccgattggccaccaattcagccccgtcggatttttaagatcgaggccgaattctga

SEQ ID NO: 8966 - RNA, 1167 nt, synthetic construct
  source 1..1167: mol_type = other RNA
atgcccgccccaaacccgcaacgctacaggagccaaggcagactagaaggagtagatgacactgtgctggatcacgcggtcgaaaccttcgagagaattcgcgcagtggacccacgcattacgcctgtgttaacgcttaggcacctgagccacctgaccgacatcccgtttctgcatttgcgagatctcgtcggacgtagggcccatcgcccctacaaattcttttatctcaagaaacggatcccaggccggaatagagtccggatgatctccgttcccaatggcactctgatgtccctgcagaggtggatcgtggataacatactgcagttcacacggcctcacgccgccagttttgctttccatcccgattgtcggccgtatgaagccgccgccgaacattgcggctgtgcatggctgctaaaaattgacttggaggagttctttcacaccgtctctgaggggagagtcgccgcggtgtttgagaacctgggtttccctcggctgttgtcctttgagttcgcaaggttgactacagtggcatgtgaacgaccaggatcaagacctgatcccggtgagcgatggccagctattccctactatcagtgcgagcatgagggcatgcttcctcagggtgcccccacatcacctatgctggccaacctggctatgctcaaggtcgacgaaatcctctcggctctggctgaggaatacgggatgacctttactaggtacgctgacgacttggcttttagttgcggggaggaatacgacttcgctcacgtacagagattcaagagactcgtgctcgagaagcttaataagtctggcttcaggcccaaccacaggaagactgtaatacgtggccctggcacaaggcggattgtgctaggtatgctggtggatagtgagcggccacgcctccccagagaatacaaagataatatacgaatgcaccttcactatctcaccagcgaatcccatgggcctagcgttcatgcagcatcacgacagacctctgtgtctggaatcttccaccacgttcgcgggttaatcgcatgggcggagacagttgaacctgactatggagcccgtgccttagagaactttgaaagcgtggactggcccccacttgagccaaatcgcctgctggggcatagaggatga

SEQ ID NO: 8967 - RNA, 1173 nt, synthetic construct
  source 1..1173: mol_type = other RNA
atgtctctcccaagctcacagaggtatcgatcccagggaaggagggagggcgtggatgacgcagtactcaacaacgcattagcagctatgagacgcattcgagctgtggatcctcggattacacccgttctaaccctgcgacacctgtcccacctgatcgatgttccctttttacatctgagagagatagtcgcgaggcgggcccgaagaccttataaattcttctacctgaagaaacggatccccggacgcagtagaatgagaatgatttctgcccctaacgccacgttgcttaagattcagcgctggattgtggaaaatatcttgcaatacaccacggcgcatgaagcgtcctatgcgtttcaccctggttcacgtccctttgacgccgcccaggagcattgtggctgcgagtggctgcttaaaattgacctcgaggatttcttccattccatcagcgagggtcgcatcgctgctgtgttcgcccacctcggcttctctaagcttctgagctttgaactcgctcgcctcgttaccgtggggtgcgaacggcctggaacaagaactgaccccgcaatccggtggccggccattccttactaccagagcaagcacgaaggaatggtaccacagggcgccccgacctcacctatgctgagcaacttagtgatgttcaagacagatgagattttggctcgcttggctgacgcccacggaatgaaatataccaggtatgccgacgatttggccttcagttgtggccccgggaaaaacgaaatccatgttcgtaggttcatgaggctggtgcttgaccaactaaatcacgccggttttcgtccaaatcacaggaagactgcaatacgggggccaggaagccggagaatagtgctcggcatgctggtcgactcagataggccaagactgactcgcgaatacaaggacatgatccgactgcaccttcattatctcacaagtccatcttacgggcctgcactgcatgcactagcccggaaaacttccgtcagtggcatatttcatcacgtgagaggtctgatcgcctggtcgcagatcgtggagcccgattttggggctggggctctgacccgctttgaaggcgtcgattggccccccgtccaaccagacccgtacgatgaggaggcaaatgacacatga

SEQ ID NO: 8968 - RNA, 1170 nt, synthetic construct
  source 1..1170: mol_type = other RNA
atgccgcccggccctcagagatacagagctcagggtcgtagggagggcgtggatgaaaccgtccttgctaacgcattgtccgttatcgaccgaattcgcgccgccgacccacggataactcctgtgttgactttgcggcacctcagcgagctggtaggggtaccctatccccacctcagggaccttgtagctcggcgcgttccacgatcttataagttcttctatctgaagaaacgcattcccggacgtacttcaactaggatgataagtgtccctaataaaaccttgctcagtatccagcaatggattgtctctgacatcctgaggtttacaagtgcgcatgaagcatcctatgcattccaccccggtggacggcctctagaagctgcagaggagcattgcggctgcgcctggctgcttaaggtggacctgcaggacttttttcacaccatttctgaggggcgagtggccgggatattcgccgaactcggattcaataggctcctggcctttgagctggcccgccttgtgacagttgcgtgtgagcgcgccaaaccatcagatcctgcagctcgatggcctacaatcccttactaccagtgtgcgcacgaagggatgttacctcagggagcacctacatcacccatgctaagcaacctggttatgcataggacagatggagtccttgcacgtctcgctcgggctcacggcatgaggtacagcagatacgcagatgacctagcgttcagctgcggcgccgatcgggatgcagctcatgtgcggagatttaaaaggctggtgctgaagagcttaaatgaggctggctttagaccaaacctgcgcaaaactaccatcagggggcccggtagccggagaattgtccttgggatgttagtggacggtgatagaccacgactgccaaaaggctacaaggacatgattcgcttgcatctccactacctcacgtcgccggattatggaccggccgctcatgcccaggccagaaagacgtccgtgtctggcatcttccaccacgtgagaggcctgatctcctgggccgaaaccgttgagcccgcctacggaaagcaactgctggctcgcttctggagtgccgattggccacccctggagccaacctatctcgatgacctgtccgaagacggggactga

SEQ ID NO: 8969 - RNA, 1176 nt, synthetic construct
  source 1..1176: mol_type = other RNA
atgccggcacccgccccacagcgatatagaagcgagggacggagaaaaggtgtgcctcccgatgtactcgctaacgccctcgccagcatctcacggataagagacacagacccacggatcgaaccagtcctgaccctgcggcacctggccttcttaacggatgtaccttacaggtacctgcggcaagttgtggctcgcagtgccgccactgggtaccgtacctttagactcaagaaacgagtgccgggccgcagcagaatgaggaccatatcagtgccgcccccatcccttaaggaggtgcagcggtggatcgtggagaatgtcattcagcatgtggccccacacgaggcaagttacgcgtttcaccctggctcctccccttacctagcagccgaggagcattgcgaatgctcttttctgttgaaggtcgatgttcaagacttttttcactcgattggggagggatccgtggctgccgtattcgaagcgatcggatttcagaagttaatttccttcgagatggcgaggcttgtgacaaggcctatccccagttctaaacctgcaccagatcccgccgctaggtgggtcgctataccatattataattatccccatgaaggggtcctgccacagggtgcacctacgagccccatgcttgcgaacctagttatgcgtcacgcggatcagcgactggcaaacctggctactcggatgggcatgagatatactaggtatgccgacgaccttgccttcagcgcacctcatggatctgctattgccttggccgacatgcgccgctgtaggacccaggtgctgcgaattctcaacgagtacggattctcacctaacctcaggaagacagtgatccgcggtcccggctctagacgtatcgtcttagggatgctggttgacggcgatcgccccaggttggcacgggaattcaaggataatctgcgcctgcacctgcactacctcacagccccatctcatggcccggctgcccatgcaatggctagaaaaaccggcgtgagtagcatgtatcaccacgtgcgaggtctgatttcatgggcccagtgtgtcgatcctgaatacgctgcagacgccttggctttgttccgcactgcaaattggcccctcgttcaacccagatggtccggggctagcgacgatgactga

SEQ ID NO: 8970 - RNA, 1164 nt, synthetic construct
  source 1..1164: mol_type = other RNA
atgaatctacccaatccacagcggtatcgctctgaagggcgaagtctcggagtggatgagattacattggataatgccatagccacaatcaagcgcctgcaggcttcttcgccctcactgcctgcggtcttcacactgagacaccttgcccacctgacccaagtgaaatatgggtacctccgatacattgtgcgccgcaaggtgaattatagacacttccgcatctcaaaaaagctccctggccggaatcggtaccggctcatatcaatcccacctgctaatctgagtaagctgcagagatggatttccaacaacatcctgcgacatctgagcccctcttccgctagctatgcctatcatcccggatctaacccccggtttgcagctgagcagcattgtggctgcgaatggctgatcaaaattgacgttcaagacttcttccatgccatctccgagggacgtattgccgagatcttttataaggcgggctaccccagacttctgagctttgagctggccagaatagtcacgtgtgtgcttccaggcactattaaaagggctgcttcttacagcgccagatggccagttattagtcagtaccagcacgatagggagggtgttctgcctcagggcgctcccacctccccaatgctgagtaacttagccatgcgtgcattagacgaacgacttattgcgctcgccgcaaagaacggtatgatctatacccggtacgcagacgatttagtgttctcttgcaagaacagaaccaaacctactatcgacaaagtgaaacggagcattttgagggagctaagccgcgagggctttcaacctaatctgcgaaaaaccgccgtcaggggacccggttcaaggcgtatcgtattgggtgtgttggtcaatggcaaggaaccgaggctcacgcgcgattttaaggagaatctgagaatgcactttcatttcctaactagtgaaaaacatggaccacacaaccacgccaacaaccgggggacatccatttcagggatataccatcacgtgagggggcttatcgcatgggcaaaggtcatcgaaccggcatacggagctaacttgatggtaaggttccacagcataaactggccatccctccagcctcactccatcttcgaagacatggagaagtga

SEQ ID NO: 8971 - RNA, 1161 nt, synthetic construct
  source 1..1161: mol_type = other RNA
atgagcctgctatcatcacagagatatcgctctaggggaagaagactaggcatagaccccaccactctggagcgagccgttgccacaattgagaggatccagaggtccgacccacggctgaccccgatcctgactctgcgccatctctccgaattgacaggagcacagtacggctatctgagacgtgtggtagggcgcatactcggcgggtaccggcacgtacattttaagaagagaattcctggcaggtcaaggaggcgggtgatttctatccctcctaggagactgctcgaggttcagcagtggatcgctcaaaacgttttgcggttcgccgagcctagcagggcgagtttcgcttaccacccttcttccagcccagtgctcgccgcagaggaacactgcggctgcgagtggttgcttaaagtggacatcgtcgacttctttcattctatcactgagggccgcgtcagtgccgtcttctaccgactcggatatcccaggctagtggcttttgaactggctcgcctgactacgatgcaactgattcgaggcgctttgcagcgtgacgccgagcgttggtcagctataccttactatcagagcgagtatgaaggtgtgttgccccagggggcgccaacaagtccgatgctgtctaatcttgtgatgaaggatctcgacgaacggcttatcgaattatccaagcagcacgggatgcgctacacccgttatgccgatgatcttgctttttcctgtgggaaaggcagggaccggagccatgtggagcgattcaaaaggttagtcctggcagaactgtcccgggaggggttcaatcccaacctgagaaaaaccgtcattagaggtccaggtacccggcgcattgtgctcggaatgcttgtggatggtccctcgcccaggctcccgagagaattcaaggatatgctgagactgcaccttcattttctgaaatctgagggacatggcccaagcgcacacgcgcaaaagcgacggaagagcatctccggactctaccaccacgtacgcgggttaatcggctgggccatgagtgtggaaccagattacggagcccggattttggccgagtttgagagagttgcatggccccccgttcaacctcgctggtcggaacgaccagacagatga

SEQ ID NO: 8972 - RNA, 1251 nt, synthetic construct
  source 1..1251: mol_type = other RNA
atgctcgtcagccggtccgacattttcatgcttagaaacggaacctctttgagcaggcgtcgtcttggcggggcatcatgccactatcctcccaatggggtgaaggtgatgcaatcttggagccctcaacagtacaggtatgacggcgctcagcatggtgtaagtgatgaaacaattgagtccgtcattgctagagtggagctgatagcagccgtgaaccccagtatcacccccgtgcttactctgcgccacctgagcgagctctgcggagtggaatacggctttttaagacggattgtgagccggagcactgtaccgtatagagtcttttccttgcgcaagaggatccccgggaggactcgacatagattgatctgtgttcctagaaacgaactgaaggcagcacaggactggatcgtcaggaacattctgaggcacaccaaagcccacggcgcctcattcgcttaccacccaaaatctcggcctgagctgggtgcccatcgccattgcgggtgtgactacctactgaagatcgatataacagacttcttccacagtgtaagtgaaggtaggatttttcgcatcttcgccgaactcggcttttcagagctcgttgccttcgagctggcccgcctgaccacgataatcgcacagggaacggaacggcccgattggatcgccgcagctaggtggccggctataccagcgtatcagacatcatatgagggatttctccctcagggggcgtcaacatccccaatgctatccaacttggccatgttagccttagatgccagaatcgcgggcatggctagcgacgcaggtctggtctacacaaggtacgccgacgatctgaccttttctggacgtaaaccccacgacctcaagtcgatgaagcggttcaaacgaaaggtgtttgatgcactgaatgaagccggcttccggccaaatctgcgcaaaagttctatccgcggacccggggcacgacggattgtcttaggcatgctggttgacggcccacgacctagactcgctaaggagtttaaggacgatctgcgaaagcatcttcattacctgcgcagcaaagattatggaccagctaaacacgcggccgccaataagacctccatttccgctatgttccacatggtgcgtggtcttatcgggtgggctactagggttgagccgcagtacggcagatcttgtctcgtggagttccggaaagtggtgtggccacccttgattccttga

SEQ ID NO: 8973 - RNA, 1287 nt, synthetic construct
  source 1..1287: mol_type = other RNA
atgggcattcttgacgtgcagtccattggattttccatgctggttagcagatcggatatcttcatgctccgcaacggcacatctctgtcaaggagacggcttgggggtgcatcctgccactacccaccttacggcgtgaaggttatgcaaagttggaacccgcagcaatacagatccgatggtgcacagaagggggtggcctcagagacgattgagtccgccatcgcccggatcaagcttataggagctgccaacgcaaatgtaaccccggttctaactcttcgccatttgagcgagctaactggcgtcgactatggatttttgaggagggtggtgtctcgctcgattgtgccatatagggcattcagcctgcaaaagcgagtgcccggtcgcactcgacacagactgatctgtatccctcgggatgaactgaaaagcgtccaggactggatcctccgtaatatactgacacacaccaaggctcatgaggcctcattcgcatatcatcctcgatcacgcccagagttagccgcccagagccattgcggatgccattaccttctcaagattgatgtgcaggacttcttccatagtgtctcagaggggcgtatttaccagatatttgtggacctgggctttagcgaactcgtaagtctggagctggcaaggctcacgaccattatcgccccaggaactggcaggcctgattgggtggccgctgtcagatggcccaatatccccgcgtatcagacaccatacgaaggctttctccctcagggagcccctaccagtcccatgctgagtaacctagcaatggtagcgctggatgctcggattagcgcaatggcttctaaggctgggatcgtatacacccggtacgctgacgacttgacattttccgcacgcgctccccacgacgctatatctctgaaacggtttaagagggagatttttgccgtgctcaacgaagcgggtttccgacctaatttgaggaaaacctctatccgagggccgggagcccggagaatcgtgttagggatgctggttgacggccccagaccacggttagccaaggaattcaaagatgacctgagaaaacacctgcactatttgaagtctcccgatttcggcccagccaaacacgctgctgccaataaaacctccgtttccgcgatgttccacatggtccgcggcctcatcggttgggccacaagggtcgagcccgaatatgggagaagctgtctggtggaattccgtaaagtcgtgtggccacctctgactccctga

SEQ ID NO: 8974 - RNA, 1152 nt, synthetic construct
  source 1..1152: mol_type = other RNA
atgcaatcatggtcaccccagcactataggttccacggaacgacagaaaacgtgcccgaaagcatccttgaatccgcgatcagcagaatcgagctgattcgggctcgcaaccccaatatcacgccagtgctcactctgaggcacctgagcttattggccgacgttgactacgtgtttctccggcgggtggcaagtcgtagtacacatccctatagagcttttatgttgaagaagaacgtgcccggccgaacccgactgaggctcatttgcgtaccgaacaaaaatcttaagaagatccaggactggatcgtgcgaaacatactgcgccatacccgcgctcatcgcaagtcctttgcctatcatccctattccagaccggaatttgccgcccaagcccactgcgactgcgattatctgctgaaagtcgatattgaggatttttttcaccgggtgagtgaggggagagtatacaaaatcttctgtgatcttggctactcagaactagtctccctggagttggcgaggataactacaacagtcgccgagggtactgaacgacccatcgagagcattcatttccggtggcctgccattcctgcatacgtttctccttacgagggtttcctcccacagggcgcaccaacatctccaatgctgtctaatctggccatgctcggcttggacgagcagctagattcgatggctagagaagaaggaatagtttatacccggtatgcagacgacctgaccttctccgccagaagacctcacaatgctgcaaccatcaaacgattcaagcgcagggttttagctctgttgaacgacactggcttcaggcctaatcatcgcaagaccatgattcgggggcctggtgccaggcgcattgtgttagggatgctcgtcgatgggccgaaacctcgtcttccaaatgagttcaaggatgaaatccgtaagcatctgtactacctgcagagcgagaaatttgggcccgcccaccactcagcagctaacaaggtcagtatttctactctctaccacatcgtgagaggactgattggctgggctgcgagggtggagccagagtacggaagacggtgtcttcagcagttcaaattaatcgagtggccacctatagacaggggaagctcttga

SEQ ID NO: 8975 - RNA, 1341 nt, synthetic construct
  source 1..1341: mol_type = other RNA
atgggcacgaccggtgtacagagcattggctttagcatgctggcttctcgatcactgttcttcatgctgcgcacaggtacctccctatacagaaggaggctacggtatgcctcccgtcagtaccctccaaatggagtcaaggtgatgcaggcatggagcccccagcactacaggtatgaagccgaacgccatggagtacaagatgagacaattgacaatgccatcgccaggatcgaactgattgtggccaacaatgctaacgtgacccctgtcttgactttgcgtcacctttctgctatgtccggcgtcgagtacgggttcctccgttcagtgatcagtcgcagcatgatgcgaaaaaagtatcgggtgttctctttgcgcaagaatgttcccggaaggacaaggtacagactgatctgcgtcccaaatgaggagctgaagactgttcaagactggattgtgaggaatatcctgaggcacacgcgaagccatcctgcgtcttacgcctatcaccccaaatccagacccgaattcgccgccaaggcccactgtggctgtgattacttactgaaggtggatatccaggatttttttaacagggtcaccgaaggcaagattactagaatttttagggacttagggtttagtgacctggtgagttttgagctcgcacggctcacaaccgtgacagcgcaaggtatggagctccctgagggactgagcgaaagacggtggccggccatccctgcttaccagagccggtatgagggcttcctgccacagggggctccgacatcccccatgttgtccaaccttgcaatgctcgccctcgatgaaaagctgcaggagttagcaagtagtgagggtatctcatacactcggtatgcggacgacctgaccttttctgcccgaaaaccacacgactttgagtcaataaaacggttcaaacgcaaggttcttactgagctgaacgcggcagggttccgccccaaccttcggaagacccatatacgtggcccaggaatgagacgcattgtacttggcatgctggttgatggacaaagacctcgcctcactaaggagttcaaggacgatttgcgacagcacctccattacctgacctccgacgaccatgggcccgctacccatgctcaggcaaacaagacgtcgataggcgggatgtttcacattgtgagaggtaaaatcgggtgggcaacaagagtggaacccgaatatggaagaaaatgcctaattcagttccggaccatcaaatggccacctatcgagcgcgctaaatcaggcactatctctctggacttcgatatgatagatgaaccatga

SEQ ID NO: 8976 - RNA, 1182 nt, synthetic construct
  source 1..1182: mol_type = other RNA
atgtcaagttggaacccgcagcactataggttcgatggagaacgccagggcgtgcctggagctgtcattgactctgccctcgcgattatggagcgaatccgaagagtcgatccccggatgacccccgtgttcacccttcgccatctaagcgaaatgactggaacacggtacgggcttctccggtccgtagttgctcgccgcacacatccgtacaaggtttttaccctgaagaaggctattccgggaaggactcgcgtcagactcatctgtactccaaatagagagctcaaaaccacccaggactggattgtgagaaacatcttgcaacacacacgtgcacaccccgcctcctacgcttatcatcctgggagccgaccagagtttgccgctcgcatgcattgtggctgcgattttctgctgaaggtggacattgaggacttcttcactagggtcacagaaggtaagatctgcgaagtgttcgagggcttagggtatcccgaccttatagctttcgaactggctcggttgacgaccgtggtggcaagtggtggcaagagccctagcgttgaccctgccgttcggtggcccacgataaaagcctaccaacacgcagccgagggttttctaccacagggcgcccccacctccccaatgctttcaaatctcgtgatgcggcacctggatgatcgctttgcggctatggccgctgcggcgaacatgaaatataccagatacgctgacgatttggccttttctgcaaggaagccccacactagggcaacagtggccgccttcaagcggaaagtcctgagggagctgagcgaggctgggtacagacctaatctgcggaaaactgcaatcaggggcccaggagccaggaggattgtgctcggaatgctggtcgacggccccgaacctcgactgagtcgtgaattcaaggatgatctgcgacagcatcttcactatctggcatcagaggatttcggcccatcgagacacgccgagcgtcagaagctgtctgtgtccacactctaccatcgggtaagagggttaatcgggtgggccatgcgcgtggagcccaaatttggtgctaaatgcttagcccagtttgaagccgtagcctggccacctatcgacatcagatctcctattaacgcaatagactgggacgagttggcatga

SEQ ID NO: 8977 - RNA, 1155 nt, synthetic construct
  source 1..1155: mol_type = other RNA
atgagtttttggagccctcagcgttaccaattcgaaggggagaaacacgggatcgatgacgacgcaattgcggctagcgtggaggttataaaacggattcagaacatcaacgcacgcctacctattgtgctgactctcagacatttgagttggctgaccgatactaactacggttaccttagaaaagtagtgtctcgggagtctggcaaatataagcgggttttgttcaagaagaaggtacctggccgctcccgctatcgggaaatccacattcccgaggcctccctgcttgcggtgcagaagtggatcacggccaaaattctgtccaatacgtcagcccacccaagttcttttgcatatcacccagacagccagccgatctttgctgcctctaggcattgtggatgcaaatggctgctaaagatcgacattgagaacttctttcatagcatctcagaacgcatggtctataaggtctttcgagatctcgggtatactaagctcttgagcttcgaattggctcgtatcactaccacaaccggcctgtccaataaaaagtctgaggatatctttaggtcagacagctcccgttggccctctatacccaattattactgttcggatgaggggttcctgccgcaaggtgctccctcaagccccatgctcagtaacctcgtgatgaaggctatcgacaaggacttagaatacctcgccaactgcaatggtttcacatacacccgatatgcagacgaccttgccttctcaacagaaaagaacgccacaatagctgatataaataggttcaagaaggaggttaatcggctgttaatcgaggctggctttaatccaaataggcggaaaaccgccattcgcggacctggagcaaggagaattattctgggcatcctggtcgatagcaaaaaccctagactgtctaaggagtacaaggaccagcttaggcagcacctgtactacttgagatcgcaggagcatggcccttccaaacacgccgaagcgagaaagctgagcgtcagtaccctttttcaccatgtgcgaggaaaaattgcctgggcagaaaaagtggagccagagttcggagccctctgcttagaaaaattcgaatccatctcctggcccccactggataactggtga

SEQ ID NO: 8978 - RNA, 1143 nt, synthetic construct
  source 1..1143: mol_type = other RNA
atgtcctcttggtcctcgcagagatataagtttgagggtgaaacacagggcattgatgactctgtcctggattcctccatctctgctattggacgaatccagaaagttgatgagcggctgccaattattttaacactgaggcacttcagcctcctgaccgactgtcactttgggtatctacggagggtggtatcacgcgagagcagagagtataagcggatcttgttcaagaagaaggttcctgggcgctcacgttaccgcgagatacacgtccccgaacaggagctcctcgaggtgcagcaatgggtgaccgccaaaatcttatccaatactaaagcccatcattctagcttcgcataccaccctaactcccaacctatttttgccgccagccagcactgtggttgtaagtggctgctgaagattgacattgaagacttcttccatagcatcagtgaaagaatggtgtataaggttttcaaagacctgggctataacaaactcttgtcttttgagcttgctaggattacaaccattgtaaaagcgcgcgataagtcacaggctagcagtgatctgacaaagtggccggccatacccacgtactgcaagaactccgagggatttctcccccaaggcgcaccaagtagtcccatgctgtctaatctcgtgatgaagagcgtggacgagaaactcgctactcttgctaagacgaacggattcatctactctagatatgccgacgacctggccttttccactaaactcaacgtgggaatggtcagtatgagacagctgtctaagttggtgtcatgcctgctaagcgcagaaggctttaatctgaataagcggaagactgtcatacgtgggcccggcacccggaccatcatcttgggtatactagtggattccaaaaagccaaggttaagcaaagaatacaaagatgatctgcgacagcacctttattacctgtgcagtcaggaccatgggccatcgaaacacgccgagatacgaaaaatctcagtctcaacccttttccatcacatcagggggaagatcgcatgggcggagaaagttgaacctgaattcggagcatactgcttggaacaatttaatggcatcaagtggccgcctcttggctactga

SEQ ID NO: 8979 - RNA, 1167 nt, synthetic construct
  source 1..1167: mol_type = other RNA
atgcctgcctggaacccacagcgctaccagcatgaaggaaaaattagggacatcgaccaggggattctcgatagcgtggtccggataataaatcgtattagagccgtggacgcacgacttccagtgatcctgacactgcggcatctgtccgtgcttactgacgtgccgtataagtacctccgtgatgttgtctctagacaggcaggcgattataaacgcgtgctgctaaagaaaagggttcccggtagaacacgacacagagaaatcagcattccaaatcccgtcctggccggcgtacagaaatggatcaacgagaatatactgcagttcacaagtgcacatcccctttcttacgcgtaccaccccgaatcgcaggccgtgtttgcggccactcctcactgtggttgcaggtggctacttaaggtagacctgacggacttcttccactcaatttccgagtccgatgtgtacgctgtgttcaagtctctgggatatagtcctctgttggcttttgagttagctaggctcactaccatgctgtcagcatcttctcggcccgctcccgccgactttactgaaaggtggagcagcatccctgcctacgcctgtgaaaaacagggcgtgttaccccaaggtgcccccaccagcccaatgctgtcgaacctcgtcatgcgggacctcgatgagggattggcccaattggccgaggcagccggttatacctacaccaggtacgctgacgatcttgcttttagcacggccaaggacgtcggactcgagcatgtgcagcggttgagaaagagtgtcctcctgaaattggccaaatccggattttctgggaatctgagaaaaaccgttattcgaggcccaggcgcgcgcaggatggttttagggatcctcgtagatgggcacgaaccacgacttgctcgggaatacaaggatgccctgcggcaacatctgtattatctgttgtcacctgcacacggcccagctaagcacgcaggagctcgtaacctctccgtgagcacactgttctatcacgtgaggggcaagatcgcttgggcagagcgcgttgagccttcattcgggtccgcctgcctagaagagtttgagaaggtcgattggcctccggtagatgtggcaagacaacgcagtcgcgacgcgtga

SEQ ID NO: 8980 - RNA, 1188 nt, synthetic construct
  source 1..1188: mol_type = other RNA
atgcggatcaccagccctcagcactatgtggcagccggccaaggactagcaattgacccacttgtgctggaaaacgcctcaagagcgataagccaaatctggagtcgcaacatcaacttgtttccgcttcttacactcaatcacctttctgtagcaacaggtctgaactacggttttctcagaagggttgtggcacgcaaaggaggtccgtacttatactcacacttctacatgcggaaacgcgtacctgggagacggaaggtcaggatgatatccattcccgctcctaaattggctcagtgccaaagttggattgtccgccacattttaaagcatgtcccccctcacagcggcagctatgcctaccatccacactccaatccggtgttcgcggcacgacgccacacggaagccgtttggctgattaaagtagacatccaggacttttttcacgccattaatgagcacgctgtttatcgggttttccgtagcctgggctatgcttctattctgtccctggaactcgccaggctgtgcacaatgaccgccgagcgtcccaggcaggcaaaggatccttccgcccgctacgtctcacccgcagtggagtattatcagaccccatacgtgggagtcctaccacaaggggcacccacatccccaatgctatctaacctggtgatgagagatgtagatcagggcctgtccgatctcgcgaaggagtctgccatgcggtttactcgatacgctgatgacatcgtcttctcttgtgccgacaaaaggctcggaagctcagtgagattggtgaggaataagatcctcgagatactgaaccaggccggcttccggccaaatcttagaaaaaccgtcatcagaggacctggggaccgcaaagttgtgttggggatgctggtggattcggctcatccccgattaatgaaggaatttaaggatgagctgcgtctgcatatacactatctgagacatccaaaattcggccctgcccaccatgctttggctcgaaagaccagtgtgactagtatttaccatcatgtgctcggcctcatcttctgggcccggactgtggaacccacctatggggcccggctgctgaaggagttcaagctgatccagtggcctcccatcacgaggcgagactactacgctactgttaggcaggcgggtgactga

SEQ ID NO: 8981 - RNA, 1188 nt, synthetic construct
  source 1..1188: mol_type = other RNA
atgagaatcacatccccccagcactatgtggcagctgggcacgaacttgcggtggaccccctcgttcttgagaatgcatccaaggtaatttcccgaatctggagtgtcaatcctaacctgtttcccctcttaactcttaatcatctgtccgtcgcctctggagtcgattatgggttcctgcgcaacgtcgtggcgcgcaagacaggtaactaccggcagtttctgatgaggaaacgcgtccctggtcgaaggcgggtaagagttataagcatgcctgtgcccaaactgatgcattgtcagcattggattgtggagaatatcttaaagcacgccaagccgagcccagacagctacgcttatcatccgaactctaatcccgtgttcgcagcccgacgccacacaaattcagtttggctgatcaaggtggatattgaggatttttttgactctgtccacgaacacgatgtgtatagggtatttagatcactggggtacgccggaatactgagcctcgagcttgctcgtatctgtacgatggctgccaaatggaggcccgacactgatgagaggtgggcacgctacaagggccacggtgtcgcttattaccggaaccagtggatcggagtgttgcctcagggcgccccaacctctccaatgctgagcaacctcgtaatgcgcgatgtggatcagaaactggcacggctggcttcgtcaagctgcatgcgattcacacggtacgccgatgacattgtgttcagttgcagcgacaggagaacagccgagactgtgcggtctgtgcgcagtcaaatcctcaccattttgaacgaagccgggttcaggccgaatagaagaaagaccgtgataagaggaccaggcgataggaaactggtcttgggcttgttagttgacggcaagaagccacggctggccaaagaatttaacgacgagataaggatgcacctccattatcttgggcaccctgactttggccctgcccgtcacgccactgcaagaaaaacctcaattgcagctatttaccatcatgttctgggcctaatcttctgggcgcgtgctgtggacaagaccttcggaagtgaactcctacgacagttcaattccatcgcttggcccccagtttccgaaagacattacttcgccaccatggagcaacaagagaaccaccggtga

SEQ ID NO: 8982 - RNA, 1158 nt, synthetic construct
  source 1..1158: mol_type = other RNA
atgcggcagacttctcctcaacagtataaagctgctggccacgagttagagatagcaccagcagtacttaataacgccgctgcagccatgcagcgtattgctagcataaattcacaattattcccactgctcacactcaaacacctgtccattgagagtgacgttagctatgggttcctgagaaagacagtggctcgggaagcgggtcgctacagacatatatatctacggaagaaggtgccgggacgaaaaaacgtgaggatgatctctatccccgaaggaagattactgcgatgccagaaatggattagtgagaacatcctgcgcttcggcgctccccaccaagctagttacgcctaccaccctggcagcaatccggtgttcgcggcaagagcacacactgaagccaagtggctgatcaaagtggacatacaggacttctttcatgccattagcgagcatcaagtctacagggtgttcaggtcccttggttacgcacgcctcatgtcctttgagcttgcacgactttgcacgatgccatgtgaaagattggaaccagacacagcggatgtcaaatatctggaggctactatcacccattactacagcccttacgttgggatcctccctcagggcgccccaacctcacctatgctgtcaaacctggtgatgaaagagctcgatgccaagttggccaagctggctgacgacaacgccatgaatttctctcgatatgcagatgatattgtgttctcttgcaaagatgcccgtccctcccagagcgtcaaccgcgttaaaaggctgatcctgaaggcgctgaatgatgaggggtttcgcccaaatcttagaaagaccaaggttaggggccccggaacccgcaaggtggtattgggaatcctagtagacgggaagcagccccggttgccccgtgaatacaaagacaagattaggcagcacctccattacctgacccaccctgattttggtcccgccggacatgcttcggccagaaagacaagcgtctcacggatttatcaccacgtctttgggttgatttgttgggccaaggcagtggaaccttcctttggcgaggaagccctccggtcctttaatgccatcaactggcccccaatcagtaggccgaaattctattcttga

SEQ ID NO: 8983 - RNA, 972 nt, synthetic construct
  source 1..972: mol_type = other RNA
atggctaggtggaacccccagaggtatcaggacgagggcgagaagcaggggatcgatccaggggttcttgacgctgccagcaaagccatcgcaaatatacaagcagtcaacccatctctcccccctatcctgacgcttatgcatctctccaaggtgacagaagtgaattacccttatctccgggagatagtcgggaggaagattgacccctacaagtccttcgccctgcgaaaacgaaccccaggcttgcaccggacccgtactatccatgtgcccgaggactaccttttaacagtgcagcggtggatttcgcgcgccattttgagacaggctgcccctcattccgccagcttcggctatcaccccgggtcaagccctgtaactgcagcacggcggcacagaaatgcgaaatggctgataaagattgacctgaaagacttctttgataatatccgcgaaccagctgtgttcgacgtctttagaagcctggggtacggctccctcatcagttttgagatggctcgcattgtgaccagagccccagatgcaaagcgggcccaaattgccatcgatgaacacagaatccccttctactctgtggacagtaatggttttctgcctcagggtgcaccgacaagccctatgctgtctaacctggtaatgaggggcctggatgctaaattgcaggagctcgccaacgaacacgatttccgctactcacgctatgccgacgatctagtcttttcttgccgtgaccagaagtcacgaagtgctgcgcagaccctgcgtgatgccgcacttcaagcgttgagggctggaggctttacgccaaacatgaggaagacaactattgtggctccgggcggtagaaaaatcgttctgggactcttaggggccgtcgaagttcaaggatttttctggggactattcgtgatccaggcagccgacggtaccatatgtgcggatggatga

SEQ ID NO: 8984 - RNA, 1128 nt, synthetic construct
  source 1..1128: mol_type = other RNA
atgaggttccctagtctccagcagtataaagcgaagttggtaagctttgccgtggcccagcctctattcagcagacttgtcagggttttactcagaatccgttcaacctccgatagtatataccctatatttaccctccgccacttctgtcaaatcgtgggggcagacttcaagtttctgcgcctggtcattggtcggaaatttccctatacttacactacgttctacctgaaaaagaactccccatctaggggttttcgggaaattaacgtgccctgtaacgagctgagactggtgcagaggtggctggtggaaaacatcatctctcacgtgcacccatcagaacactcctttgcttttcaccctggtagctctccatatgccgccgccgcagagcatcggaacaccaagtggttgctgaaagtagatatcaaggacttcttccattcggtgtctgagcatgaggtttatgatattttctatggcatcggcttccaaaaattactcgcctttgagcttgctcgcatttgtacaattcccagtacagactcagctagtttggtgagtaaggagcgaaaaatcgaggattaccaaagcaatcgaataggcagacttccacagggagccccttccagccccatgttggcaaatctggccatgagaaaagtcgaccatgagattgcctcgtgctgcgctgaatacgacctgaggtttacaaggtacgccgacgatattgcaatctccagcgacgatgactgcgggctcgacaccttaatccagatacgacgacaggtctttcggattctacgggctcacgggttcgatccaaatcctaggaagtcagttatccggaaacccggcgacagaaagatcgtgctcggactgctggtagatactgaacgtccccgccttacgtcagaattcaagaacaatctgcgcatgcatctctattacctgatgaagccgtccggaccatctgctcacgcaaaagcacgcaattcctctatcaccacagtccacgctcacgtgttggggctgattcattgggcccgttacgtggatagcacctatggaaatgcgagacttgcggagttcaagagcgttaactggccgaagggcacttggtga

SEQ ID NO: 8985 - RNA, 1155 nt, synthetic construct
  source 1..1155: mol_type = other RNA
atggcccacccctgggatcctcagacgtttattgcaggcgccagactagctggcaggtcagaggtcaccatacaagcatgccaagctgctgccatcgctattaagagaacacatccagacctgccagtaatcctgacactgaaccatctcgctcacctggccgacgtaaacgctgacttcctgcaggaagtggcacaccggaagatcgatccatacagagtgttccgagttaagaaaaggggcgtcgcaaatcttgtgcctgcccagccacgccgctataggacgatctgcgttccggagccacgactcatgagggtccagcgttggatcgcccagaacatactgcaggttacaccctctcacacagccagcttcgcatttataaagaacagggacttgaaaggggccgccgagatgcacgtgaatgccaagtgggtggtcaagatggatgtgcggcaattctttgagagcattcctgaagccgcggtctacagagtttttcgaacattcgggtacggggctttactgtcattccagatggctcggatttgtactcggaggccggatcatcaccgacgggacactagagcactccttggacgcgggggtcagaggccttatagattgcaccccatgggccatcttcctcaaggagcccccagctcgcccatgcttgccaatcgcgcggtagaagcactcgaccgtcggttggagaggctcgccatttcagctggctggacatacacgcgctatgcggacgatctggctttttccagaaccaccgacgctacccggtccgaggctatgaagctggtgaagttggcagaactctccttgcagatccatggactggtggtccatagacagaagacctctatcctaagtcccggtagccggaagatcttactgggaatgctagtggacactggaaaacctaaactgaccaaggcctttcgaaacaatatcgagactcacctgtacgccttaacccataaaaaaatcggggccgaaaaacaccgcactaaacgcggcttctcttccctgataggcatgcgtagacatattcttggtctgattgcatatgcacaccaggtggatgaggcgtatgcggccactctctacgcaaaagccaatagtgtggattggaccaggtga

SEQ ID NO: 8986 - RNA, 1155 nt, synthetic construct
  source 1..1155: mol_type = other RNA
atggcccatcggtgggacccccaaacctttatagggggggccagggtcgctggtagagacgaatacactatcgaagcctgtaaggctgccgctaccgctgtcaaacgtattcacccagatctgcctgtgatattcacactgaatcactttgcgcacttagtagacgtggatgccgactttttggccgaggttgcacataggaagatcgacgcctatcgcgtctttcgagtgaaaaagcggggcgtggctaacctggttagcgcaccatccagacggtaccggaccatttgcgtgcctgaaccacgtctcatgcgcgcccaacgatggattgcgcagaatatcctccaggtcacgccgagtcacagggccagcttcgcattcacaaagggccgcgatctaagaggcgccgctaccagccatgccaacgctaagtggctcgtgaaaatggatgtgcgccagttctttgaatctatctcagaggccgctgtctaccgagtgtttcgggcattcggctacggagccttgctctcattccagatggcgaggatctgcacaagattgcctgaccatcatcactctgataatcgcgatcgattaggtcgcggcggccgtggaccatatagagcacaggctgtgggccaccttccgcaaggtgctccctcaagccctatgcttgcaaacagagctgtggaggccctggaccgaaaggtggagcgcatcgcaaacaaatcaggctggacgtatactaggtatgctgatgacctggccttctcgaggtccgatgacgcccggagaggggatagcatgaaactcgtaaaacttattgagatgagtctgatgtccaatgggctggttgtccaccggcagaaaacttctattaccgcgtccggaggacggaagatcttgcttggcatgctgattgataggggggagcccaagctacccaagtccttcaggaacaacatcgaaacccatttatacgcactcagtcacgctaatatcggggcagagaagcatagggccactagaggatttgcatctctgataggaatgcggcgccatattatgggtctgatcgcacacgcccaccaggtagacaagacatatgccgcgaaactgtacgcccaggttaatctggtggactggaacagatga

SEQ ID NO: 8987 - RNA, 1155 nt, synthetic construct
  source 1..1155: mol_type = other RNA
atgccatacagatgggattcccaagcatttattgtgggagcaaggtcagagggtaggtccgagagtactatccaagcctgcttagccgcggccacagctgtgaagcgaaaacacccagaccttcctataattttcacgctgaatcacttggcccacctggcagacgtgaacgcggacttccttcaggaggttgctcatcggaaaattgatccctatcgcgtgttcagggttaagaagaggggagtcgctaatgcagtacccgcccccccaagacgctatcggaccatttgcgttcctgaccccaagctcatgcgtgtgcagcgctggattgcccaaaacatcctgcaggcaactccatcccaccatgcctcgttcgccttcaccagagatagggatttggtcgatgccgccaaaaagcatgctggagcaaagtgggtggttaagatggacgtgcgacacttctttgaaagcatattcgaagacagcgtgtaccaggtgtttagaagcttcggctacggcgcactgatcagttttcagatggctcggatctgtactcggctggccgaccataaccgaaacgatgcacgcgctctcttagggagaggcgggagacgcccatatcggcagcatagcaaaggacacttgcctcagggggcacctacttccccgatgcttgctaatcgagtggtagagactctcgatcagaagctggacctgatcgccataaccgcggattgggcgtattctcgatatgctgatgacttagcctttagtcgtattacaacaaccacaagacggcaagccatgtctctcgtcaagaaggtcgaagctgagctcgccaagtttggcctggagactcacagacagaagacaacaatcgtgtctcctgggggtcggaaagtgctgctgggtgtcctgatagatacagacaaaccccgtctgaccaagaacttcaggaataacatcgaaacgcatctatacgcactgacctcacagaaaattggcccggagcagcaccgcctcaaacgcaattttgtttcactaatcgggatgaggaggcatatcctgggccttatcgccttcgctcaccaggtagacgaaacctacgctgccaaactctacacgttgtttaataccgtcaattggaaccggtga

SEQ ID NO: 8988 - RNA, 1158 nt, synthetic construct
  source 1..1158: mol_type = other RNA
atgagacatccgtggagtagccagcagttccgactgggagccttagcagccgggagatcggaagccattatcgctgcagccgaatctattgctcgggacataaaaagacgaaatgagaatctgcctgtagtgctcacattgcatcacttagctcatctagtggacgtgcccatagaacctcttcagaagatcattttccggcaaatcgacccttaccgggtttatagagtgaagaagcgaggcactcctaatggcgctgctgcgcctccacggaaatacaggacaatttgcgtacctcacccgcagcttatgcggctccagcgctggatcgcccagaatatactcaacgaggtggctccacacgacgcatcctttgcctttacccccaagcgtaacctggttggcgctgcatggagacacaccgaggcgcgatggctgctgaaaatggacgtgaggcacttttttgagtcaatctccgaaaggcaggcctactgggtcttcagaacactggggtatacggctttgctttccttccagatggcccggctgtgtacccgcctgacacagcatggagtcgctgatccacgtagagcagcaggccgcggtcacactggtctgccatactggcaacacccccaagggcatcttccgcaaggtgcgcccaccagtcccatgctggcgaatctcgtgatgaggtctttcgatcgcagggtggaggcacttgcccagtccactggatggggatattcccggtatgctgacgatctggcgttcagccggcgcgatgggagctctagaggagctgcaatgcatttggccaaagcagtggagcacgagctggccttgctgggtctagtgtcacaccgagccaagacatctgttgtccccccaggggccaggaaggttctgttgggcgtcctggtagacagcactaggcccgccctcactagagccttccgtaacaacgtggaaacgcacctatacgctctcaccagcccaaagattggagccgcagcacaccgggctaaaaggggctttgccagttcaatcggcatgaggcgccatatcgaggggttaattgcattcgcccatcaggtcgaccgcgcttatggcgccaaactctacgcccagtttaacgatatcgattggacccgctga

SEQ ID NO: 8989 - RNA, 1170 nt, synthetic construct
  source 1..1170: mol_type = other RNA
atgaccttcacttgggatcctcagcaatttgaagcaggggctctgggtgctggcttggaccgaagatcagtggaggcagccttggctgcaggagcagccattaaagcttctcatcctgatttaccagtggttctctccctagggcacctggcccacctcactgatgtgtccgcaggcgtgctggacaaaatcgtgcgaagaagacttgacccatacaaggtgtttcgcgtccagaaacggggtacgcccaaagctggtaatgcccccgcgaggcgttacagaaccatctgcgtgcctacaccaggattaatgagggtgcagcggtggattgctcagaatatactcaatgtgataaccccccacgcggcctcctatgctttcactcccaacgtgaagatgtcggatgccatcaagcggcatgccaacgccacctggcttgtcaaagtggacgtccgccatttttttgagagtattagcgagactcaggtgtattggtttttccggcgactgggttacccagccctgctgtgctttgagttagggcgcctctgtacaaggctggctcccgatcaccgcgtatacgccaccgatccacctgttactcctggctctaggccatcagctggccacgacctcccttatccgcccagacttcagggatggctgccgcaaggagcccctacatccccgatgctcgcaaaccatatagttgagcccctggacgtcaagctgtctgctatggccagaagtggggggtggcgctatacacgatacgcagacgacctgcacttcagccggacatctaagttcacgcggaaggcggccgtagattggagtcacgaagtcgagagggaactggtccgcttgggccttagggcgaacagacagaagaccactatcacgcctcccggagcccgtaagctggtattgggcgccctagttgacagctcaacaccacggcttaataggggcttccgcaataacgtagaaacccacctcttcgctctaacccacccagatatcggcgtggacaaacatcaggcaaagcggggattcgctagcacaatcggaatgcgtcgacatgtccaagggctgattgccttcgcaagacaaattgacaggccctacggcgataaattgctggttcagtttgaaagcatcaagtggtga

SEQ ID NO: 8990 - RNA, 1137 nt, synthetic construct
  source 1..1137: mol_type = other RNA
atgctgcacccttgggatagccaggcttttgcagagggtgcgaaaaagattggccgtagtgacgctacaattgccaatgccttagcagtggccgacgccattaaaaagagtaatgtgaacctacccgtgatcctctccctgggccaccttgcccatttgacagacgtgggcctgccagttctgcggaactataccgagcggagcgatgacccctaccgagtcttccaggttaagaagaaccacgtagggaaagcccccaggcgtcacaggaccatctgcgtcccggagccctccctgatgagagtgcagcggtggattgctcaaaatatcttgaacgcccagaagccacatccaaggtcctatgcgttcgcgccttgtagatctctagtgcaagccgcagagcgccatgcaggatgcagatggctcatcaagatggactttaaagacttcttcgagagcatagacgaacggagggtgtatctggtgttcaggtcaatggggtacggcgccctcttgtctttcgagatggcaagactgtgcacacgtcttcccggtgcctattcagcaaaaccacaggaggcggctgcactctcgactggatacaaatttcagcaaccaggatttctgccacagggggctcccacgtctccgatgttagccaatctcgtcgtacgcgctcttgatcgacggttggaacgcatcgggctgaaatacggttgggtgtacagcagatatgcagatgatttagcgttctccaccaaagacatatcagggagaggcgccgccattgctctcgtgaagcaggttgaacgggaggttcgcgattttgggctgagggaaaacccggctaagactagtatcaccccccctggacaccgcaaagtgcttctgggtctactcgtcgaccgagatcagcctcgcctcaccaagagctttaggaacaatgtagaaacacatctgtttgcccttggccatcctaaggttggcgccatggctcactgtgcagccagaggattcagatctgtcactggcctgcgaaggcacctggctggactgatcgcattcgctcacgccgtggacaagccttacgctgcacgcttgtacgccgattttgacaaggtcgattggtcccggtga

SEQ ID NO: 8991 - RNA, 1137 nt, synthetic construct
  source 1..1137: mol_type = other RNA
atgaagcatccttgggattcgcagaactttgttcggggggccagagctagtgggagggatctcgacaccatatctgcagccgtgagcattgctaaggcgattaagcaggtcagtccaaacctgcctgttatcttttcgttgagccatctcgcccacttagtggacgtcagtccaaaagacctgcggcccatagttgacaggatgagtgatccttaccgtcacttccggctccggaaaaagtctggtggaaacggaagcaaagcacctaaaagaagattccgcgatatctatgctccacagccccatattcttagaacacaacgttggatcgcacagaacatactgaatctcatccaaccacatccgtcttcctttggcttcgcaccaggctccgatatgctggctgccgcaacccttcactgtgggtgcgcctggctcctgaagatggatgtttcaaattttttcgagtccataacggaacgtcaggcatatcaggtcttcagggaatgcgggtacactgctttattgagcttccaattggcgaggctgtgtacacgatccattgataagaaacactactcccacctcagggagactgagttccctcaccccagcgctacagaaggctttctaccccaaggcgcccccacctctcccatgttggccaacttggctgtgtatagcctggatgtgaagctcaaacagatcgccgacgaactgggctggaaatatagcaggtacgccgacgatattgccttcagcaccgaacagtcagtgtccagaaccgacgcgctgaaactgcgggggattgtcgagggtactctgaagtctttcggactgtcagaaaatagtaataagacccgaatctccccacctggtgcccgcaagatccttcttggcgtactggtggacagagagcgcccgcgactgacgagacggtataaagacaacatcgagacacatctatacgcacttaatcacgagaaaatcggtgtgctcgcccatcaggctaatcgcaagttttcatcagtgactggcatgaggcatcacgtgctaggactgatttcttttgcgtatcacgtagaccgcaagtacggaaacaagttatactccgagtacaatcgcgtcaagtggtga

SEQ ID NO: 8992 - RNA, 1137 nt, synthetic construct
  source 1..1137: mol_type = other RNA
atgaagcatccttgggatagccagacattccgacggggtgcaagggaaaacggacttgacgcagtttccatagaggcagccctgagcattgccaaggccatcaagtctactgcccccgacctgccagtcatcttttccctgtcccatttggctcatctagtcgatgttagccccaagcacctgcgcccaatcgtggatagaatgtctgatccatatcggcacttccggctccgaaagaaaagtgggagaaaggggagtaaagctcctcgcagaagatatcgtgatatttatgctcctcagccccacttgctgcgcactcaacgttggatcgctcagaatattctcaacgtccttaaaccccattcctcttcgtttgctttcgctcccgatagcgatatgttggacgccgctacccagcactgcggatgcacttggctgctcaaaatggacgtgtcaaacttctttgaaagtattacagagaggcaggcatatcaggtgtacaggggttgtggctacaccgccctgctctcttttgaactcgcccgcctgagtacgcggagcgttgaccagaagcattatttccaccttcaagagtcagaatttccgcatcctgaagcagtggagggatacttacctcaaggggcccccacctcaccaatgctggccaatcttgcagtgcgtcccctagatatgaaattgaagaggatcgctgccgagctgggctggaagtacacgaggtatgcagatgacatggccttcagcaccgaccgcgtaagaacccggaaggaagcgctgcagctgaaggccatagtggagacagccttaaccaggttcggcttaagcgtcaatcaatccaagactcgcatctcacctccaggagctcgcaaagtgctgctcggcctgctaattgatcgggagcggccgaggctcacacgacagttcaaagacaacatcgagacacatctgtacgcgttgaatcacgcaaagatcggtgcgcaggctcacagggacaaaagagggttttcttccatcactggcatgagacatcacattagaggccttatagcgttcgcccaccacgtagacccagactacgcccagaaactctacaaggactttaaccgaattaaatggtga

SEQ ID NO: 8993 - RNA, 1143 nt, synthetic construct
  source 1..1143: mol_type = other RNA
atgagtcacccttgggactcacagaccttcacagccgcagcacgtgctgcaggtcgcagtgatgcagtgattgatgcctccttaagggcggcgacgtatatcaaagacaggcaccctgacttgcccgttattttaaccctagcccacctcgcacacctgactgatgtctcaggggagtttttacgcggagtagtggatcgcgagacagatccctatcgtgtctttcagctgaataaaagatccagacccaacgcgccccaacgcgctcatcgaaccatttgtgtgcctcacccactgctgatgagaactcagagatggatagcacagaacatcctgaatgtcatcgatccgcacagagcctcattcgccttcgcaccgaaacgcgacattgtgcaggctgctaagagacacgccggctgccgatggctggtgaagctggacgtcactgatttcttcacctccatcagggaagatgctgtgtacagggtgtttcgcgcattgggatacggggccctcattagctttgagctcgcccgtctttgcacaagggccccaggaagcagccggaggaagcatagagctagccatgaccaacgactcccataccatcggaagcactgcggatttctcccccagggagcccctactagccccatgctggcaaacctggcttcttaccagctcgacgaggactttgaagcactcgctacatcccgcaactggatctattcgcgctacgccgatgacctagccttttccacaaagcacccgagtaacaggtcagaagccctgcacgtctctcggaaagccgaggcattgctggaacggcatgggttcgccgcgaatcgatctaaaacctgtattgcgcctccaggtgctcggcgtctggttctggggcttttggttgaccgaggcgctcctagacttccacgggcattccgggataatatcgaaacgcatctctacgccctggctcatgccgacataggccctcttagacacctaaataaaaggggcttcgcttctttgataggcatgcggaggcacatcgagggcctgatcgcttttgctcatcaggtggagcccacctatgccgccaggctttatgctcggttcaagaaggtagcctggccagcccaatga

SEQ ID NO: 8994 - RNA, 1143 nt, synthetic construct
  source 1..1143: mol_type = other RNA
atgcaggcgtggaattcacagagatttagagctggtgcaaaagcctcaggcagctctgaggagacaatccaagcggcaattgagattgccgcttgtatcaggaaagagaatcccaggctccctgtggtgttcaccttccatcatctgtcccatcttactgatgtgagctctgaatttctgcaagatgtagccttcaggaaggttgatgcatatcgcacatttcagctaaaaaagagaggcaagcctaactccgtccccgcacctgctcgtcggtttagaaccattagtgtgccagaacccggactcatgcgagtgcagcggtggattagccagaacatactgaacgtgacaacgacccacgcagccagcttcgcgtttactcccaaacgcgatttgaagcaagctgcaatgcgacacagggaggccaaatggctcgtaaagatggacatcacaagctttttcgaatcaatcaaggagaacaagatctatttcgtctttcgtaagcttggctacccacctctgctgtgctttcagatggcaaggatttgcactagactgccaatagagcacggttcaaagattccaaagcaggataaaatgttgccgtacaaaaggcgcactgaagggtttctgcctcagggggctccaacgtcccctatgctggcaaatctggtcgctcacgctcttgacaatgacctgtctatgttagccgcccaggagggctggatatatacacgctacgccgacgacttatccttcagtcacaccgagtgtagatctaggcaagaagccgttgccctggtgcggagggtcgaaagccttttaaaacgtcacgggttcctgcacaaccccaccaagaccaccatctctccaccgggtgcccgcaaaatcgtgttgggcctgcttgtggacagagaggacccccggctccccaagtccttcaagaataatctggaagctcatctctatgcactccgcagtccgaaaataggggcccgagcccatgtcaaacgacggggattcacttcccacatcggactccggcggcatgtttacggactattggcctttgcgcatcacattgagccttcgtacgctaagaaaaagtacgccgaattcaacatgatcgattggagtgcttga

SEQ ID NO: 8995 - RNA, 1143 nt, synthetic construct
  source 1..1143: mol_type = other RNA
atgttgcatccatgggattcacagcagtttcgaaggggagctaaagatgctgggcgcccggatcaggtgatcgatcgtgccattgctacagcccggagaattaagaggaaaaaccgcgacttgccagtgattttcagtatcttccatctggcccatctcacagacatagacgtggactccctactctccgtggtagatagaacagaggaccactaccggatatttcgagttaagaagagatccgttcctggccgcgtggctccaagcagacgataccggacaatatgcgttccttcacctgccctgaagcggattcagaggtggatcgcacagaatatactgaatgtgactgagacgcaccccgccagccatgcttttgcaccggagtcagatctggtcgaagctgcaaacgaacatctgagatcctcttggattgtgaagttggacatcatcaatttctttgaaaccgtcaccgagcgacaagtgtactacgttttccgctccctgggctatgcggccctgttatctttccagctcgccaggatttgtaccaggacccttaagctcactcccaagggacgggctggaagtgagggcagggtaccccacgaaagatacatcgcgggtcaccttcctcaaggtgcccccactagtcctatgttggcgaacttagcagtgcgccagctggacgacgagctcgacaatctggctaaacgtctgggctggaaatacacccggtatgcggatgacctcacattttctctggagggcaagtcatctcgcggaaaagctgccgaattaatgagccttgcaagccaaactctgagccgtgccgggttcacgagcaacaaactcaaagcaaaaatcatccccccaggagcccggaaagtcgtcttgggggtgctggtcgataccgaccgagcaaggctaagtaagaagttccggaataatctcgagactcacctgtatgcccttaccagccacaagatcggcgtgagatctcacatgcaaaaccgcggctttgattccgtaatcggtatgaggcagcatattgaggggcttctggccttcgcccaccacgtcgatgaaaagtatgcagccgggctatatagacagtttaactcgattgactggctggcttga

SEQ ID NO: 8996 - RNA, 963 nt, synthetic construct
  source 1..963: mol_type = other RNA
atgctttcctttgttgagcggacccatgaccactatcggattttccgagtgaaaaaacgcgccaccccaggaacaactgccccaacgaggcgctaccgaactatctgcgtcccaagccccgcactgaaaagggtgcagcgctggatcgcccaaaatattctgaatatcatagacccgcatgaggcgtcccacgcttttgctcctgaaagcgatctcgttgaggccgccaataagcatttagggtgttcgtggctggttaagctggatatcgtcaatttcttcgaaactatcggtgagagacacgtgtactacgtgttccgtagcttgggctacacggccctgctgtcttttcagctcgctagaatatgcaccagaacattacgcttgacccctaacggccgcgctggcaacgatggtagactgccacacgagaagtatatccctggccatctgccccagggtgcacctagctctccgatgctggccaatttggtggcaagacatctcgacgaggaattgactgctctggccagttcccgtgggtggacttatacacggtatgctgacgatctaaccttttctgtgcacggcaaaagctcaagggggaaggccgcagaaatcatggcagtcgcaacccaagcgcttgcacggcagggatttgcttcaaacaagctcaagagtaaagtagtaccccccggagccaggaagctcgtgctaggaatagtcgttgacacagagcatacaaagctcagtaggaagtttcgaaacaatctggagactcatctttatgctctgacatcagacaaaattggagtgaagctccacatggcgaacagggggttcgattctattgtgggcatgcggaaacacgtggctgggctgcttgccttcgcccaccacgtcgatgaaaaatacaccgccagattataccagcagttcaactccattaactggcttacctga

SEQ ID NO: 8997 - RNA, 1128 nt, synthetic construct
  source 1..1128: mol_type = other RNA
atgctgtcttggaatccacagcagtttacccgcgaggcaaagaaagaagggtgttcgcagcctctgatcaacgctgctattcagactgccagcttaattaagaaagtggacatcggactccccgtgatatttacgctgagtcacctggcccagatcaccgacactccattggtcaagctgggagcctactccaggcgcacctccaagaattcttaccgagtattcaggctcaagaaagccgacagacgtaaatttcgcgttatctgtgtcccagagcctactctcatgcatgtgcaaagatggttggcacaaaatgtcttccaaacaagggctgcagctccgcatcaggcgagttacgcttattatagcgatactcggcgggggctacttaacgccgcaaaacaacacgccggttgcttgtggctgattaagatggatattcagaacttcttcggatccatcatggagcctcaagtgtataaagtgtttcgagacttaggttactcagctctcctgtcctttcagctggcccggatttgcacttatgttggcgacaagccgagtcccagacgaaagaaaagttatgggatccccaactcatactgcgagaatctggggtatcttccacagggagccccaacctcccccgcacttgctaatctaactacaagactcctggactcagaactcgagaagctagctcaggaaaatgggtggaggtactctcgttatgcagatgacattgccttcagcaccacacagacgattaacagagaggtggccaaaagcctcgtgttgctggtgcgcgaaaaactgatcaacttcggctttacccctaacgatacaaagacagtgatcagcccccccggcgcacgttgcatagtactgggactgctggttgacggcccttaccctcggctgaccaatgacttccggaataacttagatacacacctctacgcgcttctttctaagaaaatcggcgtcaagaaacaccaggaaaagcggggttttgattctgtcaccggcatgcgcaggcacattatgggcctgttggcgtacgcccatagcatagatagggagtattcaagaaagtgttacgagaaattcaacaagatcatatggtga

SEQ ID NO: 8998 - RNA, 1227 nt, synthetic construct
  source 1..1227: mol_type = other RNA
atgaattacctgaccagccagcactttcggtctgtgggaatctcactcaacatagaaagcaaggttttggataacgccgtgttggtacaccagcgaatcagaaagcagtccccgaatcggggcgtggtcttcacactggcacatctggctcacctgaccggagttcactataacttcttgcgaatgtgtgtgtctgatcccggcaccgggagttacagggagttctttatcaaaaagtcaactagcggccagaaaaaaaacaaaagggctgcttctagacccatgcggcggatttctattccggcacctatgctgatgttagtacagagatggatcctgcacaggattcttcatactgcagaggggcatgaggcgtccgtggccttccataaggacgcagatatcaagcgggctgccaaactgcactgcggttgccgctggctcattaagttggatgtgcagaacttttttgagtccatcactgaggaacaggtcttcaaagtgtttgtcaggctcggatacccccgtctcctttccttcgagctagcgcgtctgtgcaccaaagtgataggtcctgaagacagatccctgtctccaactacccgctttgccaacttcggacggggcccttatgaagatgctgctttcatcgaccctagtacaccccgcagactaagacgagatgccccactgatcgtctcgagacgggtactccctcaaggtgccccaaccagcccactcctcgccaatctggccgtgacggaactggatacagagatcctagccatagccgaagagcacgggcttatttatacgcggtacgccgacgacatcgctctgagtaccaagcgcaaggacttcagcagagatgaggcaagtcaagtcatcgggaaagtttatgcagcatttgcgagggccaggttgctgcctcacacaggaaaggcctgtgtcaggccacccggcgctctcaaaattgtgctgggcttagtggttaatgggcccgagccccgcttaacaagagagtacaggaataagttgaggcttcatgcccatattcttgggcgcctgggaatcgaaccagccgaccacgctaaagcgctcggcttccgctccgtcctgtcaatgcgacgccacatatacggcaaggttgagcatgcacgacgtattgaacctgactttgcttcaaagattgcagacactttaagcaaggtgaattggctgctttga

SEQ ID NO: 8999 - RNA, 945 nt, synthetic construct
  source 1..945: mol_type = other RNA
atgaggcgcatcagtgtgcccgctcctcttctgatgcacgtccagaggtggatactccaccgaatcctccacaccgctgccggacatgaggcatctgttgcattccacaaggatgccgatatcaagggggctgccaaactgcattgcggatgcaaatggttaatcaagcttgacgtgcagaattttttcgagtcagttagcgaggaacaagtgttcaaagtgttcgtgcgcctcggctatcctcggctcctgtctctggagcttacccgtttgtgtactaaagtgattgacccagagaaaagggtgagaactcggtttacaagactggcgagctacgggcgtggaccgtacgaggatgacgcatttctggaccaatcactgaaacgccgcgagaggctgggatccccaatcttggcccagagaagggtgttacctcagggtgctcccacgtccccgttacttgccaacctggcagtcttcgaaatggacagagaaattatggaaatcgccattgagcacgatctggtctacacccgctatgccgatgacatagccttgtctaccaacagggataacttcactcgggatgaggccagcaagattattggcaaggtgtacgcttgttttgcgcgagctagactcgtacctcaccccggcaaagcctgcgtcagaacaccaggtgcgctgaagatcgtgctagggctagtcgttaacggcaccgaaccccggcttacacgggagtataagaataagctccgattgcatgctcacatcctgggcacaaagggaatagaccccagtgaacatgccaaagcactaggctttaggtccgtactgtcgatgagacggcatatctttgggaagctggaacacgctaagcgcattgaaccagacttcgcagtaaagattggtaatagcctgaaagcagttaattggctcttgtga

SEQ ID NO: 9000 - RNA, 1227 nt, synthetic construct
  source 1..1227: mol_type = other RNA
atgaattacctgacctcacagcaccttcgcaatatcgggacctcactgcaaattgaacccgaagtgttagaccgcgccgttttgattcatcggcgggtgacctcccaaaacacaaagcgtgctgttgtgtttacaatgtcacatctcgctcacctgactggcgtgcactataattacttgcggatgtgcattggggaccctggcttactcagttacagggagttttttatcaaaaagtctacctctgggcggacaaagggcaaaaaaagcccaagcagaacaatgcgccgcatatccgtgcctgctccaatgctcatgctggtccagaggtggatcctgcatcgcattcttcacacagcagccggacacgaggccagtgtcgcatttcataaagaagccgatatcaaaaaggctgccaagctacattgtggatgcaaatggctgatcaagctggatgtcagggatttctttgagtcgatttccgaggagaaagtcttcaaggtcttttcaggcctgggctaccccagattactgtcctttgagctcacacgactctgtactaaagtccttgaccccggtaaaagaatcgcgtctcagaacaccagactagccaatgttcagcgcggcccttatgaggatgaccttttcacggaccagcggattccgaggcgtcagaggctcgacgcagacgtgctgacccacagaagagtgctacctcagggtgctcccacctctccactgctcgctaacttggccgtgttcgacatggatgaagaaataatggaaatcgcagctcggcatggcatggtattcactagatacgccgatgacattgcactctccaccaagcggacggacttcacgcgtgatgaagccagcaaggttatcggaaaggtatatgccgctttcgagaaggccggactgattccacaccccggaaaggcttgcgtgcgcactcctggcgcgctgaaaattgtgctgggcttggtggtaaacggaagcgagccgaggctgactcgggagtatcgaaacaaattgaggctccacgcatacatgttgggtactcgagggatacttccaagtgagcacgcaaaggcgcttgggttcaaaagcatcctgagcatgaggcgacatatcttcgggaagctggaacacgccaagagaatagaacccgagtttgccaacaagatcgatatcacactgaagggtgtgaattggttactgtga

SEQ ID NO: 9001 - RNA, 1278 nt, synthetic construct
  source 1..1278: mol_type = other RNA
atgagctccttctctccccagcattacaaacaaatcggacggagactgggtgtggatcccgcagtactggagacagctgcaaagattggcacacgcatcacggcttcagcgccagatagagccgtggtttttagcctccgacatctgagcgctctctccggggtcccctatcagtttctccgtgactgggtgggacgatggggcccagacccatatagagagttcttcctcgctaagaagcctgacggcagaaccgccaacaaaccttctcggcgacctaaacggcggatagccgctcccacccccatcttaatgcgacagcagcggtggttggtggaaagagtcctccaccatgctccacgtcaccccagctcaatggccttccacagaaaggcagatatcgtagaaaccgcgaggcttcattgtcaatgcaattggctgatcaaaatggacattcggaactttttcgagtcgatctacgagccttccgtcttcaatgtgttcgtcgaactggggtacccacgcttgctggcatttgagctgacccgcctttgcaccagaattgtgcccgaaaataggttaaagtgggcctctggcctcaagcacggtctgttcgacgcaagacgaggcccgaagttttactcccgcgtgcgcaagcagcctgacgcgaaaggacagcatgcaataggaaagcgcgatcgcttccacgagtgggtgactggggcaatcggctcagaccggctaccattgcctttagggagtctgccccagggcgctccaacatctccgcttctggccaacctcgccgtgaggggactggacgagcgtatcaacattatcgccgccgagcacgatatgacttatacaagatacgctgatgacgtagccctgtcaacggaaaggaaagatttttcccggaaagaggccggccaggttatcggaaagattaaacgggaattcgaacgcgaagggctgttgccacaccatagtaaaacccgtttggtcagccccggtgctcggaagatagttctaggcctagttgtggatgggaaggctcctaggctgactagggagtatagaaataaactgagactgcacgcgcatatgctgggtactagggggataagtccgtctgcccatgccagtgcacttaggtttcgaagcgtcatctccatgcgcaggcacattgagggaaagattgcccacgccaggagggtggaagagccttttgcagacaaaattgctgcgcaacttgccaaggtggattggacactctga

SEQ ID NO: 9002 - RNA, 1278 nt, synthetic construct
  source 1..1278: mol_type = other RNA
atgcccagctttagtccgcaacactacattcagattgggcggcggctcggcatctcgccaactgtattggctcgcgcaggtgctgtcggtacaagaatcacggccaatgcgccagatcgggcagtcgttttctccctgagacatctgagtgctctgtcaggggtcccataccgtcttttaagggactgggtgggtagatggggacccgacccataccgcgaattcttcattgcaaaaaagtccgacaataggcggactaacaagccctctgtccgcccaaagagacggatagccgcccccacaccagacctgatgcgacagcagaggtggctcgtggagagagttttgcaccatgctcccaggcaccctgccagcatggcctttcaccgtgatgcagatattgtggaaaccgctagactacactgcaaatgtaactggcttatcaagatggatattaggaacttctttgagtcaatctacgagcccgccattttcaaggtattcatcgatctggggtatccccggcttttggcctttgagttgacccggctatgcacacggatagtgcccgagaacagactggaatggaaaactggcctccgccatggcctattcgaccctcgccgaggcccaaaattttataacagggtgcgtgggacacctgatgtgacgggcaggcgtaccattcataccagagacagattccacgagtgggcaatgggagctgttggtagcgatcgcatgccactgcctctcggctctttaccgcagggagctcctacgtcaccgctgctggccaatctggccgtacgagcgctggatgaaagaattactcttatcgccgctgaacacgacttggtctataccaggtatgcagacgacgtggccctttccacacagagaaaggactttactcgaaaagaagctgtgcaggtgatcgggaaagttctgagggagttcgagcgcgagggattaagacctcaccacgccaagacacgtctcatcagccccggagcccggaaaatcgtcctgggactggcagtcgacggcaacacccctcggctcacccgagagtaccggaataagctgcgcctccacgcacatatgcttggagcgcgcggcatcaatccttctgcccacgcgaccgcactgcgatttcgcagtgtggtgtccatgaggaggcatatcgaagggaaaatagcccatgctcatagggtggaacctgcctttgctgatgatataaaggctaagctgcaaggcgttgactggactctctga

SEQ ID NO: 9003 - RNA, 1176 nt, synthetic construct
  source 1..1176: mol_type = other RNA
atgtctgtgtggagggcccagccgtacattaacgcaggacgtcgagccggtgcagatccagtggccttagcgcacgccgtgagatatggccagtctattgtgcgccattccgccagcctcgtccctatattcactttgaaacatctggcagttctgagtggaacgccttacggtgtcctaagggaaatcgtgggaagagatgctactagcatgaaggatcagccctatcgcattttccgcatccggaaaagaattgctaagaaaggggaggcccagcgcctgagaaccatctgtgttcctagtcccatgctgctccgggtgcagaggtatatacacgaaagaattctggttcggctacccgtgcaccctgcgtctattgcttacaacccggggcgggtcatggttgaggacgttgccgtgcactgcggctgccagtggctcatcaaagtggatatcaagaatttcttcgaagctatcccagagcaggtagtgtacagagtatttaggaatgcaggctaccctgcactgattagttttgaaatggctcggctatgcacccgcgttcctatgccattcgcgcttgaacgccccttcaattttcccccaaatcgatcggagagatatagcatctcagcctacagtaagaggttacaggggtcattaccccaaggctccccatcctccccccttttggcgaacctgtgtagccgggcactggatgagcggatcgaggagcttgctctccgtcatggactcgtgtatacacgatatgccgacgatatcgcactttcttcagaggacaaaagctttgggcgcgggcatgcccgctatatagtccggaagttgcacgccattatgagggattgcggatttgcccccaacttggcaaaaaccatcgtggtaccacccggcggcaggaaggtgctgttgggtctgtacgtggacacagagcgtcctcgactcagcagagaattccgggctaagctggaacaacatcttcacttttgtctgaggcctgacgtgggtgctatcgcccactccaaacaccgtggctttgacgctgtcctgggattccgaaatcatgtcagggggctggtcgcctttgctatacaagtcgacccagactacggcgccaagagactgtcagagttcaacaaggtagaatggccgctctga

SEQ ID NO: 9004 - RNA, 1176 nt, synthetic construct
  source 1..1176: mol_type = other RNA
atgagtgtgtggagggcacagccgtacgttaatgctgggagaagagccggagctgatcccgtagcgctggcacatgcagtgcggtacggtcagtcaatcgtgagacattctgcatctctgatccccatcttcactctcaagcacctggcagttttaagcggaactccttacggggtattgagagaaatcgtgggccgcgatgccacatcgatgaagggacagccttatcgaatcttcagaattcggaaaaggattgccaaaaccggcgaggctcaaaggctccggactatctgtgttccctctccaatgttactgcgggtgcagaggtacattcacgaaagaatactagtccaccttccagtccatgctgcttccatcgcctataatcctggcagggtgatggtggaggacgtagcagtgcactgcggctgccagtggctcattaaggtggacattaagaacttctttgaagcgatacccgagcaagtcgtttatagagtgttcaggagtgccggctaccctgccctgatatcctttgagatggcgagactctgtacccgagtccccatgccattcgccttggaacgcccatttaactttcctctcaacaggagcgagcgctacagtattaccgcgtattcaaagcgtttgcaggggagcctaccacaaggctcccccagctcaccactgctcgccaatctgtgtagccgcgtgctcgacgagcggatcgaagagctggctctgaggcacggtctagtttacacgcggtatgcagatgatattgctctgtcatccgaagacaagagcttcgggcgaggacacgcccgccatatcattcgcaagctttacgccatcatgcgcgactgcgggtttgccccgaatctggccaaaacaatcgtcgtgccacctgggggtcgtaaagtccttttgggcctttatgtggacaccgatcgacccaggctttccagagagtttcggtctaaactcgaccagcatctgcacttctgcctgaggcccgatgttggagccatggcccatagtaaacgccggggttttgacgctgtgttaggcttccggaaccacgtccgaggcttgattgcttttgcaatacaggtagaccctgattatggagagaagcgtctgacagatttcaacaaggtggtctggccgctgtga

SEQ ID NO: 9005 - RNA, 1176 nt, synthetic construct
  source 1..1176: mol_type = other RNA
atgtctgtgtggaggccccaaccctataagaaagctggggagctcgcaggagccgatcccacagcacttgctcacgcagttcgctacggacagaccattatcagacataatgccgaggtgactccagtatttactttgagacatctctcagttctgagcgggacgccctacggcgtcctacgagaaatcgttgggcggcatgctacctcaaagaaagatctgccgtatcgtatattcagaatccggaagaggatggcccgtccagatggtatcgaaaggtttaggacgatttgtataccgtctcccgtcctcctgagagtgcaacgctacatccacgagcatatcctggtgcacttacctgtgcatccagcaagtattgcgtataaccccggtaaaaagctgatcgacggcgtggctgtccactgcggttgcaactggcttattaaggtggacattaagaatttcttcgaggccattcctgaacaggtggtgtatagagtgttccgacaggcggggtaccctgcactcatttcctttgagatggcgcgcttgtgcacccgaaccgttatgcctttcagtcccgacggaccattcaactttactcagaataggcctgacaaatacaaaatcacatcctacagcaaccgcttacagggctccttgcctcagggcgctccctcttcaccgttgcttgcgaatctatgtagtcggttacttgatgagaggattgaggaactcgccctgctgcatggactggtttatacaagatacgccgacgatatagccctgtcttccgaggacaaacggttcggaagagggaacgcaaaagacgtcatcaggaagctctacgccatcatgcgcgattgcggctttgcacccaacctagccaaaaccatagtagtacctccaggaggtcgtaaggtggtcctgggcctgtatgtagatacttcgcggcctcgactgagccgcgaattcaggagcaatctggaacaacaccttcacttctgtttgcacccagacattggggccgtggctcacgccaagcataagggctttgacgccgtcctcgggttccggaatcacgtgcggggcctggtcgcttatgccacacagatcgatccagcttacggcgctaagcagctggcagactttaacaaggtgaaatggccattttga

SEQ ID NO: 9006 - RNA, 1176 nt, synthetic construct
  source 1..1176: mol_type = other RNA
atgacggtgtggcgcccccagcacttccggaagaacggcttaaaagcaggtgctgataaagcagtgattgccaacgcaatagaatacggcaaggccatcgtgaggtgcgatcctgctctgactcctgtctttaccctgcgccacctggccgctttatcaggtacaacctacgaagtgctccgggagatcgttggccgtcaggctgtggtaggaaaagaacaaccatacaggatttttcggatccgaaagagaaaacccaggccagacggcgcagaaagattcaggaccatatgtattccctctcccatgctcatgcgagtacagagatacatccatgaccacatactcacgcacctagctgcccatcccgcctctatcgcgtataacgagggaaagaaaatcgttgacgaggtggctatccactgcggatgcaagtggctgattaaggtcgacatcaagaacttcttcgaggcaatcccagagcagtctgtgtaccgggttttcaggggtgcggggtatcctgccctggtgtcctttgagatggcccgattatgtacccgcgtcgtcccacttaattggaccgaggggccaaggggtaacagtcagaatctcgatagcaagtattccatcgcacgatatagtaatcggtaccaggggtcactgccccaagggagtccctccagccctttgcttgcaaatctgtgcagccgccgtctggacgacagaatagaacagttggcgattgagcacgatctggtgtatactcggtatgccgatgacctgagcctctcaacagacgatccggagtttaaccgcacaaaggcttctcaggtcattggcagactctatgccatcctagcggagtgtggcttcgcccctaatactatgaagacagccgtggtcccacctagcggacgcaagattctgttgggcctgtacgtggattccgaccgccctcgtctctcgcgggagtttagatacaaactggaacaacatctgcatttctgtcttcatgccggagtggggccggtagaacacgccaaaagaaggggatttgacgccgtcttcgggtttaaaaatcacgttagaggccttgtagcttacgccgttcagattgatcccgaatacggcgcaaaaaggttggctgagttccataaggtggcttggccattttga

SEQ ID NO: 9007 - RNA, 1206 nt, synthetic construct
  source 1..1206: mol_type = other RNA
atggctatttggaggccccaaccttataaagcaactgggcagaaattgggggtgaaccaggttgccttagtcaatgccatcaaatacggcaagagcatcacaggccatcacccatccctgacacccgtattcacactgagacatctcgccgcactgtcgggaactccatatgccgtcctgcgcggtatcgtgggtcgccaaacggagacaggtactgacagggcttaccgcatcttccgaatacggaagcggttgtctaagaagggtgagccacagcgctaccgtaccatttgcattccttctcctgttgtcctgcgggtacagcgatacattcacgaacacatactaactcacctggccgtgcattctgcttccatcgcgtacagtgaaggcaataagattgccgaggaaatcgccgtgcattgcggctgtaagtggctcatcaagatggacgtgaagaactttttcgaggcgatcccggagcaggcagtttacaaggtgtttcgcggtgcgggctatcccgcccttattagcttcgaaatggcaagactttgcaccagggtagtcccgctgaattggtcagaaggacccacagcataccccactaataggatttcccgttattccatcaccacgtattctaacccatctaaaggggtgcaaccagccggcacccaagtgcagggaagcctacctcagggaagcccctcaagccccttgctggctaacctgtgtgcccggggattggatgagatgctctcagagctcgctgatgagtacggattagtttacacaaggtacgctgatgacctcgcgttcagtaccagtgataaaagctttgatagaagacgtgccagtcaggtgatcggccgggtttatgcaattatggccaagtgcgggtttgttcctaacaccgctaaaaccgtcgtggtgcctccaagaggccgcaagatactgcttggattatatgtcgactccgacagaccgcggctctcaagggagttcagatacaagctggaacagcatctgcatttttgtatgcaccccaaaatagggcctgtactgcacgctaaacgacgagggttcgatgcagtgctcggctttaaaaatcacgtgcggggcctgatcgcatatgccgtgcaggtggacccagagtatggggctaagaggcttgccgaatttcacaaagtcatgtggcctttctga

SEQ ID NO: 9008 - RNA, 1206 nt, synthetic construct
  source 1..1206: mol_type = other RNA
atggccatctggcgaccccagccatatcagaagactgggcagcagcttggaatagaccctgcggtactggcctctgcaatcaagcacggcaagagcattattggccaccacccgagtctcacccccgtgttcaccctgagacatctcgccgccctgtctggaacatcttacgctgtcctgagaggcgtggtgggcaggaagacggagctcggttccgaccgcagctatcggatcttcaggatccggaagaaaatctctaaggtcgggggagctcagcgataccgcactatatgtattccaagccctgttctactccgggtgcagcgctatattcatgaacatatcttaatgcacctcccagttcactccgcatcgatagcctatagcgctggaaataagattgcagaagagatcgccgtccattgtggctgtaaatggcttattaaggtggatgtcaagaacttttttgaggcgatcccggagcagggtgtatataaagtgttcagaggcgccggctacccagcccttatatccttcgaaatggcaaggctatgtactagagtggtgccgttaaactggacggaaggtccacatgggtatctgaacaatcgttgctcccgctttagcatcgctgcatactcaaatccctcacaagatgctcggcctgctgggacacagatccaggggagccttcctcaggggtccccttcaagtcccctcctcgcaaacttgtgcgcgcgtaagctggacgagaaaattgaagagttggctgatgattgtggcctggtgtacactcggtacgcagacgacctggccctcagtaccgatgatcagtgctttaccagacgcaaagccaaacaggtgatcgggaggatttactctctgatggctagctgcgggctgacacccaacaccgctaaaacagtagtggtccccccaggaggccggaagttgctgttgggcttgtacgtggacagtgatcgtcccaagctatcccgagactttagatatcgccttgagcaacacctgcacttttgcctgcaccccggagttggtcctgtctcacacgccaaacaaaaaggcttcgacgcagtcttaggattcaaaaatcatgtgaggggtctgattgcctacgcggttcaagttgatcctctgtacggagagatgaggctggtagacttcaataaggtggcctggccattctga

SEQ ID NO: 9009 - RNA, 1176 nt, synthetic construct
  source 1..1176: mol_type = other RNA
atggtggtatggcggtcccaattgtacaggaaaaccgggagacagctgggggttgacaattcgatactggacgcagctgtgctctatggcaaggcgatcagcaatcaccagccttgcctcgtcccagtgttcaccctacgtcacctggcagccctctcctccactccctataacgccttacgcgaaatcgtgagaaggcatcagctgggtggggggatgcacccataccgcctgttccgaatccggaaacgcatcagcaagaaaggtggcgaggagcgcttccgaacaatatgtattccatcaccagtactgttgagggtccagcggtacatccatgaacacatcctgattcatctccccgtccaccctgctagcatcgcctataacgagggtaaaaggatcgtagatgaggttgccattcactgcggatgtaggtggctgatcaaagtagacgtgaagaacttctttgaagctattccagagcaggccgtgtaccgagtctttcggggagcgggataccccgctctggtgtcatttgaaatggctcgactctgtacacgggtcatatcccgcagtagggacgaaggcgcatttggctacagagacaatcgctctctgaggtactccattaaggcctattctcaggcccttcagggatctctacctcagggtgcgcctagctcacctctgctagccaacctctgctctattcccctggatcacgaaattgagaaacttgctgaggaatatgggcttgcatatactcggtacgcggatgatttagccctgagtaccccggacacaaccttcgaccgtgatcaagcccggcaggtcattgtgagactgtatgccgctatggcccggtgtggcttcgttcccaacacggcaaagactgcagtgatcagccctgggggaagaaaggttatattgggactttatgtggatacagagcgaccgagactgagtagagacttccgttacaaattggaacaacacttgcacttttgcctccatgatggcgtgggcccagtggagcatgcaaagcatagaggattcgaggctgtgcttgggtttaagaatcatgttaggggcctcatcgcccacgcagtgcaagtcgatcccgagtacggcgcccgcaggttagctgactttcataagattgcttggcccttctga

SEQ ID NO: 9010 - RNA, 1170 nt, synthetic construct
  source 1..1170: mol_type = other RNA
atggccatttggagagcacagcattaccggcagaatgggttactccaggggattgaccctcagcttctgtccagggctatcgaatacggcgatgcaattacccgcagtaaccgaaacctaactccggtgttcaccttacgccatctggctctgctgtgcggcgcctcatatgcagctctccgtgcctacgctggacgcaagaacgacgaagctaatcatccctatagattctttcggatacggaagaggaccggtcccggagagaggccaagacgaaggacaatctgtgtgcctgcacccgagttgcgaaaggcccagcgcttcatacacgatagtatcctgagctatctccctgtacacccaggatccatagcttatagcagacacacgaggccagtggaagagattggcattcactgcggctgtcgttggttgattaaacttgatgtccagaactttttcgaggcgatctccgaacgggccgtgtaccgcgtattcagaaacgccggctaccctgctttgatttctttcgaaatggcacggctctgcacccgaattgtccctggaaatagggatgaggggcccagcggtcaaacatctgggcgggtcgggagatattcgatagaggcatactggaattggagacaaggatccctgccgcagggagcaccctctagtccactcttggcgaacctatgctcttttggcctggacacactggttgccaacatcgcctcagaatatggcatggtctatacacggtacgcggacgacatcgcccttagcactaccaatcatcactttagcaggtccgacgcactccgggtgatccaacaggtgtacgccgccatgcgccaatgtgatctgcagccaaatacagcgaaaactatgatcgccccacccggcgcccgaaaaatcgttctgggcctgtacgttgaccagagcactcccaggttgactagagagtttagatcacgcctcgagcagcacctgcacttctgtttacatcctgacgttggtcctgtcgcccacgctcggcgtaagggtttttcagccgtgcttgggttcaagaatcatctgaggggacttatcgcctatgctacccaagtggagcccgggtacggcgctacgaaactggtggatttccagcgcgtggcatggccattttga

SEQ ID NO: 9011 - RNA, 1167 nt, synthetic construct
  source 1..1167: mol_type = other RNA
atgaatcattggcgcccacagcattataggaagcagggcactaagagcggaaaagatcccgtgatcataaaacgggccatcgaaatcggtacatctataacccgaaaatatcccaccattaccccaatcttcacgctgaaccatctagccctgatctcgggaacatccctgcacaaattacgcaaggtggttagtcggaacgaaagcgatggctatcactatagattcttccagatcagcaagagatgtcgaaaaaaatccaagccgacaaagcgttttatctgtattccgtctagtgacctgatgcgagtccaaagggtgatcaattccgtgatattatccaaagtaccagcacactctgcctcagtggcatatacgaagggtagcagcatatacaatgcagcgagcatccactgtggatgcaagtggttgattaagctcgacatcaagaactactttgagagtatttctgagcggtccgtatattctattttccggagcattgggttccccgcgctcctctcattcgaaatggcaaggatttgcacccgcgtgattccccgcagaggcctgacttacgactcaaggtggatcaatcccagatttgaaaaggggaagattaaggcctacaggaatcgcgacgtcggctccctccctcaagggtcaccctcatctcctatgctggccaatctcgcttcggttcatctcgatgaagagatcgctgaccttgcctataaaaatggcctagagtacaccagatacgccgatgacattactttgtcaactgataacgagtactttagtaggttgaaagctagcaagttgattcaggaagtgtactttgtcatgaggaaatacggattcgagcctaacacaacaaaggccagcgtcactcctcctggggggcgtaaagtggtccttggactgctggttgatggtgccagtcctcggctgaccagagactttagatccaaactgcggcagcatctttacttctgccgcaaagatgggtatggcccaataaaacacgcaaagcacaagaatttcgcttctatcctgggctttaagaaccaccttgctggactgatttcctacgctaagcagatcgacccagactttggcaagaagatgaacgatgagttcaacaaaatcgagtggccattttga

SEQ ID NO: 9012 - RNA, 1146 nt, synthetic construct
  source 1..1146: mol_type = other RNA
atgaaacagtggtccccccagcgataccgagcagaagctctcattcagggagtgaaaccggaaatcatagacagcgccatcctgcacaccaagaagatcattaatctgaatcctaaggtgattccgattctcactttacggcacctggctttcatggcaggtgtcgagtatagctttctgcggaaagtgatcaacagggaacattttcatccctatcgctttttcctcatacggaaacggcggtctatcagtaagaggaagatttttgtcccagaaccccagcttctaaaggtgcaaaagttcatacacgacaatgtgctgaagcacatcctgcctcacgatgcctcctttgcgtatactccttatagctctatttacgatgcggcccatgtgcatatcaattccaggtggcttattaagatcgacatcaccaatttcttcgagagtatttcagagattgatgcctaccatgtgtttaaatacaacggctactcaaacttgatttcctttgagctcgcccgtatctgcacctggcctatccccagatccaggaacgaacgcctgcacagactgcagaacaagtacctgaaagagtacaagttctatgatagaaaacagaaactcggatcaacacctcaaggcgcacctacgtccccatgtctttctaacctcgtgtgcaaaaatttagacgctgagattagcttcctgtgtgaaaagttgcaggttaggtatagtcgttactcggacgatattacaatctctagcaccaacaagtcattttctagacataacgcccagcacattatagactccatctacagaatcttaaacaagtacgggttcaaccccaacaagtataaaacaaagatcattccaccaggcgctaaaaagattgtactagggctgaatgtcgacaaagatagcgtgggcctggacaaggagttcaaatacaagataaaacagcacatccacttttgccttcacgaaaaggtcgggcccgtccaacatgcacgctttaaaggtttcagcagtgttatagggtttcgcaatcatttgtacggattgatagtttatgcccgatctatcgatgtaatcttcggcgagaagatgctgagcaaatataatgagatcaattggccattctga

SEQ ID NO: 9013 - RNA, 1146 nt, synthetic construct
  source 1..1146: mol_type = other RNA
atgaagcagtggtccccccagcgttacaggtccgaggctctgatccgcggtgtcgaaccagagatcgttaacaacgcgatcctgcacatcaaaaagatagtgaatctcaacgacaagctccttcccatattaacgctacgacacttcgcctttatggctggagtggaatactcctttcttcgcaaagtgattaatcgcgagcatttccacccatatcggttcttccttatcaagaagaagaagtctattagcaaacggaaaatctttgtgcctgaacctcaattgctaaaggcccagaaattcattcacgataacgtgctgaaaaacattagcccacatgaagccagcttcgcttacacacctcagtcgagtatatactacgccgctaatatgcacatcaattccagatggttgataaagatcgacattacctcattcttcgagagcatatctgagatcgacgtctaccatgtctttaaaagcaatggttacagcaacctggtgtcatttgagctgagtagagtttgtacctgggtgatccccagaagtcccaaggaacggctcccgaggttaaagaataagtatctcaaggagtacgatttctataaccgatcatccgagctgggctcaactccacaaggcgcccctacttcaccgtgcctttctaacctggtatgcaaacacttggattcggaaatttctctgctgtgcgagaaactgaaagtgcggtatagcagatactccgatgacatcacaattagtgcggtgaatattaacttttccaggacaaatgcactggatatcgttgactccatctacaggatcctgaggaagtatggcttcaacccaaacaaggttaagaccaagattatcccccctggggcaaaaaaaattgtactgggcctcaatgtggataaaaaccgtgtgaatttagacaaggcctttaagtataagctcaagcagcatgtccacttttgtctgcacgaaaaaatcgggcccgtcaagcatagtaaattcaaaggatttagcagcgtaataggctttagaaatcatctctacggattgatcatttatgctcggtctattgacgcaatgtttggggaggaaatgcagaagaaatatgagcgcatttcttggcctttctga

SEQ ID NO: 9014 - RNA, 927 nt, synthetic construct
  source 1..927: mol_type = other RNA
atgagaaagaaaaattccttggagaaaagacgaattttcatcccacacccacaactggtcaaggtccagaagtacattcatcagaacatcctgaaatttgttgaatgccatgagaatagcttcgcctatactcctggtattagcatcgtggatgccgcttccttgcacaccaactcaaagtggctaataaaactcgatatcacagcattctttgagagtatttccgaggtgtcggtttataaagtattcaggagtctggagttccccgctttgctttcctttgaactggcacggatttgtacctggaattcaccccgcaaccgtaacacaatccctcctaggttcaagatttccaaaaagacaaactacaccgtttactctagcactgaggggatagaactgggccacctgccacagggagcaccaactagcccctctcttagcaaccttgtgtgtcgggaactcgataaacaactcaccgccttctctgtgaaaaatgagctggaatactcaagatactcagatgacattaccttcagcagcaaaaacattaatttcagtcgcaaagatgcgatcgagataattaagatggtctacaagatcctcattaactatgggtttacacccaatattcagaagacgaaaataatcagtccgaaagctaagaaaatcgtgttaggcctaaatgtcgaccgggagaaggtaaagctggacaaaaagttcaagaacaagatcaaccagaacatctatttttgcctgcatcccgacattggcccggtgaggcaggccaaatataagaagttttcctctgtgttagggtttaagaatcaccttcacggtctgataatctatgccctgtctatcgacaaggaatttggagaaaaggctctcaacaattacaataagatcgtgtggcctatccattga

SEQ ID NO: 9015 - RNA, 1161 nt, synthetic construct
  source 1..1161: mol_type = other RNA
atgcgccagagatggagcccccagaggtttcaggcctctgccaaaaaccaagacatagaccagaacacaattgaacatgctatcaaacatgccaagaacattatacagcatgggaagtatatcctccccatcttcaccttaaggaatttaagcttcctggccggggtggaatacagcttcctcagagagatagtttcacgcgaatatattcacccctaccgatttttctacatcagaaaaaaaggccggaatcgtaggagaaaaatctgtatccccaatccacaactgtgtaaggtccagaggttcctccataaggaagtattgcaggaatttcaggttcacccagcttgctttgcctatatacgggatagctcaatcgttgacgctgcgtccgtgcacgtggaatcccggtggctactgaaacttgacatcgtcaacttttttgactctatcagcgaaattagtgtgtacagggcattccgagagaacgggtttcccgcgctgatatcctttgagatggctagaatttgcacttggctgagtctgcgcaacccacatgagatagatagccgctggaaaattgatcatcgacacaattacaagatctaccacagaagctccattagtgaaatgggctccctgcctcaaggtgccccttcatcacctatgctttctaacattgtgtgctttaagctggatgagacattggaggagctggcagtcgagaatggactccgctatacccgttattccgacgacctgacattctcgactaactcaattaacttcaatcggaagaacgcaacgttgttcatcagcaaggtgttcagcattctaaagtcttttggattcgagccgaacaaaaccaaaaccgagatcattcctccatcttcaaagaaagttgtgttggggctgaatgtcgataagaaatctgtgtctctggataagaacgtgaagtacaagatcaaacagcacatccacttttgtcttcacagtgacgtcggcccaatcaatcacgcaaagcggaagggcttctcgtccgtaattggtttcaggaatcatcttaaaggcctcatcaattatgccaagagtatcgagccggagtttggagaaaaaatgctgtccctctacaagaagattaaatggcctttagatatctga

SEQ ID NO: 9016 - RNA, 1185 nt, synthetic construct
  source 1..1185: mol_type = other RNA
atgaacaatatctggaggccccagttatatatatccgaggctagatcccaaggcatcccaacagatataataaacaatgcagttgcgattggcgacaggattactaacaagggcctaaatattcccatcattttcaatctggaacaccttgccaaactgtcaggggtcgattacgaccaggtttataaacttaccaagagagcgggcgaaaacagtagcggtaaagactactatcgcatttttgcaatacgcaagaaagacaccaagtcaaaacgttacatatgtgtgcctagcaaaaacctgttgcgggtccagaagtacattaatcaattcatccttcacaacctgaagtcacatccttcttccatggcctataataaggggtgtaagattgtcgacgtggccaatgtgcaccggcaggccaagtggcttctcaagatcgacatcgaagatttttttgagaatatctccgaagtagacatctacaagatcttcttcagttccggatacagtaaactgctgtcatttcagctcgcccgattgtgtacaaggattgttccttaccagaaggagcacgctgagaaatatagccactcccgctggagagcccacaagaactacaacaacaagaactacaatttccatgtgataggatctctcccccagggtgctccaacctctccgttgctcgcaaacctggtgctccgcgagttggacgagaaaatcactaaaattgctttatcgtacggggtgcggtatacccgttattctgatgatctgacattcagcagctgcgatatcaagtttggaaggaaaaactgctacagactgattcgagagatctatgatagcctgtattctaatggcttctcaccgaagaagaataaaactaaaatcatctccccaggaagcaggaaggtagtgctcggcctgattgtggatggaaataagcccaagttgacgaaagaatttaaagccaatatcctgcggcatctgcatttttgcaatctggaatctgtcgggcctgttcagcacgcaaaacaccaaaaattcgactcggtgatcggcttcaacaaccatctaaaggggcttgtctcttatagcctcagtattgaccccaagtttggtagcaaagtgaagtcattatacgagagtattaactggccttccctgccattcaactga

SEQ ID NO: 9017 - RNA, 1182 nt, synthetic construct
  source 1..1182: mol_type = other RNA
atgaataactggcggcctcaacaatacagaatagaagcccagaggaagggggtgccagagaatgtgattaacagtgccatcgccattggagacaagatcagttcgacaggactgaacatcccaatcattttcaatctcgagcacctgtcctatctgagcggcgtggactacaatcagctctacaagctcacaaaacgtgtcggagagcgcttttacgaaaaggaaaattaccggatcttcaccattaagaagaagaactcaaagtctaaacgctatatatgtgtgccaaatcacaaactgctgcgcgtacagaagtacattaacaagtttattctgcagcagatcaaaacacatcacgcaagtatggcttataatagtggctgccaaattgtcgatgttgctaagttacattgtaactcccgctggctgattaagatcgacatcaaggacttcttcgaggaaataagcgaggttaacgtctattccgtgttcaatgagtgcggttattctaacctcctttcctttcagctggcacgactgtgtacgcgtatcgtaccgtatcagaaggaggatgttcttaacaatatcaagagtcggtggaaatcaagcaaacagtacaggaacatcaactataaccatgacgttaccggatccttaccccaaggtgcgcccaccagccctatgcttgccaatctctttttccgagctctggatgagaaaattatgactatcgccaacaagtacaacctgatatatagcaggtacagcgatgatatcgccttatcatctagagacgacctattcggcaggagcaaatgccatcaggtcgtgaaagacgtgtataaggtgttgtactcctctggcctttcgccccagaaagggaaaaccaaaatcttgtcaccaggatctagaaaaattatattgggtttggtggtcaacggctcctcacccaaattgactaaggaatttaagaagaacctgctgcagcaccttcacttctgcaatctcaaaagcattgggcccgtgagacacgctaagtacaagaagtttgactccataatcgggtttcggaatcatctgcacggcctcatttcttatgcactgaatgtcgatccgaatttcgggaaaaaagtaaaacaacagtacgatcacatcgattggcctcctctaccctttgtgtga

SEQ ID NO: 9018 - RNA, 1173 nt, synthetic construct
  source 1..1173: mol_type = other RNA
atgtacaaaaattggaatccccaaagatacaggaagaacgctaatcgagataatatctcacatgacgtgatccggaacgccattgaaattggaaaccggattaacagtgtcaaccgcgatatccccatcgtgtttactttgaatcacctctctgtgctgagcaaaagcaaacttagcttcctcgaatctatcgcatccaggaattacgaggacaagccatatcgcttcttcaagataagaaaaaaagggaagaactcaaacgacaaacgacgtgttatttgtataccggagccaaggctactgtcagtacaacagtacatcaacgaggaaatactgtctaagatcccttcacacgaatgtgccatggcttattccaagggcaaaggtgtctatgatgcagccgagttgcactgcggatgtcggtggcttatcagaatcgacctgaaggacttttttgatagcatcagtgagcggcaggtgtactacgtttttaataagctcggttatcctaagctgttgagcctcgagctggccagaatttgcacccgcgtttacccaaggttcatttaccccagtgagaaaagcaagtggatatccaaccggtccaaagactctggcattgcctcctatacctgcagcggaaatatgcttggctcgctacctcagggcgcacctacaagtccggctctctccaatctggtgtgtaagtcgttagatggggacttgcttctcttttctgaacagcatggctttctgtataatcgatactccgacgacctgtatcttagtacgacctctgacctgtcaagaaaggacattcggtgcttcttactgtccgtttatggtttactcaacaagagggagttccaggtgaacaagaataagactgtaattagcggacctaagacaaaaaagctggtcctggggctgaatgtggataaggaatatcccaaagtcaggcgcgaggtgaaaaaccagattaagcagcatctccacttttgcctgagaaaggatatagggccagtcatccactcacagaaaaaaaagttcagcagtgtggtgggcttccgcaaccatctgttggggatgatcaattacgtaaaccaaattgaacccatgtacgcgatcaaattgcgtaaatctttcgatcgtatcgattggccatttatctga

SEQ ID NO: 9019 - RNA, 1146 nt, synthetic construct
  source 1..1146: mol_type = other RNA
atgaatcgttggtcgtccagagcctttaagaagcacaatagcgacaaacccgcggcagtagtcgaaacagcagctctgtatggaagaaaaatacaaacatcttgcccagaactccctgtcatcttcactctgaatcacctggccctgaagagcggggtaccatataacaacctgcgcagcttcgtcgacagaaccatcgagcgaccttacagaagtttcacgcttcgtaagaacggactgggctccaaccccaggaagtttcgagtgatcaaggtgccgcagcaagatttaaagaaggctcaacagtttatcaaccagaacatcctctctaaaatggagccgcatgagtgttctgtggcgttctccccaggaagcaagatctatgatgctgcaagcgaacattgcaacgctcggtggctccttaaattcgacatcgtgtctttcttcgaatccattaccgagaagagtgtgtatcgggtgtttaggagatataattaccctgctttactgtcctttgaaatggcaaggatttgtacagcgttgaaagcacggcctcccataaactgggggggtgcccctcccaacatacggtaccgcacgattcccgggtattcaaataaaaatttgggtaccttaccgcagggagcccccacttcccctatgctggccaaccttgtctcatacaacctggaccgtcggttgaagctgattgccgacgcttataactgtcattacagtagatacgcagatgacatcacattttctaccgatagttctctcagccgcggcgaggtgagcaggattatagccatgatcaattccacactacgagagtacggacatactatgaataaggccaagaccactattgccccaccaggcgccaggaaattctacctgggcatgaatattcacggcgactcgcctcagctacggaaaagttttaaaaggaagcttaaacagcacctcttcttctgcgaaaagaattcagttggcccagagaaacactcaaagcacctgggctttgtcagcgttattggtttcaagaatcatctgcgcgggctcatcaactacgctaaccaggtggataccgtttttggggagaattgcatgaaacgctttcagtcaatcgattggcccttgtga

SEQ ID NO: 9020 - RNA, 1158 nt, synthetic construct
  source 1..1158: mol_type = other RNA
atgaatagatggtccagccaactgtttcagaaagaagctcgccgtctgggtcggtcagaggatgtgattgacaactgcttaaatgctgccgccctcatccagcttaagaactcacaaatcacccccatctttagcctgagacacctttcatacatggccaaagctgattatgggttcttacgggccatagtgagcagggacgacagaattgatagttaccgaacgttccagatccgtaaaaggaagcgcaggaagaatgacaaagaaaggtaccgcaacatcaatgtgccatctcacgacctaaagaagactcagcaatggattaataagcatatcctctcacacgtatcgcctcatcagtgcagtatggccttctataaggatagttcaatcatagaggccgtaaatgcccacgtcggggccaagtgggttataaaagtggatgtcaagaacttcttcgagtctatcaacgagatatccgtgtacagagtgttccgggaattgggatttaatgctctgctctcctttgaactggcaaggatttgtaccaagaaacggacaatgctgccctcccggtcgaggaagtggattagcaccggcagacgagagacaatatccacatatgctcagccgatccaaggttttctgccccagggtgcgcctacctctccaatgttgtccaacttggcaagtcttcgcctcgatcaggagatctttaagttttgcgcccatgaaggattcatatatactagatacgctgatgacattgtgatttccgtgcacagggacgtgaagaaaagcgagtgtagcaacatcatcaacaaactgtaccgagttatggcatctaatggcttatctcctaataagaccaagacaattgtcctgcatcccggcgcgagaaaggtcatcctaggactcatgttgactgacaagggagtcatgctcacgaaagagttcaaaagccgcctgcgccagcacctgttttttcttaactccgagaacgtggggccagttgaacacgcccagcacaagggcttcgttagcattatcggcctccggaaccatattattgggctgctgtctttcgcaaaagcggtggacaaaaatttcgctagtaaatgtcaggcagactttgatcgtatcgtatggcctatttga

SEQ ID NO: 9021 - RNA, 1152 nt, synthetic construct
  source 1..1152: mol_type = other RNA
atgacactttgggattcacaggcttacattgttgaagcccgcgccactggtatcaacccaaatattgttaccgcggcgctcgggcatgctaatgccattagatccgtgtcgcgtgatctgccaatcatcttcactctgagtcacctcgcacaggcctgtggagtggcacactcttacctgatggacgtagctgatcgcaggatagacccgtaccgcgattacatcacaaagaagagagagaaaccccaccgcacagccttcagccggcgttacagaatcatatgcatgcctgaccctgagctgaagaaggttcagaggtgggtgcatcaaaacatcctttcaaaagttacgcctcatcgcgcctccaccgcctattccaactccaacactttgttagatgcagctgcgcggcacaccaatgctaggtggctcatcaagatcgacatcgaaagatttttcgagagcattaaggagccctatgtggccggcatatttgagcggctgggctatcccgaccttctgagcttccagcttgcgcgactctgtacacggctcccctctttaaaaagtcggaaggatattttctgccgccggtctaagccagtcaaaggcgtgatgcagaatgactggatcggcttccttccgcagggagcccctaccagccctcaactggccaacttggtgatgaggcggttcgacagaagaatgaccagcttgagcagaaccgaaggtctgagatattctcggtactctgacgatatgattttttccacactggggtcattcagtaggccacaggccactagttttgtgcatcaagtctatgatgtcttgggagcttatggcttcgaagcaaacaggacaaaaacctcaatcgctgcacctggcgccaggaaagtggtcttagggctcctggtcgatagggacgagccaaggctgactcgagagtttcgaagcaatatagagacgcacctacactacctggagcgcccaaacgtgggtcccgtagcccatgcaaaagctcgggaatttgactccattattgggctccagaatcacttgctggggctaattgcctttgcacgacagatcgacagaaagtacggagatgaactgcgcgctcgactgcaccgtataaattggcccgcatga

SEQ ID NO: 9022 - RNA, 1152 nt, synthetic construct
  source 1..1152: mol_type = other RNA
atgactctctgggactcccagattttcacagctggagctagagctgccaatgttgatccggcagtaatcagcgccgccgttggccatgcgaacgctatacgcagtgtgagtattgacctgcctatcgtgtttacacttgcgcaccttgcccacttgtccggcgtgtctcataggtacctcatcgaagtggctgggagagggtcagacccctatcgagactatattgcaaagaagcggcaggcacccggatcaactgctgcctcgagaagataccgcactatttgcatgcccgatccagagctaaaaaaggtgcagcggtggttgcaacagaatatgctctctaagatcgcacctcacgctgccagcaccgcgtactccgaggacgacactgttttcgcagcagcagccaggcatgtgaacgcgagatggctgattaaaatcgatatagagaggttcttcgagtccattaaagagccttacgtcgcatccgtctttgaacggttagggtatcccgatctgctctctttccagctgggtcgcctttgtaccaggcttcctacattaaaaagccgcaaggacatttttaaaagacggagtaagccggcccgtggcgtcatgcaacacgaatggatcggcttcttgccccaaggcgctccttcaagcccacagctggctaatctcgtcatgcgtaggtttgaccgtagggcaaccgccgctgctaagaaagccggtttgcgatactcacgctacagcgatgatatgatctttagtaccgcaggttctttctcccgggagagggcagagcacttcgtgcatgatatatacgacgtcctgggagcctatggctttgaggccaaccgaacgaaaacgagcatcgcggcccctggagccagaaagattgtgctcggcctgctggtggacagagataagccccggctgacaagagagtttcgggccgggatagaaacccacctgcattatctagagcgaccagacgtgggaccagttgggcacgccgaagttagggaatttgattctgtgatcggcctgcgcaaccacctggaaggtttagtagccttcgctcgccagatcgaccagccatatggagataggctcaaggctcgactgcgggccatcgtatggccagcctga

SEQ ID NO: 9023 - RNA, 1155 nt, synthetic construct
  source 1..1155: mol_type = other RNA
atgcagaattggaacagtcaacttttcagcaaaggggccgctgccgcaggagtaagccctagtataatcgcaagcgctaatgcctacgctagaagaattatttcctgtaatagcgacctgcctatcgtctttaccctgaaacatttcgcccacctgaccgaattaccatttgacaacctggtgaagatcgtagaacgaaaagaggatccttatcgatcttttctgatcaagaagagatcaaggcctggtgatagggccgtggctagaagatataggaccatctgtattccggatactactctgatgtttgcccagcgttggatcgaccagaagatcctgagcaaggttgacccgcataattgcagcactgccttccatggcaattcttccatcgttagggcagcacagcgccattgcggatgccggtggctgattaagattgatatccagcggttcttcgaatccataacggaatcgtctgtatgccgggtcttccagagtctgggctatccagacctcctgtcttttgaactcggccggctctgtacccgggagcctagtgtgctgtcccgccgatggaagtttagacgcacacgctcttaccccagcggggtccaccaacacccatcaattgggttcttgcctcagggttcccccacttctccccgactcgcgaacctaacaatgagggagttcgacgaaggcgtgaactcaatttcacgtagctatggcctggtgtattccaggtacgcagacgatctcatattttcaacggacgcggccaccttttccagagtggaggccgaggcgctgatctctcgtatctaccaggtgttacttgagtacggcttcgagcccaacagaacaaaaacaatgatcagtccaccccgggctaggaagatagtgttgggactacttgttgatcgcgacacacccaaactcactaggcaattcaagcaggatttggagaaccacgtgttttacttatcgcacccacggcatgggccaagccaacacgctaacaaacggaattttacctcagtcattggactccaaaattacgtgcagggattgcttgcccacgccgctcaggttgattccgctttcgccgaccgcatgcgcgcaatgctggctcaggtcaaatggcccatttga

SEQ ID NO: 9024 - RNA, 1134 nt, synthetic construct
  source 1..1134: mol_type = other RNA
atgaatcgctgggtgccgcatatatatcgacaaacaggacagcaaaaagatgtccccgacgcgatcatcaatgaggccctaagccaggctcaccgcgtgcagaataaagagctgcccgcaatcctcaccttacgccatttagcgttccagactgatgttagctacacgaatctgcacaaaattatctcacgagatgtcgatccttatagatcttttagcatcaagaaacggagcggcggttggagacggatcagtgtaccacagtttgaactccttaaggtgcagaagtatatagaccacttcgtattgtcaaggatagccgactccagttacagctatgcatttaaatctaagacctctatcgctgattgtgccaatcagcatttatcatgcagatggcttgtgaaaattgacctccgtcacttcttcgagtccttgagcgagatgcaggcttatagggtgtttaacgaggcaggctataataacctggtgtccttcgaactggctagactgtgcaccaaagtcctgccactgaccgccaagaagtactcgaaaccaaactggcggagcgtcgggcacatctccatgtacagcttttacgaggataaatataaccgcattggccatctaccgcagggggtgcctacatcccctcgattgtctaaccttattgttcgtggactggatagggaaatcgtggaagccaccgacgagtatgacctgacgtatactcggtatgccgacgatatgacattttcgactggctcctcatgtttctctaagaagaaggggagggacttcattaataagatttactcactgttgcccaagtacggcctcagacctcacccccaaaaggctcaaatcgttcctccaggcgctcggaagattgtcctggggcttctggtggacggagataaggtgaggctcacaaaacactttcgctctaaccttgaatgccatctgtactactgtgttaagaatcccattagtcacgcaactaaccgggggttcgcaagtgtcctcggactcaagaactacgttaatggtttgctggcctacgccaaccaggtggaccccgactacgtgaacaaaatctccagtgacgtaggtaaacctgattggccaatatga

SEQ ID NO: 9025 - RNA, 1119 nt, synthetic construct
  source 1..1119: mol_type = other RNA
atgaagcggtggtccccacacctgtacaagatctacggcaagaagaacaaaaaggatgacaaacttatcgagaatgctcttaatcaagcggacatattgcagaatcgcaacttaccagtggttctcaccctaggccacctggctaggcacacagatattccctaccagactctgcggaaactggtagcgaggcaagtcaatgcatataggatatttcgaattcggaagagatcctccggatatcgggtcatttgtgtgcctaacaaagacctgctaaaggtccagcggtggatcgacaaattcattctatctaacctggagtcatccccttattcttacgcatttgaagagggccagtcaattgttgattgcgcttctcagcatttgtcatgccgctggttgatcaaaatcgacctcaggaacttttttgaaagtcttagcgagatccaggtgtatcgagtgtttaaggttgcagggtataataatctggtcagttttgagatggctcgtctgtgcacgaaacagtcaaaaagcgggtggaagctctataacccctattggaagtcctacccgcgcgagaaaatccctttgtataatgccgatgtaatcggccatctgccacagggtgcccctacctcgccaaagctcagtaacctgatcatgaaaaacctcgacttcgaagtgaataacattgcacaaaaattctccttggtgtacactagatacgccgacgatatgatttttagtaccatagactctagcttcgactataagaaggccaagtgtttcatcaaggacatattcaacatccttcccaaacatggcttattaccgaatagacagaaaaccaagataatccctcccgggggaagaaagattgtgctgggtctgctcgtcgatagcgaaaaggtgcgtctgcccaaggatttccgcaacaaactcgaatgccactggtactactgtacaaaggacattacacagcacgccgaaaagagaggcttcaaaagctatctgagcatgcagtactacattaaagggctcatctcttttgccaggcaagtggatagcgatttcgttgagaaacttaagaagaagtacggagagatcaaatggctgtga

SEQ ID NO: 9026 - RNA, 1152 nt, synthetic construct
  source 1..1152: mol_type = other RNA
atgtcaatcggtccaccacacacttatgtgacagaaggcaggaagcggggagtgtcgaaccagattctgcgagattccctagagcaggcccggaaagtgcaggagaagggcctccccccggttctcacactgagacatctgtcctctctgacaaatgtcgagtacaaattattgcgcaaaatcgtagcacgccggcaggacgatgcatatagatcattccttatcaccaaacacagcggcggtaagcgcgtcatctgtgtgccccaccctagcctcaaaagagtgcagcgatggatcaatcagaagattctgatgaacgtgtccacgcattggaggtcatacgcttattccagaaattctagcatcgtcgactgcgcccagcaacactgcggatgcaactggctgattaagttggacattcgtcagttcttcgaatccattaccgaaatacaagtctaccaagtgtttcagaacttggggtaccagcctttagttagtttcgaactggcccgcatctgtactagaacttactctagttataacgagctggaattgaacaagaaatggctcagccagcccgaggcctatagcgtaattcccttttatcagtacaaataccttggtcatctccctcagggcgcacctacgagtcctatgttagcgaacctcgtctgcaagctgatggatgaggcgctgttcaatatcgctcacgatgagggtctggtgtacacacgctacgctgatgatatagtgctgagctctagtgacatacactttacccggaagaaggcccaatccgtaattagaaaggtgtcttcagtgttgactaagtatgagtttgaaccgcagcacaataaaacatccgtcgttccaccaggggccaggaaactggtcctgggcctcctagtgaacaattctactcccaggcttacccgaaccttcaagtgtaagctagaaaggcacatctgggccgttgggaagttcggacttgccaatcatgctcatcacatcggatttgacagcatatggggcttcgttcggcatctggaaggccttatttcatacgctatgatggtggagaggcgttttggggagagtatgcagatcgcatttcaaaaaaccctcgacgggaacggatggaataataactga

SEQ ID NO: 9027 - RNA, 1146 nt, synthetic construct
  source 1..1146: mol_type = other RNA
atgatgtggagttctcaacattacttggcccaggggcggcagctacaaataagtgaggccatactgcagacggcgatgaaacagtcacgtcggctcgttcagagaaggcctcagagtctgcccgtactgctgacactgggccacctggcaaagcgaaccggaattccgtactcttcccttagggcttatgtgggccggcaggcaattgagccttaccgccggttcagaatacgcaagcgcagtggggggatccgacgcatttgcgtgccagagcctgcgttatcggccatccagggctggatcgccgagaacatcttacagagggtggacgttcattccgctagccacgctttcaaaaaaggtgactctatcgctcggtgcgcagaggtgcatgcaggagccagatggctggtcaagatggatatcgccgatttctttggcagcatttcagagattgatgtctttcgagttttcaaatccctcgggtataactcattggtgtccttcgaactagccaggatctgtactgagttgcccctgaattccgccaaatatgccttttcaagctggcgcagaagccacgctcgaagaggaatccccgcttacaatcagcaatatgtcggacgccttccccaaggagccgctagctctccaatgctggcaaacctggcgatgattaacaccgatcagcgcctgacagaaatcgccaattcttttgggctcgaatacactcggtactccgacgacctgacctttagcactacaggcgactttgatcgcgcctccgcttacgccctcatagaacaagtggctaatgtgctcaagaggcggaatcttttccctaacaaggcaaagacaaaggtagtgcacccgggagcgcggagagttgttctgggcctcctagtagacggtgtcgcacctaggctgaccagagcgtttagggaccgactcagacagcacctttatttcctggagaaacgggggattgaagcccacgtgcaggctcgtgccttcgaatctgctggtggcctttacagacatttgaggggcctggtggattatgctaacagcattgactcggcatatgccgccccagtcctcgcacgtttggaagcattaccctggaggccagaggtgaagatctga

SEQ ID NO: 9028 - RNA, 1131 nt, synthetic construct
  source 1..1131: mol_type = other RNA
atgtggtcatcccaacactatttagctcaggggaaacaactgcaacataacaacgaagtgcttcaggaggccctgaagcagtcacgccgcctcgtacaacacaggccacagcccctgccggttatcttgactctgttccatttagccaagcggaccggagttccctactctgccctccacgcatacgtcggacgacaggcaatcgagccttaccggcgttttaggatcagaaagcggtccgggggaatccggcgcatttgcgtagcagagccccgattgggctctatacaagcctggattgccgagaatatactgcagagggcagaagttcacccagccagccacgctttcagaaagggcgactccatctccaggtgcgcggaagtacatgctggggccaggtggctagtcaaaatggacattgctgatttcttcggtagcatcagcgaaattgacgtgttccgagtgtttaaatcgctcgggtataatccactggtcagtttcgagcttgctcgaatttgtactgagttgcctgcaaagagcgcaaagtacctgctccctagctggcagctgcatcatacgcgtcggcagatacctggctatagtcagaagcacgtcggcagactcccgcagggtgcttctagttcgcccatgctggcgaacctatcaatgatcagaacagatcagacactctctgagattgctaactccttcggcctgaagtacacccggtactccgacgaccttaccttttctactgcaggtgatttcgataaagcctcagcctacgcccttatcgaacaggtcgccaatgtgctgaagagaaggaatctgtttcccaaccgcgcaaaaacaagtgtggtgcacccaggcgccaggagagttgtgctgggcttactcgtggatggagacgtcccccgcctgaccagaacatttcgcgatcgactccgccagcacctgtattatttggagaaacatgggattgtggcccatgtgcaggctcgggcttttgaatctgcaggaggtctgtatcgtcaccttcggggattgatcgactacgccaatagcgtggaccctgcttatgcggccccacttctcgccagactagaggcgctgccttggaggagctga

SEQ ID NO: 9029 - RNA, 1131 nt, synthetic construct
  source 1..1131: mol_type = other RNA
atgtggagttctcagccatatctggtgcgcgggcgcaaactgggtctgtctccggaactgttacaggaagcagtgaaacagagcaggagactggctcagaggcaccctcaacctctgccagttttgctgacactgtgccacttagcaaagaggaccggagtgccttatagctccctccgcgcctatgtaagccgtcaggccgttgagccctaccgccgttttagaatacggaaaagatccgggggcgtgaggagaatttgtgttccagaacccaccctgggcgcgatccaaacttggattgccgagcatattctgcagagagctcaggtgcacagagcctcccacgcctttaagaaaggcgactcaatagtgaggtgtgcagagcaacactcgggagcgcgctggcttgtgaagatggatatcgctgacttctttgggagcgtttccgaaatcgacgtgcatcgcgtcttcgtagggctggggtacaatcccctggtttcttttgagttggcccgaatctgcacagaactgccctcacggtctgataagtacgccctgagttcctggcaatgtcggtatgcccggcgcggcatccctgcatatggacagcaatacattggccgcctccctcagggtgctccctcaagtccgatgcttgccaatctgacaatggtcgccactgaccagaaactcgaggaaattgccctcaaggctggcctactctacacccggtattctgacgacttaacattcagtaccgccggggacttcgataaggggagggcatacggcctgatagaagaggtcgcggccgtgttgaaaagcagaggtctattcccaaaccgggccaagactgtgatcgtccacccaggcgctaggcgacttgtacttggactcctggtcgatggagacgcacccaggctgacccgagtgtttcgtgataggctcagacagcatctatactatcttgagaagctcggcatcgcagcgcatgtccaggctagagcattcgagagcgcaggcggattataccgacatctgcggggattgattgattacgctaactcagtggatcctacgtacgccggtcccttgcttgctcggttggaggccctcccatgggctcgatga

SEQ ID NO: 9030 - RNA, 1131 nt, synthetic construct
  source 1..1131: mol_type = other RNA
atgtggtcttctcagcactatctcgctcgcggtagagagatagggcggtcacctgagttgcttcaggaagctgttaagcaagcccgcagactcgtgcataggcacccacaagggatacccgtacttttaacactctgccacctcgcaaaaaggaccggcgtgccatactcaagtttgagatcctacgttggccgacaggctattgaaccttaccgcagatttcggataaggaagaggtccggaggggtcagaaggatctgtgtgccggaacccaacctgggcgctgttcaggcctggattgctgaacacatcttacagcgcgtcgatgtccaccaggcgagccatgcctttaagaagggcaattccatcgtacgatgcgctgagcaacatgtcggtgccaggtggctgctgaagatggacattgcggatttcttcggtagtgttagcgaaattgacgtgtatcgggtgtttgtggccctcggctacaattccctggtgtccttcgagcttgcccggatctgtaccgagcttccagccgcctctgccaaatatgccctgcgctcttggaattgccatcgatttagaagtgggattacgcattatcagcagaaatacgtcggcagactgccccaaggcgcaccaagctcgcccatgctggctaacctggccatgttgaaaacagaccagttgatagcagaactggcgtctaaagaggggctgatctatacccgctattcagacgacctcaccttcagcactagtggtgactttgatcgccggcgagcaaataagtttatcgaggaggtggctgctattctaaaggcacgtggactcttccccaaccgcgcaaaaacagtggtagtgcacccaggagccagaaaagtcgtgttagggcttctagtggatggagacgcgcctcggctcactaggcagttccgtgataagatccggcagcacctgtactacctggagaagaacggaatcaaggctcacgttgaagcccgtgcattcgagtcaatcggcggcatgtacaggtatctgcgaggactgattgattacgccaaaagcatcgacagcgcatacgcagccccgttgctgaggagactagaagccctgccttggcctcggtga

SEQ ID NO: 9031 - RNA, 1137 nt, synthetic construct
  source 1..1137: mol_type = other RNA
atgtggtcacccaggcattacttagaacaaggcagacttcaaaaacagccctcagccgtgctggcagtagcagttgagcagataaaacgcctgcaggctcacaatcctcccctcccgccaatactgaccttaaagcatttggctaaagttacgaaggtgaggaaagccaaacttgagtgcttcgttgagcggatcgcccccgaagtgagctacaaacgattcaacatcaagaagcggacgtcagggtacagaaaaatttcaatccctgagcctgacttaatgaaggtgcaggcatggatctctcaaaatatcctgcagctgccctccgtgcactctgctagcaaggcatttcggaagcacgattccatcttgaaatgtgctgaggtgcattgtggggccaagtggatgattaagattgatattgccgacttctttggcagtataactgaaatccaggcctatcgtgtctttaaggatctgggctacaacccattgattagctttcacatggcccgaatttgcacagacctgatcccaaagtctcagaagtataaaatgcaagcctggcaaatctttgagaacaaatactccataaccgaataccacaataagaacaactttggacgacttccgcagggcgctcccaccagtccacttctctccaacctcgtgatgttgcgcctagacaaaaccattgctgaactcgccgaaaaacaggggctgaggtacaccaggtatagtgatgacattactttcagtacaaagggcgattatagccgcaagcaggcggtcgagttcgtagcgtctgtgagcgcactgctcaaggcagacggactgtatctcaatcggaagaaaacagtcatcgtgccacctggaagccgcaagatagtcttgggtctgctcactgacagagaataccctaacctgaccaaggaattcaaagagaagctacgtcagcatctgtactacattaaaacactgggggttgaggcgcatatgcggaggagagagttcgattccgtcggtggactttatagacacatcctgggtctgatcaattacgctaatctagtggaccccacttatgcctataagatgaagcagcagttcaaatcgctcccatggcctggccagtga

SEQ ID NO: 9032 - RNA, 1152 nt, synthetic construct
  source 1..1152: mol_type = other RNA
atgccttggtccccccaacgctttctcgcagagggacttcgaagaggtagagatcacaaagccctgatggaggccattcgccagatttctcggatgcagcggcaaaggcccgtgcttccgacgctgctgaccttggggcatctcgcgtgcagaacgcagatcagttacgaatacctgcgcgacatcattgcccgtaatacaggtcatcctccctataggtccttcagaatcactaagcgcagcggaggtctgagggttatttccgtccctagccctcaactgatgaaagtgcagtcatggctaaccacgcacgtactgaacaaggtccagccgcatccaacctcctacgctttctctccaggcagctcaattgcagattgtgcccggcagcacgctggcgctacttggttggtgaaaattgacatagccgatttctttggcagcatcacagaaatccaggtgtttcgtgtattccagatgctggggtataacaagctagtcagctttgaactagccaggttatgcactatcctccccatagtttcagccaagcacaaattaaagccatggaagactaaattccccagaaaacccatcgattattactcggaacagctcatcgggaggttgccacagggggcacctaccagtcccatgctcgctaacttggcgatgagagacatcgacgaagagctgcagcatttggctgactctctcaagttagtgtacacacgatattccgatgacatcaccttcagcaccaagggcaaattcagtcggacagcggcatccgccgtgattaagcagactaccgctattctgaagcgcagaggactgtttccaaaccgtgcgaaaaccgctgttatacaccctggggcccgcaaaattgtgctggggcttctggtggaccaagagcaaccacgactgtcacgcaagtttcgggataggctgcggcagcacctctactaccttgagacaaggggtataactgcacacctggaggccagaggcttcgattctgctggcggcctctataggcatctgcggggattgatcgactatgccaatatggtcgaccagccgtacgcacagaagcaactgctccgattacaggcccttccttggggatctacacttaatgcaagtagctga

SEQ ID NO: 9033 - RNA, 1146 nt, synthetic construct
  source 1..1146: mol_type = other RNA
atgctctggtcgcctcaacgttttctcgaagaaggcttgttaagagatcgggactactacgcgctccaggaagcgatcaagcagataactcgtatgagaagacgcgggcctggattgccagtggtactcaccctaggccacctggcgaataggacacgagtgccacatgagcacctccgtgatctagtggctcggaataccggccagcctgcctatagaacatttaggatttccaagcggtctggaggatctcgggtgatctctgtgccaggcccgcagttgaagaaagtgcaaacatggcttacccaacacgtcctgagaaaagtaaagccccatatcgcaagtcacgccttcagccccggtagcagtatcgctgattgtgcaagacaacacgccggcgctcgctggctcgttaaggtcgatatcgcggactttttcggtagcgtcaccgagattcaggtattccacgtgttcaggaggttaggatatagcgacctggtttccttcgagctggcccgactatgcaccacggtgccatttgccagcgctaaacacagcatgaaggcttggcaggtccgcttccctcgaagacgaatccacttctatagtgagaagctgatggggcggcttcctcagggagctcctacgtcacccatgcttgcaaacctggttatgagggaggccgacgaagagttgcagaacctcgccgactcttacggcctggtatacactcgatattctgacgacattaccttttccactcgcggcgaattttcaagggatcaggcagtcacagtggttaggcagtcagcaactatactgaaacggcggggtctgttccccaaccgcgccaaaactgccattgtgcatcccggagcccgccgtattgtcctggggttgcttgttgactccgatcaacccagactgagcagggcattccgcgataggcttcgccaacatctgtactatctggagacacggggcataatggcccatgtggaggctagggaatttgatagtgctggggggttatacagacatctccgggggcttatcgactatgccaatatggtggaccagccatacgcacagcagcagctgtccagactgctggccctgccgtggtcctcagtcgctcaggtgtga

SEQ ID NO: 9034 - RNA, 1185 nt, synthetic construct
  source 1..1185: mol_type = other RNA
atgtggagctctcagcgatttatcaggcaaggcctggccagagggattagccagcagattctggatgctgcagtagagcaggttgaggctctcgccaagggacccatccgcctaccagcaattctcaccctgggtcacctggcccagagaacggatgtctcatatatcagtttgcggaggctggttgccgacgagtaccgacacccttacaggacctttaccattctgaagagaaaagctaacaagagtggctatcgcgggaggcgcgagatttctgtcccaactccagagttgctgaccgtccaacgctggctgtcagctcacgttctccggcaagtacggcctcaccctgcctcccatgcgttttctcctggaggtagcatagtgaaatgcgcctcagagcattgcaatgccaaatggctgatcaagctggacatcgctgatttcttcggcagcatatctgagatccagatttatcacgctttccgaaaattgggctaccagcccctgatttcgttcgagctcgcacgtttgtgtacagataggcctcgcaaaaatgttcccccagcctttgtaagaggaagaaatcggatgccgtccgggaaggtcaggtttaaggctcgtgtgatcgaccaatatgaccacaggtatataggctacctaccccagggtgcacccacatcccctatgctcgccaacttggtcatgcgagacatcgacgtgcagcttgctgccatcgcgagcagatacgaactgcggtacacacggtatagtgacgatattaatttcagcaccactgaaaacttctcacgcgacaaagcccatgaactcatccagcgagtggctaaatgcctgattaagaaggggcttggtctgaacaagtccaagacaacgatcgcaccacccggggccaagaagctagtgttaggactgcttgtggatactgcaaagccaagactctgtcatcagttcaaagacaggttaaggcagcatatctactacattgaacggtttggcatagaagcgcacgcacaacggcgtgccttcgatactaccgccggatttatccgccacataaaaggccttctcgattttgcctacatggtggaaccggcttatgcgctggacttaacagagagacttcaggtggcagtgttcagttgggacgattccttcgtgatctga

SEQ ID NO: 9035 - RNA, 1134 nt, synthetic construct
  source 1..1134: mol_type = other RNA
atggacgaacctaccatccgagctgttattgcccaggtgaaagccaccgtggcacctccgttgcgactgccagctattctgacactgggccacttggcccaaagaagcggcgtctcctacgatgcactccggagactggtggcgggaactcagcatcactcttacaggcagttcaagattaggaagaagtctgaacaggcccggaaaaggcgatcctttcgcattatccacataccatgccccccactctttgaagtccagcgatggatatccacctacgtactgagagagttacccgtacatccttctagtcacgcctttagcccaggaagctccatcgtgaaatgtgcagagatccactgtaaggcacgctggctggtgaaactggacgtgcacgacttcttctcgagcgtgagcgagattcaggtttacagggtttttaggagccttaattatggggctcttatctctttcgagatggcccgtttgtgtacctatcggcctaaccgcgagacattcaagctggcactccctggaagattcagagtcccgtcaggtattgtcaggcacccaggccggggcatcaagtcctactcacacaaatacgtgggctatctgccccaaggtgcccccacgtccccaatgctcgctaatttagcaatgaaggacatagatgtggctatttctaagatcgccagcgatcacggattgcgctacactcgctactcagatgatctgactttttcaaccgagggggatttttctagagggaaggccctgaacgtaatccaagaagtggcgaagaaacttatcgttcatggcttaatgcttaataatcccaagacaacagtcgcgcctcctagtgctcggaagatagtactgggtctacttgtggacggagccgatccccgtctcatgaagagtttcaaagacaaagtccgccagcatctgtatttctgcgggaaatatggggttgaggagcatgctgcccgtaggaaatttgacagtgtcggcggcttcgtgagacatctgcggggactcatcgactttggtaacatggtggaaccctgctgggcagctgatatgtatgaccagatgtcgaaggtgctcgggtccaacaaattcgacctatga

SEQ ID NO: 9036 - RNA, 1191 nt, synthetic construct
  source 1..1191: mol_type = other RNA
atgtggtcctcccagcactacaggatgaatgccaaagagcatggcctctctaaggagacaatcgacgccgcaattgcccagaccatcgccgtcgtcgaaggccctcataagctcccagccatactgaccctgggacatctggctctccgtactggtgtagactatgtggcattgcgtggcctgctgacaggaagctgttgccatcaataccggcatttcaagattagaaaacgcgtaaatggccccgagaagacgattagatatcgcaaaatcagcgtgccaaccccagatttatacagagtgcaacggtggatcgctgtccacgtgttacggtccgtgcctgtgcatggggcaagtcacgccttctctcccgggaatagtatcgtcaaatgtgcggagaagcactgtggagccaaatggatggtgaagctggacatcttggacttcttcggcagcatcagcgaaatgcaggcctacagggtgttccacagtctgggatatcaacccctggtatcttttgagatggctagattatgcacttacaggcccaagcacgacgtgcctccgaattttgtgctgccacggtatcagattccttccggccgcgtgaaaaagcgcaacagagttatcgaatcgtacaaccacccatacatggggattctaccgcagggtgcaccaacatctcccatgcttgctaatctcgccatgcgagatatcgatgaaaaaatcctgtccattgccaacaggttcggtctgcagtataccagatatagtgacgaccttaccttttcaacacgaaacgatttcgacagacagcaggcttctctcttgattcaggagattgctaacctactgataaagcgtggccttatgctgaataggcagaaaactgccattataccccctggagcgaggaagatcgtgctcgggctgctggttgatggggatcttccccggttgtcacgaccctttaaggatcgcatacggcaacacctttactatttggagaaattcggacctgaccagcacgttagcaagcgatgctttgatagcgttgggggtttctttcgccatctaaagggcctcatcgactttgctaacatgattgaaccacagtacgcgcgggagtcatacgtcaggctctgcgcagttgtctcagatgcacaaatcgaatcccctcagaaccagtga

SEQ ID NO: 9037 - RNA, 1146 nt, synthetic construct
  source 1..1146: mol_type = other RNA
atgtggtcccctcagcattacagagagcgcggtaggcagctgggagcagatgatgacgtgattgaaagagccgctgccgccattgaatctttcattgacaagcacccaaaccgcccccctctgctcaccatcggacatttggcccgcaggtcaggcgtgagctggttccatctgcgtcaattcgtggaaggcagtaggagtgggatttacaggtacttccggattcgcaaacggagtgggggccaccgtcagatcagcgtcccagatcccaaacttatgatagtgcagcgatggatagcccggcatatactggcagcaatccccgttcaccgcgctagcttcgctttcgctcctcagtcatctatcgtaggttgcgcgagacagcattgccgggctaggtggctgatcaaactggacatttctggattttttggctccatctcagagatccaagtctacagggtgtttctgggggctggttatgcacccctggtagccttcgagcttgctaggctgtgtacccacgcgccatccggaagcaagcgatatgcaaaaaggacatggacagccgcactgaccgaacgtgcgattagaccctacacacagccccacattgggtatctgccgcaaggcgcccctactagtccaatgctctccaacttggtgatgcgcgagacagacaaacttgtcgcggctgtggctaccaaggccggagtgacatatacccgatacagcgatgatatgactttctcgaccatcggaagctttgatcgggaacgggccttggccgtcatacgggaagtcaccgccattctgagacgagctggcctctctgtgaatgagaagaagacgaagatcgtcccccctggcgcacgaaagcttgttttgggcctcttagttgacggggccgagccgagattaactcgcacgtttcgggacagactcaggcaacatctccactatttacagaaactaggacctgaggcccacagggcagctagagggttcgacactgtatcagggactcaccgccacgtgagaggcctgatcgactttgcgcagtctgtggacccagccctagccgagaagatgcgtgagaagtttgatgccgttgcatggtccctcgatcggccaggtgcagaatga

SEQ ID NO: 9038 - RNA, 1146 nt, synthetic construct
  source 1..1146: mol_type = other RNA
atgtggtccccacaacattttcgggaaactggtcgacagcttggggccgatcatgacctcaccgagcgggcagccaccgctatcgagacatttaccgatcgtcacccaaccctaccccccatcctgacacttggccacctggcccatcgtactggcgtgtcctggttccagctccggttgattgtggagtcggggaggtggacaaactataccttcttccgaatcaggaagcgtagcggcggacataggcaaatcagcgttcccgacacaaagctgatgattgtgcagagatggatcgccggtcacatcctggcagccttacccgtgcacagagcctctttcgcatttgctcctaaatcctccattgtgggatgtgctgcacagcacactggtgctcggtggctgataaaattggacatcgctgggtttttcggcgcagtatctgagatccaggtttacagggtttttcttgatgctggctatgctccactggttgcctttgagctcgcgaggctatgcacacatgccccgagcggctcaaaacgctatggccgccaggagtggttagcccatgccacccaccgccctatatatgcataccgccacccccatattggatatttgcctcaaggggcccctacaagtcccatgttaagtaatctcgtgatgaggggtcctgaccgcaagatcgcaactctggctaccaaagccggactgacctacacccggtacagtgatgacataactttcagcactacaggggtgtttgatagagcgaaagcaatggccgtggtgagagagactactgccattctgagagctacgggactcgaagtgaacggacgcaagacccgcattgtcccacctggagccaggaaggtggttctggggcttctggtcgacggcaaggtcccacagctgacgcgagagttccgggatagagtccgacagcatctccactacctggaaaccagaggtccagaagctcacagggctgcgcggaacttcgacacggtagcagggctttacaggcacgtacggggcctgattgatttcgcgaattctgtcgacgcagtctttgccgatcgaatgttgacaaagttcgacgccgtgagatggtcactcgactcaccggaagatacatga

SEQ ID NO: 9039 - RNA, 1155 nt, synthetic construct
  source 1..1155: mol_type = other RNA
atgtggtccccgcaacattaccacgaagcagggcagcagctcggccttgacgacgctatggtgcagagagccgctactgctatcgaggactttctagaccggcatcctaagttaccccccatcctcaccctgaaacatctcgcatctagaaccggtatctcttggtaccatctccggaagatggtgcttggcagccgggcaagtgattacaccttcttcaagatccgcaagcgatcgggtggacaccgtcagatttccgtgcccgatgcgaaactgatggccgttcaacggtggattgccgcgcacattctgagtgaactcccagtccaccgggcaagctttgcttttgcaccaaagtcttccataaggagatgtgccttacagcattgcggagctcgatggttgatcaaaatggacatttctgggttctttgggtctatctccgagcttaaggtgtatcgggtattcctggaggcaggctatagcccgctggttgccctggagctgactaggctctgcacacacgcccctagcggatcaaaacggtatgaccgccccgaatggttggcccacgcgacaaggcgaaagattcctgcctatcgccagtttcacatcggttatttgcctcaaggcgctccaacttccccaatgttgagcaacctggttatgagagagctggataaagaaattgcagctttagctgctagggccggcgtcacttacaccagatacagcgatgatatcacgtttagtacaaacggggattttgaccgcgccagagccatgctgctcgttcgacaggtgacagccaggctccgccgagtaggcctttccgtcaatggaaggaagacgtgtatcgtgccccccggagcccgtaaagtagtgctgggacttctggtggatggcgccgaacctaggctgacccgggagttccgcgaccacctacgtcagcatttgtactacttagagaaagtcggtccggaggcacaccgcgatgctagaaagttcgacaccgtctcaggcatgcacaggcatattagggggctgatagactatgcgaagtcaatagatgaggggttcgccgctaaaatgagactgaagttcgacagcgtgccatggagtcctgatgtggcaccaccctcagaagacgcctga

SEQ ID NO: 9040 - RNA, 1146 nt, synthetic construct
  source 1..1146: mol_type = other RNA
atgtggtcgccccagcactacagggagataggcgagaaaagcggagccgaccccgtggtgactgacagagcagtcgcggccatcgacgcgtttatggagaagcagcctaagctgcccgctctgctgacattaggccacttggcccaacgtacaggcgtgagttggttccacctgcgccagtatgttgaaggacagagatccaccgaatacacctacttccacatacgaaaaaggagtggtggacacagacttatttccgtcccaggtcagcaactgatgatggtgcagcgctggatcgcagcacatattctcgccgagctgccagtgcatcgagcaagcttcgctttcgctcctaagtcttcaatcgtcaggtgtgccaagcagcattgcggggctagatggctgatcaagatggatatatccgggtttttcggctcaatcagcgagattcaggtctatcgggtgtttctccaggctgggtatgctcccctggtggccttcgaactcgcaaggctgtgcacccatgcccccaatggatcaaagaggtacgctcgggcagagtggttggcgcctactacctggcacccgattgttgcctataggcagccaatcctaggctatctccctcaaggagcgcctacctctccaatgcttagtaacctcgtaatgcgagatattgataagcagatcgctgcactcgccaacgctattgggttgacgtacacacggtactctgacgacattacatttagcactatgggtgaattcaacagagagagagccattcgggtggtaaggaagactacagccattttgcgacggataggactgaaagtaaacgacaataagaccagaatcatccccccgggtgcccgcaaacttgttctaggcctgttagtggatggcatcaaacccaaactgacgcggggctttcgtgatgggctgcgccaacacttatattaccttgaaaagcttggcccagaggctcacaggaaagcccgtaattttgacactgttaccgggctgtaccgccatgtccgggggatgatcgactatgccaaatctgtggacgagccattctttgatgaaatgcgcacaaagttcgaagccgtggcatggagcctcgattcccctgcagacgattga

SEQ ID NO: 9041 - RNA, 1149 nt, synthetic construct
  source 1..1149: mol_type = other RNA
atgtggagcccccagcattaccgcgacaagggcattgagcaaggtcacgaagcagaactggtcagcagggccgcagccgctatagactccttcgtcgacgctcacccacagctgcccccgatcttgaccttgggccatctggcgagacggagcgatattagttattttcagttgcggcgactggccgaaggccctcgatggaatcactacacttttttccggatcagaaagcgctccgggggaagaaggctgatatctgttccagagcaccggctgatgattgtccaaaggtggatcgccgagcatgtgttgaagaaactgccagtgcatagggccagctcagccttcgcggatggtgcctctattgtgaaatgcgctaaacagcattgccgcgctagatggttaatcaagctagatatctctggctttttcggaagtatctccgagattcagatatatcgggtattcctcgccgccggatatgctccccttgtcgcgtttgagctggctcgtctgtgtacgcacgccccttccggttcagctcgatatgacagggcccagtggcgctctagagataactggcagctccccattatgcggtacagacagccacacattgggttcctcccgcaaggggcacctaccagcccaatgctaagtaacctcgttatggtgggaatggacaagctgcttgcagcactcgcaactgccgaaggattgacctacacaaggtactcagacgacatcactttttctaccacaggagcctacgaccgccagagagcgacagaagtgatcagaagtaccagcaggctcttacggaccatcggcctcaaagtcaatgatcaaaagacaagagttgtgccccctggcgctcggaaaattgtgcttgggctgctggtagataatcccgagcctcgactgtccagagactttcgcgaccgactgcgccagcacttacactatatagagaaattcggcccagaagcacatcgtgccgctcgtgggtttgatacggtgtcagggctttataggcacgtgcggggcctggttgatttcgcaaagtccgtggaccgcaactacgcctcggcaatgagggatcgtcttgatgctatcgcctggagccccgacttccctgtagagacttga

SEQ ID NO: 9042 - RNA, 1140 nt, synthetic construct
  source 1..1140: mol_type = other RNA
atgtggagccctcagcgataccgggagttggggctggaaaaaggcgtagatcccgaagttgtggatcgatccgctgaggctataagtgactttctggactcctatgctacgctgccacctatcttgactcttggacacctcgctgcaagaaccggaattccttactacaagctccgcaaaatagtggtaggacagcggacattagaataccagtacttctggattagaaagaggagtggtgggaggagacttatctccgtgcccgagcctgacttgatgcacattcaacgctggatcgccggccaccttttagcccggcaacccgtgcatcgtgcatccgcagccttccgcccaaaggcgagtattagcaaatgtgcccggcagcactgtgaggccaggtggttgatcaagctcgatatctctggctttttcggctcaatttccgagatccaggtctacagagtcttccgaaggatggggtacgcgcccctagtcgcgttcgagctggctagactctgcactcatgcacccgcaaactcaaaacgttatcagcaagacagcaagtggctggttcggaagtgcgagtctaggaaattctacacccagtggggaataggctatctgccccagggtgccccgagttctccaatgctgtcaaaccttatcatggtggaggctgataagaagatcgcaaagctcgccacaaaccagggactgacatatacaaggtatagcgacgacattacttttagcaccaccagggggtatgatagggaacgcgccaaaaaaatcgtccgggacacaaccgcgattctgcggcgaatgggcctggcagtcaatgataaaaagacgagaattataccaccgggtggccgcaagattgtgctgggactacttgtggatgggtcgcatcctaaattaactcgtgatttcagagacaggctgcgccagcacctgtattacctgcaaaagtttggcccagaagctcaccagctcgaaagaggcttcgacaccgtttctgggctctatcgacatgtgcggggtctgatcgattttgctaagagcatcgacgccaattacgccgcccgcgtgcagaagaaatttgaggccatcaaatggtctttggatttttcagactga

SEQ ID NO: 9043 - RNA, 1131 nt, synthetic construct
  source 1..1131: mol_type = other RNA
atgtggtcccctcagcgctacatcgaacacggcctgaccgagggctatgacgcagaactggttagaagcgcggccggtcagatagacgattttttggaaaagcaccccgatctaccaccgatcttaactctcggccacttaggaaaacggacctccctcccatatgcccggttgcgtaagctggtgtcaggactgcgatctaatgattacagctactttagaatcaggaagcggagtgggggtcaccgccagatttctgtccctgaagccgacttgatgtggctgcaaaggtgggtgtcagctcatatactttccaagctgaaacctcatagagcaagctatgcattcgctcccaaggccagtatcgtctcatgtgcgaaagcccactgcgaggccaggtggttaattaagcttgatatttctgggttcttcggctctgtgtcagagattcaagtgtacagagtctttctggccgctggatacgcccctatggtggcttttcagttggctcggctgactacccacgcaccttatttcagtatgaggtacaaacgtcccgagtggcgcgcagttccggatagggctcggttaccctacttgtttagaacacgtctgttgggatttctaccacaaggagccccttcctctccaatgctctccaacctcgtgatgaggcagatcgatgccaaactgcacgccatcgcgctgagtgctggactgacatatactaggtattccgacgatattaccttcagcacaagagggggtttcgacagagaacgcgcacgagcagttgtgagcaagacgcggcgcattctagccaaggaggggttcaccctgaacagcaaaaagacgaggatagtgcccccaggcgggcggaaactcgtacttggcctgctcgtcgatggcagtgagccaaaccttacccgcgccttcaaggactccctgagacagcatctccattacgtctgcacttttggccccgacgcgcatgccaaacgacgaggtttcgacacagtttcgagcctttaccgccacctgcttgggctcatcaattatgcaaaaagcgtggacgaggactacgctctgcgggctaggacaaagctcaattctgtacagtggtcactgtga

SEQ ID NO: 9044 - RNA, 1032 nt, synthetic construct
  source 1..1032: mol_type = other RNA
atgaggctcgccagcgccctgccgctttttacctacggagaggtgaaggtgactatgagctggtcctcacagcattatatcacaaagggcctggcctctggcagagatagggagttgctggagactgcagcgaaagaaatagagcgggcagtctactcgaacccgactccactcccagccgtcataacacttaatcacttggctaggcgctgcggtgtgtcatataactctcttagagccatcgtcgcacgcaatggcaaacagtacagctacttccgaatacgcaaaaggtctggaggacatagactgataagcgtgcccgaggctgaattgttgcgggtgcagaaatggatccacacatacatcctgagccaggcaaaagcccacgaggcgtgtttttccttcctgcgtaagaagagtatccgggattgcgccgctgttcacagaggggctacgtgggtcatcaagattgacatttctgccttcttcggcagtatcagtgaacgagatgcctttgatattttcaagggttttgggtacaatccccttgtggcttttgagatggcacgcattgtaaccgacgccccactatatagtaagagataccaagccgtgccctggaaacgcgatcctggggagtatgaaattgcacaatatcggtccgctaaggtcgggtatctgccccagggagcacctactagccccctgctctcaaatctgttcatgatcaacatcgaccagcaactgcaggccctcgcagagcacaggaaactcagatactccagatattctgacgatatgacgttttccacccggggtgacttctcccgggaacgagctaaagaactaattcatgctgtggcggccatcattagggttaagggcttacgtattaacaccgctaagacaagaatcattccacctgacgggcgcaaggttgtgctgggattactcgtagacggcaccgcgcctcgtctgtcacgaaagctgcgggacaacttaaggatgcatatcttccacatgaggaaatga

SEQ ID NO: 9045 - RNA, 1140 nt, synthetic construct
  source 1..1140: mol_type = other RNA
atggcctggagctcccagagatacatatcagccgggctaaagttggggttttcccctgacgtactcaacatcgcttctgagcaacttgaacaacacatcactggactgcctcccttcccagcgttgctcactctcaaccatctggctaagcggaccaacgtgccttacttggagctacggcctctggtcaggggccaaaagccagacgcctaccaccacttctatatccggaagaaatccggaggacaccgccgcatttccgtcccagaacccacactgatgcggatacagcagtggatcgcgacacacattcttaatattgcccctgttcatcaggccagttatgcttttagccccggaagcagcatctacaagtgcgcatatcagcatcggaaagcaagatggctcatcaaaatggatgtcactgggttctttggtagtatctctgaaatccaggtgtatcgagtgttccgcagtttcgggtaccagcctctcatcgcatttgagcttgctcgactcacaacatatgctcccatctcctcaccaaggtaccttctgaaggaatggcaggccaggactcactctagcccaatagatgactatcatcgggccaatattggctatctgccgcaaggtgctccgacctcgcccatgttatcaaatttagttatgcgctcagtggacgagcgtattgccaagattgccgagaagtacgggttgcgatacaccaggtacagtgatgatataaccttcagcacgactgcagagttcgacagaaagagggctagagatgtgattcgcagcgtgacgaaaatgctgacccgagtaggcctgcacgtcaacgcgggcaaaacagtggttgtgcccccaggaggcagaaaggtcgttcttggattactggtggacggtcccgaaccaaaactgtctcgtgatttccggtccaatctgcgccagcacatctttttcctcgagtcgttggggccgatggagcatgcaaaagcccgtggctttgaaaccatctctggcatgtataggcatattagaggcctgattgactttgccaatatggtggatgcagactacgccgcagagctgctgtctaggttccagagagtaaactggccttttgctataccctga

SEQ ID NO: 9046 - RNA, 1152 nt, synthetic construct
  source 1..1152: mol_type = other RNA
atgtggtcatctcatatttataaaaagcaggggctaaccaaaggaatctctccatacctgttgacggaggctattacccagattgagttactggtttacagccagaataacctcccttctatcctttctctctcccatctggctaagagaacaggcgttgaatataagctgctccggtgctacgtgatgcggacaggggccacttccgtggagccttttgaaatctacaagaagttcagcatccgtaaaaggagcggcaataggcgctttattcacatccctacaccaaagctaatgcggactcagcgatggatttctgagcatatactggctaagctccctgtacacgccgccagccaagcctttaacaaaggtaactccatcaaaaaatgcgcatcgcgccactgcggagcgaaatggctaatcaagatcgacatagaggatttcttcagtagcatttccgagattcaggtgtatcgattcttcagatcactgaattatcaacctcttgtggcatttgaattggctcgcctctgtacagttggcacccacaacaagtccccccgcggagtctttagcaattggaaaatcattaaccccaacaatgccatcccttcctacaaccaaaaactgctcgggtatttgccacagggagcgcccacatcgccacttctggctaatctgataatgaatgactgtgacaaagctctgcaaacaatcgcgagaaagaacgatttgatctacacgaggtattcagatgacctgaccttcagcactaccgacaaaaaatttgataggagtaaggctaagaccttcatcttcgacgcatacaagattctgagtaagcacggtttcagaccccagtttcggaagaccactatagtcccacccgggtctaagaaaatcgtgttaggcctgaacgtcgacagtgaacagccgcggctggccaaacacactcgtgattccataagacagcacctttactacttagaaaaaatggatccagtgcagcatgcatttaatcgacagtttgattcagtatggggtcttaagatgcatctcaggggcctgattgactatgccaatatggtcgagcccgacttcgccaaggcatgtttggccaagttcaacgccattgagtggccggtgtga

SEQ ID NO: 9047 - RNA, 1152 nt, synthetic construct
  source 1..1152: mol_type = other RNA
atgtggagttcgcagtcatataagaagcagggcttggccaacggtctgtccgtgccactgcttaatgaggccatagcacagtcagagcttctgctctactctgaatacactttgccctctatccttagcctgaagcatctggctaaacgcacgagtgttgagtacgagtggctacgatcctttgtcatccgtacagctataaatggtgtcgagaacttcgagatctacaaaaagttctccatcaggaaacgcagtggcgggcggaggttcattcacgtgcccagccccaagctgatgcacacgcaaagatggatctctgaacacatcctgaaggcactacccgtgcatccagcttcccacgctttccggaaagggaattcaattaaaaaatgtgctctcaggcattgtggagccaaatggttaatcaagattgacatcgcagacttcttctcgtcagtgtccgaaattcaggtgtatcggatctttcgttcactgaattatcaacctctcgtcgcctttgaactcacacgactgtgcacagtcggcacccctggtttgtccccacgagctaatttcccgcactggaagaccaaggaatttaacgaagcaataccactctaccaccagacaatgctcgggtacctgccccaaggagcacctacctctccatttttagccaatctggttatgaagaactgcgataagtctctcaacgcactggcccagaaaaacgggctcgtgtatactcggtatagtgacgatctgagctttagtaccagagacaaagatttcggcaggagcagagcgaaacactttgttttcgaggcctacaaaattatctctcaaagcggcttccgcccccagttcagaaagactaccattgtgcctcccgggggaaagaagataatccttggactaaatgttgaatccgagtttcctcgcttagctaagagcaccagagatactattcggcagcacctgtacttcttggagaaagtcggacctgtgcagcatgcctttaaccgcaagtttgacagcgtatggggccttaagtcccatgtgaggggcttgatcgattatgcgaacatgattgaaccggacttcgccgaggtgagcctggagaaatttcaggccattgagtggccagtatga

SEQ ID NO: 9048 - RNA, 1152 nt, synthetic construct
  source 1..1152: mol_type = other RNA
atgtggtcttcacagacctataaacagcagggattggccaaggggttgtctgaatcgctactgactcaggccatctcccagagcgagctgttaatctacagcgagtacaatactccgagtatcctctctctgaaccacctggcaaagcggacaggtatagagtatgagtggctgcgctcttttgtcatgcgtaaggcaattaagggagtggaaaacttcgagttctacaacaagttctccatcagaaaaagatcaggcgggcggcggtttattcacgtgcctacaccaaagcttatgcgaacacagaggtggattaatgaacatatccttgcgaaactgcctgttcaccctgcctcccaggccttcaggaaggggaactcaataaaaaagtgcgccctgaggcattgtggcgctaagtggattatcaagattgacatcgcggatttctttagcagcgtctccgagatccaggtgtatcgaatttttcgcactctcggataccagcccttggtggcattcgaactggccagactctgcacgatcgatacgtattgcgaatctcccaggagaatctttccccagtggagaagcaagaaatccaacaaggctatacctagttacgatcaggagctccttggttatcttccacaaggggcgcctacatcccctaccttggccaatctgataatgaaggattgtgacaccgccctgcagacacttgctcgcaataatggattaatttatacccggtacagtgacgatctcgtgttttctaccaaggacaagaactttggccggtaccgcgctaaacaattcattttcgagtcctacaagattatcagcaaggcaggcttccgcccccaattaaggaaaactactattgtgccccccggcagcaaaaagatagtcctgggattgaatgttgagtcggaagtgccgagactaatgaaatgtaccagggataaaattcggcaacatctgtttttcctggaaaaagtaggtccagtacaacacgcttttaatcgacagtttgacagtgtgtgggggctcaaaatgtacgtccgtggcctgatcgactatgccaacatgatcgagccagaattctcaaaagcttgcctcgagaaattcaacgcaatcgagtggccagtttga

SEQ ID NO: 9049 - RNA, 1362 nt, synthetic construct
  source 1..1362: mol_type = other RNA
atgacttccgcgagtgaaaggttcaagtttgcaccaagcggcgctaaagaggaccgctacactaccgtcagatggatgctgggctatggttttaggggtctgacagaaaagcctacccatggatggcggaggcgtacactaccgcacccagcatacgcaagcggccaccaaagtgctccctctcccgctgctacccaccggtcatccttcatgtggtcttctcagtcatataagaaccaggggctcgctaaaggggttagtgagactctgctggataatgccattgtacaatccgagttactcatctacagtgaactttcactgccttcaattctttcccttaatcatctggccaagaggacctgcgtagagtacgagtggctgcgggggtttgtgatgcgcagggctatgaacggtgtggaggacttcgaatcctacaaaaagttttctatccgtaaacgcagcggaggaagacgcttcatccacgtgcctacaccgaagcttatgcatacgcagcgatggataaatgagcatattctgaagggggtgcctgtgcatcctgcatctcaggccttcggaaagggcagttctataaagaaatgtgccagtcgacattgcggtgcgaagtggttgattaagatcgacatagccgacttctttagcagcgtttcggagatccaggtctttcggatcttcaggtcgttcggctaccagccgctcgtagccttcgagctggctcgtttgtgcaccgtcggaacctattgggaaagcccccgaggatctctccctcagtggaaaacacggcaccccaataaatccatcccactgtatgatcaaaagattttagggtacctacctcagggcgccccaacgagccctttactcgccaatctggccatgaaggactgtgaccgagctcttcaagcactcgctcacaaaaacgggctggcctacacacgctattcagacgatctgtcctttagcactaaggataagggcttttccagatcccagagcagggagtttgtctgtgatgcatatgcgatcctaagccgctcaggcttcagaccaaacctgagaaaaaccaccgtggtccccccaggatcccggaaaatagtgctcggcttgaatgtggaaactgagcaccccagattgacaaagtctatcagagatcggatccgccagcacctgcactttctcaaaaaagttggtcccgtggaacacgcattcaacagagaattcgattcagtgtgggggcttaaggcgcatctgaggggcttgattgactttgccaacatgattgagccagattttgccgaggccagtctgaaagaattcgacagcgtggaatggcccgtttga

SEQ ID NO: 9050 - RNA, 933 nt, synthetic construct
  source 1..933: mol_type = other RNA
atgcacacccaaaggtggataaacgagcatatcctgaaagatgtgcccgtgcaccctgcctctcaggcctttggcaaaggaaacagtatcaagaagtgcgccagcagacactgcggtgccaaatggctaataaagattgatatcgcagacttcttctctagcgtatccgagattcaggtgtttcgggtttttaggtcactggggtaccaacctctggttgcatttgagctggctaggctctgtaccgtagaaacctactggaaaagtcccaggggatccttaccacaatggcgggcacggagatttaatgggagcatccctagctatcatcaggagatccttggatatcttccgcagggcgctcctacatccccactgctcgccaatctggcaatgaaggactgtgacaaaagcttgcagacactggcccagaagaacgggttggcttataccagatattcggacgatctcagtttctcaacgaaagataaaaacttcgaccgcacacagagccggaagttcgtttgcgacgtgtacagtgtcctgtctcgctcaggattccggccgaacctgcgcaagacgactatcgtccctcccggctctcgaaaaattgtgctgggccttaatgtcgaaactgaacatccacgtttaaccaagaatgcccgagatcgcattaggcaacatttgcactttctaaagaaggtgggtcccgtcgaacatgccttcaacagagagttcgattcagtctggggcctgaaggctcacctcagggggctcatagactttgccaatatgattgagccagacttcgctgcagcgccctcccgaaattttactcttttgtccggtcgttgtcgccacgcggctgtgctctgcgaaagacacttccaggcgatgaaatctaccactgtgcacacaatccagtactggtga

SEQ ID NO: 9051 - RNA, 1155 nt, synthetic construct
  source 1..1155: mol_type = other RNA
atgtggagcagccacacatacgagctggaggccattgagctcggacgacccagggaaacaatcgacgcctcaattgagcagatcgagaacttaaatgagacaaaccctcccgcccctgccatcctgaccctgaatcatctagccaaacgcactggcgttggctatgaatggttacgtgcttttgtaatgcggcagctcatgcccggaatggatggcgacgccaggccgtatcggaaattctctatccgcaaacggtccggggggtacagaacaatccacatacctgagccaaagctaatgcatacccagaggtggataaattaccacatccttagagaagtttcccctcatagcgcatctcaagcctttacgaacggctgcagcattaagaaatgtgcgattaagcactgcggggctcagtggatgattaaaattgacctggaagacttcttcggatctgtcactgagatccaagtctatcgcgtgtttaggagtctgggctatcaggcgctcgtcagtttcgagttggcgcgcctgtgtactattacaccaggagacaggtcactgagaagccgtcacccacactggagagtgtggaagcctaacaaggaaatcccaacctactcgaagaaatacttggggtttctgccccagggtgccccaacgtcaccacgactcgctaaccttgttatgcgccggtgtgatcaggagatacagaagttagccaaatcctatggtctgaccttcacccggtactcagatgacttgtgcttctctaccagaactaaaaagtttaatcgacatgcagcttccaaattcatcggcgaagcatacatggtcctggccaaatatgggtaccaacccaacctgcgcaagacctccgtagtgcctccgggtgctaagaaggttgtgctcggcttgactgtggatgggcaggaacccaagatcagcaaggaagtgagagacaagattcggcaacatctctactaccttgcaaaagtcggcgctgctgaacatgcacacagaaggggttttgatagtgtgtggggactcaagtgccacctgaggggactgatcgactttgcacacatgatagatgaggatcttgcccagagttatattaaaaagttcaatgaggtggactggcccgtgtga

SEQ ID NO: 9052 - RNA, 1134 nt, synthetic construct
  source 1..1134: mol_type = other RNA
atgtggctgccccagacctacattaaagaagcgaaaagcaagggacttgacagccagacgatagacgctgccgttgaccaagtggatacagtccttcgcaaggccgaaaacatcccgtctctgctcactctgaatcacctggccactcgggtgggggtgaacgttaaggaactcagacagtttgtcgatcgcaccgacctggacgcataccaacgtttctcaatcagaaagagaaggggaggcagacgatttattagtatcccggcacctcagctgatgaggacgcagcggtggatcaacgagttcattttaaagcctctccctgtgcatgggtcttcacacgcatttgagcgtcattcctctatcgtgaaagctgcctcagtgcactgtggagcccgatggctgataaaaatagatgtggaggacttcttcggatccattagcgaaatccaggtcttccggcttttccgctctctggagtaccaacccttggtgtccttcgagctcgctaggctctgcacaataggcaccagccctcatagtccaaggaaagaatatccaaactggagagtacacaagcgaaacaaaattatccaggggtattctcagcagctgttaggctacttgcctcaaggggccccttccagtcccaggctctcaaacctaattatgaaaccactggatgaggctctctatctagaggcaaagcagaagggcttgtactatacccgctatagtgatgatttgtgctttagctatcacaataccgacttcaatcgaagaaatgctacagagcttgtctccgcagtatacaggatcctgagttcagccggatacagacccaatatgcggaagactacagttgtcccgccaggttctaaaaagatcgtactgggtctgaacatcgagaatgatcagccccgcttaagcaagcccttttgtgacaaagtggatcagcacttgtactatattaagaaatacggccccgtggaacacagccatcgcaggaaattcgactccgtgtggggtatgaagagccatatccggggctccattgactttgcgaagatggttgagccagagcgttcggccgtttggctggaagattttaatcgggtggaatggccagtctga

SEQ ID NO: 9053 - RNA, 1152 nt, synthetic construct
  source 1..1152: mol_type = other RNA
atgtggagcagccacaggtacagactcgaagctcggcagaagaatctgccggaatccgttgtgcaggccgcaattgcccaaagcgagaaactcctaacagccgaccctagcctcccatctattctcagcttaaaacatctagcagtgcgctgcgacgttccctactccgatcttcgcgagtttgctagcagaaggcccatcgacggaaatcagccaagtcttccctaccaaaacttttctatacgcaagcgctcaggggggcgccgtttcatccacgtgccgaatcccaagttaatggtggtacagaggtggataaacaaccatatactccaagaagtgaagccacaccgtgcttctcacgcgtttacgcgtaatagttcgatcaagaaatgtgctcagattcactgcggctccgcctggctggtgaagctcgacattgcggacttctttgaatccgtgtctgagattcaggtgtttagagtgttttccggtatgggctattccccgttggtagccttcgagctcgcacggatctgcacaatcaggacacctacacattctcctcgacagtatttcaagcagtgggtcgtgaggaacatcaaccatactatttacgcctacaatgatcggtacttaggctatttgccccagggtgcccctacctctccccttctggcgaatctggttatgcgacaatgtgacaaagaactgagtgaaattgcagctacttttgggatgcgatacaccagatatagcgacgatgtcactttctcaagtctggatcctgctctgggccgggatgcctgtcgaaagctgatcttcgaggcctatgctgtcctgagttcagccggctacagacctaacgctaggaaatccaccattgtacctccatcagcccggaaattggtcttgggccttaccatagacggtgccgagccagggctgaccaaggagttcaaggatagattgagacagcacctgtattttctggagaaactgggagcaatcgatcacgctttcaaccgcaagttcgattcagtgtggggaatgaaagcacatatcaagggactgattgacttcgcaaaaatgatcgagcccaactatgcggccgtctgccgggaaaggtttaatcttatcgactggccagtttga

SEQ ID NO: 9054 - RNA, 1152 nt, synthetic construct
  source 1..1152: mol_type = other RNA
atgtggagtagccataggtatcggctcgaagcacgagaaaaacagctgtcagagactgtgatccaagccgctattctacaatccgaaaaattaatcacagctgaccccgctctgcctagcatcctatctttgaaccatctgtctgtcaggtgtggcatcccctactgggagctgcgggagttcgtgagtcgtagatcaatcgataagaacgaaccatcaatgccatacgagaacttttcaataaggaagcggtccggcggacgccggtttatacatgttcccaacaggcagctcatggctgtgcagcgatggatcaacaatcatatactgcaggacgtgaaaccccacattgccagccacgcatttagtcgaaagtccagcatcaaaaagtgcgcacaagtgcactgcggatccgcatggttgatcaaactggacatcagtgacttcttcgagagcgtgtctgagatccaggtgttcagagcttttcaggggatgggatacaccccactggtcgcctttgagcttgccaggatttgtaccattagaactcccgctcatagcccgaggcagcacttcaagcaatggttggtcaaaaaggcgaaccacacgatttacgcctataatgaccgttatctgggttacttgccacagggggcacccacatcccctctgcttgccaatctcgtcatgcgccagtgcgacaaggaattatctgaggttgcggcaagatttgggatgaaatatacacgctactccgatgatctcacattttcttcgcacgatccgaccctgggccgtgatccttgtagagaactcatcttcgaggcctatagcgtgctgagtagaccagggtaccgccctaatgcccgcaagtcaaccattgttcctccctccgctcgcaaactggtacctggcttgaccgtagacggcgccgagccaggactgactaaagaattcaaggaccgacttagacagcacctctacttcctggagaaactcggcccagtggatcatgccttcaatcggaagtttgactctgtctggggtatgaaggcgcacattaagggtcttattgatttcgccaaaatgatagagcctaagtatgcagctttatgcagggaacggtttcagaagattgattggcccgtttga

SEQ ID NO: 9055 - RNA, 1152 nt, synthetic construct
  source 1..1152: mol_type = other RNA
atgtggagttcccatctgtacagagtcgatgctcggaagaagggactgtctgaggcgactatcgaggccgcaatctcccagtctgaaaaagttatcaacgccgatccatcactgccctcgatcctctccctgaagcatctggctagcaggtgcggagtgccgtacagcgaacttcgtgagttcgtctctagaagggccatgttcacaatagcaccctcgatgccatacaataaattctccattcagaagcggtctggaggccgccgattcatttacgtacccaaccgcagtttgatgaccgtgcagaggtggattaacacccatatacttgcccagatttcaccacacggtgcatcccacgcttttacgaagcggagtagcatcaagagatgtgctctcgtccactgtgggtctgcctggttggtaaaactcgacatcagcgacttctttgaaagcgtgagcgagattcaagtgtatcgttccttcaagtcaatgggctatacacccctagtggcctttgagcttgctcgcatttgcacaatccgcactcctcgtcattcacctcgggagcgatacgggcaatggcgcattcgggagctgaacgaggaaatatatgcctataacgagcatcttttggggtacttacctcagggcgccccgtcatctccattgctgtctaatattgttatgcgggattgcgatatgctgctaagccagatcgctgcaaaattcggcatgaaatacaccaggtatagtgacgatctcacatttagctccctcgaccctcaattcggccgagaggcgtgtagaaatctgatatttgaagcctatgctatcctgtccaaggccgggtacagacctaatgcaaggaagtgcactgtcgtgccacccagtggcaagaaaatagtcctgggcttacagattgatgggaccgagcctcgactgaccaaggactttaaagacaggatcaggcagcacctgtatttcttagaaaaatttggtcccctgaatcacgccttcgaaagaaaattcgacagcgtttggggaatgaaagcacacattaagggactcatcgattttgctaagatggtggaacccggttacgcggagatctgtcgccggagatttaacctcatcgactggccagtgtga

SEQ ID NO: 9056 - RNA, 1272 nt, synthetic construct
  source 1..1272: mol_type = other RNA
atgtggtgggaagccggggtacccgtgctgtttgggaaggccctagccgagcgagaacacagccattctggtaatgtgccttccttggccagggtggctcgagcaactgttaggtccgggctcattggcgtcattgtgatgtggagtcccttgtcttataaaagaaaaggattggagatcggcatcgcagaggagctactcgactcagcaatcgaacagaccgagaatgtcatcgaggaaaaccccgatctgccatcaattctcacactgaaccatctgtcaacccgtacaaagacaagtctggagacattaaaggcctacatatctcgtgatgaaccggatgcataccggaaatttagcatagccaagcgctccggtggccgaaggtttatcagagttcctgcacctcaattagctcacgtccagaaatggatacatcaccacattctctcccatatttccccccacagagcgagctatggtttccggaagcggacttcgattaaggactgcgctcgtaaacactgcggagccagatggcttatcaagttggacatcgttaacttcttcgaaacgatttctgaaatccaggtgttcagcgtctttcaaaaactgggttaccagcctctcgtggccttcgaactggcgagactgtgtaccgtgagctcagatgagtactccccacgccgcaattacggaaactggtgggccttcaagtcttacaaggtgatcaggaattacgagcagaagctgttggggtatctgccccagggcgcctcgagttccccaatgcttagtaacctggttatgtggaagtgcgacgaacagattagtaagattgcgaaaaaaaacgggatgaaatacagcagatattccgacgacatagctttaagcacttctagcaaggactttaatagagctctcgctaaacaggtgatccaggaggtcaatcgggtgctttcacagtatggctacctgcctcacttcaaaaaatgtaaggtagtgccccctggcgcaaggaaggtcatcttgggccttaacgtggatggagccgttccagtcctgcaaagggaaaccaaagatcgcatacgccaacatctgtactttctgaagaagcacggacccgtggaacacgctctcgctcgagggttcgatagcgtatggggactacagtctcatctccgcggccttatcgactatgccaaggccattgagccggagtatgctgcaaaaaggctgcgggagttccgggagatcgactggccattttga

SEQ ID NO: 9057 - RNA, 1134 nt, synthetic construct
  source 1..1134: mol_type = other RNA
atgtggtcaccgcagctctatctaaagttgggaattcaggagggtcatagcacagagttactggaaagagcaatttctcagtccgatgctgttatcaactctgaatactccttaccaagtatactgagcctgaaacacttggccgtccgaaccggggtgagctacgagtctctcaggtcgattgttagtcggtccgctccaaaaacctacaataagttcagtattcgcaagcgatccgggggacgacgctacatacacgtgccaagccttgagctcatgcacgcccaacgctggataaacgaacacatcctgaagaagatcaaagtgcaccccagttcacatgcgttcatcgaagggagctccatccaaaaatgtgcctccaaacattgcggcgcaaagtggctgatcaagcttgatatcaccgatttcttcgagagtatctccgagatacagatctttaggtcgttcaaggagctgggatatcagccccttgtttcttttgagctggctaggttatgcacggtgcccacacaccacaagtcacaacgcagacattatattcagtggaggtcttggtaccggaatgagtcaattacagactacaataagtctctgatcgggtatctacctcagggtgcccctacttctccactcctgtcaaacatcgtgatgagaaaaaacgacgaagagcttaagaaactcgctcacaaattcaaattgacgtatactcgttactccgacgacctttcattttctactaggagcaaaaatttcgacagatataaggccaaagagctggtgtttgaagtatacaggattctctcaaaaagcggatacctgccccaatacagaaagaccaaggtcattagtcctagcagcaagaaggtaatcttgggcctcaacgtcgacggcgatacaccccgtctgcagaaggaatttaaagaccgcctgcggcagcatttctattacatcaagaagctaggcctggacgaacatatcatcaatcgggagtttgattccgtgtggggcttcaagagccacctgcggggtatgattgattatgcaaacatgattgagccggaatatgccaaaaagcagttggaaacctttaaatccatagattggcctatttga

SEQ ID NO: 9058 - RNA, 1125 nt, synthetic construct
  source 1..1125: mol_type = other RNA
atgtggagcccccagtcgtacaagaaaatcgggtctgagaaaggattatcagacgaactgttagaaaccgcaatcacacagtccaaggcagtcttctgtaatattccttcaattctcagtctgaggcaccttgcttgccgtaccggaatcagctacagaaagctgaggtgtttcgtagaacggtccagctatgtgccatataagaagttcagtatcaaaaagcggtctggcgggagaagatttatccacgttcccgatcccgaccttatgcatgtgcaacgatggtttaacgaatacgtttttaagctggttcctgtgcacccctcttcctacgccttcactaccggctcatccattaagaagtgtgctgcagaacattgcggcgcccagtggctgatcaaactggacatcacagactttttcgagtccgtaagcgagatacaagtgttccgcctattcaagggcctgggatatcaacccctcgtcagcttcgagatggcacgcctttgcacagtcttgatcctggataagagccctagaactcactacagtcagtggcacgttcggaaagagaataaaatcattccgcagtacaaccagaagatgctcggttacttgcctcaaggggccgcctccagtccattgataagtaatctggtgatgaaagagtgcgacgagaagttgactaacattgccaataggtacaagctaagctatacgcgatattctgacgatctcagcttctctacacgctcgaagaacttttgtcggtcaaaggctaaagacgtgattttcgaggtgtatgaggtcctctctaaagccggatatagacctcagctgcgtaaaaccaagatcatctcaccaagctcaaagaaaattatcctcggcctgaatgtggatggcgcggaaccgctgctccagaaggagtataaagataagattaggcagcacttatactacatagaaaaacttggtgtggcgaagcatgtggaaaaaaggggttttgactccatctgggggtttaaatctcatctgcgcgggatgattgattacgccaacatgattgaggaggactatgctaagaaatgcctggatcggttttccaacatagattggccagtctga

SEQ ID NO: 9059 - RNA, 1131 nt, synthetic construct
  source 1..1131: mol_type = other RNA
atgtggagccctcacaactacaaagagcaagggttagagaaagggctctccgacgaacttctggaaagagccataagccagagcgaagatgtgatcgagcgaaaccacgatctcccatccattctcagtttaaaacatctgagcgtgcggacctgcacttctcaccagaaactcactcgcttcgtcgcccgcgaagaattttcatatgagaagttctccatcaagaagagatctgggggcaggcgttttatttacatacctgaacccacactactacatgtccagcggtggataaacgagtttatccttaagcccattcccgttcaccaggcctcttttgctttcaatccgggttctagtatacggaaatgtgcagcgaaacattgcggagccaagtggctgattaagctggatataactgacttcttcgagtcgattagcgaaattcaagtataccggctgtttagagaattcggataccagcctctggttgccttccagcttgcccgcatctgtacaatcgcgacaccagagatgtcacctaggcggaagttcaacaattggaaggtgaggcgaaagaataaaaatattccccgatacaaccaacgtattttgggctatcttccccaggggggcgctacctcccctatcatctcaaatttggtgatgcgcgaactggattcggagttttccaagatcgcacgcaagtaccgattggtgtacaccaggtacagcgacgacatcaccttctctacgcgggcaaatacctttgagagagacagcggcagaaggctgattacggaggtgtataacctcctgaacctgagtggctacaagccccagtatagaaagactaaaatcgtcccgccatcagcaaagaagattgtgttgggactgaacgtggatggtagggctccaagactgcagaaagagttcaaagacaatatccgtcaacacttttattacgttgagacactgggtctgagtgagcacattgtgaatcggggatttgactccgtttggggctttaaatgccatctcaaagggttaatcgattatgctaactctatcgaaccagagtatgcccgcaagctcgtcgtaaggttcaacaatatcgactggcctgtctga

SEQ ID NO: 9060 - RNA, 1134 nt, synthetic construct
  source 1..1134: mol_type = other RNA
atgtggagtccgcatcagtacagagccgccgcgaaggaaaaaggactgtctgatgctacaattgaggctgccattgatcaaatcgaaaccgtagaacagggaacacctgaactgcccgctattcttagtctcaaccacttggccactcgagcacgtgtaccctaccagtaccttaggtcagtcgttagcagaagtgagccctcaacctatcgcaagttctccatcaataagcgctcaggcggaaggcgatttattcacgttcctgagcccccactcgcgcacgtccaaaagtggatcaatcgcttcatcttacgtcaggtgcccgtgcataaggcttctttcgcctttgctcccgggagctccataagcggttgcgctgcacgacactgtggggcacactggttgataaagatggacatcacagggtttttcgagagcgtgtccgagattcaggcctatcgctgctttgaagaactgggttaccagccgctggtggccttcgaactcgcaaggattgtcacagttgggccactagaccagagcccaaggcaccgcgatccagtgtggaaagtcagagagcctaacgcggccattccctcttatagttcaggcgcattgggctacctgcctcagggtgctccaacttcgcccatgttgtctaatatcgtgatgaaaccggttgacgaggagattgccgccgctgcgagaaaagccggcctcatatacacgaggtattccgacgacctcactttttccacgcctgccaaggagttcggacggtctgctgcgaccgattttgtgcatactgtggggcagatccttgcagccgccggctttcggccacaacatcggaaaaccaagatcatcccacccggtagcagaaagatagtactaggacttaacgtggaaggaaccgcccctaagctgagaaaggagtttaaagacaatctgcggctgcacctgcattacctggataaattcggcccagctgagcatgcaaaagcccggcagttcgaaaccatctgggggatgaaagcacacatcaggggcttaattgatttcgctaacatggtggaacctgtctatgcaaagggcatgctggaccagtatgagcaaatcgagtggcctttctga

SEQ ID NO: 9061 - RNA, 1143 nt, synthetic construct
  source 1..1143: mol_type = other RNA
atgtggagctcccagcgctacctttccgagggcaaaaagaacggagcagcccaattggtgattgacaatgctatcagccaaattgaattagtcctggatcagaataacaatatccccgccatcttgagtctgaagcatttttcactgaggtcccacgtcgggtataaattcctgcggtctgtggtagagagggaggaggaagatgacaagcagggcgtgcaggtatatagatacttcaacatccggaagaaaagcgggggaacaagaaccatttctatcccacacccacaactcctcatcgcgcagaaatggctggctaccaatgttctgtccaaactctcagcctcaaactatagctttgccttttccccaggcagcaacattgtggcctgcgcaaagaagcacgtagaggcaaattggcttgttaagatggacgtgaaggacttcttcggttcgatcagtgaaatcgacgtctaccggcaattcaggaagctgaaatatcagccattggtggcgttcgaactctcccgaatcgtgacatggcccaagtccccccgagtcgattcgccaagatgggaattagatagcgtgcgcagcagtataggatcttacattcacaccgaaataggctgcttgcctcagggggctcctacttcacctatgctgagtaacctggttgctaacgcgctagatgaggagctgagtcgcgtggccaacaaatttggtgttaggtacacccggtattgtgacgatctgacttttagcactcgccggaaatcttttgaccgtaatcaggcaaaggcccttatagaagcagccacaatgacaatgctgcctctcggcttcagcccaaacgagaagaagacggtcgtgattcctcccggcgctaggaaacaggttctcgggcttaatgtcgacggcccggtgccgactctctctaaggagttcaagtccaaaattcgtcagcatttgttttttctgaccaaaaacggacccgccgctcatgctgctgatagagagttcgacacgatatggggtctaaagagacacttatatggacttgccgattacgcattcatggtcgaacctgagtacgggaagcatgtgaaatcagccctgtcttctatcaattggcccgtgtga

SEQ ID NO: 9062 - RNA, 1128 nt, synthetic construct
  source 1..1128: mol_type = other RNA
atgtgggcatctcagcactactttcaggaagggaagtctctcggtgtggatgaggacatcctcgtgtccgctgtggatcaaatcgagagagtcttagacgttaacggcgacctcccaagtattctgacactcaaccacctagctacacgcgcgaaagtaggccacgcttttctgagacgcgtgatatcaagaacacagaatggggcctaccggcacttcgcggtcaaaaagcgaactgggggccagcgctggatctccgtaccacatcctcagctattgaatgtccagaggtggctggcaaaacatgtgctgaaccagattgatgcttccagacattcctacgcgtttgaaccggagtcttctataaagaaatgcgccgaacagcacatccacgccaagtggatggtcaagatggacgtcgaggacttcttctggagcattagtgaaatcgacgtgtatagacaatttgtgagcctgggctatcagcctctggtggctttcgagctcagccggttggctacctggcccttattcgcacatggtcccgctaaggccgccgtttggagggctaggccacgtgaaggtattcccacctattcctggggaaacatgggatgcctgccgcaaggagccccaacctcgcctatgctttcaaatcttgttatgcgagaactggacgacaggatccaccgcgcagcgcgaaagcacaggatggtgttcacgcggtatgccgatgaccttacctttagtagccgcgatgaaactcttgggcgggctgcctgtcgtgagctcattggcgaggtgggagacttgctgaggcagcgggggttcaacccaaagcataaaaaaactgttgtggtgcctcccggtgcacgcaaggttgtgctcggcctgaatgtcgatggagatgcccccaggctgccaaaggagttcaaaagcaaaatgcgacagcacctgtactacctgagaacagcaggacctgcagctcatgccgccaagagatcatttgataccgtgtggggccttcaacggcacttgcgtggcctggcagattttgcccatatggtagaacccgagtacgggagcgagttactgcgggccttgcaggccgtatcatggcctgtctga

SEQ ID NO: 9063 - RNA, 1188 nt, synthetic construct
  source 1..1188: mol_type = other RNA
atggagttccccctgcacaactatttaaagtcccttagagacattggtgcgcgggacgggtacattaaagccatacagcgaaatgcaaaacccctggctgactgcggactgccagtgatccttacgttgggtcatctagcacacataactgatgttagccatggtattctcactgatatcatcaagaggcagatcgacccttacagggtattcgcgatcaggaagaggaatgggggtaagcgcttcatttgcgtcccagaaacgggattgctgaacgcccagcgttggattcatgatgaaattctctgcagccttgcggccacaaagaacctttcctgtcacgccaccgcctatgctccgggctgcagtcatgtgatcaacgctaagagacacgtgggggccgcctggatcttgaaattcgatattacccgtttcttcgagagtatctccgagcggcaggtgtaccgcgttttccgcggactgggctacaggtcacaggtggctttttgcttgacccgactgtgtaccagggtgctgcctacaaatgtcgaccatcggctgctccggcacaccaagagatggcaaactggggatcaaagaaatcagagaaacttttcaggagcccgggtcatcgggcacttaccccagggtgcaccaacttcccccatgctagccaatctcgtgtgtatccctctcgatactgacatgcagaatatcgctgcacgggagggcctgactttcacccgctacgcagatgatatgacattctctggggaaatgctcgaccgtgccgccgcagtaaagataagtagagaggtttctatagtggtgggccggtatggctttggcatcaacctccagaaaacatcgatagcgaaaaatggaggccgcaagattgttacaggccttagcgtcgacggcgacgtagtccgactgccgagagcatataaagacgctatccgccaggagctattttacttggacaagcacggcattcaggagcattgtgcccgcattggacacaaaaaccatctcagctatctgttaaggctggctggacggattcgatacgctacctctatcgagcctgtgatagggcagaggatgatgcacctgttcctgcgaatttttccaacatttcaagaaaccgaaagactgatctttcaagactttgtgtcagatgattga

SEQ ID NO: 9064 - RNA, 1188 nt, synthetic construct
  source 1..1188: mol_type = other RNA
atggagttccccctgcacaattacctgaatagcctgcgggactctggggcgagagtagaatacatttccgcgattcgaagaaacgctcagcccctggtcgattgtggcttaccggtaatcttgacactggggcatctagcccacgtcacggacgtctcacatggcattctcgctgatattatcaaaagacaaatcgacccatatcgcgtgttcgccatcaggaagagatctggagggaaaaggtttatttgcgtgccagagaaggggctgcttacggttcagcggtggatccataaggaaatcctgtgcgccccggtcgccttgcgtaagctgtcttgccatgcaacagcctacgcgcccctcagttcacatattgtgaatgccaaaaggcacattggtgctgcctggatcttgaagctcgacataaccagatttttcgagtcggtgagcgaacgtcaggtctaccgcgtgttccggggcctgggatatagggctttggtggcattctgtctcacacggctgtgtactcgcgttttaccaagcaccgtggaccaccggcttaggctgagaaccaaaagatggcaaactggcgaccagagaaaccagaggaattttcccggcgcccgggttattggacacctgcctcaaggggctcctactagccctatgctcgccaacctcgtttgtgtgaagcttgacgcagatctacaaaagatcgccgcaagagaagggctaacctacactcgctacgcggatgacatgaccttttctggagaggtcgtagaccgagcagccgctatacggatctcccgcgagatatccatcgcagtgggtcactatggattcggtatcaaccttcagaagacctccatcgcaaaaaatgggggccgaaagatagtgacaggattgagtgtggatggcgaagtcgtacgacttcctcgggcttataaggatgccatccgtcaggaactcttttacttggataaacatggaattcagggccactgcgcaaggattggccacaaaaaccacctgagttatctgttacgcctcgccggccgcatccgatatgctatctcaatagagcccgttattggtcagaggatgatggagaagtttctgaggattttcccaacttttctggagacagagcagatggtggctcaggtgttcgtgaaagatgactga

SEQ ID NO: 9065 - RNA, 1167 nt, synthetic construct
  source 1..1167: mol_type = other RNA
atggaattcccacttcacgcatatctgaatcatctccaaaccgagggtgcaagcggggaattcattgccgctgtgcgacgtaatgcaaagccactggcggacagggatcttcctgttattctcacccttggtcacctggcctacgccacagatgtgcggtatggaaccttgaacggtatcgtgcggcggcagatagatccctatagggtgttcgcgatacgtaagcgaaacggcgggaagaggagcatctgtgttcccgagcctgggctgctctcagtacaaaggtggatccacgagcatatcctgtgctcacactacgccctgagcaggctatctaaccagagtactgcttatgcccccggatgctcgcatctggccaatgcccgccggcatatttccgcagcctggctcctaaaactggacatcacgcggttcttcgagtccatcagtgagcggcaggtgtatagagtatttcgcggctttggataccgagcactcgtggctttttttctgaccaggttatgtacaagagtcctcccattcgcggttgacaggcgcctgaagcggcagattagaagatggcgcactggcgaacctcgacgttacttgaacgctgctgttgtgggtcatcttccgcaaggagccccaacatcaccaatgctcgcaaactttgtgtgcacagtgttggatgccgaattacagaccatcgctgtacgcgagggcctgacatacacaaggtacgctgacgatatgactttctccggcggcatcggagtcgcatgttctcctgccgagataatacgagaaatttctaccatcgtcgggaaatttgggtttggcatcaattcccagaagacgagcatcgctaaaaatgggagtcggaagattgtgaccgggctaagtgtcgagggcgatatgctgagactgccgcgctcttacaaagacgagctgagacaggaactgttcttcttgaaaaagtacggcattgcggaacactgcagcagaactaaccacaaaaaccacatgtcatatctcctgcgcttagccggaagaattaggtatgctgtctccgccgagcctattataggaaccagaatgatgcttcagttccagcacttgtttcccaattttactgagatcgaacaaagcctgttcgaccgcccctga

SEQ ID NO: 9066 - RNA, 1209 nt, synthetic construct
  source 1..1209: mol_type = other RNA
atggagttctctctgcatacctatctgaacaggcttagaaccaggggagcctcggacgagtttgtcgagatcatccggaggcatgcgaaaccactgagcgacagagggttgccggtcatactatcactgggccatctggccttcgccacaagtaatagccatgaagtgctgcatggaattgtgaagcgggaagtggacccataccgggggttctggatacgaaaacgtagcggaggaaaacgatatatatgtgtacctgaaggggggttaatcaggacccagcgatggattcatgatcatattctttgttctacgtgggggaagaagtccctctccatggccgccacagcctatgtacccggctccagccacatcgacaacgcaaagcgccactccggcgctgattgcgtcctgaaattggacattaccaatttcttcgagacaatatctgaacgtcaggtgtaccacgtgtttcacggttttggatacagacctcttgtcgcgttctatttctcacgcctgtgcacacgcgtgctcgaccctaagcacgacgttcggagtcccactgtacgctgggcaggcaaaaagaagcgctggcaaactgaagccaaccgaaagaacaataattaccacacagtgggccaccttccacaaggagcccctactagcccaatgttagcaaatctcgtgtgctttggcctggacctagagctgcagcagatcgccgactcaatcaacctcgtgtataccagatacgctgatgatatgacctttagcggttcttttacgacaaaggagcagatatcccagttcatctgtcaggtgagtgctgtcgtcggtaagtttgggttctctatcaatcaacagaaaacctcactgagccggactggtggcaggaagattgtgaccggcttaagtgttgaaggagatgctttgcggctgccacgggcgtacaaagatgcaatccgccaggagctgtactacattgaaagatatgggctctctggtcaccttgagcgtgttggctatgccaaccacttgacgtatctgatgagactcaaaggaagaattcaatactggttttccattgagcccgctacagcaactcctagtatcgagcagtttagggctatcttccccaacttcaatgaaattaacgagctcgttaccggcgattcatccaggggcatcccggggactccctactga

SEQ ID NO: 9067 - RNA, 1368 nt, synthetic construct
  source 1..1368: mol_type = other RNA
atggccagtcagtatccttgtagattgttcgagacacacgagcgaggatctgaaagcgctgtgttggataccgcttttctctccgcacggtgggtcgacgaccagttggagctccgcggactggcaattagacctagcagccatcacgcagagagggtgaaagcccgcaatatgaagttctcactacacgcctatctgaaaccgctgagggaaaacggcgctagccaggagtatattgaagctctggcaagaagcgcgaaaccgctggtggataatggcctccctgttcttttaactttaggacatctggctcacgtgtgtgacgttccatacggcatgctagtgggcattatctcccgtcatacaaacccttatagagtgttctcaataagaaagcgttctggcggaaagcgctttatctgcgtacccgagcctctgctaatgcaggtccaaaggtggatccacgaccaaattctgtgcagccccttcgcattggcaaggctgtctagacatgccactgcctacgctcctcagaatgggccagtgcccgccaatcagcgacggatagcagatcacgtgaagaacgcggaacgccatctgggcgccacatggattgtgaagctggatatctctaactttttcgaaagcataagtgaacggcagatctaccacgtattccgtgaatttggttaccgagcccttgtcgccttctgcttggctcgtctctgtaccagggtgttgcccctcacagctgataaaaggctgaggtcacgggcaaaaaggtggcacccaggtaaagagtataagatccttgccactaaggtagttgggcatctcccacagggagcacccacatctccaatgcttgccaacctggtttgcgtagaactcgatcgcaacctgcagtccattgctgtccgggaggctctgacgtatagtcgctacgccgacgatatgacgtttagtggtgagtttcatgaccggagcgacgcagttatcgtgttacgagaactttcccgagtcgtggcggcccagggcttctcaatcaatgccctgaaaaccaacattgccaagaacggtgggcggaagatcgtcaccgggctgtccgtggacggagactccataagggtgccccgggcctacaaggacaaaataaggcaagaactctattttatcggcaaacacgggctcaccgatcactgtaatagaatcgaccaacgcaatcagctgtcttacctgctccggctggctgggagaattcgctacgtcagttcagttgaggccgaggcgggcaatctcatgatgaagaagttactttcccttttcccaactctgttggataccgagagaatcctatcggagatttga

SEQ ID NO: 9068 - RNA, 1167 nt, synthetic construct
  source 1..1167: mol_type = other RNA
atgaacttcagccttcattcgtatatcaaacacctccgtgatactgatgccagtgaggactatatcaagaccgtgcagagacatgcaagaactctcgtaaataacaacttgccagtgatattgacattaggccacctggcccactccacgaacagctttcacaacaccctcctcaatatcgttaagcgtgaggtcgacccttatcgggtgttttcaatcggcaagaaatccggaggcaagaggctgatctgcgctcccgagctcaacttgcttaacgttcagcgctggatcaatcagtacattctgaaatctgagctggccctgaagaaaatttcatccaacaccacggcttacgtgccaggggggagccatataaagaacgccgagcgacacgtcggtgcctcttggattatcaagatcgatatcgtgaacttctttgaatccatatcggaaaggcaagtgtactatgtatttcgggagcttgggtaccgcgcactggtggcattcaatctggctaggctgtgtacaaggattctgccccataaactggataaccggaagtacaataagaagcgatggcgatctaaaaagcagtacgcctattgtaattctaaggtcgcggggcacttaccgcaaggtgcacctactagcccaatgttggcgaatttggtgtgcgtgatgctggacgctaaactacagtgcattgccagtgaatacggcctttcttatacaagatacgctgacgacatgacattctctggccacttcgacgacaagaagactgcgctcatttttatgcgggagatcagtaataccgttatcaattacggtttctcaattaactcccagaaaagcagcatcgctaaggacggaggccgcaaaattgttacaggattaagcgtcgatggcgaacacattaggcttcctcgggcatataaagataagattaggcaggagatcttctacattaagaaatattccctcgaatcacattgtagtagaaccagaaaagggaatcgcttttcctacatcatgcatctggccggaaaaatacggtatgccatcctggtggaacccaccttcggaaataaaatgatgagcgagtttgtcaacatatttcccgatttcctagacatggaacaaatactgaagagttcaattcgctga

SEQ ID NO: 9069 - RNA, 1167 nt, synthetic construct
  source 1..1167: mol_type = other RNA
atgaacttccctttgcacgcgtacgtacgcgctctgaaacgaagcggcgcctccgagcagtttatccagcaagtacgggacaaagctaagccactagtcgccactgggcttcccgtcatacttactttgggacagctcagtttcgccacagagattccatatcgcatactgctgagtatcatcggccgagcagtggatccgtataggctgttttccattaggaagcgggcgggcgggagacggtttatttgtgttcccgagcccaggatgatgttcgcccaaaggtggatccaccagaatatcttgagcgcgccttcagtgacggcaggaatgtcttgcgcagccatggcctacaagaattccgcctctcatgtggccaacgctcgtgctcacctcgctagcgactggattctaaagttggatgtgacacgtttcttcgagagtgttagcgagcggcaggtttatcatgtgtttcactcactggggtaccctgctcttgtggcattcggtctggctcggctgtgtacacgcgtgtctttcggctcacgtggtggtaggcatcccggagcaagtgcccgatggtcctctagagacaggtatgactttcttggctaccccgatctgggccacttaccgcagggagccccatcaagccctatgttagcgaacctcgtctgcattcccttggattcgcaaattgaaaagatcgccgaagagcacaacctcgtgtataccagatatgcagatgacctgaccctctctggatcacttatcggggccgacgaaacgctcgaggtgattcggaaggtgtccaatagcctaggccagttcgggttcggcgtcaatgtgcgaaaaacccgcgttgttcgcagagggaccagaatgatcgtaactggactctccgtggaaggagaaacactccgcgtcccacgggattacaaggaccgactgagacaagagctgtactacatagagaagtttggcctgagagagcattgtcagaggatcggtcagaggaattacgcagcttatctgcgcagattatctagtcggatcggatacgtctcctgcatagaacctgctactggcaagaaactggaagccaaatttaccaacctgtttccaggttttggggaactgaaagagcttattctgagcttcccttga

SEQ ID NO: 9070 - RNA, 1131 nt, synthetic construct
  source 1..1131: mol_type = other RNA
atggaattcccaagaccagccaccgctgttccgctgccttttgatgccacgctcgcccagttagcccatgctactggaatgaccacggctcgactgcagggcattgtttcacgcaggattgatccctggcacacgttttccataaggaagcgtggcggcggtaggagaactatctgtgtccccgatgcagacttattggctctccaacgctgggtgcaccgacacctcctctgccatccccagtcgctggccaggctgatgccacaggcaactgcgtacagacccgggggcagccaccttgctaacgcagaagcacaccttggagcagggtggctgttgaaactggacctcgtgcggtttttcgagtcaatcagtgagcggcaggtgtggcacgtcttccgggcactgggctttgcccctagaaccgctctgctgctgacacgcgcatgcacacgggtccttcccctcgctgtcgaccgcagatattttgatcgtaccccgcggtggcggactggagcagaacgatccccgaatgagaaatttcaccctaggccacgtgtggttgggcatttaccacagggtgcgccctccagtcctatgctagccaaccttgtgtgtcacgctttggacgctcaactccagcagttggctcagagctgctctgagcacgctgttagatatactaggtacgccgacgatatcacattctctgggcctccaatgacagcggctgcgttgaatgccctttgcggccgcttgctaagggaggccaccagagccataacccgctatggattcggggtgcagtggcggaaggtacaactagtacgcagaggagcccgccgaatcgtgacaggtctgctggtcgacggagacgccttacatgtgccccgtccttctcgcgacgccctgagacaggccctctatcatctggagcaacaggggatcgaagggcattgtgcctggctccggattgatgacacccaggcctacctggctcggctgagaggtcagctggcctacctgaggagcattgaacctgtgaggggcgcacggatgcttgcgcaattcgataggctgatggccgcacgaggcacagtgggaactaccggccagatgaggaacgcatga

SEQ ID NO: 9071 - RNA, 1194 nt, synthetic construct
  source 1..1194: mol_type = other RNA
atgactgctttcagtttgcacgattacctctctgtactaagggccgaagggagcccgagtgactatatcgaggccctgagaagaaatgcacagccacttgtgtcccgaggcctgccggtgttactgacccttggacatctggcctttgtcaccgacgtggattacagatatctgaatgcggtcgtgaggcgaacagtggacccctatcggatcttttccatcgcaaaacggtcaggggggaaacggtacatcgttgtcgcagaccgcaagttagccctggtgcagagctggatacatcgtaacattctgacgagcgcagcggccatgcgctctatttcctctgccgtcaccgcctacgtgccaggctcttctcatatagcgaacgccagtcgacatcgcaatgcatcctggctcatcaaagttgatgttgcccgcttttttgagtcaatttcagagagacaggtgtactacgtttttcgacaattgggctatcgcgctctgatggctttcgccctaactcggctatgtactagagtgctcgaaactaaggatttccgcgccagaaagaaaggaagatggcagaagagaacagttagccccgaccgacctctgggtattggacacctccctcagggtgctgcaacctcgcccatgctggctaacctcgtgtgcaggaagttggacagcagcctttcagagattgccgacgacaggggactcatatacacgcgctatgcggatgacatcaccatgagtggggaattccaggataggatggacgctgagtccactatcgggctgatcagtggattgctgggaggggtgggcttcggtattaaccaccaaaagacatccattgctaaagacggagggcggaaaattgtaacaggcctttcagtagatggcgataagctgcgtgtacctaggtcctataaggataatctcaggcagcacttatactacatcgagaagttcggtctgaatgaacactgcgtgaggatcggtcaggcccaccatcttgcattccttctccggctggctgggcagatccggtatgtcaggagcgtcgagccacctctcggagccgagatgctgaaccggctgcgtagagctgtgccagaatttgatgctatagacggcttggtcagcgcagcctacgatacagacaccgatccctctcaaggcggcggctga

SEQ ID NO: 9072 - RNA, 1176 nt, synthetic construct
  source 1..1176: mol_type = other RNA
atgtctactcacaattacattacagagctgaacactccaggagtgaatccgacctataaacgggtcgtaaggcagctggttaccccccttctgcagaaaaatctgcctgtcatcctgagcctgaagcacctaagtgttctgctggacattccatatattgttgtgcataagatcgtgtatcgagacggagacttctataaggtgtttgctataaagaagcggtctggtggaaaaagatggatcacaattccagattacttcctcatgaaagcccaaaaatggatcaacaataacatcctcaatgctcaggaggcccaagccatgctatcgattaactcaaccgcatataagaagaagagcagccatatcgtgaacgcctcaatgcacttaggggagaagcagctgattaagctggatattctaaggttctttgaatccatctcagagcgacaagtgtttaatgtgttcaaaaagctcggctacaaaaactctgtcagtcttattcttgcacgcatctgcactcgtgtgatcccaatccatttagacaaacggttcatcaagaacgaacagaggtggaccacaaaatacaattacaagtacgatcagcagaagaacaaaatcaagcgcatcgggcacttgcctcaaggggcacccacttcccctgctcttgcgaactttgtatgttgtaatttggacgccgatatagaagacctgatagatcagttcaatctgaatagctatacgaggtatgctgacgacattattatatccggcaattttcaggacaaaaatacagccattagctgcatcttccgcgtctccagaatactgcggaactatggctttaagacaaactacctcaagaccaaatactgcggctctggcgacagaaaaatcgttacgggtatttgcataaacgatgagaatcagttacgggtccccatcgagtacaaaaacaaaattcgccaggagatttactacatcgataagtttggacttttgaaccactgtgagagactgaatataagtaaccccctcaactatctcatgaggttggagggcaagatcaactatatcaagaccgtggaattggataaggggatctacttcatgaacaagctcgaaaaagcgattcccaatatgaatgaaattcgtctgctgaacgatctcccttga

SEQ ID NO: 9073 - RNA, 1098 nt, synthetic construct
  source 1..1098: mol_type = other RNA
atgagcacacacaactatctgaccgagttaaacaaacatgatgtcaacccttcttataagcgcgtagttagacagctggctactccccttcttcaaaaaaaacttcctgtgatcctaagtctgaaacacttatccgttctgcttgacataccttacattgtgctccataaaatcgtgtatcgggatggcgacttttataaggttttcgcaatcaaaaagcggagcgggggaaagcgctggatcacagtgcccaatcatttcctgatgaaggcgcaaaaatggattaacgagaacatcctgaatattcagtcaactcaggactttctgtcgatttcctctactgcctataagaaatcttcctcacacattatcaacgcttcaatgcacctgggtgagaagcagttaatcaagctggacatcctgaatttttttgagagcatatccgagaggcaggtcttcaaggtgtttaagaacttgggatacaagaacagtataagtctgatcttgactcggatttgtacaaggctgatccccctcaacaaggacaagagattcttcaagaaagaaaaaaggtggacaaccaaatacacctacaagtacgacaatcagaataataagctcaagagaattggtcacctcccccaaggcgctccaacatcccctattcttgccaatctggtctgtcaggatctggatagcgaaatccagaatctaacggaccaattgaacctcaattattacacccgttacgcagacgacattatcattagcgggaacttcataaacaaagaactggccattagctgcattcacaaggtaagtaaaatcctacgagagtacggattcaagaccaattttctcaaaacgaagtattgcggctctggggataggaagatcataactggcatctgtatcaacgatgagaatcagctgcgggtcccaatcgaatataaacgaaaagtgcgccaggaaatatactacattaagaaattcggcctcctcaatcattgcgagaagttgaaaatctataacccgcttaattacgtgttgagactggatggaaagattaactacatcaagaccatagaaccagattga

SEQ ID NO: 9074 - RNA, 1173 nt, synthetic construct
  source 1..1173: mol_type = other RNA
atgagcaatcataattatcttacatcactccgtaactccgagaacatcaatagcgagtacaagaaaagcatttccaagtatgcgcggccactgatccgggaagagctgcctatcatcttatctctcaagcatctgtccgtcctaactgacgttccctacaatactttgtacaatatcgtgttccggaagattgagtcttaccgtattttcgccatcaaaaagagatcaggaggaaaacgctggattacagtgcctaccccttacctcatgcgcgtacagaaatggatcaataaaaacatcctcagcaattctcacgtgctaagttacatttcgaacaattcaatggcttacaagaaaaaatccagccacataaagaatgcccttgtgcaccatggcgaaactaaattgataaagctggacattaccaacttttttgagtccatatctgagaggcaagtgttccacgttttcaagaagatcgggtataaaaactcggtggctttcattctgaccaggctctgtaccagaattttgtctctgaataacgacattagactgttgaacaaggagaagcgctggttttctctttatcagtataagcacctcgataatgagaaaactatcaagcggcttgggcatctgccacaaggcgcacccacatcacccatgctggccaatttagtctgtcttgagttggacaaacagatcgaagatatgtgcctcctggaggactttaattatacccgatatgccgatgatattgtaatcagtggtgactttagcgacaaagaaaacgctattaaccacatctatgagatctccaagatattgagaacgcacggcttcaaaacaaactatctgaagaccaagtactgcggagcaggtgataggaaaattataacgggcctatgtattaacgaccctagtagcctgagagttccaagtcactataaaaaaaagatcaggcaggagatttactacataaagaagtacggcctgatcgaacattgcaggaaactcaacatcaagaacccgcttaattatttaaaccgcctggaaggaaaaatctactacctgatctgcgtcgaaaacgagaatgggaagaaggctctcgaaaacctggaggatgcaattcccaatatacatgaactgcgacagctggccgaaatctga

SEQ ID NO: 9075 - RNA, 1119 nt, synthetic construct
  source 1..1119: mol_type = other RNA
atgcggaaggttcctgccgtgtttactctgatgcacctggctcaccttaccggcacttcttggcagagcttacggaataccattacacgccagcaagacgattacagagtattcgaaatcagaaaacgctccgggggaaataggaggatctgcgctccagcccccatgctgaaaagcgttcagttctggattcacaaaaacatactctgtagtctcggagcccgcgctctcttgcaagaagcgtcaaccgcgtatgcgcccggctcctcaatcaagaaaaatgctgctattcatgctggagcagcctggctgattaagctcgacatcaaggacttttttgagagcatctctgaacggcaggtgtatcacgtgttcaggagactgggttacccggccctgctgagcttcgagatggccagattatgtacaagggtggtgccgcctagagatgacaaagtcccccgccggagagaaaagatgtggcgctggacgaaccagacatgtaaacattttactccttatccatgcgagactgccgtcggacatttgccccaaggcgctccaaccagtgccatgcttgcaaatcttgtggcagtggagctggataaaaaaattcaggtcatcgctgatgccaacggagcatcgtacacaagatacgctgatgacattgttttgactctcgccgtggctaccagggtacagtgcgacacaatctttcgggccgttgcagatgtagtgagtcacagcggctttcgtgtgaacagaatcaagtctcacgtccgcgggcctggtgcacgtaaggtcgttaccgggctagtgattaacgatgtgaggccccggttggcacgatccatgcgagaggacataaagctagccttataccacataaagaagcatggcctgctggggcatgcagagcgcaggcattcaaagaacccacttggctatctgaatcacctcgtcgggctgatctatttcgcccggagcatagagcaggacttcggtgtatgggccctgtccgaactgcgaatcgcgatggacgaccacaaagatttgctctctatccttcgtacgttcgactcaagtcaagatcagaggtactcctaccgaaatatttga

SEQ ID NO: 9076 - RNA, 1059 nt, synthetic construct
  source 1..1059: mol_type = other RNA
atgagggccacagtggctcgcagtaaagacaactacactacttttgagatacgcaagagaagcggaggcaatcgcaggatctgcgtccctgcacctgcgcttaagctggcacagggttggatacacaagcacatcctgtgttcgccaggggccttagcgctgctccaacaggcctctaccgcttatgctccagggagctccatcaaaatgaacgctagtgcccatgccggggctgcttggctcataaaactggacattaaggactttttcgaatcaatcagtgaacgacaggtttatcatgtcttcaagagccttttcgggtaccccgcacttttatcatttgagatggccagactgtgtacccgagtggtacccccaagaaatgacggagtggctaggcggcgcgagcgaatgtggagatggaccaaccgggcttctaaacatttttctccctactcttgcgtcacggcagtaggccacctaccgcagggagctcctacgtccgccatgctggccaacttagtggcagtggagatcgataagcagattcaggcgatcgcagatgcgaatgacgccacctacacccgctatgcagatgacattgtgctcactctgagcgatgggacacgctcccactgcgacgcgattctgcagaaggtggcccatgtggtgaacaccgcaggctttagggtgaatcggaaaaagtcctacgttcggggacctggcgcacgaaaggttgttacaggtctggtaatcaatgatgaccgtccaagattgacaaaagcctcccgggaggagataaaattggccctctaccatattaaaaagcacggtttgctgagtcattctgagcgtaggcactccaagaaccccctcggatatctaaatcacctcgtcggcctgatctacttcgccagatcaatcgaagaagatttcggcgccagggcccttattgaattgagaactatcatggctgaccacagggatctgctctcagtcctgcaaacattcgaggctatgccggccgaacgtgagagctatagctatcggagcatttga

SEQ ID NO: 9077 - RNA, 1146 nt, synthetic construct
  source 1..1146: mol_type = other RNA
atgtctatcgctgaccaactgaccgagaataaggtgccattaatctttagccttatccacttggcccacgtatctggcgtcaagtggtctttactccggtctttcgtaagacgagactccgatttttatggctgttacgagatccggaaacgatcaggcggtaacaggcgcatctgcgtgccggaaccagctctcaaactgatccagaaatggattcatgcaaacattctgagatccacaggcgcactagctcggctccattctgcttcaaccgcttacgcgccaggtgccagtatcaagaaaaacgccgacagtcacgtaggggctgcctggctcataaagctggatataaaggacttcttcgagagcatctccgagcggcaggtgtactgggtttttagagatttaggctaccctgccctcctctcatttgaactagcgcgactgaccacaagagtggcaccccccaggagagatggtaccatgcgtcaccgcgacaaaatgtggaggtggagcaacaacgcgtcccaggcatatcccgcctataagcccggccgcgtcacaggaaaccttcctcagggggcccccacaagtgccatgctctcaaatcttgccgtgcgcgaattggacgtgcagatacagctgatcgctgcacggcaccatgctacgtatacacgctatgctgacgatattactttgactctggttcaaggcagtaggccggcctgtgcagagatatttaggagcgttgcagatgccattactcatgccggattcagagtgaataaatgcaagtcacggatctcggggccagggagcaggaagattattaccggactggtgattaccagtaaggcagctcgtgtggccaaaaatgtgcgttctgagattgaaatcgcccttcattacatcaagaagcatgggctgctggaccacattgaaagatgcggacacaagaatcctgtcggttacctgaactacctttatggacgcatctatttcgttaggtccatagagttcgacttcggcactcgggccctggaagagttgaatgcgctgattaaaacgtacgaggggttgggatggtccagcaagccttttaaaatcgtccgaagcgatctggtcttccactccgcaaaaaagtga

SEQ ID NO: 9078 - RNA, 1059 nt, synthetic construct
  source 1..1059: mol_type = other RNA
atggtcgagagaaagatcgacgactatagagtcttcaccattcaaaaaagatccggaggtaacagaaggatttgttccccgagttcaaccctccggcgagtgcagacttggatccaccgtaatattttgtgcgccgccggctctctggccaaaattcacgccgcatccacggcttacgcacctggctcgtcaatcagagccaacgccaaagtgcataccggggctgcgtggatcatcaagatagacataaaagacttcttcgaaagcatatccgagcgtcaggcctactatgcttttaggagtctggcctatccggccctcctgtcctttgagctggcacggctttgtacaaggattgctcctccacgcgatgatggggctcaaagaaaacgcgatttactgtggcgctggaacaacgaccgggcaaagacaggcaatccatacgggctggtgcagtctgtggggcatctgcctcagggagcccctacttctgctatgcttgcaaacctggtattcgcagcgctcgacgtacgaatcaatgctatagcccagaagcacggtgctacatactcccgctacgcggacgatattgtgctaagtcttactagcggctgtcgggtggaatgcgcaaaaatttttcgcgatgtgacatctgttattagtcatgccggataccggatcaacagatctaaatcccgaatcaccccccctggcgctcggaagatcgttacgggcctggttactaacgatgtcacacccaggctgccacgagagatgaaagaagacatcatgctgtcaatctatcatatcaagaagcacggattactatcacacatggaacggaggaagtcttcgagccccttgggttatctcaatcacctcattggacgcattttgtttgcccagagcatcgagaacaagtttgggagctgcgctctcaatgagctccgtgtggccatggcaccctacagggacctgctggatatggccaggatgttaaatccaaagaccagcggcagcaatgatttcaccgcgctgtatcttttggtcttcccctga

SEQ ID NO: 9079 - RNA, 1215 nt, synthetic construct
  source 1..1215: mol_type = other RNA
atgctgggaccttccctgcatgcaattgagttccatgcacgcggattcaacgagcagtatgtgaaagcccttgtggataccgccaaacacttgtcggctaagagagtgcctgtggtctttacagtgatgcatttggccactctcagcaaaaccagttggtcagctctcatgcagactatcgtgcggcaaagtgagaacgattaccgcgtctttagcatacgaaaaaagtctggcggttttcgtcgtatttgcgttcccgcgccccatcttatgcagacccagcgatggatacacgaccacatcctgaattcaaggggcgctctggactgcctccatggtgcgtcgactgcctacgggaagggcagctctattcttaacaatgcctctgctcacgcgggcagcaagtggctaatcaagatcgacattaaggatttcttcgagtccatcagcgaaagacagatctattacgtctttcggagattcggctacaaggccctgctggccttcgagcttactcggatatgcacgcgggccattccccctaggtatgatggtcgtccgaggcgacgagacaagacctggcgctggagcaattctcaagtcgtaggcaaggggccttatctggccaccgccacagtgggacacctgccacagggtgcacccacctctgccatgttggctaactacgcagttgcttcactagacgaaaaaattcaggcgatcgcagatggcgtcggggcaacttatacgaggtacgctgacgacatcgtactctccatgaccaactcctcccgggagttgtgtcaaacaatctttcggcaggtgtgtgtggaaattacgacaagtgggttccggctcaatgagaaaaagtgcttcgtgagaggcccaggcgacaggaaaatcgtaaccggactcatggttaatgatgtgaaaccaaggttaacaaagtctattaaggatgagatcgaagtcagcctgcactgtattgggaagtttgggctgctgtcccacatcaaacgcaagaagattaaaagtccgttaggatatctgaaccacttgaacgggttaatcaggtttgcttactccatagacgataggtttggcaattgggcaactaaagaacttgacagagttctggccccagaacgcgagacaatagaactcctgaaaaatttctcaggaagaccccgccctaacagacatatgttcggatga

SEQ ID NO: 9080 - RNA, 1215 nt, synthetic construct
  source 1..1215: mol_type = other RNA
atgctgggcccgtcacttcatgcgatcaaagcacatgctcacggcctaaacgaacagtatgtgaaggtcctcgtagacacagcccgccagatgtcggtcaaacgagtgccagttgtttttacccttatgcacttcgccacattgagcaacaccccgtgggccgcgcttattcagactatcgggagaagggcagaaaatgattaccgggtgttcaacattcgaaagaagagcgggggatttcgaaggatttgcgtaccagtcccccacttgaagcgcgctcaacggtggatccatgaccagatcttaaagtccaggggagccctggattacctccacgaggcatctaaagcctatggggatggagactccatcctgaacaatgctagcgttcacgcaggctccgagtggattataaaggtggacataaaggacttcttcgagtcaatctctgagagacaagtctaccatgtatttaggaaattcggataccgagctctgctcgccttcgaattagcccgtctttgcaccagaaccgcccctcgaaggtacgacggtcagcctcggaggcgggacaagacatggaggtggggctcaccccaggttgcaggtaaggtgccatacagatcccgcacgactgttggccatctcccacagggagccccatcttccgcgatgctggccaactatgtcgccgcctccctcgatacaaaaatccagactattgcggacgcagccggggcagcttacactagatatgctgacgatattgtgctgagtctgacgaatagcgatagagagagctgtcaagagatctttcgccaggtctgtctggcagtgaccacagctggctttcgtctgaatgaaaagaaatgcctgatcagaggacccggcagtcggaaaatcgtgaccggtctggtggtcaatgatgtgaaacctcggctgactaagagcataaaagatgagattgaactgagcttgtactatattggcaaattcgggctgctatcacacgccaagaggagaaagaccaagtctcctcttggttatctcaaccatttgaccggcttgatacacttcgcccactctgtggacgatcgttttggggcttgggctcaaaaagaattcgaccgggtgctagctcctgagagggaaacagtggagctcctgcgcagttttagtggacgcccccggcccaatcgccacatgttagggtga

SEQ ID NO: 9081 - RNA, 1104 nt, synthetic construct
  source 1..1104: mol_type = other RNA
atgctgctgtggacccctcacctattcgaaaaagcgggcattcagagaaagtacgatattccctacattgcaaggctcatcgattatggaaatcaactcagccagaggaacttaccagtgatatttagtctgaagcacttcagtcgcctgaccgacatcaactattcctatttacgggccgtgattgatagaactgaatacccatacaagacattcaaaatccgtaagaagacagagggattccggaggatctctgtgcctgactcaagacttctggtaatccagcagtggttgcataagcacattctttccaaaatccagccccatttttcgagtaccgcatttaatccaggctgctctatcatgcggaacgctcaaccccactgtggtgccaactggctcatcaagatcgatatcgaaaatttcttcgactccataagcgaacgacaggtctatacgcagttcaaggcactgggctattctaagtacttatgcttctgctttgccagactgtcaaccaggctagcctcccgagaggcaaaaaaatacaaaaaacctcgctggcaaaacaaacgccaccagtatcctgagttcattggcaacttgccacaaggagcccccacaagcccaattctcgccaatctcgtgtgtcgacagctcgacgcacaaattcatcagctgatccagcccatggggcttatatacaccaggtacgccgatgacattgtcatctccggcaacgcgctgactagaaaggatgcttctaagcttatccaggagataagcaagattttgaatcgcagcgggtttcagaaaaatagcctgaaaacacggatcctgtcaccgggggctcgcaagatcgttactggtctgaatgtcaatggcccaaatcctaccattcctaagaagctcaaatattcaattagggccgagcttcattacgctaaagtttttggggtggctgagcattgtaaaaaattgggttaccacaagatagacggatttcgtaaccagatccgggggaagattgattttgtaagaagtgtgaaccccaagctggccgacaagttctatgctcagctggacgacataaactggccgtga

SEQ ID NO: 9082 - RNA, 1026 nt, synthetic construct
  source 1..1026: mol_type = other RNA
atgcttccgaacattattcccctgcagacaattggggaattagctaatatcaccggcgtgccctactcgtacatcaacaatatcattaagctcaaagaggactcttatcgatcttttagtatatccaaacgaagtagcaacacaaaacggaaaatcttcgttcctaagcctatgctaatgaaggtccagaaggctataaaccgctatatcctccagaatattcagccccacccaattgccaccgcgtactcatacggctccaacccaatcaagaacgctgcataccattgtaatagctctatcctcctgaagtttgatatcaaagacttcttccactccttcgatgagcgggatgtatactacctctttctgagctttggttataatagactcctgagctttcagctggcaagattgtgcactaagatcgtggagtccacctggttcccaaacgagtataaagaccactacatctatccaagtttgactatcaagaagaagtcaacttttctgcctcagggatgtccaacgagtcctatgctttctaaccttctgatgcgcacattcgataataagctggaaatgcttgccaataagttctccttgaagtgcactcgctattccgacgacctgacctttagctctgaaagcaagatgtcccaggattcaattaagattgtaatcgctgaagtgaacaaaatgttaggtaagaagttccgtatgaatagggagaaacaaaaagtttaccacaaagggcaaaggaagatcgtgacgggcctaattgttaacaacgacacacctaagttgaccaaagcattcaagaacgatctgcggatgcatgtccatttcatagccaaatatggatacgtggaacatgccctcaagaggaattgcgaccccttttctttttataatcacttcaatgggaggatgaaatgggccgagctgattgagccggcctttgtgaataaactgaaacacctgttagtcaacatatcaatacccttcacctacagcgcggagtga

SEQ ID NO: 9083 - RNA, 996 nt, synthetic construct
  source 1..996: mol_type = other RNA
atgacccagtggaatcccaatctgtttcgcaaggagggacttagcaaaggctatgattcccattacttgactaggctggtggagcagggggaaactatcaacgagcgtaatctccctgttgtgtttagtttagcgcacctcgcgaacctgagccatacgttatacagcgatttgcatggcttcgtatccagaaacgagcttgagagaaaggacttcccctataaaaacttctctattagcaaacggaccggtgggaaacgctggatttctatcccaactccggccctaatggcagtgcaatactggataaaccagaacatcctgaatcgcgtgataccacacgctgccgcatacgcctatgtcccaaagcggaaaattatccagcacgcccagagacattgcggatctggttggctgatcaagatcgatatcaaggactttttcggaaacatttcagagcgtcaagtcttcgacgtttttcttaatctaggctatcccaaactcttgtcatttgagatggcccggctgtgtacaagggtaacgcctaagcggaaagggaagcgatggtgcaacaccaataacgaacacacaatcaccggctatgattcgaaatttgttggcagtctccctcagggtgcccccacaagtcctgcactgtcaaacctcgtgtgtattggattagataaacagctgacatccctggctatttcagaaggggctacttattccagatatgccgatgacatttgtttctccctgcccatggggtgccggaaaagtgcactgcacatcaagaaggaaatctctaaaatcctccatggctacggtttcagcgacaactccaagaagaccaggcttataccgcccggagctagaaaagtgctgaccggcctcaatgtcaataatgacacacctcgaattccaaaggaaataagggacagcgtgaggatgcacctgtactacgctaagaagaagtggtaccgcaattctttgtga

SEQ ID NO: 9084 - RNA, 1137 nt, synthetic construct
  source 1..1137: mol_type = other RNA
atgactcagtggaatcccaacctgtacaggaaggaggggttaagtaagggatataacgttcactacctgaccagcctcgtggaacaaggcgagaaatccaacgagaagaattttcctgtagtgttctctctcgctcacctcgctaatttgtccagaaccttatactcagatctgcacatcttcgtgagccgaaccgcgatcaaacggaaagactttccttacaaaaacttcccaattgccaagagaacaggtggtaagaggtggatatcaattccgacaccagctctgatggcagtccagtactggattaatcagaatatcctcaacaaggcaacaccacactccgccgcttatgcctacgttcctaataagaaaatcatccagcacgctcagcgccattgtggagccgcgtggctgatcaaaattgatataaaggacttcttcggcaatatatcagaacggcaaatctttgacgtgtttcttgagctggggtatcccaaactgctctcttttgagatggcacgcctgtgtacccgagtcactcctaaaagaaagggcaagaggtggaggaacatcgtgactgagcacacaatatccgattatgatagccggttcgttgggagtctaccacaaggggcacctacgtcccccgcactgtcgaacctggtgtgcatgaacttagacaaaaaattgacgtctttcgccatttctcagggcgccacctactctcgctacgccgacgacctttgtttttcactgtccgacggttgccgtaaggatgccctttatattaagaaggagataagcaagatcctccgagaacatggtttcagcgataactctaagaaaacaagaatagtgccaccgggagctaggaaaatcttgaccggactgatcatcaacgacgaacttcccaaaatccctaaggagattcgggatagcgtccgtatgcatctatattacgccaaaaagaatggcatcgcgtcacattgcactattcgcgggttcagaagtgtaattggctttaagaactatttgagtgggatgattggatacatttccagcatcaatccccagcagggcaagaaactccggactgaattcaatagtctgccctggattgattttgacctgtga

SEQ ID NO: 9085 - RNA, 1137 nt, synthetic construct
  source 1..1137: mol_type = other RNA
atgactcagtggaaccctaacctgtttcgcaaggaaggcaagagtaaaggcttcaaccctgagtatctgacagccctggtacagcagggggagaagacagatggcctgggcttccctgtggtgttcagccttgctcacttggcaaacctcagtcgcacactatactccgacctgcactctttagtctcccgcaatgagttggagaggaaggacttcccctacaagaactttcctatcagcaagcggaccggtgggaaacgctggatttcagtcccagtccctgcattgatggctgttcagtcctggatcaatcacaacattctttcaagaaccaaaccgcacgcagcagcctatgcgtacgtgcccaagaagaaaataattcagcacgcgcaaaggcattgcggtgccgactggctcgtcaaaattgatatcaaagacttctttgggtcaatctccgagagacaagtatacaatgtgtttcttggtctaggatatccaaaactgctgtcattcgaaatggccagactctgcacaagggctactccaaagcgacaggggaaaaaatggcggaatgagatctccacgtattcgatcagctcatacaattctgaattcgtcgggtctttaccccaaggagctcccacctctcccgcactctccaatctcgtgtgttttgaactggatgtggccctgacctctctggccaccagtctggacgctacttactctcggtacagcgatgatttgtgcttttccttgagcgaaggaaacaggaaatccgcccttaatattaaaaggcaggcctcgaaaatattacgggagcatggctttagtgataacagcagcaagacgcggattgttccaccgggagctagaaagatgctgactgggctgaatgtgaataacgccagtcctaagataccaaaggaggtgcgtgacagcgttcgtatgcatctttattattcaaagaagctgggaatcccccagcattgtaagaacagaggttttcgaagcatcatcggattcaaaaatcacctcagtggcgtgattggatatatatactctattgacaaggacctcggcaacaagtacaaaatcgaattcgattccctgccatggattgacttcggcatctga

SEQ ID NO: 9086 - RNA, 1137 nt, synthetic construct
  source 1..1137: mol_type = other RNA
atgacccaatggaaccccaatctgtttcggaaggagggtatcagcaagggttacgcccctaactatctcgccgcactgattgagagagcggagaaaattaatgagaataatgttcctgtggtgttttcgctcgctcatttagccaacctctccgggaccttatatagcgacctccactctttcgtgtctagaaacgccctggaacagaaagactttccgtacagaaactttcccattaaaaagaggtcaggaggcaagcgttggatttcagtacccgtcccacccctaatggctgtgcagagctggatcaacacaaatatactgaacaagataacgccccacgcaagcgcttacgcctacgtgtgtaacaggaatttgattcaacatgcccagcgccattgtggcagtgattggatcatcaagatcgatatcaaggacttctttgggaacatcagcgaacgacaggtttactccgtctttgttgaactggggtacccgaaactgttgagtttcgagatggctcggttgtgcacaagggctaccccaaaaaggaaaggcaaaaagtggatcaactacgctaatgatcacactattgaatcgtataacacaccttatgtcggatccctgccacaaggcgccccaacctctcctgcgctctccaatcttgtcttctctatcgtggataaaaagctttcctctctggcgctgagccatggagcaacttactcaaggtatgcagacgacctatgcttcagcctcatacagggaaatcgacacatctctctggcactcaaaaaggaggtgtccaagatacttaacgagcatggcttcagtgacaatagcaaaaagactcgcatcatcccccctggagctcgcaagatggtaacagggttgtgcatcaattctagttcacccaaaattccaaaagaagtgcgtgacgccgtgcggatgcacttatattacgcaaagaagctgggcattgccagtcactgtatgagcagaggtttccgctccgtcatcggctttaaaaactatctggccggtatgattgcctacgtgtcctcagttgatgtgaagctggggaccaagtttcggcagcagttcaatcttctgccttggatagacttcgatatttga

SEQ ID NO: 9087 - RNA, 1134 nt, synthetic construct
  source 1..1134: mol_type = other RNA
atgcaatggaacccaaacctgttccgaaaagaaggcaatgcaaggggctacgatgatctttacctgaacgccttagtgtcccagggacagaggactgccgctagagggctgccggtcgtgtttagcttggctcacctggcaaatctcagtaggaccctgtacgccgatttgcatggattcgtcagcagatcgggaatcgagtacccagactttccttataaaaacttccccattgccaagagaacgggcggcaaacggtggatatctatcccagtaccccagctgatggccgtgcagcagtggattaaccagaacattctgaacaaagtcgtgccgcatcctgcggcattcgcttatgttccaaagcgccgtctgatcgagcacgcttcactccactgtggggcggattggattatcaagatcgacattaaggacttctttagcaatatctccgagaagcaagtgtttaatgtgtttctcggtctagggtatccagccttgctctccttcgagatggcaagaatctgcacccgggtcacaccccttcgcaaaggcgctcggtggaagaatagcttcaaggcccattcaatttcaagctatgacagccgattcgttggctctctaccccaaggggctccaacatctcctgcacttagtaaccttgtttgtatgaaaatggacgaagagctgacagaatgggccatatctaaaagtgtgacatactcccgttacgccgacgacctgtgcttttcatttgttaacagcagccggcagtcagcatacgatttgcagagggaagtgaccaagatactccgcaagcacggtttttccgataatggaaaaaaaacccggatcatccctcctggcgccaggaagactctcactggactgaacattaatgccgcgtcccccagtatccctaaagaagtccgcgactctatcagactgcatttgtatttctccgagaagaatggtatatcggagcactgcgagaagcgcggattctactccattattggctttaagcatcacctcttcgggctgatcagttatgtgctgtctgtagacaagtctaaaggggagaagttccgacagcaatttaacgctttaccctggttagattttgaaaattga

SEQ ID NO: 9088 - RNA, 1137 nt, synthetic construct
  source 1..1137: mol_type = other RNA
atgactcactggaatcccaacctgttccgcaaggaagggtccgccaagggttacgagctcgcgtatctgaatgctctcgtggagcagggggataaaagcacagcacttggggtgcctgttgtattcagtctcgctcatctggccaacctgtctcgaacactgtactccgatctccacggttttgtaaggagagcagagatctctcgggcagactttccgtataaaaactttccgatatcgaagcgtactggcgggaaacggtggatctcaattcccgtccctccactgatggcggtgcagcagtggattaaccaaaacatccttaatagggtggtccctcacgccgccgcatttgcctacgttcccaagcgcaaactgattgaccacgcaaagaggcattgcggcgccgactggctggtcaagattgacattaaagatttcttctccaacatcagcgagcggcaagtgtttgacgtgtttcttaagctgggctacccaaagctgctgagttttgaaatggctaggctctgtactcgtgttacccctaaaagaagaggcgccaggtggacccatgtgaccggagaacatgccatcagcgactatagctcccagtttgtcgggtccttaccccagggtgctcccacgtctccagctctctccaatttggtctgtattgaattggacaaagagttaacccagttggctacagcgctatcagcaacatattctcgctacgccgacgatttgtgcttctcatttgttggcggcagccgccaatcagcatttgatttgaagcgggaagtgagtaaagttctgtggaagcacgggttctcggagaacaccaagaagacgcgaatcgtaccccctggagcccggaaagtattaaccggcctcaacgtgaatgccagcttcccaacagttccaaaggaggtcagagatctagtgaggatgcacctgtactatgctaaacttcgaggtataccagatcactgcaaggagagaggattccgctctgtcatcggatttaaaaatcacctcttcggactgatcggctacgtggctactgtggacgtgactcatggagaaatattcctaagccagttcaatagtctgccttgggtgaatttcgatctttga

SEQ ID NO: 9089 - RNA, 1134 nt, synthetic construct
  source 1..1134: mol_type = other RNA
atgcggtggaacccccacttttttaggcgcgaaggcgtcaacaaagggtacgactctaactacttggaggccctcgtccgccaggggaatctgtcgagcggagaacggttaccagtcatctttagcttgagtcatctggctaatctctccaaaactctgtacagcgatttgcacgggttcgtgtcccgagaggacatctttcgggaaaactttccctacaaaaacttcacaatagggaaacggtcgggaggacgcagatggatttccgtacccgttccgcctctcatggctgttcagaagtggattagtcagaatatcgtgaacagtgtgctgccacaccccgctgccttcgcatatgtgaggaatcggaggatcctggaccacgcttaccgacactgcggggcggactggatgctcaaaattgacattaaggatttcttcggcaatatctcagagaggcaggtttttaacgtcttccttagcctgaagtatactagactcctgtccttcgagatggccagactgtgcacaaaggcctctccgaatagacagggcgagagatggtgcaacgtggatcttgactattctgttagcggctatagttccaaatttatcggcagcttacctcaaggcgctcctacctctccaggattgtccaatcttgtcttttctcctattgatcatcaactttcagagctcgcccaggccgaaagcgcagtgtattcaagatacgccgatgatctttgtttctctttcaccgggtcctctcgtagtgcggcagttaagatgaagcgcgccgtagccgagatcctatggaacgctggtttttcagaaaacttgaagaaaacgcgtataatccctcccggggcacgcaagatcctaaccggcctgaatgtaaatgactccaccccaacaataccacgagaggtgcgcaacctggtgcggatgcacctgcattatgcgagggtgaacggcattccccagcattgtagggaacgtggatttaggtcagtcattggtttcagaaattacctcttaggcgtgataggttatgtggcaagcattaatgaccaggccggaaagaagttcctgtaccaattcaacgagctgaattggatcgattttggtctgtga

SEQ ID NO: 9090 - RNA, 1137 nt, synthetic construct
  source 1..1137: mol_type = other RNA
atgactcgatggaatcccaatctgtttaggaaagacggcctggctaagggcttcaatccagaatatctcggagcgctcattgcgcagggagagtcgctggtgtcgaaccaaatgcctgtagtgtttagcctcgctcacctggctagcctgtcacgtacattatatagcgatcttcatggttttgttagtcgttccgatatccagcgcaaggacttcccctatagatcattcccgatagctaagcgctctggcggggtacgctggatttctatccctgcccctccacttatggcagtgcagcagtggatttgtcaaaatgtcttaaatcgggtggagccgcatgctgccgcttacgctttcgtgccacggaggaggctgttggaccacgcacagaggcactgcggtgccacatggttagtgaaggtggacattaaggactttttctctaacatctctgagaggcaggcttttcaggttttccttagactaggctacccgaaactgctgtccttcgagatggcccgactgtgtacccgagtcactcccagaaggaagggggcaaaatggaccaactccaacgacgatcattctatccccgagtatgattgccggttcgtcggcagccttccacagggagcaccaacgtcccccgcccttagtaatctggtgtgtatggacttggatcgcgacctcacagaactggccgtttccaaaagcgccaccttttcaagatacgccgacgacttgtgctttagcctaacctccggttcaagagaggccgccttcgccttgaaacgggatgtctctaaggttctctggaaacacgggtttagtgaaaaccctaagaaaacaagagttgtgcctcctggagcaagaatggtcttgactggactcctcgtaaacgctaatgtgcctaccgtcccccgcgaagtcagggatctggtgcggatgcacctgcactacgcaaagaagaatggtatacccatgcattgcaaagcgcggggctttcgcagtatcttcggctttaagaaccacctgctggggctaattgggtacgtggcaagcgtggataagaaacatggggccgacttctacgcccagttcaaccaactgccatggatcgaatttgatctctga

SEQ ID NO: 9091 - RNA, 1155 nt, synthetic construct
  source 1..1155: mol_type = other RNA
atgacccgttggaaccctaatagttactacaaggagggtaaaaacaaaggatactcttccaactatctgaatagcttggtagtgcacgggaagaagatagctgccaataacatccctgtgatctacagcctgaaacatctggctcttcttagcgggacaaactacaatgaactgtaccagatcgtcagcagacttgacatcgaccccgagggcccttcccccaattacccttacaagatttttccaatacggaagcgcaggggagggaaacgccttattgcaatcccgtatcctactctgatggctgtgcagcgctgggtaagtcaagagatcctgaataaactgccagtgcacccagcggctttcgcctatgtcgccggtaagaagaatccgttgagggatcatgcaaagttgcactgtgatgctgactggattctgaagctagacatcaagaactttttctcgaacatatctgagcggcagatttataaggtgttcaaaacatgcaactactattccctcctctccttcgaaatggcaaggctgtgtactatgattgtccccagcaggagaaaacgccgatggaacaattcaaagcagttcaagaataagaacctgtatccatgcgatcacataggctttctgccacaaggtgcgcctacttctcccgccctgagcaatctcacatgtatcgacatggacaatgaactcaccaaattagccctcgaaaatggcgccaactactcccggtatgcagatgacttatgctttagttttaccatcagtacccgacgggaccttctaaaatttaaacgcacggcctgtgagctgctatggaagaatggcttctcagaaaacaaaacgaagacaaagattctgccacccggatctaaaaaagttatcaccgggctgattattaactccggcaagcccatgattcctaaggagctcagagatagagtgcgaatgcacttgtatttctcaaaaaagttaggcattcccgagcattgcaaacggagaggctttcgttctatcatcggattcaggaaccatctctatgggttgatactctacattaagtcaatcgatcccaagaaaggagaggtttttagggccgcattcaaagatctgccatgggttaatttcaacatctga

SEQ ID NO: 9092 - RNA, 1143 nt, synthetic construct
  source 1..1143: mol_type = other RNA
atgaatagatggaatccgaatttctactacaaggaaggcataaaacgcggatttaacacagagtacctggataagctcatagagcaggggagaaaaatccaggagaataacatacctgttctatttagccttgcgcacttggcaagctgctcgcgcactcagtattccgagttgcatagcttcgtagctcgcaccgagtacgggccagagggatacccctataggaatttccctattcggaagagaagcggaggtaagcgatggatttctgtccctgctccacctttaatggcagtgcagtcatggatcaacaagaacattcttaacagcattcctacacacccgacagctttcgcttacgtgaacggaatcaagtcaccgctaaaggcccacgccgagaaacattgtgatgctgattgggtactgaaggttgacatcaagaatttcttctcgaacatatcagaacggcaggtgtatcgggtgtttagaagtctgagttactccaaacttctctcctttgagatggccagactctgcacgcgtatcacccccggaaggaccgggaaaaggtggaacatcgattggaatgaaagtggtgtcgagggctattcttgcacttgtttggggagtctgccccaaggtgccccaagttcccctgcactgtctaacctggtgtgttttgaactcgacacccaattgcatgaactcgccctgtcccggaacgccacatattcccgatacgccgacgacctgtgcttttccttcatcaaatcttcccgggacgaggtctatcagttcaaacgcgaagttaataaagcactttgggataacagcttcaccgaaaatcccaaaaaatctcatattatcccacctggtgccagaaagattgtgactggcctgatcgtgaattctgataagccaagcattccccgcgaattaattgacgcgatccgaatgcacctgttctattcagaaaagtttgggatccccgcacactgtaggaaacgtggctttcggagcgtcattggcttcaggaaccacctcaaaggcctgatcatgtacgtatactcaattgacccaaagaagggcaatgagtttttagagaagtataacaggctgccctggctggaatttgagatctga

SEQ ID NO: 9093 - RNA, 1146 nt, synthetic construct
  source 1..1146: mol_type = other RNA
atgaaacggtggaatccgtatttttttagaaaacagggcgaagagctcaactacaacaagaactatttggacaaactcattcagataggatctcaaatcgatagcaaactgactcctgtcatattctccctcagtcatctttgtaagctggcttccgtgtcctatcaagaaatgcatgacatcatagcgaggaagaattttacgtccttcggctatccataccgtaatttcaccattaggaagcgatctggcggctaccgatggatcagcgtgccttgtccatcattgatgatcatacaacactggattgccagtgaaattctccgccagatgaaaccccaccaggccgcatacgcctatgtgaacaacctgaccagccccatcaagtcacacgtgcagaaccactgcggggccaaatggatactcaagctggacattgaggatttttttggtagcatctcggagaagcaggtttacaaggtgtttaagaattaccagtacccagatctactgtctttcgagatggcgcggttgtgtaccaaaattagtaggaataggaaaggcaaaaagtgggtcaatgacagaaagaataacgtggagctatcaagttatttctccaaatacattggctgtcttccccagggtgcccccacatccccagctttaagcaatctggtttgcatcaacatggatgaagagctgtctctgctgagccgcaacaacgacgccaattactcacggtatgcagatgatctgtgctttagcttctataccaccaatagacgcaatgtgtacatgtttaaaaagcaggtatgcgaaattctttggaaatatgggttccaagagaacatcaaaaagacacacattgttccgcccggggctagaaaaatcgtcactggacttatcatcaacgaacatgaaccaacaatcccccgggaggtaaaagacaacattaagatgcatctgtactacgcaaagaagtttgggatccctgaacactgcaaaaacaaggggttccgttcggtcattggattcaagaatcatttagagggactgatcaattacgtgacatctgtcaatcctgagcagggtaagaagtatgagaaggctttcctgactttgccttggttaaactataagctctga

SEQ ID NO: 9094 - RNA, 1140 nt, synthetic construct
  source 1..1140: mol_type = other RNA
atgaaccgatggaatccaaacacttatcacagaaacggcctggaaaagggttttgacccagattaccttctgacactggtcaaatccggaaaggccatcaagagtaaacataagcccgtcatattcacgttgtctcatctcgccaactgtactgatacacaatattcagatctgcacgctttcgttagccggaaaggatactttagtgacaccaatccacactatcgcaccttttcaataaaaaaaaggactgggggtcagagaaccatacacgcacctcaccctgtgctgaagatcgtacaatcttggatcgctcgcaatatccttgctgatgcaaacatccacgaagccgcaaaagcgtacaagaagggcgagtccattgtagacaatgcttctcctcattgtgaggccgagtggctgctgaagctggatatttgcgacttttttcacaactgttccgagcgccaggtgtactacgttttcaagtcaatgaactactcatctctgctctctcttgagctcgcccggctatgtaccaaggtggacgacaaacgacccttacatagatggaataacaccaacaagcagtataaaattgaggaatactccagcttcagggtgggctcattaccccagggagcccctacaagtccggccttgtctaacctaatttgcgaaactctcgacgaaatcctgattatgctcagtttgaaatactccggatgctacactaggtatgcggatgatctgaccttctccttcaacaattccaccagggccaaagtgatggattttaaacgtcaggtgtcgaacgaactcaagaaatttgggttcgagatcaataagcagaagacacgtgtcatcccacccggcgcaagaaagatagttacagggttgaatgtgaatggaagtcagcctagcctgacacgggagttacgggacaagattaaagcagacctctattactgcaagaaatatggcgtcgtgaatcactgcgaaaagaataaatacaagagcattatcgggttcagcaaccatatgaagggtatgattagcttcgtctacagcgtgaatcccgagctggctggcaagtataaaatcaagtatgacgagcttgatcttccgacgttggttctgtga

SEQ ID NO: 9095 - RNA, 1140 nt, synthetic construct
  source 1..1140: mol_type = other RNA
atgaatcgctggaatccgaacatctatcatcgtaatggcgtagacaaaggttttgagccagattacctgctgacgctcgtccagtccggcaaggctatcaacagcaaacataagcccgtgatattcactttgtcacacctcgcaaatgtgacggacacccaatattcgaccctgcatgagtttgtgagtagaaaaggatacttttccaatattgagccacactatcgcacctttagcattaaaaagaggacaggagggcacaggactatacacgccccccatcctgtcctgaaaaaagtgcagtcttggattgctcgaaatatactggcggatgcggacgtacacgaagccgctaaggcatataaacgaggggaatccatcgttgacaacgccctaccccactgtgaatctgagtggctgttaaaactggacatctgcgatttcttccacaactgttctgaaaggcaggtctactacgtgttcaaatacatgaactactcatccttgctctcttttgagctggctcgcctgtgcacaaagatcgatgataagaggccgctcagacggtggaataataccaacaagcaatataagatcgaggagtatgggagttttcgggttggatcactgcctcagggcgcccctacttctcccgcactgagtaatctcatctgtgagaagttagacgagatcctgttcatgttgtcccttaagtacagcgcctgttatacacgttacgccgacgacttaaccttttcatttaataactccagccgcgcaaaggttctggggttcaaatgccaggtcagcaatgaacttaaaaagttcggcttcgaaattaacaagaagaaaactcggattatccccccaggtgccagaaaaatcgtgaccggactgaatgtgaacggaaacaaacctagcttgacacgggaacttagagataagattaaggctgacctttactactgcaaaaagtatggtgttgtgaaccactgcgaaaagaacaagtacaatagtatagtcggcttctctaaccatatgaacggcatgatttcattcgtgtatagcgtgaacccttccctcgccgagaagtacaagaaacagtatgaggagctcgatctaccaagtttggtactttga

SEQ ID NO: 9096 - RNA, 1140 nt, synthetic construct
  source 1..1140: mol_type = other RNA
atgaatcggtggaaccccaacacatatcacaagaatggcatcgagcagggattcaaccccgattatctggtgaccctcgtgaaatctggcaacgcaatcaagtccaaaagaaagcccgtgatcttcaccttggcccatctggcaaattgtacagatacacagtattcggacttgtacgcctttgtttcaagaaagggttatttcagcgaatcagaacctcactatcgtaccttctccattaaaaaaaggagtggcggaaatcgaatcatacacgtgccacatccggtcctaaaaatcgcccagagttggatagctcgccacattttagatgatggagatgtccacgactgcgctaaagcttataaaagtggggaatccattatcgacaacgccagcccccactgcgaatctgaatggcttctgaaactggacatatgcgatttctttcataatatctcggagcgccaggtatactacgtgttcagaaagatgcaatactcttctctcttgagcctcgagctggcccggttatgtacaaagatcatagataaacggccaaaccacaggtggaataacaacccgaaaaactacaagatcaaagagtacagctccgatagagtcggttcactgcctcagggggctccaacttctccttccctgagcaatatcatctgtaaagacttggacgagactctgtttatgctcgccctggagtctaacgcttgttacactcgttacgcggacgacctcactttttcatttaataacaccaccaggaaggatattgtcaattttaagcgaaaggtttccaatgagctgattaagtatgggtttaagattaacgctaagaaaacccgcattgtggccccaggcgcgaggaagatagtaaccggcctgatcgtgaatggacctgtccccacgatccctcgcgaacttaaagacaagattaaagccgatctatactattgcaagaagttcggcgtggcaaatcattgcatcaagaacaagtaccaaagcatcattggtttctccaaccatatgcgggggatgattagtttcgtgaacagcgttgacaagaaactggcacttaaatacaagaaggcatatgacgagcttaatctgccaacgctcattttatga

SEQ ID NO: 9097 - RNA, 1140 nt, synthetic construct
  source 1..1140: mol_type = other RNA
atgaataggtggattccaaacacataccataggaatggtctgatccaggggtatgacaagacatatctcaaaaatctggttcagactggaaatataatctcagggacccaccaccccgtgatctttacactaggacatctgtctaaatgcaccaacacacagtatgacgaccttcatagttttgtgagccgcaaggattacctgtcagaaatcgagcctcattacaggacgttcaacatcaaaaaacgcaccggagggtacagaaacatccatgtgcctcaccccgtgctgaagatcgtgcaatcatggattgcacggaacattctgagacaggtggatgttcacgattgtgccaaagcgtataaggtgggcgaatcaatttacgataatgccctcccacactgtggagctcagtggttgctgaagttagacatcaaagacttctttagcaacatttctgaacggcaagtgtattacgttttcaggaagatgaattatcctgcacttctatctttggagatggcgaagttatgcacgaaagtggatcatctcagagtcggcaagcggtggtctaacaccgagaagaattacgcagtcaaggaatacctgtttgataaggttggtagcctcccacagggtgcacctacttcccccgctctcagtaatattgtgttcaaggagttggacgaactgttattcatgctgtctctcaaccacgaggcctgctatacccgatacgccgacgacttgactttctccttccactcctccagccgtgccgaaatcatcgcctttaagcgccttgtaagtaaggagctgctgaagtttggctttaatataaaccccaagaaaactcgaatcgtcccacccggggctagaaaaattgtaacagggctgatagtcaatacccataaacctagcattccgaaggagatccgggataaggtaaaagctgacctttactactgtgagaaatacggcgtcattaaccactgcgtcaaaaacaactataaatcgatcataggcttcagcaatcacataagtggcatgatttccttcatttattccatcgacccagtgcagggaggcaagtttaagaaagtgtatgataagctcaacctgccgttgttcgttctttga

SEQ ID NO: 9098 - RNA, 1143 nt, synthetic construct
  source 1..1143: mol_type = other RNA
atgtctatttggagtcccttgctgttcaatgcagagggcaagaagcaaggatatgattgcaggtacctgcataaactgaccgaccagggaaacaagctctccgactctggactgcctgttatttttacactagctcacttatgtgctatggccggtgtaagcttctccctgattcacagttgtgtgagcagaaaatatgacccttacagatcattcaccattaaaaaacgttcaggagggtacaggcagatcgtggtgcctgagcccgagctaatgcatctccagcgatggatcaatgaattcatccttaaaagggccaaagttcacagctgcgccgccgcttatatcagtggctcagacatcaagatgaacgcttccaagcatttgggcgcaaactggttaatcaagcttgacattcagagatttttcgagagcattagcgaacttcaagtctactacatattccatcgactcgggtaccccaaactgctgtcctttgagatggccagaatctgcactagagtcgacacacagtccaataggcactttcgccccagatggaataatcgcatccaccacttcgaaatactcgaatattgtgatagccgtgttggatacctccctcagggcgcccctacttctccatcactctctaacctgacatgccggaaactggataaagagatttatgatctgtcatgccgctctgactgtaggtacacccggtatgcggatgatttcgccttcagctttatcgacttagatcgagagaaagcatccaactttgtaaaccaggtgtcgcggataatcagcagttatggatttaggaagaatgcccgcaaaactaagatcattccaccaggctctaagaagattataacggggttggtgctgggtaacgggaaggtgcatctccagaaggagctgaaggactacatccggcaaaacatctactttgcaaccaagtacggggtggacgaacattgtaaaaagcgcggcttcgtctccattgatggcttctataatcacttggagggcattgtgaattttgcgcttttcatcgagccggatttcggggaaaaggcatttgaagaatttcgggctataaagtggccaagtctgatcgtcggtctgcacgcttga

SEQ ID NO: 9099 - RNA, 1113 nt, synthetic construct
  source 1..1113: mol_type = other RNA
atgctaaatggcgggccttttaagtatataaaggagtccctgatcaagtcaaatagcatcctttacaagatcaagatctctatatacgtgcggaagttgtcctctaagaatctccctatactcttcaacctaaagcatctgtgtaacataatcaacgtgagctatgttaaaagcaaagacattgtgtcacggaaatattacgcctacaaacatttcactatcaagaaacgaagtggaggtgtaagacacattcacattcccaaggatgagttgaggctcattcagaaatgggtgcacaataacatactgctgaaaaactcttacgacgacagtgcttttgcgtacattagcgggagaaatatcaaaatgcatgccgaaaggcactgcatggctcgatgggtgctgaagattgatctggagaactttttcgaaaacacaaccgagagaaaagtcttccacatcttcaaaaaaatgggctatagcaatatcatgagtttcgatctggccagactgacgaccattcctgtcaatataaaagcaaaggagaagctgaagaagtggaagaacaaatcatcgatcaataaaagcgatcgcattcttggatctctcccacaaggtgccccgagcagtccattgctgtcaaatctctgcttcgccgacctggacagggaaattttttccatcgctaattccgctgaatttgtctatacacgttactccgacgatttgatcttctctacctttgaaggtgaccggatgaaagtgctaaacttactgaaggacgtcaggaaacttctgtcaattggggggtatcggatcaacaacaagaaagtaaagatcctgtctcctggcgcacgtaagatcattactggcctgaacatcaatcagggctttcccaaagtgaataaaagctacataatggaggtcaagaaacatctctattactgcctcaagttcggaccattgtcccactgtgagaagattaattttcgcaacatcgtttccttcaaagcattcttaaagggccgcatcaactacattaagttaatcgatcccgttgtgggacttaagcttagtcagaagtttgagctcattcattggcccattatctga

SEQ ID NO: 9100 - RNA, 963 nt, synthetic construct
  source 1..963: mol_type = other RNA
atgaatgtctcctataccaaaaccaaggacatagtggatcgcaagagctatccatacaagcatttttcgatcaagaaacggaatgggggctttagaaatatccacattcctcaggacgagcttagactgatccagaaatggattcacaagaacatcctgcttaaaaacaattacaaggattgcgctttcgcatacattccgggcagaaatattaaaatgcacgccgaacggcactgcatggcacgatggcttttgaagatagatctggagaatttctttgagaatacaacagaaaggcgagtatttcatgtgttccgcaatatgggatattccaaaaagatgtccttcgacttcgccagattatctaccattcccatgaacatcaaaaaaaaagagtcaagcgggaaatggaaaaaccgttttccaatcgggcggctggacaggattctcggatctctgcctcaaggcgctcccagttcccccctcctgagcaacctatgctttagcgaactcgataggaaaatcatatcaatcgcggattctttcgaatttgtttacaccaggtacagcgacgacctggtgtttagttgtttcgagggtgaccgtattaaggttatcaagcttctcaagagtattagaaaactcctgtccatgtacggctaccgaatcaacaacaagaagatcaagataatcacaccaggagcccggaagatcataacaggcctgaacattaaccagaatacgcccaaagtcagtaagtcttacattactgaggtgaacaagcacctatattattgtaagaagttcggtccactcagccattgtgagcgcattaaattccgcaacactgtgtcatatagggatcatttaaaggggcggatagattatatccgcctgatcgaccctgtcgaaggaactaaactgttgcagaagttcgagttgatcaattggcctttgatttga

SEQ ID NO: 9101 - RNA, 1179 nt, synthetic construct
  source 1..1179: mol_type = other RNA
atggagacatggagtacacatcagttgtatcagtcggctgtggcctcgctcgggcttgatgcagccgctgacctgcgggtatactgccaacggctccggttaaagggggtcgccgttgtttttacactgggccacctggctaggattacggacgtgaactatcagactctaagggaatccgtgaataggagaagagagtctgcaaactatagaatgtacgcagtaaagaagcggtccggcggacgcagattcatacacagtgtgtgcaccgatctgtttaaggtacagcgatttatcaatcaggaaatcctccagaaatgtatgccacaccctgcatcttttgccttccacaacagcggcggaatccggaagtgtgccgccatgcattgcggggctcgttggctgttccagtccgatttaacagatttcttctacaatgtgaccgagattgacgcttaccgagtgtttcaggagatcggctaccgacacgtcctggccttcgaactggctagactatgtacgaccacccaccttccacgaagccagatgaggaggctgtatgtggaggagtgggcgtacttcaacaagcatgcccgcaaacagaccggtgatggggaggatgactctgtcaccatgccctatgccgccagatttggcgtcgcgggtgtgttaccgcaaggcgcacctaccagccctatgctgtccaatcttgcagctgcgaaactcgacgaaagcctccaaaactttgccagtaagaatgggttcgtgtacactaggtatgccgacgatattacaatctccgcatcagacctgcccaaatctgtatcttccttgcatcgttcaatcgtccaaattatccgcaaaagcgggtttaaggagaatcgcaaaaagactaggatagcaggacccggatccaaaaaggttgtgctcggattgcttgtggacggtgatcagccccgtatatcaaaggagacttatagacgcattgatcggcacttgcatgctagtctgaaatacggacttgttgaaactgccgtccacgaaggtttcgactcagctttcggctttcataaccacctgtctggcctcgtggccttcgtcaaagacgttgacacaaagcgctgggaggaatttgcgctgcggctgagcaaggtgagggtgccatggagcgaaaactga

SEQ ID NO: 9102 - RNA, 1197 nt, synthetic construct
  source 1..1197: mol_type = other RNA
atggagacatggagcgctcaccagctcttcactaccgccgaaagaagtatcggcaaaagcgccgcatacgccctgcagtcttacgcacagtccctggaagctaaaaagttgccagtggtcttcactctgcgccacttgtctacgatcacaggagtctcttaccgggttctgcaccagaccgtgaataggaagagggaggcatgtaactaccgcatgtatgccattaaaaagcggtccggtggtcgtagaataatccatagtgtctgtgaagacctcattcgggtgcaggactttgtaaacagagagattcttcagcggtgtcaacctcacccagcctcctttgcattccattcaagtggcggtataaaggaatgcgcttcgatgcattgtggcgcaaggtgggttttccagtttgatctcagtgacttcttctatgatgtaacggaaatcgatgtatatcggattttcgacgatttgggctacagatctctcctggcatttgaactggcgcgtctgtgcaccacaactaagctccccaggcaccttaaacacctgctctatcattgcgctaatcccgataacctgattcaggatttcgaagatgactttgagaaaccggggaatggggttcgccggcttccctatcctgagcgccatggggtggtgggtgtgttaccacaaggagcccctacctcaccaatgttatccaatctagctgctagacgtatggacgagctgctgcagagcttcgctttcgactccggctttgtgtataccaggtatgccgacgatctaacattttctgcagctcgattgcaagacaagcacggcgtgtgctctgtccgcagggaggtgatcgggctgatcagaaaaagcggatttaaggaaaacagtaagaagagcaggatagccgggcccggatcaaaaaaagtggttctgggccttttagtcgatggggacacccctcgaatttcccgcgagacttacagacgaatcgatcggctcctttacggcgccctgcagaatggcttcgagagcgcctccgcgttcaacaaatttgactcagcgttgggcttctacaatcacctagggggactgatcgccttcgtgaagtcagtcgacgagaagcgatggagcgagtttagcaacagaatgaggggaatcgagcaaaagtggggtgattttggagacatttga

SEQ ID NO: 9103 - RNA, 1185 nt, synthetic construct
  source 1..1185: mol_type = other RNA
atggatgcgtggtcagtgcaccacttatacgagaacgccaagaatcaacgggatatgcagacagctgcgtctctgcgtgactatgcagcccagctcagatcgagtggcctgccagtgatatttacgctaggccatctggccaagatagttggcgtggagactgaaattctgcatgagactgtgaatcgacagcgcgagtctgccaactacagaatgtatgcagtagcaaagcgctcgggaggaaggcgatttattcacgcggtgaccccagaattgtttagggtccagcagtatctccacaaagagatactgtgtggggttaagccacatcctgctgccttcgcttttcattctagtggtggcatcagacagtgcgcttcccaacattgtggggctcgatggcttttccaatacgacctgaaggatttcttttatgagattagcgaggtcgacgtctataggatctttaacggtctggggtaccgcaagcttctgtcttttgaaattgctcggttgtgcaccaccacacggctacccatctcattcaagcggtatctcagggcctcctacagtgagaaacccaacttcgacaacgtggaactacttgatgatgcattctccggatacctgaaattcaagccctacctgcacagccagagaaccggggtattgcctcagggcgctccttcctctccgatgcttagcaatcttgcagcacgtcatctggacgaatccctgcacgaatatgcgtttcagctcggattcgtgtacactagatacgccgacgacattagcatttccgcatacgacttgccaagcaaaatgtccagaggtgatatccacagggccatcgtgcatcggatcaggaaagcccgtttcctcgagaacgaaaaaaagacacgcatcgccgggccgggcagtaaaaaattagtcttgggactcctggtggacggcgactcacctcgcctcagcaaggagacgtatatgaggattgatcgcctcctgtatgccgcaaataagtacggacttgtcaacaccgccaaacacgaaaatttttactcagcttacggcttctataatcacctgtctgggctggttgctttcgttaaggacgtagatatcaagagatgggccgaatttaaactccggttaagcgagctggatgtgccctgggagactacatga

SEQ ID NO: 9104 - RNA, 1137 nt, synthetic construct
  source 1..1137: mol_type = other RNA
atggagacatggtcagctcaccaactcgtgactgcagcggagccctcgttgggtccagctatcgccgaacagctccggcgctattctactcagctgcgtaggcaagagctgccagtcatctttagtctgcagcatctggcgaaaattacaggggtccagtatcaaaccctccatgatacagttaggcgacggcgggaggctgccaactaccgaatgtacgcggtcagcaagcgcagcgggggaagaagatttattcatgccgtgtgcggcgagctgaaggccgtacagcagttcatcaatgccgagattcttcaacggtgtaagccacacccgtgtagttacgccttccattcctcaggtgggatacggcagtgcgcagctgcccattgtggcgctcgctggttatttcagtttgacctggccgactttttctacgacgttacagaagtggatgtgtataggatcttccacggcctgggttaccgacgtttgctggctttcgagatggccagattgtgcaccaccactcggttgccgaaaacctttcttcagctccccgcaacacgcaggagggacctcactcaggtgggagatcacgaggttgataggataagaccttatcagcgtcaccaacgaggggtgcttccacagggagccccttcctctcccatgctggccaatctagcagcagcagccctggattgcacgatcaccgaatatgcggataataacggcctcgtttacacgagatacgctgacgacattactctgagtgcccgagacttgagatacgaccgtgcaagaatccgccgccaggtgatttccatgatcaggaagtgcggattccgggagaaccctaacaaatgtagaatcgcagggcccggaagcaaaaaggtggtgctgggcctgctagtcgatggcgaatctcctagggcctccagggaaacctatcggcagattgatagattagtatacggggtccggaaatttggcggtaaggctgcagctgctcacttcggcttcgagagcgaatatggatttcgcaatcacttagccggcctggtggccttcattaagtctgtggacctcgacaggtggaacgaactttcagaagtccttcgccacgtaggaatatga

SEQ ID NO: 9105 - RNA, 1125 nt, synthetic construct
  source 1..1125: mol_type = other RNA
atggaggattggtccgcccaccagctgtttcaggcagcctccgcaagcctggaccgtagtacggctacagccctgtctgcctatgccaggaccctccagagcgctaaactcccagtggtgttctctctgcgacacctgtccgggattgtcggggtcagttacaagatgcttagagaaagcgtaaggcgcaagcgtgaggcagctaactatcgcatttaccgcatcgccaaaagagacggcactttcaggcacatccatgaagttacctctgatctgtttcgcgtgcagacgtttctggcccatgaaatactggcaaaagtgtctccccaccccgccgctttcgctttccacgctggtggtggcataaagaaatgcgcagcacaacattgcggagcgcggtggatctttcagtacgacttgtcgaacttcttttacagtatcaacgaggccgatgtgtatagattattctgtcatctcggctaccggccactactggcgtttgaattcgcccgactgtctacaaccatccgcatgcctccatatatggcggggattattaatatggtgtcaccagaccacaggggaatgccttatgcagatgcttgcaataaactgggggtcttgccccaaggagctcctagctcgcctgccatctcaaatctggtcgccaaagatctcgacgacaggcttacaaaggtggccgtccactacaagcttgtatacactaggtatgctgatgatataactatttccgccatggacgttggcaagggccggtcaagaggcgagattcatcggagcgttatccatgcgattcgaaaatcagggttcgtggagaacgagagtaagacaagaatcgccgggcccggatccaagaaattggttctgggccttctcgtagatggcccccagccaaggctgagcagacagatgtacgaacgggtggatacccgcttatatgcatgtagaaaattcggactcgaggctaccgccgacttttacaagtttgactccgcgtatggtttctacaatcacctagctggattgctctcttttatcaaggacgtggacccgttaagctggaactccttcgcaccgcggtttaaggagatacctcctccctga

SEQ ID NO: 9106 - RNA, 1173 nt, synthetic construct
  source 1..1173: mol_type = other RNA
atggaaacatggtccactcatcacctgtacaatgatgctctagctgtacacgacactgatactgccctggagataaggtcatacgcccagaatcttatcactaagggtcaccccgtcgtgttcagtctcgaacatctgagccgtatcacacatgtatcatatgccatgctccgcgctacgatagagcgaaaccgggagagcgctaattaccgcatgttcgccgtgagcaaaagaagtggagggctcagatttattcacgctgtgactggcgatttgcagattgtccaaaggttcatcaatcaggagatcttgcagaactgccgaaaccaccctgcgagctttgcattccattcaagtggcggaatcagaaaatgtgcagcgcagcactgcggggccaaatggctgttccagttcgatctctccgactttttttacgcagttaacgaagcacaggtgtttagaatcttccgtgagatggggtacagggagcttctggccttcgagctgggccggttatgcaccaccaccagattgccacgtaacaagcatatgtatcttaagtggcggcctggtcccccactgtttcctcgattcggaggcgaagcaagaggcgaaggccttccctacccacaatcctctgggcagctgggcgttcttccacagggagcccctacctcgccgatgctcagtaatttggccgctggtaagctcgacgaatccctgtctgccttcgccaacgacctgggatttgtctatacgcgctatgcagatgatatcacaatctccgccaccaacattccccgaggtgtggcaattggaacaatatgtcaccgcgttatcgactgtattcgcaaggctggtttcaccgagaatcgcgagaaaattaggattgccgggccggggtctaagaaggtcgtgctgggcttactggttgatgggccccagccccggatcagcagggaaacatataagaggatagacagacacttacacgctgccaaaatctacgggctagaggcgaccgctcaacatgagggatttgactcagcgtttggctttcataatcatctcaccggcctggtgaggttcgtgcacgacgtcgacttgaaacggtgggccgatttttctcaacggctgacaagcattgaagtgccatggcaggcaatgccttga

SEQ ID NO: 9107 - RNA, 1167 nt, synthetic construct
  source 1..1167: mol_type = other RNA
atggaggtgtggtcagtccatcagttgtttgaacaggctaaggccgaccttggtgtcgacaggtcctctgagctgagaaagtatgcgcagtacctgatccatagtggcctacctgtgattttcagcctcaaacatctaagtaagatcacccgggtgaattatggagttctcagagacactgtggggaggcgcagagagagcgcaaattatcggatgtttcctgtgaagaaacgatccgggggcagacgcttcatccacgctgtttcaggccagctgttttcagtacaacagtttatcaacgccgatatcctgcaaaatgtggctccccacacttccagctttgcattccactggaatggtggaatccaaaagtgtgctgccatgcattgtggcgcaaagtggctgtttcagttcgatctcagcgattttttctacgacataaatgaaatcgacgtgttccgcattttccagcaacttggttacagaaagttactggcttttgaactcgcccgcatatgcaccacaatacacctgcccgcacacctgaagtgcaccttcaaggtccatagatatttccctgagtgccatcccccatacggagtgagctacgatgctggggttttaccacagggcgccccgacatctcccatgttgtccaacctggccgcccgagaactggatgaaagactgtttgaattcgctgtcgcgaacgggtttgtatatacaaggtacgccgatgacattaccttgtctgcccgtgagctgccgtctcgggttagcgttggagacattcacaggcagtcgacccacatcatacgaacctgtggctttcgtgaaaacaagaaaaaaacccgcgtggctggaccaggaagtaggaaaattgtcttggggctgctcatcgacggcgatcaacctcggattagtcgcgagacttacaaccggatcgataggcacctttacgcagccactaaattcgggattgtagagacggcatcccacgagggattcgacagcgcctacggcttctataatcatcttgcagggctcatctcattcgtgaacgatgtggacaagaaaaggtggactgagtttcacgcgcggttatccaaaattacggtcccctggcagacaccatcgggcacacagtatggtgagttctctcagtga

SEQ ID NO: 9108 - RNA, 1185 nt, synthetic construct
  source 1..1185: mol_type = other RNA
atggaggagtggtccgtgcatcagtttcagcaaggcgcaattgccgcctcagctccgtgcgtggatgacctcgtgaggtacgcccgactgttaaaaaacaatggcttgccagtgatattctcactggggcacctgtgtaaaatcacccgcagcaactataaattcctgcataacattgtcaacagaaaggtcgattcacagaattacagacttttccccatcaaaaagcggagtggtggaatacgccacattcatgctgtggcgggcaaactgtacaaggtccatgactacatcaataatgatatcctgcagtcttgttctcctcacccaagctcctacgcatttcatcgttcgggggggatcttcaagtgcgctaaacagcactgtgagtctaggtggatttttcaatttgacctgaaggacttcttctactccatcagcgaagctatggtcttcacagcgttgaaaaacctgggatacaaaaagctgttggcattcgagctggcccgaatctgcacgactaggcaccttccagcgaataaaattcggtacacagctagattttctaagagcctccccagttattacaacaataagccttatagagagacttatcatcacggcgtgcttccccagggtgcaccaagcagccccatgttgtcaaacttagttgccctaaggttagatgaaacgttgtctgcctacgccgacgaaaatggcctgacctataccaggtacgccgacgatatcacactatccactctcgctctgccttccaaggtaagcgtgggcggaataaagcgcgccgtgattaagattatacgccgcgcaggatttatagagaaccccaagaagatccgagtcgcaggtcctggatcaaggaaaaccgttctcgggctccttgtggaccagtcgagtcctcggatttctagacacacctataagcgtatcgaccggctgctctattccatcagtcagtataaactggccggtgttgccgaacacgatggatttgattcatctttcggcctctataatcaccttcatgggctgatcaactacgtgaaagacgtagactattcccggtgggaagaattcagcaagcagtttcaaccgattaaggagcagttcgagagcgagtttgatgtttccaacacagctcaatttatgctaagtagtacttga

SEQ ID NO: 9109 - RNA, 1188 nt, synthetic construct
  source 1..1188: mol_type = other RNA
atggaaacctggtcagcgcatcagctctacaccgaagcggaaagctctctcggtgaggcagccgctagaaatcttcaggcttactcagagcagttaagagccaagggactccctgtcatcttctctcttcgccacctggcggagctgagcggagttcgttattggtttctgcatgagactgtcaacaggatgcgcgaggtagccaattatcggatgttcgccattaaaaaacggtccgggggccgcagacatattcatagtgtgagcaacgagttgggcagggtgcagcaatggattaaccaacacttactgcagaactgcaagccgcacgctgctagttttgccttccataaggagggagggattcgtcagtgtgcggagcgacactgtggagccaggtggctcttccagttcgacctggtggatttcttttacgacgtttcggaaagagactgctttaacgtctttaaagggttgggctatcgtcctctgctggcattcgagctcgctcgcatctgcacaaccactaggctgccagcctggtgtccacgggcagaattccatggcgagcaactccgatgggaaaacatctggtgtgaagatgatttaaatcctgtgaaccccaatacatccagaaactttccgtattacgagaggttcggaagacttggcgccctgcctcaaggtgcaccaaccagtcccatgctatcaaacctcgccgcaaagtatctcgatgaatctctgcagcacttcgctaataagaacgggctgatatatacgcgctacgctgacgacatcacttttagtgcttgcaggctaggggtggcaagaggcagggtgctgtggcaggtaaaggatcttataaaacgggcacactttgccgtgaatcccaagaagacacggattgccggccccgggtccaagaaactagttctgggattgcttgttgacggtagcaccccacgcatctctcgagagacatacaaacggatcgaacgactgctgtacggcgccaagcagtttggcttcgaggccgctgccagccactttaaattcgatagcgcatacggtttccacaatcacctgtccggattggtggcatttgtcaaagatgtggacaggaagcggtggcaggaatttaacgccgtgttgctgaatgctaaatcctcatgggggaatgacgtctga

SEQ ID NO: 9110 - RNA, 1134 nt, synthetic construct
  source 1..1134: mol_type = other RNA
atggaggactggtcgacacatcagctcaaagagaatgcgataatcaagctgggaagcgagaaggccaacgatctgcagaagtatacaacgaacttgaaaatccagtcactgcccgtaatatttaccctaaatcatctggggattatcaccaataccgaatattcctttctctataagactgtctgtcgcgagagagaatacgtgaactatagaatgtttccgatcaagaaacgctccggaggtactaggttcattcatgcagtgtctaagaaactctcaatagtgcagacctttatcaacaatatcatcttgcagagtcagcagcctcacaactgctcatatgcctaccaccctagtggcgggataaaaaaatgcgcagccatgcactgtaatgccaagtggctatttcagtttgatcttgctgatttcttctaccgcattaacgagattgacgtgtataacattttccagaggatgggctacaggaagctgcttagttttgaactcgctcgactatgcactacgatccgtctcccaagacagctgcaatctatgttaaagcaattcaagagcttcagcctggacgactacccattctataataacgatttcattggcgtgttgccccaaggctcaccaacatcccccatgctcagcaatcttgccgcgatggaactggacgaggacctgtacgtctttgctctgaaaaacgggttcatctatacaagatacgctgacgacctcaccttttccgcaatcaatctgcctcagggcatgagcataggcaagattcggtggcaaatcattcagattattcggaaaaactgcttcaaggagaattctaataagattcggatcgcaggtcccggcgccaaaaaaattgtgctggggctcttagttgatggtaatcaacctcgaatctctaaagagatgtacaaaaggatcgaaaagatcttctactacgtcaaccggtttaagtttgagaacaccgccaaacaccttggtttcaactccacttttggattaatcaatcacctgcttgggttgataagctacctgaaggacgttgatagtgatcgttatggattgttcaacaagaagttcaatgaactgatgctgtctctgggatgttga

SEQ ID NO: 9111 - RNA, 1131 nt, synthetic construct
  source 1..1131: mol_type = other RNA
atggaagcatggtctacccaccatttggctcagcaagccgcaaagactctcggcagtgatgctgcagccagcctccagagctacgcgcaggtcctcatatccaaaggtttggcagtcgtgtttaccctgggccatctcagccggattaccggggtttcttaccaagtcctgcgggatacagtcgatagaaaacgcgacagcgccaattatcggatgtacgccatcaataagcgcagtggagggttacgcttcatccattcagtctctagggacttacttatcgtgcagcgtttcattaatcagcacattctgcagaagtgtgccccccatccgagctcctttgcctatcatccttccggaggcatcaagaagtgtgccaccatgcactgcggagctagatggcttttccatttcgacctgaaagatttcttttacgacatcaccgaaattgacgtattccacatatttaaggctatggggtaccgtaatttgctcgcctttgagcttgcgcgactgtgcacaacgacatgcttgcctaaaggccaagaacgactgctgtttcactcgacgaattcgaaatacaacgtgtatagggatcccaacggaatagtgggcgtgctgccacagggggcacctacttcacccatgctctccaacctggctgcccagaagctcgacgaggaactgagcagttttgcactaatgcatgggtttgtgtatactcgatatgctgacgacattaccttctctgcatcatacatacctaaggggttgaatatcggtaacattcaaaggcagatcatccacattatcagaacaaccgggttcgaggagaacaatcagaaaatccacattgctggcccaggctccaaaaaggtagtgctgggcctgctggtggatggtaacgaaccaaggatctcccgggagatgtaccaccgcatcgagaggtatttatacgcgatcgagaagtacggcctacggaacgtggcctgtcatgagggatttattagtgcttatggattcttcaaccacctgacaggtcttatcgcctttgttaaggacgttgatcagaaacgctgggaagagttcagctctagaatttcaagaatacagactccctggcacctttga

SEQ ID NO: 9112 - RNA, 1149 nt, synthetic construct
  source 1..1149: mol_type = other RNA
atggagacttggtcggcccatcagctgtataatgacgctaagcaccgctttaaagatatcgaaaaggccagtagcctgcgatcttatgcacagttccttatcgacaagaacctcccagtcatattctctctgaagcacctggccaagataaacgacttgaactacagctttctgagacttaccgttgagcgccgtcgggaatccagcaattataggatgtacgccgtgaaaaagagagcgggtggacgccgattcattcacagtgtgacgaaaaagctgctgaaggtgcagactttcattaacactgagatcttacagtactgtctgccgcaccccagctcatttgctttccacccttcaggaggtattaggcggtgcgcagaacaacactgcagcgctcggtggatgtttcagttcgacattctcaatttcttccatgcaatcaatgaggttgaggtcttcaacatctttacaggtttgggatatagaccattggtcgcgtttgagatggctcgtatctgcacaaccacgcacgtcccaaaccatttaaagccgctcctgtttaggaagtctaacaacacaccctacaacttctatgcgaataagtctggggccatcggcgtgcttccacaaggggcacctacaagtcccatgttggctaatctggtggctaagaaactcgacgaggaactatcgtccttcgtgcggaagcatggctttacatacacccggtacgccgacgacatcactatctcagccgtagacttacccgacaatctctccattggggaaatacacagaagcgtgatcagcattattcgccggtgtaagtttcgcgagaatataaagaaaacccgagtagccgggcccggaagtaaaaaactggtgttgggcctgctggtcgacggcgataaacctaggatctccagagagatgtataaaagaattgataggaacctccatgctctggagaaataccctattgccgatgtggcaaaatacgaaggcttcgattcatcttttgggttcttcaatcatgtatccggactagtggcctttaccaaagatgttgataccgagaggtgggaaaagtttaagaaacgtatagatggcatcgagctcccttgggaatccaagcttgttacttga

SEQ ID NO: 9113 - RNA, 1143 nt, synthetic construct
  source 1..1143: mol_type = other RNA
atggaaacctggtctgtacaccatctgagccagcaagctacaagcgtgctgggcaagtcaattgcccaggatctgactagctatgcacagcgattacgaagatccggccttcccgtcgtgtttactctgcgtcaccttagccgcatcgtcggcgtcgattatagtctgctgcgcgctagcgttgagagacggagggagtcagcaaactatcgcatgtttgccattaaaaagaggtctggtggccgacgccatatccatgccataaccggtgacttgttcaaggcacagcagttcataaacgccgaaatccttcagaagttgaatccccacccggctagttttgcctttcacccaggaggtggaatcagggcctgtgccgcagctcattgcggagctcgctggctgttccagtacgatctgtccgacttctttcacagtatctctgaggccgatgcatataaagtgttcttcaccgccgggtacagaccccttctagcttttgaactcgcccggatttgcactaccaccagactccccgaccacctgaagcatcatctttgggcgcacagagcatggagggactataaattctacggagatcacactcatgccatgggtgttctcccgcaaggtgcgcctacctcccctatgctctctaatctcgcggcccaccacctggatatcgtgttaacagagtttgcagacaggcatgggatgtcctacacaaggtatgccgacgacctgacattgtcgacgagctcggacctgccagatggcatgtccatcggcaatattcaccgtgctgtcattgggatcatccggaaatccgggttccaggaaaacaaaaagaagattcggatcgctggaccagggtcaaagaagattgtgctcggcctattagtggatgggacggcacctcgtctctcaaaagaaacttacaagcggattgacagacacctgcatgctacacaaaagtacgggttggccaacgtcgcgagccatgagggcttcgatagtcctctaggattttacaaccacttgtccggcctgatagcttttgtgaaagacgttgatctggtacggtggaaagagttccacgaccagttctctaaaatagagtctccaatgaatggaggcgtgtga

SEQ ID NO: 9114 - RNA, 1152 nt, synthetic construct
  source 1..1152: mol_type = other RNA
atggaggcatggagtgtgcatcatctgagccaagctgtgactccagtcctaggcaaaagcgccgctgaccaccttaaagactacgcacagcgcctccggagagcaaatttgcctgtgatttttaccctgcggcacttggctaaaatcaccgctgttgaatatggagtcctaagggcgacagtcgaaagaaggcgcgagtccgctaattaccgcatatttgcagtgaaaaagaggtcaggaggcagaagacacattcacgccgtgagcggggacctgttcaaggtccagcaattcatcaacctggagctgctacagaagctccgtccgcatcctgcctcttatgcgtttcatgccgagggtgggattcataagtgtgcctcagtgcactgcggagccaggtggctgtttcagtacgacttagaaaacttctttcacgctttgagtgagtcagatgcctatcgggtattcatgaaagcgggctaccggcctttactggcttttgaactcgcccgcctttgcactacaacccggctccccgcccatctcaaacatcacttaagacccaagcgtcacgccgcctccatgaaagcctatcagttttacgtcgagaggtctggggcaacgggggttctgccccaaggtgctcccacatccccaatgctttccaaccttgcagctttcgacttggatgaaaagttgaccgcattcgccgatctgcacggtttcacttatacgcgatatgctgacgatctcaccttttctgcaggcggcgaactgccagagcgaatgagtattggagatatccatcgaactattgtgggcgttatccgtaaatgtggctttcgcgaaaacaccaagaagacacgcgtggcaggacccgggagcaaaaaggtggtgctcggacttctggtcgatggtaccgtgcctaggctcccgagagagacatacaagcgaatcgataggcacctgcacgccacacagaagtacgggctggttgcggtagctgcccacgaatcttttgactcggcgatcggattccataatcatctggctggcctgatagcattcgtaaaggacgtggacaccgccagatgggaggagttccaccggcagttcagcatgatccctgccccaatgtccgccggcacttga

SEQ ID NO: 9115 - RNA, 1149 nt, synthetic construct
  source 1..1149: mol_type = other RNA
atggaagattggtcagtgcaccatctgcacaaggccgccgagttgaagctgggtgcgagcgaggcagcgcagattagaatctatgcacagcaactcattaggaaaaagatgcccgtaattttcaccttaaagcacttgtctatgattgccggggtggactatctcgccttgaggcggaccgtggagagacgacgtgaggcagccaattatcgcatgttcgctataaaaaaacgtagcggaggcagacgattcatccactctgtcactgaaccccttcaccggacacagcaatttatcaacagcgaaatcctccagaagatcgaaccacacccagcttcatttgcgttccattcaagtggtggcattaggaagtgcgccgaagtccattgtggagccagatggatctttagcttcgatcttgccgatttttttttcaagatatccgaagccaaagcatatgagatcttccataaagccggctacaggcccctgctggcattcgagctggctagaatttgcactaccacccgcttgcccaagaaactgcactacctgcttcgcaacacagacaacgcttggtgtcagaatgagaactgggggaaatatcaaatctatagtaggcatgcctactcaataggtgtcctccctcagggcgctcctaccagtccaatgttatccaatctggccgccctgaagctggacgttgccctaacagaatttgctgataagtacggctttagctacacacggtatgctgatgacctgtccatttcttcttgctcggaccttccatcttccttaagcatcgcaaggatatgtcggattgttatcgggatcatccgcaagtgcggatttgaggagaatcagaagaaaactcggatcgcgggccctggcgctaaaaaaattgtgctagggctcctcgttgatgggcccacgccgagaattagtaaggagacttacaaacgaattgaccggcacctgcacgcaattcagaagtacgggttcgctgaagtagcaacgcatgagaagttcgactcccctataggtctgtacaaccacatccatggattgatctcctttgtgaaagatgtggacccgaagcgctggggagagttcaattgtcagctgctcgctatgccagccccttga

SEQ ID NO: 9116 - RNA, 1149 nt, synthetic construct
  source 1..1149: mol_type = other RNA
atggaggcttggagcgtgcatcacctcagtcaaaaggcagagcctatcctcggacaggctgccgccgatgacctaaaaacttacgcactccgattgcggcaagccggtctgcccgtcatcttctccctggggcacttgtctagaattaccggggtggactacagcctgttaagggcgaccgtcgagcgaagacgcgaaagcgccaattatcgcatgttcgccattaaaaagagaagcggcggccggaggcacattcatgccgttacaggcgaactgttcaaagcccaccagttcataaacactgagatcctgcagaagctggagcctcatgttgcttccttcgcctttcatgccgacggagggatcaggacttgtgcatccgagcattgcggcgcacagtggctctttcagtttgacctggccaactttttctacagtgttaacgaagcagatgtgtatggagttttcgtgggtcttggatatcgacctctcctggcatttgagatggcgagaatatgcacgactacaagattgcctaagcacttattgccccatctttggacccaccggtcacacaagtctcacggctatcagttttatgctgataggtcaggagctatgggggtcctaccccaaggcgcaccaacgagtccgatgctgtcaaatctggtcgcacgcagactggatgagaagttgaccgaatttagtacccagtatgggtttgtgtacactcgctacgccgacgatctgacactgtcttgtggcgggaatctgccacgtggaatggctattggaaacctccaccggaaggtgaccggcattatccgcaaaaacggtttcagagagaatcttgacaaaacacgcatcgctggaccaggcagcaagaaggtggtactgggcctcttagtggatggcgaggggccgaggatctccaaggaaacatttaagcggatagataggcacctccacgcctccgaaaaatacggtctacccgacgtggcgaaacacgaaaaattcgacagcccctctgggttctacaaccatcttgctggtctgattgcttttgtaaaagacgtggataaggtccggtgggaagagttccatgcccgtttctcgaggcttcagtccccaatgaattcttcagcgtga

SEQ ID NO: 9117 - RNA, 1149 nt, synthetic construct
  source 1..1149: mol_type = other RNA
atggaagcatggtcagtacaccacctgtctcagaaagccgaacctctcctaggacaggcagccgccgatgatctcaaggcatatgctttgcgcttacgtcaggccggcctgcccgtgatttttagcctcggccatctcagtaaaatcgtgggagtagattacagcctgcttcgtgcaagtgtggagcgcaggagggaggcggctaactataggatgttcgccataaaaaaatgttccggtgggcgccgacacattcacgcggttaccggggagctcttcaaagtccaacagttcatcaattccgagatcctccagaagcggaagcctcatgcagcctcattcgctttccatccggacggcgggattagagcttgcgccagcgaacactgtggcgccaggtggttgttccagttcgacctttctaatttcttttattcagtgagcgaggctgacgtttatggtgtgctcgcagagctggggtactcccccttgctggcctttgaaatggcgaggatctgcactacaaccaggcttccagagcacctgaaacgctacctgtggtctgccctgtcgcataaggtgcgggattatcggctgtacgtagacagatccggagccatgggcgtccttccacaaggtgcccccaccagcccaatgctaagcaatctggctgcgcgaaatctcgacaaagcactgactgccttttcgacacaatatgggtttgtctatactagatacgctgacgatattacattatccagcggaggaaacctgccggagggtatgagtatcggatctatccataggtctgtgataggggttattcggaagaatgggtttagagaaaaccctgacaaaaccagaatcgctggcccaggctccaagaagctggtgctgggacttctggtcgacggcgaggtgcctcgaatctccaaggagacgttcaagagaattgaccgccacctacacgccgcagaacggtacgggttagtcgatgtggccaagcatgagaagtttgattctcccataggtttttacaaccacttggaaggcctgattgctttcgtgaaggatgtcgaacgggagcgctggaaggtgttgtacgacagatttagtaaactgcaggctcccatgaacgttggctcatga

SEQ ID NO: 9118 - RNA, 1185 nt, synthetic construct
  source 1..1185: mol_type = other RNA
atggaaacctggtctgtccaccagctctctactgccgcgaagtctacattagatgagagcagcgtggtacatctaaaatcatatgctcagtccctgaagagaagcggcctgccagtaatctttaccctgggacacctcagtaaaattatagacatcgactactcgtttctccgagctaccgtcgagagaaggagggagtccgccaactatcgtatgttcgcaattaaaaaacggtctggcggcagacgccatattcatagtgtcacaggagggctattacaggctcagcaattcataaacagcgagattttgcagaagatcgagccccactcggcgtccttcgcttttcacaaaaaagggggaatcagagcttgcgccagtatgcactgtggggccaggtggatgtttcaatacgacctagccgattttttctacagtgtgaacgaggccaatgtctacggcatctttagtgccctcggttatcgacctcttttggcctttgaaatggcgcgcatctgcacgacacttcggctgccaaatcacctcggacacctgctcattgatccacgcactaaggtgaagggcaagttttataacctgtaccagcgttatatggaagtgccggggttcggcacaatgccctacatgtcttctatgggggttctgccccaaggtgcacctacctcaccgatgctgagcaatcttgcagcccggaatctggacgtggaactcactgattatgcagaccagaacggccttatctatactaggtatgcagatgacctcaccctgtccagctcagaaaacttcccagagggtctgtcaatcggagacatccacagatccatagtgggtataatccgcaggaacaagttcaaagagaacaggaagaaaacgcgtgtggccggccccggctctaagaaattggtgctggggctgctggtcgatggggattcccctcggctttccaaggagacatacaaacgaattgacagacatttgtacagcatccagaaatacggcattttgtcagttagcaagcatgaaaagttcgactcccctctgggattctataatcacctttcaggactgattgcttacgtgaaggatgttgacaccaatcggtggaaggaattccatcggcgcctgttagagatcagctaccccattgaaatgaattactga

SEQ ID NO: 9119 - RNA, 1164 nt, synthetic construct
  source 1..1164: mol_type = other RNA
atggagatctggtcagcccatcagttgtatcagaacgcagagtcttctcttgggaaaactcaggcacttaatctgcggaattatgctagcaatctgaagaagaacaacctaccggtaattttcactctcaggcacctttccaaaatcaccggtgtggactaccggctgctcaggagtacggtcagtcgacgcagagaatccgctaattaccgtatgttcgcaataaaaaagagatctggaggcagaaggcacatccatgccgtgaccggggaaatttttaaggtccagcacttcatcaacagcgagatactgaagaaactggtccctcataatacatcatttgccttccatcccaatggtggcatcaggaaatgtgccgaacagcactgcggagctaagtggctcttccagttcgatataagcgacttcttttacagtattaacgagtcagatgtgtatatggtttttaagaatgccggctatcggcctctcatcgcatttgagttatctcgtttgtgtactaccattcggctcccacagcacctgcaatcgttgatttccgtacccaaacattccacaaaggagtacaagctttacgggcaaaacaaggaaaagaacctgttctgggacatcagcgaaccctggcccttgggggtactgcctcaaggagctccgtcctccccaatgttatctaatctggccaccgtgaagctcgacatcagtctgtctgagtacgcgaacaaatatgggttcacttacacaagatacgccgatgacattacactgtcttgcggaggaacgctacctgactccgtcagcgtgggcaagatcaagaacaacattatcagcatcattcgcaaacaccactttaaagagaatgtgtcgaaaatccgagtggcaggcccaggctcaaagaaaatagttttggggctgttagtggatggcaacgtgccccgccttagcaaacagacctataagcggatagagagacacctgtacagcatcaagaagtttggactgagcgaggtcgctcgccatgaaaaatttgattcacccattggcttctataaccatgtggcgggtctgatcgctttcgttaaagacgttgataatgccaggtggctcgaattttcccagaagtttgtgagtattgaacacccatga

SEQ ID NO: 9120 - RNA, 1164 nt, synthetic construct
  source 1..1164: mol_type = other RNA
atggagatatggagcgttcatcagctctaccaagaggcggaagccagtctggacaaggaatctgccctaaacctcaggaattatgctaacaatctgaaaaagaggaactttcccgtgatcttttcactgcggcacttgtccatcattacgggcgtggattacagcgtacttagatcaacagtggccagaagaagagagagcgcaaactataggatgtttgccattaaaaaacgctccggcggtcggcgccatatccatgcagtcacatccgaactctttaaggtgcagcactttatcaactctgtgatactccaaaagatcaagcctcacaatgctagttacgcctttcactctgacggcggggtacggaagtgcgcagaacagcactgcggagcgcggtggttgtttcagttcgatattgcagatttcttctactcgatcaacgagtcagacatatacaatatcttcgtctctgccgggtatcggccactgttggcgttcgaactgtctcgcctgtgtacaaccctcagacttccaactcaccttagatccctaatcttactgcctaaatattccgtgaaagagtacaagttctacaaccagtacaataccaatcacaattcgcgaataatccctgagccatttcccttgggcgttctgccccaaggcgctccaagcagcccgatgctcagtaacctggccagtgagaagctggacgtgtcactggcagattacgctgacaaaaatggcttcatttatactcggtacgctgatgatattaccttcagttgtggaaatgacctcgccgacggcgtatccgttaagaaggttcgccgagacgtgatctctatcattaggaagcatcatttcattgagaacactaacaagatcaggatctcaggaccggggagcaagaaagtggtcttggggcttttagtggacggaaacgccccccgtctgagcaaagaaacctataaacgtattgatcgacatctttacgctatccagaagtttggtttaaacgaggtcgccaaatatgaaaaattcgatagccccattgggttttataatcacgtcgccggtctgattgcttatgtgaaggatgtcgacaatgcacgctggctgcagttccaccagaggttctccattataaaccatccttga

SEQ ID NO: 9121 - RNA, 1173 nt, synthetic construct
  source 1..1173: mol_type = other RNA
atggaaacatggtccacccaccatctctcccaggaggcagaggtactgctaggcaaagaatctgccttgaagttaacccggtattctaacaagttaaagcggaatgatctgcccgttatatttaccttgcgccacctgtctaagatcgtgaaagtagactacaagttgctgcgatccactgttaatcgccaacgggaaagcgccaactaccgtatgtttgcgattaaaaagaggagtggaggcaggagacatatccatgcggtgactggcgaactgttcaaagtgcagcacttcataaattctgagattctccagaagatcaagccgcacaacctctcgtttgcattccacactaatggtgggattcgcaaatgtgctgagatgcattgtggagcccgttggcttttccaattcgatattgagaacttcttctacagcattaacgaatccgacgtctacaaaatattcctggctgccggatacaggccacttttatcatttgagttggccagaatttgcacaactctgtgcctgcccgcacaccttgccagcctgatacagcgaaacgctcacagtaggaagaagtacaaactctacaatcccaacaaaaactgtagcagttcctttctcgacgagtataggccgaagccaatgggagtgctgcctcagggtgccccttcaagtcccatgatctccaatcttgtggctaaggagctggatatttctatggaggaatacgctgacaagaattccctgatatacacccggtatgcagacgatatcacgttgagctcatcttccgatctgcctaaaggggtcagcacagggaagattagacgggacatcatcgagatcatccgcaagaatcacttcaaggaaaacagaaataagaccagaattgccgggcccggcagcaaaaaaattgttctcggtctactcgtggatagcgaacggcctcgcctgtcaaaggagacatataaacgaatcacaagacacatctatgcaatcgaaaaatttggaatcgaggaagtggccaagtatgagaaatttgatagtgctcttggcttttataaccatatctgcggcctgatttcatttgtcaaagacgtcgaccatgagaggtggaatgacttccataagaagatctcgaaaattaccccaccaacgaactga

SEQ ID NO: 9122 - RNA, 1176 nt, synthetic construct
  source 1..1176: mol_type = other RNA
atggtgagttggtccgcccatcagctttacatggaggctaagagtaagcttggtacccaacaggccaccaatctgagacagtatgcccgcgtgctgcagcgaaagaacctgcctgtcgtttttacattgaatcacctggccaagatcacagggatttctcacaccctgctgagggataccgtggagagagggcgagagcgcaagaactctaggatctactccataaagaaaagcagcggcggcgagagattcatccacgtgatcaacgacgacttggcatttgttcagaagttcattaactctgagatcctccagaaactgacaccgcacccttgtagctacgcatttcatgaatcaggcggcgtccgggagtgtgctgaaatacattgcggggccaggtggctgtttaaatttgacctatgcgacttcttctaccacataaatgaaagacacgtcttcgaagtgttcctgaatgctggttatcgcaacttaatcgcatttgagatggccaggctgtgtacaaccacccggatgcccagcaacttacattacctgcttaagccaaacaagtcaggaatcgagacgcaagacaagaaataccgtttttacaaccagcataatgagaaattaggattgctcccccaaggagcgcctacttcgcctatgctctcaaatctcgtggcgttcaagctagatcagaaacttgaaacgttcgccagggaacatgggctcacctatacccgctatgctgacgatattactttttcgactagtgacgacctgccagagaaaacaagtattggatacatccagcggtccgtcatcaaaattatcagccaatgcggctttcggaataatacgggcaaaatgcacgtggcaggaccaggcagcagaaaaattgtgttggggctgctggtggacggagagaaggctaggatttccaaggccacattcaagcgtgtagatcgcctgctccactctatcaaagtatatggcctcgatgcagtgtccgtacacgagcagtttaagtccccagtcggtctatatgaacatctccggggtctgcttgctttcgttaaggatgttgacactgcccgatgggatgaattcaaaattcagttccaccaggtcacttctccctggactgatgaacccatagtgtcagggagcttgtga

SEQ ID NO: 9123 - RNA, 1149 nt, synthetic construct
  source 1..1149: mol_type = other RNA
atggaaacttggtctgctcaccagctctttaataaagctacagacaagttggacaacgccgcctctaaaaagcttagatcttatgctctggccctcaaaaatagaaaactgcctgtgatctttacactccggcacctatcccacataaccgatgtggactacagcctgttgaggaagaccgtcatgcggcggcgcgagatggccaattataggatgtttcccgtgcggaagcattcagggggctggcgttacatccaccaagtatcccgcgatttattcaaggtgcagcagttcatcaattccgagatcctccagaaactgagcccacatccgtccagtttcgcattccatagtaacggaggaataaaggcatgcgcatcacagcactgtaatgcccgatggctctttcaatacgatctaaaggatttcttctacttcattaacgagaagaacatttacacgctcttcaaggacagcggctatcgcagcctcctggcatttgaactggcgaggctgtgcacaaccacacatcttcctaatcacctgttgcattatatcaaacaggattcccactttttcaacaactacaatttctacaacgacatcaaatcccgaattggtgtgctgcctcagggagcccccacttctcccatgttatctaatcttgtggcatataagctcgatgaactgctgactaagctgagcgaggaatatggtctggtttacaccagatatgcggacgatattacattctcaagtattgacgactactcagtccaacactcccgctttcgccttcacagggaaattgtgaaaatcatccgtcagaatggtttttgtgagaatacgaagaaaactcggataagtggccccggggccagaaagctagttttgggcttgctggtagatgggtgcgagcctcgacttagcaaagagatgtataagagaattgagaggcttctgtacgccagcaacaagtacggaatcattgaggtcgctaaaaacgaaaagtttgacaccccatatgggttatacaaccatttggctggcctggtttcttttgtcaacgatgtggataaaaacaggtggcaggaatttaatgacctcttctcgaagatcaataacccattcgacctgaaaaccatatga

SEQ ID NO: 9124 - RNA, 1146 nt, synthetic construct
  source 1..1146: mol_type = other RNA
atggaaacatggagtgcccaccagctgctcaagaaaacgtcactcaagttcgatgacattactgcccaatcactcctaaagtattgccaagaactccagaacaaaaatctcccagtcatttttacccttagacatttaagcaagatcaccaataccgattatttggtgctgaggaagacaatcatgaggagaagggagttagcaaattaccgcatatttagcattagaaagcggtctgggggacgccgatatatccaccaggttacaaaagagttatttcaggtgcagcagtttatcaacactgagatactgcagaaaattcaaccccaccctgctagtttcgccttttactctaatcggggaatcaaatcatgtgctctgaaacactgcggtgcccgctggttgtttcagtacgacctcaaggatttcttttacaccatcaatgagaagaacatctacaagattttctacaaacacggatatcgttcgctgttggcctttgagctggctcggatctgtacgacaacccacctgccgaagcatcttctgtgctacatacatcaggagtacaactattttaacctcgattcctacaagttctacgccgacagccaacagggcgttcttcctcagggtgccccaactagccccatgctgtctaatctggtggcatttaacttggatgaaagcttgtccaagttcgctaatgagcggggcttgatctatactcgctacgcggacgacattacactgtcctcctacaaaaaaagctacactaagtatgagaggttcaatatccataagaacatcgtcaagattatcagacagcatgacttcctggtcaacccaaaaaaaacccgtataattggccctggagcacggaaaatagtgctagggctgcttgtagatggcgacgtgcccagaattcccaaagaaacatataaacgaatcgaacgcctcctgtacgctagtaacaagtatggccttctggaaaccgcacgacacgaaaagttcgacaccccttatgggttctataatcacctgtctgggctgctagcgttcatcaaggacgtggataatagtaggtggatttacctttccaaactcttctcaaacatcgagaacccattttataagaagatttga

SEQ ID NO: 9125 - RNA, 1137 nt, synthetic construct
  source 1..1137: mol_type = other RNA
atggagatcttcagtgcgcatcagctcttcaataaagcctcatctaaactgggcgacgtgtccgccaagaagttggtatcatattaccagaatttgcagacgcagaatctgccaattatctttacacttagacacctaagcaaaatcaccagtactcactatctggtcctgagaaagactattatgcggaggcgggaacgcgtcaattatcgtatattctctatccgcaagaggagcggtggctaccggtacatccatcaagtgaacaaggagctgttcaaagtacagcagtttattaacagcgagatattacagaagacactgcctcacccggcctcttttgcattccactccaatggcggggtgaaacgctgtgcccttaaacactgcggagccaagtggctgttccaatatgacctgaaggactttttctacacgattaatgagaaaaacgtgtacgagatcttttacaatcttggatacagaagcctccttgcctttgaacttgcaaggatttgcactaccactcgcctccctaaatgcctgaagaactacataaattcctattccaactgtatcaactacaagttctataacaaccatctcctcggcatcctaccccaaggcgcaccaacaagccccatgctgagtaacttggcggcctttgaactggatactctgctgacagacctggctaaaaagcacgatttagtttacacccgatatgctgacgacatcaccttctccacctatttagataagcgtaaggagaaattcaccattcataaggatatcgtcaagaccattgtggaaagtggtttcatcattaacaacaagaagactcgaatagctggacctggggctaggaaaatagtgctggggttgttggtggacggcgagaaacccagggttcctaaggaaacctacaagagaattgaacggctcctatatgcctcaaacaaatatggtctgattgagacagcaaaacacgaaaattttgacacaccatacgggttctacaatcatatctctggactcatggcttttgttaaagatgtcgattttgagagatggaagtatctgaataacgtgttctcgaagatcgaggatcccctcaacatctttattcagaattga

SEQ ID NO: 9126 - RNA, 1167 nt, synthetic construct
  source 1..1167: mol_type = other RNA
atggagaattggtccgctcatcacctgtttcaaaagtctatcccaattctggggaataggtcaagccaggagttgaagaattatgccatctctctgcatcgccgaaagctgcctgtgatttttacactgcggcatctaagcaaaatcacaaacgttgattacttgctgctcagaaagaccgtgatgcggcaccgcgagatggctaactacagagtgtttactatcaagaagcgcagcggcggacggagatatattcacagagtctcaaaagagctgtttaaggtccagcagttcataaatttcgagatcctgcagaagatcacacctcaccatgcatcattcgcctttcattcaaaagggggcatccatgcctgtgcactttcgcactgcggcgctcgatggctctttcagtatgatttaaaggacttcttctacagcatcaacgagatcgacatttacaacatattcaaggacaatgggtataggccacttttagctttcgaattggctcgcatttgcacaacgaccgccttgcccaaagacttcttcaaactacagaattacctgaactacatcagcaattacaagttcaacaacctgcagaactataaattttacaacaacaggtctgggcttatcggagtactgccccaaggtgcgcccaccagtccaatgctttccaatctagcggcgtttaaactcgacaattccctgactgaactcgcagacaaatacggactcatctacactaggtatgccgatgatattaccttcagttccagctctagtttgcccaggggcaaaataattacggatatccacaaggcaattattaacgcaatcagaaagaacgacttctatgaaaacgccaagaaaacccggattgcaggaccgggcgctcgtaagctcgtgcttgggctgttagtggatggtgccgttccccgtatcccgaaagaaacttataaacgcattgaacgactcttgtacgccataaaagagtacaatctgctcgaagtcgccaagcacgagaagttcgacacaccttatggcctgtataatcacctctccggtctgctggcctttgtaaaagacgttgatatagtgcggtggaggaagtttcagcagctttttctggagatagctccacctaacaatcaaaccatttga

SEQ ID NO: 9127 - RNA, 1134 nt, synthetic construct
  source 1..1134: mol_type = other RNA
atggaagcctggtccatacatcacctcatcaaggaagccaataggcagggaaatctgagcaaagagagcattatagatctccaatgctacgcacaaaacttgatcaaaaacgacgtacccgttatttttaccctaatgcacctggccttcatcacgaatcttaattatgatttcctgtacggcacagtgagccgcaggtttgacaaatcgaactaccgaatgttttcaatcaggaagcgaaatggtaaacaccgctttattcatgccgcaatcaaaaacctgcatatactgcacaactacatcaacaaagagatcttgaagaacattcctattcacccctgtgcctatgctttcaataggaatggcggaattctgaagtgtgctcaaaagcattgcggatgtgaatggctgttacagtttgatcttaaggacttcttcttcagcataacagagtctaatgtctacaatgtgtttaaatccatcgggtataaggacatattggccttcgagctggcccgcatttgcacaaccaccagattaccccgcagctacaacatgccaagaaacaaaaacgcgtataactataagcagtataagtacgacctcatcggcgtgcttccacagggtgcggcaaccagtcccgcattgtccaatctggtcgccaagaatctagatgaggaacttcaggagtatgctaaaaatctcggttttgtgtacactcggtatgctgatgacctgactttctctaccgtaagtctgcctaacaatttatccattgacactatacggagacagatcatcaagattattcgtaagaaccacttcattgaaaacaaagagaagtcaagaatcgcagggccaggggcgaaaaagctcgttctcggcctgctggtcgatggaaagcagcctcgtatcagtaaggaggggtttaaacggattgagggcctgctttacattatcaagaaatttgggttgcagtccgtggccaaggaacggggcttttattctacatacggcctcatgaaccatctgatcggactgatggcttacctgaaagacgtggatatcgctaaatacaataagatcgaaccgctattctctgagatcaagtcaaggtatggtgaactcttctga

SEQ ID NO: 9128 - RNA, 1131 nt, synthetic construct
  source 1..1131: mol_type = other RNA
atggagacgtggtccgctcatcacctttttcaagaggctagcaagcagcttgattgtgacactatattcctgttacagaattatgcgctggatttgcgtagtaaaaagcttcccgtaatctttagtcttgggcatctgggaaaaatcaccggtatcgactacgactttttgtataggagtgttaaccggaaatacgaatccatcaactacaacatgttctcaattaggaagagaagcggcgggaacagatttattcatgctgtaaatggcaagctctttaagctccagaagtacctcaatgaagaaatcctgcagaagattaatccacacccaagttcatttgccttccacgcctctggaggcattcggcagtgcgcaaaccaacactgcggatgtaggtggttatttcagttcgacctgaaagactttttctatacaatcgcagagccccacgtgttcaaaattttcaaggagattgggtacaagaagatactcgcctttgaactcgcccgcctgtgcaccacaatccgcttacccaaaaccaagagctcctatatcaagtacaacaaatatgtgtctgagaatactccctacttcccacagaattatattggagtgctgccgcaaggcgcacctacatcccctatgctgtcaaatcttgccgcacgcagactggacgaaatgctgtacgactattctcaaaactacggtctagtttacacgcgatatgctgacgatctggcattctcggcctctgtgctgcctccccataaatcaatcgcgcgaataaagagggatattattagcataatccgccgcaataacttcttcgagaacaacaagaagatcagaatcgccggtcctgggagcagaaagaccatcctcggactgctcgtggatggggagaagccacggctgaccaaacagctccggaacaggatcgaacggaacattttcagcatcgagaaattcggcattcgtgaagtcgccaatcatgacaaattcgagtctgtctacggcttttttaatcacctgtccggcctaatgtccttcattcacgatgtcgatttgactttgtggaataaactacagccgcgatttgctacaataaaaaagttggtggagctgtga

SEQ ID NO: 9129 - RNA, 1125 nt, synthetic construct
  source 1..1125: mol_type = other RNA
atggagacatggagcgctcaccaccttttcagcgccgccgcaacaaagatcggagttgctcgagctggcagacttgcagcttacgttgccaagctgcaacgccgaaatctgcctgttataaccactctagggcaccttgctgagatcgtgggcgtgtcctatagtttcctgagacagactgtcgagcggaagagagaggccgcaaactataagctgtttgccatctctaaacggtctggcggtcgacggtttattcacgaggtgggcacgcagcttttgatcgtccagcgcttccttaatcaggaagtgctgcagggaatcgcaccacatcccgctagctttgctttccatagtactggaggtattaggaagtgcgctcagatgcactgtggagcctcgtggctcctacacttcgacctcaaggactttttttacagtatcagtgagtggtcagtctatgaagtctttgccagcctccagtatcgccctctgctgtcgttcgagttagcccggctctgcacaacgctgcatttgccgggagcctcccaagcgtatctgcgaccttcaactgccgcccagaggtattccttctaccggaaagacgtgatgggagtgctgccccaaggcgcaccaacctctcctatgttggccaacctggcggcacacgatctcgacgcgcgtctacaggacttcgccgatgccgccggaatgatttacaccaggtacgccgacgacctcaccttctccacagtgcgtctctccgcgccgatctctcagttgcaatacgaagtaagccggcagattgggctgaccggcttttcagaaaataaaaggaaacgcagagtggcaggtccagggtcacgtcgcacagttttaggtttgctcgtggatggcgccgaaccaaagctgagcaggcaatttattgctcgggtagataggcatctgtacgcggccaaaaaatacggccttgaggccgcagcatctagggcagcttttgatagcgctttcggctttcataaccacctgggggggctggtggcttattccatggatgccgagagaaagagaggggcaatgttcttagaaagactgcgcgaaatacccgtcccctggcagaccgcttga

SEQ ID NO: 9130 - RNA, 1143 nt, synthetic construct
  source 1..1143: mol_type = other RNA
atggagagctggtccgcccaccatctgaataagaaggctctggagacgctatccaatgatgaggtaaaagacttgacgttttacgcccggaatctcattagcaagaatacccccgttatatttacactgaaacatctgagcgagatcatggaaaagcgatatacattcctgcgctctaccgtcgagaggaagagagaacactctaactacaagatgttctcaatttcgaagcgatccggaggcaggaggtttattcatgctgtgtccaatcagttacaacctgtgcaacaatggatcaatacggaaatactgcagaagcaaaaacctcacaacgccagctttgcattccacgcaaatgggggcataaaaaaatgcgcggccatgcattgcggagcgaggtggatactaaagttcgacattagcaactttttctactgtatcaacgaaacagacgtgtaccagttctttgtgagcctcggttaccgtccgctcctggcttttgagttagctcgtatttgtactaccctgcggctgcccatccagcaccagaaatatatcaggtcaagaaattcgagtagattggagtacaagttctattatcaaccagagggctgtcgcggagtcttaccgcagggagctcctacctcaccaatgctgtctaacctgatcgccactaaacttgacgagcagctcacccagtacgccctggaaaacggctttacatatacacggtacgcggatgatctcgccttcagtgcaatcgacttgccagagaaaaagtctattggcaagatccagtttgaaatcacaggtattatgaaggcacagggcttcaaggagaacgaaaagaagacctctgttgccgggcctgggtcaaaaaagatgatccttgggctgcttgtggatggagagcagccccgcttgagtaaacagatgtataagaaactcgaccgctacctctacgcaattgaaaaatttggtctggacagcgtcgccactcacgaaaaattcgattccaccttcggcttttataaccatctttgcggttatatcagtttcgtaaagtccgtggatgctccaagaggggaggagttcgaaaaacggatgaacaacattactcccccctggacttctcacccttga

SEQ ID NO: 9131 - RNA, 1146 nt, synthetic construct
  source 1..1146: mol_type = other RNA
atggaaatttggtcgttacaccaattgcattccgcctctgtcgaaaaactgggcctctcccaagctaatagcttaagacagtattcagagaatcttaaagagaacaacctacccacaatttttacactgaatcacctggctaagatcactggggtaacatatcacttcctccgctcaacagttctgagaaaccgggagcttgccaactacaagatgtacgcgatcaataaaaaatctggtggtcgtcgacatatccacagtgtgaatggcaagctcctcaaagtgcagacgttcattaacgaggagatactccagaacatcatcacttctaaatccagctatgccttctctaaaggaaaggggataaaaagttgcgcacaagcacattgtggcgcaagatggatcttcaagtttgaccttgaaaacttcttttacagcattaatgaggcccaggtatacacaatttttaatagtctgggctacacaagtctgctgtcctttgaactggcccggatctgcacaactacccggctacctgttgaattgagcaagctgctgaaaagggggacctttgatccctttaactccatcaattcgtacactatttacaacaagaactgttttctcggagttctgccacagggtgccccgacgtcccctatgttatcaaatttggtggctaagtcacttgacaccgtcctgaaggaactggcttctacctacggactgacctataccaggtatgccgatgacctcaccttcagcactagtatggatctaccaaagaatctgtccatcggggaacttcagaggcagatcatacagcaaattcgcaagcagggattcaaggagaattctaagaaaacggtggtgttgggccccggaagccgaaaaattgtgctcggcctgcttgtggatactgccgagcctcgcctgtcaaaagcgatgttaaaaaggatcgacagattggtgtatgcaagcagtaagttcgggatcatagaggcagctgagcatgaaggtttcgactcacccattggctttttcaaccacgtctctgggctcatcagctttgtcaagcatattgacaaccggaagtatcagtactttagctccaagttcccagatttcgatttgcacctgacctga

SEQ ID NO: 9132 - RNA, 1137 nt, synthetic construct
  source 1..1137: mol_type = other RNA
atggagacttggagtttgcatagactgtatacgtgcagcgcagaaaaactaggcgctgacaaagccaccaaattgaaacgctattccgaaaacttgaaacgcaaaaatctccctaccatctttacccttaatcatctggccaagatcaccggcgtggactatcattttttacggtctacagttctccgtaacagggaaatagcaaactacaagatgtacgcgatcagaaaacgatctgggggcaggaggcacattcattctgtcaatgggaagctcctgaaagttcaaaccttcattaatgaggagattcttcagaatatccctgtctccagttcgtcttacgcctttaagaaaaatagcggcattaaggagtgcgcccaagctcattgtgaagcgaagtggatctttaagttcgacctggaaaactttttctactcaatcaacgagcaccaggtctataagatcttcaaggacctcggttacactagcctcttaagcttcgaaatcgctaagatttgtaccactactagactgccaacaaacttatccaaccttctgaaggtgaagaacaatagtgacttcaattcgtaccgcttctaccagaacaactattgcctaggcgtgctgccccagggatcacccacgagtccaatgctgtctaacctggtagctcagaacctggacaacgcactgataggtttggcctccaattacaatctcacatataccaggtatgctgatgatctgaccttttctactccgataaaccttcctcagaatctgagcatcggaaagctccagcgggaaatcttttatgaaattcgtcgccacgggttcaaagagaataaaaaaaagaccgtgatcctaggacccggcagccggaagatagtgttgggactgctggttgatacatccgagccaagactgtccaaggcaatgctcaaacgaatcgatcggctggtgtacgccgcccacaagttcggtatcattgaggccgcagagcacgagggatttgagagccctattgggttctttaatcacgtgaatgggcttatttccttcgtaaagcacatagatatcaacaaataccactacttctcatcaaagtttcccattttcgagtttgataacttttga

SEQ ID NO: 9133 - RNA, 1140 nt, synthetic construct
  source 1..1140: mol_type = other RNA
atggaggtgtggtcactgcaccagctgtacacagaatcagtggagaaacttggagctaataaggcgaaacagttgcgtaagtactcgacgaacttaaaggagaacaatctgcctaccatatttactcttaaccaccttgccaagattaccggcgtgacctaccatttcctgagatctacggtgttacggaaccgggaaatcgccaattacaaaatgtatgctatccataagcgcaatggtgggctgagacatatccatagcgtgaacggaaagctgctaaaggtgcagactttcctgaatgaggagattctgcaacacactactgtaagtcgctcttcctatgccttcagcaagaatgggggtattaaaccatgcgcacaggttcactgtggcgcaaaatggatcttcaaatttgacctagagaacttcttttacagcataaacgagtaccaggtatataagatattcaaagacctgggctatacccctctcttgagcttcgaactagcccggatttgcacaaccataagattgcccacaaacatgcattctctgctcaaggaatcaaacaacaccttctttaaggactacaagttttaccagaacaattcgcgactgggcgtgcttccacaaggagcgcccacaagccctatgttgagtaatcttgtagcacgacacctggacaatgccctcaaagaactcgctgataactggggtctgacatacaccaggtatgctgatgatctcactttttctactccgacaaatctgccatccaacctttccatcggcgaactccaaaggaaggtcatctccacgattaggaagcatgggtttaaggagaataaagaaaagaccgtcgttctgggccccggcagtcggaaaatcgtcttaggactcctcgtggatacacacgagccacgcctctcaaaagtcatgttgaagaggattgacagactggttcacgcaagcaataaatatgggattgtcgccgttgccaaacatgagggatttaagtcccccatcggttttttcaaccacgtgagcgggttgatcagtttcgtgaaacacatcgatatgaacaagtatcagtacttttcctctaagttccctgacttcaaatttaatgatctgtcttga

SEQ ID NO: 9134 - RNA, 1143 nt, synthetic construct
  source 1..1143: mol_type = other RNA
atggagacatggagtgcgcaccacctgttcaagaaagcgacggcccagctgaatgacagcgtcgctttagatttgagtcgctacgcacagtgcctccgtaaccaggagctgccggtgatctttaccttgggtcatcttgctaaaataaccggcattgactacagatttctgcacgccactgtgaacagggaaagagaagccgcaaattaccgtatgtttgctatccgaaagagatctgggggaaaaaggttcatccacgcggtgtccaatactcttagcagcgtccatgagttcctaaaccgggaggtactgtcaaaggtcgatcctcaccccgcctcctatgcataccaccggagtggtggcattagagcctgtgcccaaaggcattgcggcgccaggtggctgctgcattttgaccttaaagacttcttctttacgatacatgaggccaaagtgtaccagattttccgggagatgggctacagagaattgctgtcgttcgagctggctcgcctgtgtacaaccaccagactcccaaggcacttatcacacctgactaagccttccgatccctgtttcaagctgaacgaacttccttatcgaagatatcactctatcggtgttcttccccagggggcctctaccagccccatgctatcaaatctcgctgcaaggcacctggaccaagatctgtacctctttgcaaaggagttgggcttagtgtatacccgttatgccgacgacctcacatttagcgcatatgacctccctcggggctggtccattggaaagttgaagttttacgtggaaaagaccatccggaagcatggattccgcacaaatccgtcaaaattttccgtgtgcggtccagggagtcgcaaaattgttctcgggctacttgttgatggagatcatccacgattgtccaagtggactcggcatcggatcgataggttactgtatagcgtcgacaagttcggatgggaaaaagtagccgagttcgatgagtttgattctctgtatgggtttttcaaccacctgcgcggactgatcgcttacgctaaagacgctgacccaatgcacggcgaacagtaccgctctaggttcgaagagctcatagaacgatttcccgtggagctctga

SEQ ID NO: 9135 - RNA, 1110 nt, synthetic construct
  source 1..1110: mol_type = other RNA
atggagaattggagtttacacactcttaaccagaaattggaggaagacttctctgatgagcagctgaacacatggattcaatatgcaagaaatctcagaaaacagaatctgcccattatcttcaacctaaaacatctatccaagatcaccaatatcaatcagcatttactttactctgtgatctgcaggtttaaagagaaggactattacaagatcttccgaataaagaagaagactgggggctacagattcatccattcacctaacaatgaattgaagaaggttcagtactttatcaacaagtacatcctctctaaattggatatacacaagtcctgttttagttatcacaaagatggcggggtgctgcggtgcgctgaacaacatactaatgccaagatcctcttcaaatacgacctgaaggacttctttttttgcattaacgagatgtccgtgtatcatctcttcaaaagcttgggctacaccaaaaaactgtcgtttcaaatggcgaggctgtgtacaataatactgattaaagatcacgggaagtacattaagaagtacaaggtcaaggataaagaaattgaactgggagtgctcccacagggagctccgactagcccaatgctgtccaatctgcttgccaatcagctcgacgttaaactgtcacagctggccgacacgaacaacctgatatatacccggtatgctgacgatctcacgttcagctcaaacaaaaagctttctaaaatcgagatccgaaccattaactccaagattctgaagatcattaagtacgaaaagttcatcatcaacaagaacaagatctccattagccgccagggaagccgcaaacaagtcctcgggctgattgtaaacaatgatacccccaagctgagcaaagatcgcaaaaagaagatagacacattcctttacgccatcgagaagttcggttgggagagtacaaccgagcactatggttttcgtgatagtttaggcttttttcaccacttggacggcattatcatctatgcagaacacattgacaaagacctaggaaagaagtatcggaataaactggataaacttctccctaaattgtttaggtga

SEQ ID NO: 9136 - RNA, 1143 nt, synthetic construct
  source 1..1143: mol_type = other RNA
atgaccatcgtgcccagtcatttgtattacctgggaggcataaaagccaaaagaattcctgccgtgttatccgctacaatggctaaagcagccaagttcctgatcaacgatgtcgtctacatccacaatctgcaacacttagtgaagctaagctctgtggataaggtgtacttggatgacatcatcctcagaaggaagaacgagtatgagcactatactgtcgaaaaaaagagcggagggagccgctttatctcggcccccaaagaggatcttaagcagcttcagaggtggattaattactatatcctccggaacctcaagccgcacccctgctgctactcttaccacaaaaatagctctatatactcctgcgcaatggttcactgttcctcacagtggctagttaagctcgacgtggagaacttttttgacatgacgagtgaacgctcagtgtatgaacagtttatcctcatcggatattccccaatcgtctcatttgcattggcacggatatgtacctatcaacccacctttctgacaaaaaaccactccaagtgggttctctataaaaggaagaatcgtgagttagcgtactcacgagacaacattaagtatattggtcgactgcctcaaggggcgccaacctcacccatgctttctaacatggtgtttttcgagctggacaagattatcttcaaactggtgcagtcccatggcgggctgtacacacggtacgccgatgatcttttcattagcttcccaaagaaagacatgaacaggtctgatattagcaaaatcataggcagagtggttgactacctgcggaaaaagggatattctctcaataagactaagatcaaggtaagtccgccaggggcaaagaagattgtactgggattgaatgtggacaaacatattcctcacttgtccaaagagttcaaaaaaagcatcgattcccatctttatgctctgagcgaatttggccctgtcgcccatgctcgcttcagaggtttcaatagtgtatacgggatgctggagcatattaagggtaagatattcttcgctaagactatcagtcaggactacggcctgaagtgtattcaggaattctacgccgccctggaaaaacacggctttaattga

SEQ ID NO: 9137 - RNA, 1143 nt, synthetic construct
  source 1..1143: mol_type = other RNA
atgactatcgtgccttctcacttatattatcttgggggtgttaaagcacgcagaaccccagctgtgttgtccgcgataatggctaaatcagcccagtttcatacaaacgacatcgtctacatccataacttgcagcatctggttaagttgacctctgtagagaagacatattttgatagagtgatactacgtgaggtccacgaatacgagcattattcgattgctaagaaaagtggaggctaccggtacatatccgctccgaaagaagacctcaaaaagctgcagcgatggatcaacttctacgtgctgaaaaatctgaatccacatccctgctgtttttcataccacaagaattcttccatctataattgtgcgcttgctcactgcgccagtaaatggctgattaaactcgatattgagaactttttcgacatgactagcgaaaggaacgtatatgaccagttccggctgattggctacagccctattgttagcttcgccctggcaaggatctgtacttaccagcccaagtatttaaataagaatcatgaccggtgggtgctgtacaagcgagatacccaggaactggtgtacagcaagaagaatgtcaagtacctagggagattgccccaaggggcacccaccagtccaatgctctccaatgttgtgttctacgagttggatgagctgatttataagcttgtccaggagaatggaggcctctacacacgctacgccgacgatatttttatctccttccctaagaaggaaatgggtaggaatgacgtaagcaagatcatcggcagggtgatagggtacctcagaaagaaaggttattccctgaacaagaccaaaattaaggtgtccccccctggggccaaaaaaattatccttggcctgaacgtgaacggtgatacgccgcaactctcaaaggactttaaaaacagcatcaactctcacctgtacagcctcgaaacatatggaccagtccttcacgcccaataccgcggctttgattctgtctatggaatgttagagcacatcaagggcaagattagtttcgcaaaaaacatctcgtatgactacggggtgaaatgctatgatgaattctattcagccctggagaaacacggattcaactga

SEQ ID NO: 9138 - RNA, 1143 nt, synthetic construct
  source 1..1143: mol_type = other RNA
atgaccatcgtccctagccacctctactatcttgagggcatccaggcacgcagaactccgagcgttttatcagccgtgatggcaaagagcgcaagatttcatatcgacgggatcacttatatccacaatctgcagcacttggtgaaactttccttgatagacaagaagtatctgaatgacttgatcttgagaaagacccatgactatgagcacttctcaattaaaaagaagagcggaggacatcgttatattagcgcacccaaggaagatctaaaaaggctccagaaatgggtaaacttctatgtacttaagaacctcagtcctcacccttgttgctatagttatcacaagaactcttccatttacaaatgtgctctggctcattgctcatcgaaatggctcataaagctggacatagagtccttttttgacatgacctctgagttatcagtctacaagcaattcaaatctatcggctatagtccaattgtctctttcgctctaacaagaatttgcacgtatcagcccaaatttctgaccaataaccacgatcgctggattctgtacaagaggaaaaataaggacttcatctacccccgggaagggatcaagtacataggaaggctgccccaaggtgcccctacctctccgatgctgtccaatatgattttctataagacagatgagctgatctacaattttatcaagaaacggggaggcatctacactcgatacgccgatgacattttcatctccttttcagaagaggaattcactcgcgatgatgttagcaacattatcggcaggattgtggggtacttaaaaagcaacggctacagtctcaacaagacgaaaatcaaaatatcccccccaggagcgcgaaaaacaatactgtccttcaatgtgaatgaatctaccccaaagctgagcaaagagtttaagaagagcattgagtcccatctgtacgccctgaacacatttgggccagtgctccatgcgcagtaccggggtttcgattctgtgtatggcatgctcgagcacattaagggcaaaattttcttcgccaagagtatctaccttgaatacgggatcgcctgttttaatgagtttaactcggctctggaaaaacacggttttaactga

SEQ ID NO: 9139 - RNA, 1143 nt, synthetic construct
  source 1..1143: mol_type = other RNA
atgactattgtcccttcacatctctactttataggaggcgtggaggctagacgcgaaccagccgtgctaaagagcctgatggctaaatctagcaagttccacgatcacggcctcacatacattcactccatccagcatctgtctaaactgatttacaccgatgagaactatttgaagagcatcatattgcggaaatcttctgaatacgaccactattcgatccccaagaagagcgggggaagcagattcatcagtgctccccgggacgagttgaagaagatccaacattggatcaacttcaacgtcctgaaaaatctaacgccacatccttgttgctactcctaccacaaaaaagcaagcatctacaaatgcgcagctatacactgctcatctaaatggctccttaagctggacctcgagacattctttgacatgacatcagaggtgcatgtttataaacagttcaccagcattggctattcaccgatcgtatcatttgcattggccaggatttgtacgtatcagccgaagaagctgactgcgcactattccacctggaagctccatagccgggtaaaccgcaaagaacccttttcccgatcagggatctcctacatcggaagactgccccaagggtcccctaccagcccaatgcttagtaatatggccttctataatctcgacgagaaaatctattcgctggtcaagtattacggtgggctgtattctaggtacgccgatgatattttcatttctttctccagtgctgatattaacaggactcttatatccaagcttgtgggccgtctgatcaatcacctgaaaaaggaaggctacaagctgaacaagaccaagataaaactttctccacctggttcccgaaaaattgtgctaggattgaatgtggacagtgaaacacctaagctcagtaaagagtttaaacgcagcatcgactcacatttatacgcattagcgaagcacgggcccaaactgcacgccttagagcggaactttcagagtgttttcggcatgctggaacatattaagggcaagatcctgtttgccagatctattagtagggaatatggtgataagaagctcaatgagttttacagcgccctggagtcccacggattcaattga

SEQ ID NO: 9140 - RNA, 1140 nt, synthetic construct
  source 1..1140: mol_type = other RNA
atgacgatagttccgactcacctgtattacatagagggggtgaagaagggacggcctagcagtctccttaaaaaactcgtttataagtctgggctgttggccgagcgtaatctgccctacattcattctgtaaaacacctgtcactactcacaggatgtgacgagaactatctgctttccattatcaacagatcaaataggacatatagcttttacactgtgccaaaacgcagcggtggtgtcaggttcatccacgcacctgatgaagagctgaaaaaactgcagcaatggattaatgcacaaattctgatcaacgtgcccgttcatccctgttgttattctttccacaaggatagctccattaagaagtgcgctgaaaagcactgtggcgtcaagtggcttatcaagatagatatcgagaacttctttgagatggtgagcgaaatagagatctacaaggttttcatcaagttagggtacaagcccataatcagtttagctctggcccgcatctgcacctatgagccgagatacctcactgggttctataacaaatgggtgatctacaaaaagagcaagcgactcccatttacatcagaaaatgctagattctttggcagactaccccagggagctcctacctcccctatgctgtcgaacttggtgctcagtagtctggatgagcgaattaaccgtctgatcaaatacaaaaacggagtgtattctcggtacgccgacgacatctttatcagctttggcgataaagacattaaccgcgtctaccttgaaaaggtcatcggacgggtgacccggtatctggaagactttggctataaagccaacaaaaccaagataaggctgatctcccctagggcactcaaaattattctaggcctgaatgtgggaggggagatcgtaaagctgaattccaattacaagaaggacttacagtgccacttctacggcattaataagttcggcctgatttcccatgcctctcatcgcaagtttaattcagtgcttggtatgttggaacatatcaaaggtaaagtcaatttcgcgtgccagatcgagccagattatggcattccattgaaggaggaattgaaaaacattctcaataagaacgggctttactga

SEQ ID NO: 9141 - RNA, 1143 nt, synthetic construct
  source 1..1143: mol_type = other RNA
atgacaatcgtccctagccatctctattacattgagggcgtgaaaaaagggagatccccgtccattcttaaaagcttaatcgtgaagagttccttcttcaactacaagaacattccctatatacatgacgtgaagcacctgtcacatctgctgggatgtagccagatcgatctgacttccattattaaacggaactattctggatatcgcttctacacggtgcccaaatacagtggcggtgtccggtttattaattctcccaacgactttctgaagaagattcaaagatggatcaatttcaacatcctcagcaaagtagaggtgcacccttcctgttatagctttcataagaacagcagcattaaaaattgcgcggagaagcactgcggagccaaatggcttgtgaagatcgatatcgagaatttctttgaaatggtttccgaagtcgaggtgtacaagcaatttaggaaattagggtacaaaccgattgtttcgtttgccctttctcgcatatgcacttacgaacctacccacctggtaaacttccagcataagtggattaattacaattcacggaccgattcactgccattctcccgaagaaatgtgaatttctttggacgcctgccacagggtgctccaacaagtcccatgttgagtaacctcgtgctgtcaagtttggatgagaaggttacaaggctaatccggaacaaaaatggtatatatacccgatatgctgacgacatcttcattagcttttccgaaatggccgtggacaggaaattcctcaggcagatcatcgggaagctgatttcgtatttaaactctttcggataccaggctaataagactaagatcaagataatctcaccaagaagcaccaaactcgtactagggctcaatgttgcagaggataaagtctttctgcagaagaagtacaaaaataacctcgagtctcacatctacggcatgaaaaagtttggtttggtgctgcatgccaaacaccgtaagttcaactctgtcctgggcatgattgaccacataaacggcatggtcaactatgcatcttacatcgaacctatgtatggcaacaagttgaaggaaaagataaagcacatcgtgaatatcaatggccttgggtga

SEQ ID NO: 9142 - RNA, 1143 nt, synthetic construct
  source 1..1143: mol_type = other RNA
atgacaatcgtgagcactcactcgtacttccaaggtggaattaaaaagggccacagtgcgaaacacctgtattctttaatgagcaaggctcataagctcgagtgctatgatataccctatgtgcactccatctatcatttggctatgctgtcaagactccctgttcatctcctgcactcctttaccgacaggaagtcaatccactatacatcttactccattccgaagcgcagtggtgggtgtcggtttctacacgcaccctcagacgagttaaaatccgcccagcggtggattaatgacaagatactgtcccaactgccggtccatagctcctgttacagctaccattccaaggggagtatcttggaatgcgcccagaagcattgcagctcaaagtggctcatcaaactggacatcgagaactttttcgatgaaatatcggaggtggacgtgtacaaagtgttcagaaccattggctataagccaatggtcgcctttattcttgcccgcatctgcacctacgagccttatactgtccggaataacaaacactcttgggtccagtacaataagaactcagacgatctgccctacggaaagaaacatattaagcttttcggccgagtgccccagggagctcctacaagtccaatgttgagcaatctggttctgtacaagcttgacgagaaactctcccacttcgcacagtcaaggggaggcatctattctcgttatgcagatgatctgttcatctcctttggatctgatgattttgataggactaaagctagccaggtcattggtagctgtttaagttctgtgcgcagctatgggtacaaactgaacagaacgaaaattaaggttgtgcctccaggcagtaacaaggtagtactcggccttaacgtaaatggtgacgaggttcgactgacaaagacctacaagaagaaaatagagtctcacatttacggcatcaaaaaatttgggatcgataagcacgccttgcacaggggattcgacagcgtgttctctatgattgaccacatcatcggcctaatcaaccatgccaaaagagtggaaccagaattcggggcggacaagcatgtggaatttcagcggatactcaccaatctgggcctggggtga

SEQ ID NO: 9143 - RNA, 1071 nt, synthetic construct
  source 1..1071: mol_type = other RNA
atggcccaggctcacaagcttgaatgtctgggcatcccatacattcattcatttctccactttgctcatctgaccaaactgcccgagtcctatcttagaagcgtggtcaatcgacacaacgccagctacacatcgtatgcgattccgaagaggtccggcgggtcccgttaccttcagatcccctcagatgaactgaagggcctgcaaaggtggattaactgtgaaatcctcaacagattgccagtgcactcctcctgctactcctaccacaagaattcttccatcgttcagtgtgccgagagacattgcagttcgaactggctcataaagcttgacattgagaatttctttgacacgattaacgaagtagaagtgtacaaggtattccgtaagatcggatacaaaccattaattgcctttgggttggctcggatttgcacatatcagcccataagcgtattacaaaacaagaaaaactgggtgcaattcaataagaatagtgacgagatgcctttccagaagaaacacatccggcacttcgggagggttccacaaggggcacccacctcacctatgctcagtaatctcgtgttagcggatctagatgagaaactgagttcttatgcacagaaacggggggggatctacactcgctatgccgacgacctcttcatctcttttagccaaaataacttcgaccgacagcaggcttcccaggtcataggaagcgttttgggacatgtgaaatcttacggctataacctgaaaaagtcaaagatcaaggtgattcctcctggatctaacaaggtgattctgggattgtctgttaatgataagcaggtccgcctgaccaagcagtatcgccagaaaatcaatagccacatctatggcattgtgaagtttggtgtggataaacatgcaatacacaggggctttgacagcgtcttcggtatgatcgatcatgtctttggtctgatcaactacgccaaaaccgtggagccggacttcggtcatacaaaataccaggagctgcaggatagcctgagaagttctggcctatcatgcacttga

SEQ ID NO: 9144 - RNA, 1065 nt, synthetic construct
  source 1..1065: mol_type = other RNA
atgtataaggctcacaaaatggaaaggtggggtattccatatgtgcatagcatttatcacttggcgatcctgtcaggcctttccgtgaacaaactgaattctatcgtcggtcggcaaaagcaatactacactgcctacgccatccccaaacgaagtggaggctcgaggtttcttcacgcaccagatgacgagctgaaaaaactacagcggtggataaatagcgagatcctgattaagttgcccgtgcacccttcatgctttagctatcacacaggcagttcgatcgttggctgtgccgagaagcattgcagctcatcctggcttataaaattcgacatcgaaaacttcttcgatagcatctccgaagtagacgtatataaagttttccggaagttcgggtacaaacccatgataagccttatcctggcacgcatttgtacgtaccagagcgagtcaattagcggagatatcctgcattgggtccaatataacaagaattccgacgaactgccttttaagaaaaagcacattcggttttttgggagagttccgcagggtgctcccacctctccaatgattagcaatctggtgctgtcctctctcgacgaaatgttaagtcagtacgcccagaaaaggggtggaatctactcaaggtatgctgatgatctgtttatatccttctcccagaaggattttgatcgtgttcaggcaagtcaggtgatcggccgagtcttaaactacgtgaagtcttacgggtacaagttgaacaagaccaaaatcaaggtgattccacctggatcaaataaagtggtcctcggcctcaacgtcaatggcgactctgtattgctcacaaagacttacaagaagagaatcgagtctcacatatatggagtgggaaaatttggcattgagcagcatgccctgcatcgcgggttcgactccgtgttcagtatgattgaccacatcaccgggctcattaaccatgctagactaatcgagcctaccttcggggagaagaaacacgaagagttcaagcgcctgctgagtacattaggcctctcttga

SEQ ID NO: 9145 - RNA, 1068 nt, synthetic construct
  source 1..1068: mol_type = other RNA
atgtccaaggctcatcacatgcagagatggggaacgccctacatacacagcatcgtgcatctatcacatctgagcaacagccgtatcgaactcattaaaagtattgtggaccgaaaggaagatttctacaccgcgtacacaatccctaaacgcagtggagggtctaggtttattcacgcccctaatgctgagctgaagtccctgcagaggtggatcaataccgaaatactttacagactgccagtacacaattgttgcttctcctatcaccgagactcgtctataatcgactgtgctaaaaagcattgcgcctcaagatggttgataaagttcgacattgaaaacttcttccataccataaaggacgtcgatgtttacaaagtgtttaggatgtacggctacaagcctcttatttcctttatgctggcacggatctgcacttatcaaccaaaggtggtcatagagaacaagctcaactggattcttttcaataccaagagtgacgatttagtgtattccaaaaagcacgtgaattttttcggtcgggtcccccaaggtgctccaacttcaccgatgttgtctaatttagtcctgagagagctcgatgagacactgaaccagtatgcccagaaacgcggaggcatttattcccgttacgcagacgacatgttcatttctttttctcaggacaactttgatcgcaagcaagcctcacaggtaatcgggagagtgtttacacatgtccggaaatacggctacaacctcaataagaccaagatcaaagttatcccccccggccaaaacaaagtgatcttggggctcaacgttaacgggcgggatgtgctgcttacacgggagttcaaacagaggattgagagccacatttatggcattaagaagttcggcgtgaaagagcatatgaaatacagggggtttaatagcatctatggaatgatcgagcacatctttggcctgatcaattatgcacgccaggttgatttcagttatggtgagatcaagcacattgaactgacggaacagctgcaggccactggactatggagctga

SEQ ID NO: 9146 - RNA, 1143 nt, synthetic construct
  source 1..1143: mol_type = other RNA
atgactatcgttagttcacagccctactttagtcaggggatcatcaaaggtcgaaacccccaaaagctgaacgctctgatgagcaaagctcggaaaatgcaagcccagggccttccttatattcattcactccaccatctggcccttcttacgaacacaacagtagattatttgaacaccatcgtttgcagagcctatgacgactacacatcttatcggatccagaaaagatcagggggaagccgcttcattaacgccccatctgatgagttaaaactactccagcgctggattaacaataatatcctgtataacgtgccctcccactggtgctgcttttcctaccataagaatgcgtctattatcgattgtgctcagcgacactgtcagtcaaagtggctgattaagttggacatagagaacttcttcgacactattaacgaagtccaggtatacgagacatttcactccttagggtataagccgatgattgcattttttctggccagaatatgtacctacgagcctaactggataagcacagacaaaaagtattgggtcagttacaacaccaattccgatgaactcccctatagcaagaagaatattaagtactttggcagggttccccagggagctcctacctcaccaatcattagcaatatggtcatgttcagcctggatgacgaaatcagcaacctgatccaaaataaaggggggatatacacccgctatagcgatgacatattcgtgtccttctctcagcctaacttcaataggaacgacgtgagcaaggtgataggcaaaatcttccaaaaatcaaagcggtacggttacaagatcaataagacgaagatcaaagtgcttcctccaggctcgaagaaaatcatcttgggactgaatgtgaatcaacgtaaaccggaactgaccaaggagtacaagaacagaattgaatctcatctgtatggaatgtccaagttcggaatttccaatcatgcacagcacaggaaatttgactctatcttttcgatgattgagcacatcaaaggcttgatcaattatgcaaggcagatttctccaaagtacggtactagtaagtacactgagctcagtgatattctaatgaaagagggcctctcctga

SEQ ID NO: 9147 - RNA, 1155 nt, synthetic construct
  source 1..1155: mol_type = other RNA
atgggcatcaacctgtctcacgcctatttaaaccaaggcgctagtctcggatatagcatcgaaaaaatagagtccctgcttatcgagtcttatgagctgataaagtcaggctttcctcccttgttctctctgaaccacctggcgaagaactccgacgtagacttttacaatctgaggaaagtgatccagcgaaaatgcacagacttcaaatacttatacgacatccataagatcccaaaaagatctgggggatttaggtttatccattccccgggttctcagatcaaacgggtgcagcgctggatcaatgagtgtatcctctataacagcaagcctcactggcgctgtttctccttccatcccggaggctcaatacttgattgcgcttcaattcactgtgaatctaagtggctaattaagatcgatattgagcggttttttgacagtattaccgagaaacaagtctatgaagttttcgtcgagctcgggtacaagccactgatcagcttcgaactcgcacgtatttgcaccgtcaatcacaagaagaaaatcaagaaacactactacaagaagtgggtgatgtttaataccgacaagggcatgccctataagaaagatgagattaagacaattgggtacctacctcagggtgccccaacaagcccacagttgagcaacctggtgttcaagaaacacgatgagcacattttcgaagtggcaaagaagaacgacttacagtatactagatatgcagatgatatgaccttttccaccgttaagaaaaatttcagcagagagaaagccgttactttcgtgaaggaactgtattcgtacctgagtaagtacgggtttagccccaatcacacgaaattgaaaatagtgcctccgggcgcccataaggtagtgctgggattgaatgtcaatagtaacactcccagactgtcacgtgtgttcaaaaaccgcgtcgagaaccatctgcggtgcatcgagaaatacggcttggaaagtcacaggattcatatccagttcaattccatttttgctctcatagaccatattcgagggcttataaactacgcccttcaaattgatacaaactacggtcacaagctctcccatcggtatctcgaacttctgaggtcaaatggattttga

SEQ ID NO: 9148 - RNA, 1287 nt, synthetic construct
  source 1..1287: mol_type = other RNA
atgctgagcgtcttttacgagaagtgtctggccctcattcggagccctctgctgcatcagagtctcgtccgtagccttccttccatcaacgaggccgttctgggttccatcaaaggatcttgcatgactatcggtcctactcacacctatatacaagagggactcgagaaaggcatatccgagcagaagctgaaggggattgtgtacgagtctttgaaacgcattaacccgagtgtgccctacctcttttcgttaaaccagatttgtcacattactggagtgtcttatccctaccttcgagagatcgttaggaggaattccactccatacaacttccacagaattcctaagaaatctgggggtcacaggttcttgacgattcccagaacggaactcaaactggttcaaacatggatacataaggaaattctggcctcacaagcaccccactttaggtgctatagctaccactcccagtccagcatcttcaattgtgcccgggaacactgctcctcgaaatggcttatcaagatggatatcgaatcattcttcgactcaatctcagaggtcatggtgtacaaggtatttcgcaaactggggtacaagccccttgtggctttcgaactgggccggatttgcacataccagccaacccacctgcggatcagcaataccctgaagtggaggaatttcaatactaatagtgctgagtatccgtataaacgcaaaggcgtcagtttttttggcagactgccacagggagcgcctacaagcccaatgctatcaaatttggtgtttcaggagattgatgagcagctgcactcctatgcaacagaaaacgggttagtgtatacccgttatgcagatgaccttacattcagcaccatcgacaaccgctttagtcgggagagagcgataaagttcgtatcctacgtaaagaaggtgctacgaacagaaaatttcaacaccaacaaaaccaagctaaagatcatccctcccggcagcaggaagattgtgctgggcctcaatgtcgaagcccaagagccattactctcaaaggggttcaaaaaaagagtggaaggacatttgcgcggaatcgagaaatttggcattcttcagcatgttgaacatagacggtttgacaccatctttggtatgctctctcatatcaacggactgataggctatgccaagcagatcgataacgcttacggcttccgattggaggcttggttcagttctattctgactcagaacgggatagtgaatgagtcttttcaggaatga

SEQ ID NO: 9149 - RNA, 1164 nt, synthetic construct
  source 1..1164: mol_type = other RNA
atgacaattggccccacccacacgtacatacaggagggcctggaaaaggggattccagagaacaaactgcgaagtatagtgcgagaatccctttcaagaagcaacacgagcgtgccttttgtgttctctcttaagcacgtctgtcattttactggcgcaagttacccctacctgcgggaaatcatcaggcggcgtcagacaccatatagtttccacaagatccccaaaaagcggggaggacataggttccttaccgttccggatatcaagctgaaaagggttcagaattggataaaccgagacatcctggccagtcaaatcccgcacttcagatgttacagctatcactcaaaaagctcaatatttaactgcgctcgcgaacactgtagctctaagtggttgattaagatcgacgtggagaatttctttgactccatcagtgaggtcatggtgtataaggtgtttaggtctttgggttacaaacctctgctcgcttttgagctcggccgcatctgcacctatcaacctacccatctgtccattaaaaacactctcaggtggtgcaatttcaacaagaatagctcgtcctacccatataagcgcatcgagattaatttcttcggccgtttgcctcagggagccccaacctctcctatgctgagcaatttagtctttcaggacatcgatgaggaactacactcttacgcctcttccaatggcgtggtatacactagatatgcagatgacctcacattctcaacaagtaatcgccagttttcaaggaaaaaggcgctcatcttcgtcaacaaggtgaaaaagattttacggactcggaatttcagcacaaacaagtccaaactaaagatcatccccccaggctcccggaaggtcgttttaggattgaacattgatgggcccaatcccctgctcctgaaagggtttaagaaaagactggaggggcacttgcgcggcattgagaaattcgggatacagcagcacctggagcataaacattttcagaccgtatttggaatgatctcccatattaacgggcttattggttatgcttcgcaaattgattacgaatacggtaatagactgaaggccaaattcagcgacattctcactcagaacggaatagtgaacgaatcatttcaatcttga

SEQ ID NO: 9150 - RNA, 1164 nt, synthetic construct
  source 1..1164: mol_type = other RNA
atgactatcgggcccacacatacctatattcaggaaggacttgagaaaggcatctccgaaaagagattgcagggaattgtgtatgagagcttaaagagatcaaacacttccgttcccttcgtcttctcactcaatcacatctgccacataaccggcgcttcatatccttcgttgagggagattgtcaggagaaatgagacaccgtactgctttcataggatacgcaagaagtctgggggacaccggtttctcacagttcctaatgccgaactcaaggtggtacagacgtggataaacaaggaaatccttgcgagtcaggcccctcactttcggtgctactcatatcatagcaagtctagtatcttcaaatgtgccgaagagcactgttctagcaagtggctgatcaaaattgacattgagaactttttcgacagcatcagtgaagttatggtgtataaggtgttcagaaaactaggttacaaacctctgctggcttttgagttgggccgcatctgtacctaccagcccactcatctgcggattaaaaacacactgaaatggcgctctttcaacacaaactctgcagagtacccgtacaagcgaaaaggcgtgtccttttttggaaggcttccccaaggagcccctacttcccccatgttatccaatctcgtatttcaggaaatcgatgaggagctccatagctacgcctccgaaaacggcctggtatatactcgctacgctgacgatctgacattcagtaccattgatagacgattcagcagagagcgggctatcaagtttgttcggcacgtcaagaaggtgctgagggccggtaatttcagtacgaacaagagcaagctcaaaatcattccaccagggtgccgtaaggtggtgctcggtctgaatatagacggacaaaaaccactgttgtccaagggcttcaaaaaacggttagaggggcacctgcgcgggatcgaaaagttcggcataccacagcacctagagcacaaacgatttcagaccgtcttcggcatggtgtcacatctgaatggtcttattggctacgcaaaacaaatcgattatgagtacgggaataggatggaagcacgtttcagcaacgtcctgacccagaatgggattgtgaacgaatcttttcaaacctga

SEQ ID NO: 9151 - RNA, 1149 nt, synthetic construct
  source 1..1149: mol_type = other RNA
atggccatcggacctgcacacatctatctgaaaaagggcatcgagaaaggaattgagaaagaaaatcttctcgccatttacaactcatctttgcctcagaaaaggaacttccagacatacatccactctctaggacatctgtgtcattttagcggcgtaaattaccactacctccgcagagtgattaaacgcgaaatcgactgttacgacgtctatccgatcgcgaagagatccggtggttccaggtatatctctgcacccgaggatgagttgaaagacgtccaaagatggatcaatcgctatgtgctgtccaatgttaagccacactggcggtgctttagttatcacgctgaggccagcatatacaacgcggccaaggagcactgtgggagtaagtggatcataaagttagacattgagaacttcttcgatagcgtgagtgagattgctgtgtacaaactgttccgtgaacttgggtataacccactcctttctttcgagttggccagggtgagcaccattgaaccattgcggattaataaaaagatggcagccaagtgggtcaattacaacacctcatccgatgagctaccttattcaaggagaaacgtgaaatactttggacggctcccccaaggggctccaacaagtccgtcgattagtaacctggtctttaagggcatcgacgaggaattccagtttttcagcgaaaagaacaatctgatctacacgcgctacgccgacgatatttgcttttcttcacacgaaaaatccttcaaccgagagtcagcgcagcaggtggtatcttattgcagctccgtcctgcgggctaatgggtatgccaccaaaaagctgaagactaagataattccccctggcgtgaggaaagttgttcttggctttaatgtggaccacgatgagcccaagctgacaaaagcctataagaagcgactggaaagccatataagaggcgtcgaaaaatttggggcaatcgctcacgctaagcataagaagttcgattccgtgctgggtatgctcgagcatgtgctcgggttagttaaccatgctaagttagtggaatacggatacgccgtaggcctgaaaaataagctggacactgcaaaacagcgtcagggattcatcggctga

SEQ ID NO: 9152 - RNA, 1071 nt, synthetic construct
  source 1..1071: mol_type = other RNA
atgacgataaattccacccacagttacatagctacaggactttcgaagaacattgacttgacatttctcgagaatatcatctccgagtcaaatagccagaagtttaacaatcggacctatatacacgggctgaatcacatttctcacctaactggagttgactatttcttcctgcacgatattatgacccgcaaggagaacccttacaagatattcttcattcgcaagaacttagggaaccgcgagatcaaagaacctaatcagcggctgaaattggtgcaacgaaccatcaatcagcaagtgctgtctaaaatcccagtgcactggagatgtttctcttaccataagggggcttcaattgtcaaatgcgcatccgagcatttaggggccaaaagtctggtgaaattcgacatctccgacttcttcggcaacataaatgagctcctggtttacaaatccctcatcaaactcaagtatagcggtagctcgtcttatgccatggccaggttgtgcacacatccgaattccgagaacgataactttggcgtgttgccccaaggagcgcccactagtccaagcttaagtaatctcgtctttttcgatgtagactgcaagcttcagaggctggcacacaaaaacaatctaatctactcccgatacgccgatgacattactttttcaagcttcaacgatctctcccgtcaggagttcctggatttgaagctgagcgtggtaaaaatcctgaagtatcataacttcgaactgaatagggacaagatcaaatttatctcatctagcactcccaaatttgtgctgggaattaatgtgggcggcgaaaccctaaagctgagcaagcggtacaagaacgatattgactgtcatatttacggactgaaaaagtatgggctcgtcgagcacatgaggcatagagagtttacgtctgtttttggcatgattcaggaactttttggtaagatcaaccacgctaagagcgtcgaagaatcttttggtctttcaagagaaagtgaacttagaaacttcatccagacaaagggcctgtttttcaactga

SEQ ID NO: 9153 - RNA, 1065 nt, synthetic construct
  source 1..1065: mol_type = other RNA
atggctatatcatcaacccatagctatcactcagtgggcttgcggaagaacattaatcccgctcttctgaagaagatcatcttagagagcaatagccagaagctccacaaccgcacatatatccacgatctgaaccacatatctcacctcagcggagtggactctctcttcctgtacgacgttatgatgcgaaacaataaaccgtaccatagcttcgagatgaaaaaaaaaaacggcacacggaccataaaagtccctaacgataagctgaaagtcgtccagcgggtcatcaatcaggaagttctgtctaagattccagtgcactggagatgtttttcctaccacaaaggtgcaagcatcgtgaaatgcgcaagtgagcatctaggggcacaatccttgattaaattggacatctccgacttttttggtagcatagatgagtttactgtgtataaggccctgcttaagctcaaatattccccacccagtagctttgctatggcgaggctgtgcacacaccccaataagagtggcgaagtctccgttctaccacagggcgcccccacatccccttccctttctaatatcatcttcttcgacattgactgtaaactgcagaagttagcctctaagaataaccttatctacagtcgatacgccgatgatatcactttcagctcgttctataagatggatcgttcgaccttcctggagattaagctctcagtagttaagattctgaactactacaggttctctctgaacaagaaaaaggtgagattcattcactccggaatgcctaagtttgtgttagggataaatgtgtctgggactacgctgaagttgtccaaaaaatacaaaaacgacatcgattgccatatttacggcgtaatcaagtatggtctgcaccaccatagtctgcatagagaattcgctagtgtgttttgtatgatccagcatgtgttcggaaagatttatcatgccaagtcagtagactacgacttcgggatttcaagggagcaggaatttcgcaattatctccacacccaaggactctttttttga

SEQ ID NO: 9154 - RNA, 1146 nt, synthetic construct
  source 1..1146: mol_type = other RNA
atgacaataggccccactcactcctacctaaagaccggattaagtaaaggatttagcaaggagaaactgcttacaatactcgagagcagccatgagaaagaatccaagagtctgagttatattcactctctgaagcacatttcacacatcaccggagttcattacatcgtgctgcgaaatattgtgttgcggaactcgaacccctacctggtgtacaatctcaaaaagaaggtatcaggctatagggatattagttcgccaaatgacgatttgaaactcgtccaaaagtggattgctcagaatatccttatcaacattgaaccccactggcgttgctatagctaccacaagggcgcctccatcatcaagtgtgcccaagagcatgtggagagcaaatggcttatcaagctggacattaacaatttcttcgggtctattcaggaatcccaggtctacgacgtgttcaagtcccagaattacaactctttagtcagctttgagatggcgagattgtgcacaatcaatacggagtttgatcactccagctcaatcaagcattgggttaaataccggaataagcgctctaccagcccttattcatcactcaaaataaagagattcgggcatctgccgcaagggagcccaactagtcctcacctgtccaacattatatttaagtccgccgacatcgaactccagtctattgcccagcgctatagcctcgtgtacaccaggtacagtgatgacctgtctttttccacaggtgacaagaagttcaatagaaagcatgcaaaagctttcatcactgaagtgagtaagatcctgaaaaagcaccactatcagttgaactctaagaaaaccaaaatcatccccccttcaaagtctaaagttattctaggcctgaatgtagatggtgatacgccaaaactgactaaaagctttaagcagaggttaaacttccatattcggggcatacaggaatttgggataatagaacactctcagcattcccacttcaattccatttttggcatgatcaacattatctcagggaaaatcaacttcgcaaagagcgtcgacattaactatggaaacaaaaccgagctgatcttcaaaaagatcctccaacaggagggtcttatctga

SEQ ID NO: 9155 - RNA, 1215 nt, synthetic construct
  source 1..1215: mol_type = other RNA
atggtgttcagctactctaactcgtccgtggtcgtcagcgtgatcgttggggtggctgagcagaacctgagtatcaagggaagctttgtaaccataggacccacccacacctatatctacgaggggattagaaaggggtacagcgaaaatcaattgttggagattatttcccgatcttcaatacagaagtcaaatggtgtgagctatcttcacagcctgaaccatatatcatacatcaccggcactcactacctgttccttcggagtgtcgtggataggaccacactgccctataagcagtttaccatccctaagaaaaacggaggggaaaggaatgtgtcctcaccagttaagcagctaaaaattgtccagcgctggatttgcacacacatcctcgccgacaaaattccacactggaggtgtttctcttttcataagaaggcaagcatcctgaattgtgcacgagaacactcaggtgcgaagtggttaatcaagatcgacatagagaactttttcgatagcatcaaggaaaatcaaatctactccgtgtttaaatccatgggctacaattccctcgtgagcttcgaattggctagactttgcacgctgtccagtgaaatcagtacttccgagctgatcaattctaacaccaagcagctcccttataaacggcaggaaaactttacaacaggtagactgcctcaagggtcacccacttctcccatgctctcgaaccttgtattcgacagtctggatgtaatcttccagcggctcgccgagaaaaaaagcttcgtgtatacaagatacgccgatgacatttgcttcagcagttgccagcgctcactgggccgggaagagtgtttgcagattatcaagattgtgtccaggattcttcggtctaataactaccaaatcaaccgcaaaaagttgaaaatcatcccgcctgctaccactaaatccgttctcggcctgaacgttgattgggacacgccaaaactgtctaagcagtttaaaaagcgttgtcaatttcatgtgagaggtattactactttcggactggccgagcatgctaaatatcgtaggtttgaaagtgtctacggcatgattaagcatgtttatggcctcataaattactgcaagcaggtcgagccatcttatggcgcacgcttagagattctactgataacagccttagagaaagagggattctcctga

SEQ ID NO: 9156 - RNA, 1140 nt, synthetic construct
  source 1..1140: mol_type = other RNA
atgaccattggccccacccacacatatatacaggaaggaattaggaacggctacagtgaggcacagcttagtgacctgctaaaactgagctcattgcagaaggaaaaaggtattagctatcttcattcgcttaaccacattagccacattaccggggctcattatctgttcttacgagcaatcgtcgacaggacctctagtccttacaaacagttctcaattccaaagaagaacggtgggactcgcaatgtctcggcacccgacgaacagctgaaaattgtgcagcggtggatctgctctaacatccttagcaaggccccccctcattggagatgcttttctttccacaagaaggcatctatcataaagtgtgctagagaacatagtggagccaaatggctggtgaagatagacatcgagaatttcttcgatagcatcaaggagacgcagatctactccgtttttaaatctatgggctataactccctcgttagctttgagttggctcgcctgtccaccgcgctatctgaaagcccggctgacgagacaaataacgaattctccagagcttccatcgagagtctgccttataaaaggcagcaggggttgttaggaggcaggctcccacaaggcgcacccacatcccccatgctgtccaacttggtctttgagaaactggataatatcttccaacggctcgccgaaaagaaaagttttgtgtatacacgttacgctgatgatctgtgtttttcatcctgcaagacttcacttaagcgtaatgattgcttgcagatcatcaagatagtatcacgagttctccgggcgaactcataccaaatcaaccaaaagaagctgaagatcattcctccagggactaccaaatctgtgctggggctgaatgtggactggaatagcccaaagctctctaaacagtacaaaaagagatgtcagttccatgtaaggggtatagccgagttcggcctggccgagcacgccaaatatcgccggtttgaaagcgtgtttggtatgattaaccacgtgtacggactcattaattactgtaaggatgtcgagccatcctttggagccaatttagagacgctcttcactaacgccctggaaaaagagggcgtgcgctga

SEQ ID NO: 9157 - RNA, 1179 nt, synthetic construct
  source 1..1179: mol_type = other RNA
atgcaacgtgtaagtcctaaccagatacataggtgcgccgagctgaagtcatctaatgaggagtttatccaaaaactggtgaaggatagcagaaagctatattccaaaggcctccctatcatctttactctgaggcacctgagcaagctcacagatgtgaattttaagtacctgcactctattgtcggcaagaagattaacccctacaataatttcagcatcaacaaagcacgcggcgggaaaagaaatatatcgtcacccaacttttacctgagacgcgtgcaggactttatcaaacaggagattttggacactaactatgtatcgtcccagattagtgagagcgtttttagctatagaaaggcattatccatagtcgataatgctaaattccacataggggcgaaatggattattaagacagacatcgagaacttctttgatagcattaaggaatatcacatctaccatttcttccattctctggggtacgcatctttactttccctagagctctcccggctggtgacctggccgtcatttgatattaacttcgatctcggcctgagccaggatcggtccctgaatgaggatattacttttacctccaagtacaagttctactgttcttctgatgttattggctccttgccccaaggagcgcccactagtccacagctcagtaacattatcttcagccctattgacgaaaaattcaaaatccttagcgaagagtatggatacatttatacacgctatgccgatgacctctttttttcaacccgaaataacatcgacatcaactcagcccgaaacctgcttaatgaagtgcgttacatactaaacagttccaactacaagatgaacaacaagaagacgaaaatcatcctgccacgggctaagaaggtgataaccggaatcgtcatcaccgacgacaaaattctgttagacaggaagttcaaggacgaaatcaagatgaatatcttctttgccgagaaaaatggacttgaagctcagaggaaattcatcaagttccacggtaacacacataccttccttaaatatctcttggggaaattgaatttcgctaaccaggtggaaccagactttgccaatatctggaaaaaacggctgttgaatctggccaagaattctggtttcacgatgatatactattga

SEQ ID NO: 9158 - RNA, 1173 nt, synthetic construct
  source 1..1173: mol_type = other RNA
atgcagcagctgagtccttatacctttttggatctcgctgaagcgcgtggatactctgaagcatacaaagacgctatttccaatacggctgacgcactgtcacgctccggttgtccaatcatcttcacgttggggcatctcgcagccctagctgatgcagactatagctacctgcacagcatagtctccaggacaatcgatccatactgtcactttagtatccccaaacgcaacggggacagacgagccataagcgccccgcacgataagcttaaatccatccagaaattcattctggatacaatcctcaacagcagtggtgttgtggccaaaatctcacagttttctttttcctatcgggagaagatttctatatactctcatgctgagaaacacgtcggcgccaaatgggtggtcaaaattgacatcaaggacttcttccccagttttaccgagattgacgtgtacagactcatgtgttcactggggtatgcccccttgctctccttagaaattagtaggattctgacctggcccaaaaacgatctttttcttcaggatgaggaggccgagactaatcatcaaaaactcttagagtccaagtataagctgtataacggcagcgttaagaagatcggagtattgcctcagggcgcccctacatctcccatgctctcaaatctgctgttcaaggaatgcgacctgttgattaacgaagcggcgaaagaatatggctgcctatacacacgatacgccgacgatctgattttttcggccaatcgcctgagcaagcaaaaagctaaggagctgatcagctatctgcggattatcctcaagtgcaacaagtttgaaatgaatgacagcaaaactagggtgtactttcctgggtctaaaaagatcataactggcctttacgtgaataacaaccggccaacccttggtaagaagtacagagatgctattaagaagcacattttcttcatcgagaaattcggaatccagaagcaagccgatcatgctggatcaaaagacgcaaataccttcctagcccacctgatcggcaagatcaacttcgccctccatatagagccaaattttgcattatcccagctgcaaaagctgaaaaatgctcttaagaaggcaaactacataaaccagaagttctatccgtga

SEQ ID NO: 9159 - RNA, 1143 nt, synthetic construct
  source 1..1143: mol_type = other RNA
atgaaaatctggcagcccgccttatatcgaaaaaccgctctgaagaaaggattgtccctgtcaattatcaataacgccatcaagatttacacgcactttagcaagactcctttcccctgtatcttgacaatcaaccatctatccaagatactgaacatcccctacccggcactgaagagatatacatacaatcagatcgacaactacaaacatttctctatccggaaacgctccggcggaactcggcgcatctacagcccaaactataacttactcagaatacagcagtggattaatcgagagattctgcagaaagatactaacatctccgatttcagttacgcctttaggaagggactcagcattagagattgcgcatcaatccactgtaaccaatcttggctcattaagttcgacattaagaactactttgagagtatatctgagatcgatgtgtacaattacttccataaactcggctacaataaattacttagcttccaactcgcgcgcatttgcactgtcaatgacagcagaaataaaaccattgatacactgccatcgaaattcatctatcacaagaataagcagtacaaattcctgcagaatagtgaaataggcttccttccccaaggcgccgccacctctcctatgctcgctaacctgatcacatcacagctagacgaggacatcaataactttctgcagagcatcgatcttgacttcaattatagtaggtacgcagacgatatttttatctccaccaatagcaagcaaatagacgatacacacattaggaaggtactgaactctgtgtattccataataatcagtcatggttttgagccaaacaaaaataagaccaagatatttcggcctggcaaatgcaaaaacattctggggattaacgtgaactcatccgacgtgaagttgacaaaacactttcgtaatatcctcgaatgtcaccttttctatttcaagaaggataagattcagcataccctgaatagggggtttaatactgtttttggggctacggcttatattcacggtctgttgtcatatgccgaacagattgactctaactatgtcaagaagctgaaaaagaagtaccagatcgataccgacttctttaacatctga

SEQ ID NO: 9160 - RNA, 1008 nt, synthetic construct
  source 1..1008: mol_type = other RNA
ttgactctgtcccacctcgctcgagagacagagactaagtggggataccttagaagcattgtccagcgccaaatcgacgactacacagcaatccgaagactgaaacgagatgggacgtacagagcaatctgggccccaatgccctctttgatgcatgtgcagcggtggatcttgagtaatgtcctttcgggtttaaagtttcacgacgcggcctacgcttatcgtaggggccgctgtataagagattgtgccgaacaacacatcggggcccggtggctgctaaagatggacctgcataattttttcggaaccattgaggaagcaagggtgtatggcgccctgagggggatgggttatcccgctctgctggccttcgagatggcaaggatttgcaccaaacctctctggctcgatgccgacaagaggtggctcgaagggaggggtgttgatgcctatggttccccactacggggcgtattaccgcagggagctcccacctcaggggcattggctaacgctgtcgcctttagcatggatgcgatgctgcgccgcctggctgacagtaatggcctgtcttacaccagatacagcgacgatctgaccttctctagctccgggccttttgaacgtgcaagtatagtgaagctggtgacagaggtggaacgggccatttccctggctggcttcgttgtccatagaaaaaaaacacgcgttgtcccgcctggagcgcgcaagatcgttctcggcttgatgctcacggagcgggaggtacgtctggtgccagaattccggtctaggttagacaatcacatccggtgcgtggacaaatatggcccagctggccatgcagccgccagaagattcgattcagccctgtcaatgataaactacgtggatggatgcctcgcttttgcacttgacattgagcctgagtggactgccgatcgcaaccagaggtggcttgatgcgctttatcgacacggacaccccgtgaaccgagacggctga

SEQ ID NO: 9161 - RNA, 939 nt, synthetic construct
  source 1..939: mol_type = other RNA
atgaacgagtactccagtataagaaggcgcaagcaggatggcagctttcgggaaatttctgccccaaaccccaatttgatgcacgtgcagcgttggatgctgtcgaatgtcctgactggcctccagtttcacgacgccgcgtttgcttacagaagaggcctatctataaaacattgtgcggaagtccacgtgggcgccaattggctgctgaaaatggacttgcataatttcttcggcagcatcgaggaaagcagggtgtacggtgtgttgcgtcggcttgggtatcctgctttgctggcactggagatggcccgaatctgcaccaagcccatcacccttcctggtatgaccaagccgcgcctcagtggtaggggagttgaagcttattccacaccaaataggggggtgctgccgcaaggagctccaaccagtggggccctggctaacgctatcgcatttcgactggatactatgctcgcttctatcgccgacgaaggcggactgacatacacgcggtacagcgacgacctgacctttagctcatatgagggactctcacggacagccgtctcaaagttaatcctgcagattgagcatgccatatctctcgccgggttcgatgttcacaatgggaaaacacgtattgtaacccccggagccagacaaatcgttcttggtctgatgctgactcctgaggccgtgaggctattaccagagttccgccaccagcttgataaccacattagatgcgtggagcgatacggccccgctgcacatgcgaacacgagacgcttcgactccgccctctccatgattaactatgtagacggatgtctcgccttcgcagtggatatcgaacctgactggactgctcggcgcaagattaggtggcgggcagcattagggcagcatggccaccccgtcgcacaggatgcgtga

SEQ ID NO: 9162 - RNA, 1128 nt, synthetic construct
  source 1..1128: mol_type = other RNA
atgtcaaccccttctccccatttgtatcagaaggctgcgattgcagctggagtgagtgcgagcgtggccaggagagcaggatccgtgtcacgggatattcaggccagtggggctttccctgtcctgacactgagacatctagctcacgagacgggcgcctcttacggctatttaaggagaattgttaaaaggtatgccgacgagtaccagagcatccggcgaatcaagcgcgacggcactttcaggctcataagcgcccctaaccccatgttgatggacgtgcaacgctggatcctggaacatatcctgaataccctgccacgacaccccggtagtttcgcctatcaccggggcatcggtataagacagtgtgcagagctccatgtgggctctaggtggctagtaaagatggatctgcacaatttcttcggtgagattagggaaaaccgggtataccgcgtcttccgccaactcaattacccagccttgctgagtttcgagatggctcggctttgcactcgcctggatcgaatcgacccttttactgaagcagtcgagcgcggcgtcggctcttatgacgatggacgcctgggaagacttccgcagggagctcccacatctggggctctggcgaatagggtggccaccgatctggacaatgaactgcagaacctggctgacggatcggggtttatctattcacggtactcagatgacctcacctttagcagccctgccccattttcccgacccgaagggatgcgtctcatttccgcagttagccgggctgcctctttagccggcttcgagccccaccgtagaaagacaagactcgtgccgccaggcgcccgaaagatcgtgcttggattactggttagcgacacaggcgtgaaacttttgccagagtttaggagacaaactcagaaccacatacgggccgcaggtaagtttgggatccagcagcactcctccaaacgtaacttccattccgtactttccatgataaatcacgtcgatgggaggctcgcgtttgcatacggtattgatccagagtggacgattcctgaaatgctggcctggaccgaggtgttggaaatgaacgggtacccctcggttgcaaaagcttga

SEQ ID NO: 9163 - RNA, 1125 nt, synthetic construct
  source 1..1125: mol_type = other RNA
atgaccaagctttcctctcacctgtatctggctaacggaactcagctgggacgcgatgccgaggtgttacggagggcatctatcgctaatgccgcaatggtgaaatcaggggtcagacctattcttaccctgaggcatttcgccagggacagcgaactctcttatgactacttgcgcaaggtagtccggagaggcgtagatgactacgagactattaaacgcaagaaagatgatgggtctttcaggtttatctcctctccccgacccgacttgatgcatgcccagcgatggctcctcgagcatgtcctgggaaatctagatctgcacgaggctgcctttgcctatcgtaaaggagtgtcaatagtccactgcgcagaagttcacgtcggggcaaaatggctggtgaagatggacttacataacttcttcggcgaaatttcagaatcccgggtctatagcgtcttccgaaacctgaatctctccccattgttgtccttcgaaatcgcccggatttgtacaagagtgccgagtgaagcagagatgacaggcaaggtgcgtctgtttagcgcttacagtcagcacgctgagggagtactccctcagggtgcgcctacgagcggtgctattgcaaacgctgtagctactgcccttgatgtgaaactcgacgcgatagcctctcggcgcggctttgtgtacactaggtactccgacgacctcaccatgtcgacacatgaaaagatctccagagatgatgcgagtaagctgatcgccgactttgcgcgcgctatacacggcgccggatttcgcgttcatagtaataaaacgagagtgatcacaccaggcgcccgcaaggttgtgttagggctgctcgtcggtgataggaacgttagactgctgcccgagtttaagcggcaagtgttgaaccacatcagaggggtgaggaataatggcctggttgcacacgccgcacataggcggttccgaagctcactaagcatggttaattacctagacggctgccttgccttcgcccacggtgtggacagagagtgggctgctgcagccaccagctcatggcgtgaggcccttaccaacgatggcttcctggacagtgcaggggtgtga

SEQ ID NO: 9164 - RNA, 1014 nt, synthetic construct
  source 1..1014: mol_type = other RNA
atgagcaaggacccagcttcagtggcatcactcggcgagctggccaccctgacagaaacgccttactggtacttgcgtagcattgtcgagcgccgcactgacccctacatgtctcttcaaagggccaagagaggaggtggcgtgcgcccaatttcagctccagagcctccgctgatgcacgtccagcggtggatacttcacaatgtactagatggactagatgaacactctgccagttacgcgtaccgccgaggccgatccatagctcactgtgccaaagcccatgtcggggcaaggtggctcgttaagatggacatccataactttttcgggactgttaccgaacagagagtgtataaagttttccgggacctggggtacgagcggcttatcagtctggaaatggcacggttatgtacacgagaggagatgaagtcttccacaagagctccgggtttccgatatacagcagttccctcctacgtcagtggcaccattggcgtgttgccccagggagcaccaacttccggggctttggccaatgcagtggctaccagaattgacagggccttaagtgggctgctgggcgaccgtggcattacttatacccgctatagcgacgatcttacgttctctaccagggatggtttcgatcgcgtgcgtgccagcgacctcatctcccaggtaactggcgtcgtacagagctgcgggtttcaggtgcacaagaaaaaaacccacgtggtgcccccaggagcgagacatgtggtgctcggattgctggtgacagaaaacaacgtgaggctgctccctgaaatcaggaggagaatcgagcaacacgtcagaggggtcgagggctttggtgtgcggcatcatgctgaccaccggggatttgatgatccttcggccatgatcggctatgttggaggttgcctgtcttttgcgctctcagtagatcctgactgggccgcacccatgtataggcggtggatgaaggccctgagcgctccctggtga

SEQ ID NO: 9165 - RNA, 1131 nt, synthetic construct
  source 1..1131: mol_type = other RNA
atgagtattgacgcgccacatctctaccggaaggcagcacttgctgcgggacgctcaaatgcagcagttgaagccactctttcacgtgcccacaccacagctctccggggtgctgtgcccatctttagcttaggccacctcgcccggctgtccaatgttgattatcagtttctccatgatgtggtgtgcaggaaggtggacccctatcagtccatcacaatgcggaagccatctggaaagattagacccatttcagccccgaatcaggaattaaaagcagtacaacaggtcatcctgtatagagccttacgcaacctcgacccgaatcccagcagctttgcctacaccaaaaacttgtcggttctggactgtgcgaaacggcacgtaggcgctaggtgggtgataaaaatggacctgagggatttcttctcatccgtggatgaacgaagcgcttaccgcacgttcatcaaacgtggttacgctagtctgatggcgttcgagatggcaaggatctgcactcgggataggagccctagaaggggagctagagagtatgtggaccgctaccctagaattcccgggtatgcatgcggctctgtgggcatgctacctcagggcgcgcctaccagtggtgccctagctaatgaggccgccagaccactggaccgaaagctggcctccttggccgcatcatctggcggcatctacaccaggtattccgatgacctggccttcagctgggcccaggacgtcgatcgctctcatctgcatgggtttgtctctaacgtcaccgagctttgtgctttgcagggcttttccgtgcacaggagaaagacacggatcctgtcccctgggagccgtaaggtcattctcggactcctggtcgatgagagttctgttcgactgttgccagagtttaaacggcgcgtggataaccacataagatgcgtagctaaattcggggctagcaagcacgcagaagagcgcggtttcatgagcattttcgaaatggtgaaccacgtggacggatgtcttgcctacagtcatgggatcgaaccagggtggacagaggttcgaaacacgaagtggaaggaggccctgtcgaaatccggaatacaatctgccacttga

SEQ ID NO: 9166 - RNA, 1092 nt, synthetic construct
  source 1..1092: mol_type = other RNA
atggccgacggtggcgacccttcggtggtgaatcgcgctacagccgaactcgcacggctgaaggcccaaggcgcttatccggttctatcgcttgcccacctcgcccacgagacaggtgcatcttactcatatctgagggaaatcgtgaaccgaacccgagacgcctacgcctctgtggctcttcccaaacggtccgggggcactcggcctatttccgtgcctgagccaatactgatggatgtccaacgctggctgctgtccaacgtgctgaatagagtgcccgagcatccagcttccttcgcatacaggcagggggtgagcatcgtgcagtgtgctgagcaacacgtaggcgcgcagtggatggtaaagatggacttgcataactttttcggaaccgtacttgagagctccgtttaccgcgtgttcagaaccctcgggtatagcaagctcgtggcttttgagctggccagaattaccactcgtgcggaaggaaatatacgggcatcaggcagtgagcacgtaattggagattacagtatgcataaccagggtgttttgccccagggaggccctacttctggccagctcgccaatgcagccgctggtcgtctggaccgcctgttacaggcctatgcgacgagatctggcctggtgtatacaaggtacagtgatgacctggccttctcaggacatagtacctttagcaggatgaaggcgagcggcgttatcggggaggtgtctggactggtgagaagggctgggttcgaagcccacagaacgaaatccaggttagtcccaccaggggctcgcaaaatcgtcctaggtctgcttgtcgacgatagcgttcgtctccttccggaggatcgacggcgaatcgaagtccacctgcggggctgcgaaatctttgggttggcaaagcatgccgcacaccgcggatttgattccgtgttctcattcattgatcacctagacgggtggatctcttttgcattgggcgtcgaacgggccagagctacagtttggcggcagaggctccgccagattttgagcgcagatggactgcccgccgacttactcaggagagtcgcttga

SEQ ID NO: 9167 - RNA, 1125 nt, synthetic construct
  source 1..1125: mol_type = other RNA
atgcgcccacctcatttgtattacagagacgggattgccctaggggttgatcccgacgtgttggaacgtgcagccgatgagagggctcgcctgagggctcaaggtgcctaccccctcttatccttggcacatctggctcacgagactggtgcctcctacacatatctgcgggaagtcgtgtcaagaacaagagatccttaccaggatgtagcgattcccaaagcagacgggggaaccaggcctatctccgctcccgaacccatactcatggatgtgcagcgctggatcctgaagcatctgctggagaggaccccaacacacccggccagcttcgcctatcggccaggaaccagtatagtgcattgtgcagaacagcacgcaggcgcatcctggatggtcaagatggaccttcatgacttctttggcactgtgactgaaacgtctgtgtatcgggtgttccgccgtcttggctacgcaaaactagtgagcttcgagctcgcgcggatcacaactcgagcccagaacgcaaggtacgccccatggctcgccggaaaccggaccatcagggcctacagcgttgacgcagagggggtgcttcctcagggaggtccgagctcaggtcagctggccaatgctgctgccacaagactggatagactgatacagtcgtttgctctcgaggctgggctgacctatacgcggtattctgacgacctgatgttttcttcccacgccgcgtttcgaagggtcgatgcagtgaatgtaatccggagagttagcggactgacccgtgccgctggctttagccctcaccgcaacaaatcacgcatcgttccacctggcgcccgaagggtggtattgggcttactggtggatgacagtgtccgcctgcttcccgaacacaggaggagaattgaagttcacatccgggcttgcgagaagtttggattggccgagcatgctgcgcatagaggattcgactctgtgttcagttttgtcgatcaccttgacgggtggattagtttcgccctgggcgtcgagcgggatcgagctatggtgtggagatctcgattcaatcacgtcctctcaggcgccggcctcttatccgctattcaacgcgtatga

SEQ ID NO: 9168 - RNA, 1125 nt, synthetic construct
  source 1..1125: mol_type = other RNA
atgatccctccacatctttaccatcagcagggggtcaatttaggcattgaaccatctgcccttaagagagcttccgctgagagggccagactccgagctcagggagcctatcccatcctgtcactgggccatctggcctcggagacaggggcaagttactcctacctccgcgagatcgtaagccgcagccgcgatccgtatcgtagcattgccatacccaaagccaccggagggacccgacccatttctgccccagaacctattcttatggacgtccaaagatggatcctgagaaacatccttgataaattgcctatgcaccccgcctcctatgcgtaccggtcaaagacctccatagtgcagtgcgcatctcagcacatgggtgcaagatggcttgtgaagatggacctacacgatttttttggaactgtgggcgaacagtcggtgtaccgcgtattccgtaagctcggatacaataaactcgtttctttcgaactagcccggattaccacacgtactgaggacctggagagggcaccttggctcgctgctaacaccgtcataggatcctacgcggttgccggtatgggggtacttccacaagggggcccgacatccggaagtctggctaacgccgccgctacgcggttggatcagctcttgcagaagttctcactgcagcggagcctgaactatactagatatagcgacgatctcaccttttcaagcctggacgcattcgaccgactcacagcggaaagtgtggtgcaagaggtgagtggcttggtgaggaaggccggcttcgtaactcaccgcgctaagacgcggattgtcccacccggatctaggaaggtggtcctggggctgttggttgacgactccgtgcgcctgatgccagaacacaggcggaggatcgaagtgcacttgaggggctgtgagaaatttggcctggcgaaccacgctgagcataggaaattcaattctgtttttgctctggtcgatcacttagcaggctggctcgccttcgcattaggtgtggataaggttgtcgcactaagctggtgccggagatttaataaaatcctggagcgagagggtctgccccctatgcctcatctggtgtga

SEQ ID NO: 9169 - RNA, 1131 nt, synthetic construct
  source 1..1131: mol_type = other RNA
atggcggacgcaagtccacatctgtatattgcacagggtttggcacaggggcatgcagctgaagtggtgtctagagcctccatcgtgcggtcccgccttctcgctaatggcgtccctcctatcctgagcctgcgtcatttagcacagctgaccggcgtgtcatacggttacttgcgagagattgtagggcgagtgcgggatccttacctcgatatcaaccgccggaagagagatggcggcattcgggagatatccagtcccgaaccggtgctaatggatgtgcagaggtggctgctccacaatgttttttcgagcgtccccatgcatcccgccagcttcgcataccagcgggatagatccatcgtccagtgtgctgaacagcacgtgggggcgaggtggctggttaagcttgacctgcacgactttttcggcagcattcaggagaagagaatatttgacttgttgttgcgcctgggatactccaaactggtgtccctggaaatcgcccgcatttgtactcgcctccgaggccccagatatgaaggctatcagaacttttgggcctataacgccattcctagttacgtggtgggtagccaaggggtgcttccccagggagcccctacctcaggagctctggccaatacagtggcatctaatcttgacgccaaactccacgatctggctgctagtagaggacttgggtacacacgttatagcgacgacctcacgttcagcgccggtccagattacgataggaaacaagctaccgctctaatagcccaagtgaggaacatcgttagggaccagcacttcgtcttacacgagaaaaagactcatgttgtgccgccaggcgccagaacagttgtcctcggcttgctggtcgactctcagggcgtgcggctcttaccagagtacaagcgcaggctgcaagtacatgttagaggagtagggaagttcggactagttgagcacgcctctcaccgtggttttgagtcagtgctgtcattcgtcaaccacgtcgacgggctcatcgcatttgctgccggagtagaaagggagtatgcgcaacatgctcgacgggcctggaatgatgccctggcgaggtctgggtatccactggaggtctga

SEQ ID NO: 9170 - RNA, 1143 nt, synthetic construct
  source 1..1143: mol_type = other RNA
atgactcgggactcaccccacctgtacttcaaaactggacgcgctctgggccgcgatgaggctacacttaacagtgctattgaacggtccagactgattcaggagacaaacagaagaccagttctgtctctggggcacctcgcagctctgacagggacacggtatgcatatctgcgagagatcgtggaacgcactagcgacccctattcagaacataccagggcaaagagcggagggggttcgaggccaattagtgtgcctgatccactgctgatgcaggtccagcgatggatcttggagcacgtgctgggcagtacacggacccaccccaattccttcgcatataccactggcgtgtctatcaaggattgcgcgaacgtgcatctaggggcatcctggttgattaagctcgatctcaggaactttttcggatctatcgacgagaatgccgtgtactccgcctttagaaggctggggtacggtccgctcgtttcacttgaaatggctagaatatgtacacgtcccgccggtccgcgaatgcaatccctgggtggaaagcggcgttacgcgagcgtaccatcatacgccgtcgaatcccgcggtgtattgccccagggtgccccaacttctggcgctcttgcgaatttagtcgcccttcggttagaccagcagctcagtgagctcgcgaccacaaggggggtggctgtgacgaggtactccgatgacatcgccataagcgccggccctggattcacccgacgagatgcctcagagctgatcgctagagtcgccaggatcgccgccggaaacggctttgagctacaggataccaaaaccagagtgattcctcctggggcccgccatgtggttctcggattattggtggacggcgacagcgtgagactggtccctgaatttaaacgccggatctctacccatgttaggggagtatctgagttcgggctggttgcccacacgaatcaccggggcttcagaagcgcatttagccttattaatcatgtcgacggctgcatagcctttagtcaaggcattgaacccgcttatgctgcaagcgtccgcgcccgttggactgcagctttgaatgcgaccaactaccctgcaggaatcggctcggagaggtga

SEQ ID NO: 9171 - RNA, 1125 nt, synthetic construct
  source 1..1125: mol_type = other RNA
atgaatccttctacactccaccagtacgtagaagcaggccggtctgcaggggtgcctcttgacgtccttcgcgcatctgtggctcaggcttctgcgacacgtagcagaggcgccggacccattttgtccttgggccacctcgcccatctgactggtacgccatacctgtacctacgcgaaattgtacaaaggcaaagggacccatatgacgacgtcattttaagtaagagatccggagggacccggtctataagcgcgccagagcctgtcctgatggatgtgcatagaactgtccttcatcgggccctctccaacttaccgctccacccattctcatacgcttatacagccggccgaagtgtccagcagtgtgcagagcagcatctgggggcccagtggatgattaagtttgacttgcacgacttcttcggtcagatacaggagagagacgttttccgagtgttcgagggccggggatatagtaagctcgtcagcttcgaactggcgcggctgtgcactcgcctcaccgtattcgatcgccccgaaagaggctccggtcggtaccaagccatccctggctacgaggttcaggtgtctggctgcctgccacaaggtgctcccacctcaggcgcactgagcaatatggtggccactcccctagattatgacatggctgggttcgccgctaggagtggctttacatatacccgttattcggatgatatggtgctgtccaccactctgaacggattcgaccgcacccaggccaagtcgatcattagagaggtgtcagagatcatcgggttccacaggtttcagctgcaccagaaaaaaacaagggttgtacctccgggggcccgtaggatcgtgttagggctgctggtggacggagatagacttcgcttgacccccgaatttcggcgaagagtggaggtccatatccgaggggttagcaagtttggtattgctcaccatgctacacataggcgctttgattccatgcttagctttgtttcacacatagacggatgtatcgcatacgcccacagcgtgcaacccgattgggcggatgcaaggcagcatgaatggctggtggccctccggaaacacggatttcctacgtga

SEQ ID NO: 9172 - RNA, 1119 nt, synthetic construct
  source 1..1119: mol_type = other RNA
atgaaccaccccgctccccatcgctactttaggctgggccaggaatcgggagttccagagcaggttttgcaagcctctgctgcgagaaatgccataacacaggcccacggcgccgaacctattctgagcttgggccatctggcccatcttagcggcgcaccatacttgtatttaaggcagattgtacagcgcacgcgcgatccatacggggatattagcaggcagaaaaaaactgggggcataagactgatcagtgctcccgagcctgtccttatggatgtccaacgcctgatcctacggagagcattgcgaaatctgcctttacacccgttctgttacgcctaccgtgagggacgcaccatccaggcatgtgcacagcagcaccttggtgcaaagtggatgattaagttcgacctgcacaatttctttggacagattgaagagagggatgtctatagagtatttgacagttgcggttattccgcccttgtgtcattcgaactcgctcgcatatgcacgcgttcccgggtggctgactttcactcccgaagtggcagatactccgctattaccacatacgacgtggacgtgacaggtagacttccacaaggggcgcctacttctggggccctctccaacgcggtggctacaccactagactataccctgcatgagttcgccactggggcaggttttgtgtatactcggtattcagatgatatggtgctgtctacatgccaggacttcaaccgcgcccaggcagtgaccatcatccgagaggtgagccacctcgttgcaacccataggttccggctgcatcgtaaaaagactcgggtcattccccccggggctagacatgtcgtgctaggcctgctggtggacggcggagaagtgaggctgaccccggaatttaggcgaagggttgaggttcacatcaggggagtacgggagttcgggctgtcagagcacagtgaccacagaaagtttcgatccctgctcagctttatcaaccatgtcgagggatctctcgctttcgccagatcaatccaacctgcgtgggccgatgaaaagcgggccgaatggcggtctatcttgggcagcttaggactcaccctctga

SEQ ID NO: 9173 - RNA, 1119 nt, synthetic construct
  source 1..1119: mol_type = other RNA
atgaatcactcctctcctcaccactactctagagcaggcagggaggctggcgttagtgaaagcgtggtgagagcagcattggcccagtcgcatttgatcgaggaatccggatcatttcccatcctgagtctgggacatctggctcacctgtctggagcgccttacctgtacttacgagagatcgtacagcgcgtccgagatccttatcaagacatttcccaacggaaaaagagtggtggaacacgcccaatctcagctcctgagccagtcctgatggatgtgcaccggttcatactcgacagggcgttggcatcagtgccactacaccccgctagcttcgcatacactagaggtcgcaatataaagcagtgcgccgagcgacatctcggggccaaatggctgtttaagttcgacattaccaacttcttcggtcaggtgaaagaaccctccgtttttagggtgttcaggcgacaggggtatagtcgcctcgtgtccctcgaactcacgaggatatgcacccgggccccactgagtaaaaacctcggcagccgttctcggtacgatgtcattccttcgtatagcgtagaccagcggggatggcttcctcagggagctccaaccagtggcgcgttatccaacgctgtcgcagccccacttgatcacgatctgacatcactggccgaccgtcatggcctggtgtacagccgatattccgatgacatgtttttttctgccgggcaaggcttttcccgtcccaaagcaaaggctttggtaagagaagtggaccggacagttcaaaggcacagattcctgctgcataggaagaagactagggttatcccgcccggtgcccgccatattgtgttggggttacttgtggacagcggccaggttcgcctactcccggagtttagaagacgggtagaagtccacatccgcggcgtgggaagattcgggcttgattcacatgtcgagcacagggggttccggtcaatgtttagctttatcagccatgtcgacggctgtcttgctttcgcctctagcgtggaacccgactgggccgagtcttgtagagttcgctgggaggccgtgctgaaggatcaggggttccccatttga

SEQ ID NO: 9174 - RNA, 1125 nt, synthetic construct
  source 1..1125: mol_type = other RNA
atggatcattcatcgccccatctgtaccgccaggcaggcttagccgcaggggttgaacgggctgtgttggaccatgctctggaacagatggtccggaatgaggctagggacgccctcccaatcttgtctctcaagcatctcgcccacctgacaggtgctccctacctgtacctgagagatatcgtcgcccgcgtggcagatccctacaccgacattgtagcccctaaacgcagtggaggaaagaggcatatttctgcaccagagccgggactgatggacgtgcaaagagtaatcctcaagcgcgcccttggaaacattccacaacaccctagctcctttgcgtatagacagggtatttccatcgttgagtgcgcaagaaggcatctgggagccaggtggctggtcaaactcgatcttcacgacttttttggcagcatttcagagagacaggtgtatctcgtgttcagggcccggggttatagccgtctcatgagcctagagctggcccggctctgtacacgtgctgggcttagcggatcacagcgcgtgggctccactcggtattccgctatcccctcttatgcagttaacactgtggggtatttaccacagggggggcctacctccggtgcattggctaacgctgtggccactccgatggactacgctcttgcaggccttgcacaggagtgggggttggtctacacaaggtactctgacgatctggtcttctctgcgggccacggctttaatcgggccatagccgtgagaataatcggcaaagcgacaagcgctgtgcgatcacaggggtttattttacatgaacgcaagacgcgaatcatccctcccggagccagacacattgtcctgggtctgttagtggacggcgatgtggttcgactgaccccagagttcagacgtcggatcaatgtacacttgcgcggagttgataagttcggcctgaggtcccacgctatccaccgaggcttccgaagtctgttcagcttcgtgaaccacatagacgggtgcctagcctttgccatgagtgtcgagcctgaatgggccagggaaaccgtgagtgcatggaggcaaatactgcgggcgcaggccttccccgtaaattga

SEQ ID NO: 9175 - RNA, 1128 nt, synthetic construct
  source 1..1128: mol_type = other RNA
atgtcacagcctccaccccatcggtatctggctagaggaagggccgatggcgttagtgaaactgtcctcagggccgctgttaagaataccactaagacggatgctcatgatgctctctctatcctttcattggggcacttgagccacttgactggagctccatacttatacctgaggggcatagtgcaacgcacatcggatccatacgacgacattatgagaaaaaagcagacgggcggaagcaggctcatctctgcccctgagcccgtcctgatggacgtgcaaaggctgattctcgaaagagccctgactggaaccccgatgcatccagcctccttcgcttaccgtcgaaagcgcagtaccctgatgtgcgcacagcagcatgttggggcccgctggatgcttaaatttgatctgcacgacttcttcggcagtattacagaagtgcaggtctataaagtgtttagatcaagggggtatgagcctctggtgtcctttgagctagcgcggttgtgcacgcgctccacaacaatgccctcatggtctacccggcaccaagtgcggtatcccgtgatccagtcttacaacggccggaccttaggttccctgcctcagggaggtcctacatcaggggcactggcgaatgccgtagctacaccactcgataattccttaagcgacctcagccatgaccatggcttcacttacaccagatattctgacgacctcgtgttctccagcgccaacaagttcgacaggacagtcgcccgggccataattaacgcagtgagacgctgtgtctctggtcagggctttcgacttcacgccaagaaaaccagaatcatcccccctggggcgcgccacattgttctaggccttatgctgagtgatgacggtgttaggctgacccccgagttccgccgacgaatcgaagtccacgtacacggggtgagcacttttgggctgttggctcacgcagaattccgtagattcaggagcgtgttttccttcatcaaccatgtcgatggatgtctggcctttgcagagagcgtggagagtccgtgggcacttcggctgcgtggagagtggcagcgagtactacggaaagagggctttccagcaatgtga

SEQ ID NO: 9176 - RNA, 1110 nt, synthetic construct
  source 1..1110: mol_type = other RNA
atgaacaattttagccctaatctgtatatcaaccagcggccaaatgaaatgcccgggcgtgtcgcgaaaatcgcctggaggggaatcgtgtcccagagggatcgggggcttacccctattctgaccttagggcatctggcctcagccaccggaattgatcatgcattccttcgatccgtggtggacagaagttgggacccttaccaggaaattaaaatctcaaaaaagcggggcggtactcgcaaattggccagaccacacccactgcttatggaggcccagcgttggatcctgtataacgtcctgccaaacctggagctcaatgatgcaagttttgcatatacatcaggcagatccatcgtggattgcgcgcagcgacatgtaggtgcccggtggattttgaagctggacctcaaagacttcttcgactctgtttctgaaaagagcatatatcggatcttcctcaaccttggctacgagaagctggtcagtctagaactagccaggttatgcactcgcgtaacacctaatagtcctaggtttggtggtaacctggataagtacgagactatatttgactatcgccaccccgcacaagggcaattgccacaaggagccccgacatccggggcactagctaatgcggctatgtttagaatagactgtgctctgcagaagctggccagaaaacacagctacacgtacacccgatacagcgacgatctcgttttctccacaggcgaaaaagcttcacgatctcagctgatcaccctcaagaagaaaatccagcacgagattgttagcactcgtttccaacttcgcaaagacaagacaagaattattaccccgggcgcccgcaagatagtgttgggacttctgattactgaaagcgaggtccggctgacgcccgagtttaagaggaggatcctcgtccacctcagaggcgtggagaagttcggactgtactcccatgtgcagcaccgcaatttcgattcgaccctcagctttatcaaccacttggaaggcctcattgagtttgcttctaatgtggagcccgaattcgctcatgagtctttaaggaactggcgggagatggtgcccctgatctga

SEQ ID NO: 9177 - RNA, 1143 nt, synthetic construct
  source 1..1143: mol_type = other RNA
atgactagcgctccacacctgaactgggcacgcacagtggattttggcgctgcccccggaattgccgacgctatgttccacaggagcgagatcctcagacgcaccggagccccagttatcctgtctctgaaacatttagctctgtccgccagcgtggattacggctttctgctgggcgttattaggcgatctgctcccgcatacagagctattcgtattccaaagaatacaggggggttcagagatctcctgtcaccttcagagtccctcatggccgtgcagagatggatccttcatgaggttttgacacaccagccgcggcatcgtaacaactttgcgtactttcccggagtgacagccagggaatgtgctgcccgacacgctggggcaaaatggatgatcaagacagaccttcacaattacttcccttctattaccgaaaaaaaggtgttcgaggtgtttgaagggttggggtattcccgcctcgttgccttcgaactggctcgcctgtgcacttggacgataagtcagacccccacagccgtcactacagtgcaacagagggcccgcagctccactggcttgccttatccggtgatgctagagggagtactgcctcaaggagcacctacctcgggcgcccttgcaaatgcctcaaccttcagcttagacgagaaactgtccgacctggcaattaagagcaacctagtatatacccgttactctgacgacatgactttctcgtcagcaagtcccctggatcgggatgtcgctcgcctggtgatcaggcacatccggactatagtcggtaagtccggcttagaactccacgataaaaagacgaaattgataccacacggagcaaggaagattgtgctcggtatgctgatcaccgaggacggtgtgagtgtactgcccgaacagaggcggatgatcgacctgcatatccatgcggtcggtaagtttgggccagtcgcctacgccacgcagcgaagattcgagtctgtgctatcttttgtcaatcacgtggagggctggcttgcgtatttgagtcatatagacagagattggaccgcccagagacggctcgcatggaacgctgcgctcgatcggcatcacgtttccgtcatgagccttggctga

SEQ ID NO: 9178 - RNA, 1143 nt, synthetic construct
  source 1..1143: mol_type = other RNA
atgcgaaacgaggcacatctgtcctgggccatcacaagcatgagcggggaacgccctgccttggctgatgccatgatgcgccaatctgaaacgcttcggcggacaggcgctccggttctgtattctctgaagcatctagcattaactaccggcgtcgagtacggctacctccgccatgtcattcagagaaacgccccagcttataaggcaattcgcattccaaaaaatacaggcggatacagagatctgctctcccctacagacagcctgaagcatgtgcagagatggatcctgcacgagattctcgacaccgtccctaggcatatcaataacttcgcatattttcgagacgtaacagctagggaatgcgccatccgccacgctggtgcgacttggatgatcaagacggacctgcaccagtattttccctctatcagtgagaaattggtgtacgaagtgttccaaggcttaggttacagtcggctccttagtttcgagctcgccaggctgtgtacctggaataagttagggcgacttgcacccaccggagcagttcccagatcacacgggagtgtgcgttctctgccttacccacccgcccctttgggctttcttccccagggtgctccgacttctggggctctggctaatgcagccacccggaggctagatgacgccctctcagatttcgcgatagccaaccacctgatttacactcgctatagcgatgatatgacattttcatccccctcagccttcagcaggacagtcgcctcagagtttgtggttcagatacggaaaatagtgaccgcgagcggtcttgccctgcactcccagaagaccaaagtgatcccacctggcgcaagaaaaattgttctgggaatgctgatcaccccaggaggggtgggaatactcccagagcagcgtaggactattgacctgtatgtgcatgccgtatccacgtacgggcccgtagattatgctgccagaagaggctttgacagcgtgttctccttcatcaaccacgtggaaggatggctggcgtacctgtctcacattgacgcattgtggactgccggcaggtcgcgttcctggaatgacgctctacggaagcacctcatcgaggtcagcagtttgggatga

SEQ ID NO: 9179 - RNA, 1137 nt, synthetic construct
  source 1..1137: mol_type = other RNA
atgagcactgatgcccacctaagctgggctcctcccgtaattagcgggggcgatggcccagccctagcaaatgccatgatgtttagggaagaaactctgaggcaacatggcgctcctgtgctgtacagcctgaaacatctggcacttagtacaggagtagactatggttttctcagaggagtgatcagacgcaatacccaggcgtacaaggcgattaggattcctaaaaataccggcgggttcagggatctgctgtccccagcacctgctctgatgcaggtccagcgatggatcttgcatgaaatcctgtctaaggtgccccgccagataaactcattcgcctactttgctaagatcacgccgaaagagtgcgttgaacggcacgctggggcatcatggctcatcaaaaccgacctgcacaattatttcccctcgatttctgagaagagtgtatatacagtgttcttgaatatggggtatagtgacttggtcagtttcgagctttctcgcatctgcacttgggtgcggcccggtgttcagttagaggccactgagagcgccattactgattctgagatcccttatccaaggaccccccttggctacctgcctcaaggatcccccacatccggcgcacttgctaatgcctgtacaagacagctggataacgacctgtccacgctcgcgttgaacgctcacctccgctacacacgctacagcgacgacatgacatttagctccagaggtccgctcgatagagcaagggccgcggagttcataggacaagtccgacggctcgtgaccgcctccggattaacgttacacgcaaagaagaccaagataattccaccaggtgccagaaaaattgttctaggaatgctggtgaccgacaccggggtgggaatcctgcgggaacagcgcaggatggttgatctccatatacacgctgtcgccaaatatgggccaattgattacgctgaacgacgtaactttgacagcgtcttgtcctacatcaaccacgtggagggctggcttgcctatctctcacacatcgatggcgactggacatcacggcgtagacgggactggacctctgccctgtctgtgcataacgtcagtgtgacttcactgggctga

SEQ ID NO: 9180 - RNA, 930 nt, synthetic construct
  source 1..930: mol_type = other RNA
atgcgaattccaaagaatacggggggtcacagaacattacatgccccggccgacagcttgcgcatcgttcaacgctggattctccatgagattctccatgtcattgataggcacgaaaacaattacgcatattttcctcaggtgacggtgaaggagtgcgccagcaggcacatcggcgcatcctggatgatcaaaaccgacatacacaactacttcccgagtgtttccgcacgctccgtctatggcgtgtttttgggtctgggctacgctcccctggtagcctatgaactctcaaggctttgtacctggccaatcggcgggcccgatttatcccatctggcgaccctggaacccccaaccgacagcgacttggtctacccatctttatggtcagaagcccttccccagggcgctcctactagcggagcccttgcaaatgcctgcacacgggaaatggacgcacggctctctagcttcgctataaaaaaccggctagtatacactcggtacagcgatgatatggtattctctggaatcgggtcgttcagtagaagcctaatctcagagctgatgacagaggtccgaaaaatagtcgtcagcaatggcttcgctttgcatctgaagaagactagagtggtgtctcctgggtcccggaaaatcgtgcttggactgctcgtgcaggaagagtctattgctctgctgcctgagcatcgccgtatgattgacctgtacattcacgcgacatctcgatatggacccgtgggttacgctggggttaggaagtttgaaagtgtgatctcatttatcaaccacgttgagggctggctgtcctattcaagtcacatagacgaggagtggacccgtgagagaagtgtgagatggagggccgccctggataagcaccaggtgtatgtggattccctcggatga

SEQ ID NO: 9181 - RNA, 1545 nt, synthetic construct
  source 1..1545: mol_type = other RNA
atggtgtccgcctcacctcacctttacctgcggagcgtgcccgaaaggcgatctgcacggactgctaaacgcgccctgcggcaagccgctgacgttagagctcatggtctgcccccactggtgacactgggccacttggcccacgtaaccggtgtcccctatggcactctgagacgagtcgtcgagcgccgtggcttcctctatgaccctgtgcataaacccggcaaagccgatcgcggaccaaggaagctgctcgcccctgaccccgagctcatgaccgttcagcggtggctcctccatcacgtcctcgacccccttcctgtgcacccagatgcatacgcatacgtgcgtggccgctccgtcgctgattgtgctaggcggcatttgggagccagatggctgatcaaaatcgatataagggacttctttggcagtgtcggggaaagacgcgtgcatcgggtctttcgaacccacgggtatcagcccctggttgcatttgaacttgcaaggctttgcacttgggacgataggcacgccggcattgaccccgctagacgtgacaggtaccctaaggtgacagcctaccaaggagggtgggggggtttcctaccccagggtgcaccaacaagcggcgcccttgcgaatctcgctgtgcgaccgatggatgacaggctaagccacatcgcggcccgccatggtctggtgtataccagatactcggacgatatggtcttttctgcgggcacgacattcgtacgcaggagcgcggtcgccatgttgcgcgaatttacccacgccatccagggctatggcttcgccgtccacccgagaaagacccggattgtagccccgggggcacgtagatccgtgttagggctcttggtagacggcgatacccctcggctgacgccagacttcaagtctcgggtgctcagtcatgtttacggcgtggagaagtttgggctgccatcccatcagcagcatagaggcttcgcctcactggccgggttggtgcaccacgtggatggcctaattgcttacgcacgtggaacagagcctgagtgggcagagcctttacgcgcaagatggagagctgccctggaggctcagggatggtcaagcgcatatgctgatgatagagccgagggcccaccaggagggaatccatgccgcagaccttctggaggcggtccccacatactggggagtgtgcggccggtttttgctgcagtggctgccgtagctggtggcggaggagcagagggtgctgtcgcagtcgtggcgggattagaaggacgagacggagatgccggtgcgggagagtgtggagaagtggttgacgcgaggcgacgacggcgcaagcaattcggcgagcccgtgcttgaggagttcggaggggtcctggaaggggttgggagggtggtaggcgaaggggttgccgatggtgtgggggctggagctgcctttgagcctggtagggacgccggcgatcagctgactgacgtggtgctgggggaaagggaattgcggtgcgttacagcctga

SEQ ID NO: 9182 - RNA, 1128 nt, synthetic construct
  source 1..1128: mol_type = other RNA
atggtatctgcctccccacacctgtatttgcgctccgtgccggccagccgttctttagggacagcccggcgagcactgtcacagtcagctgacgccggaactagagggttaccccccgttgtgactctgggacacctggcccaccttaccgggatcccgtaccggacattacgaggcgcggtcgaacggaggggctaccattataccccaattcacctccccgggaagcctgatagagggcctcggaaactgctggtgccccaacctgaactgatggccgcccaacggtggttgcttcatcaccttctcgatctcctcccagtccaccctcacgcctttgcttacgttaaaggccgatcagttgctgagtgcgccagacgtcatcttggcgcacagtggctgatcaagatcgatatacaggacttcttcggcgctattggtgagagaagggtccatcaggtttttagagctcaggggtaccagccgctggtggcttacgagctcagccggctgtgtacatgggatgatagacgagatgacgtagaccccgtgcggaaggataggtatccaaaaatcacggcctaccaaggaggttggggaggcagtctgccccagggtgcaccaactagtggagtgcttgcgaacttggcagtgaggcccatggacgaccgcctcagcgacattgcggcacgtcatggcctggtgtataccaggtactcggatgatatgatcctcagttccggagatcctttctccaggcccgccgctgttgcagctcttagagagctcacccacgcggtgcagggctatggcttcgagcctcatgcccgaaaaacacgcatagtgcctcctggagctaggcgcgcagtcttgggcctgttggtcgacggcgacgtgctacgcctgactccagcctttaagtctcgcctgctggcccatctgtacgggattgagaagtttggtctaagggcccatcagcaacaccgcgacttcgcttctctggctggtttggtgcaccacgtcgacggccttgtagcatatgcactgggagccgaaaccgactgggcccacccagtccaggaaagatggagggggatgctacgggcacagggatggagcctcgattga

SEQ ID NO: 9183 - RNA, 1155 nt, synthetic construct
  source 1..1155: mol_type = other RNA
atgacaatagggagcccgcacctgtaccggagggatggacgagccgagggcaaaccagaggcactactggacgccgctttggctcaggcctatgctgtagaggcaaatgggttagcagccgtcctaactctgaaccatctcgccgtgcgaacaggggtgagctacaattacctccgtggcattgtgtctcgcaccttcgacccctacgcagacttggtaattgaacgtagaaacggcaggaagatgcgacctatcagcgttcccgatccaccattgatgcgggtgcagagatggattctgcaccgcatagcgtccagaattccggtccacacagattcctatgcttatcaggcaggcagctcgattcgggcttgtgcaatgcggcacgctggagctaggtggctggtgaagcttgatatccgcaacttcttcgaaacgataaatgagagacaggtattttcgctctttcatgaggctggctacgtccgcctggtttcactggaactggcccggctgtgcactaggagtgcagcccacgccagtcatgtggacgtgaggcattttggcggggatgtgagagacagggtgatccagtcttataatcagcctgtcctgggctttgttcctcaaggcgcgcccacttctggagctcttgctaatgcaatcttccacgagctggacgtgacattctccacccttgcccacagagagcgcatggtgtataccagatacgccgacgacttgaccttctccagtatcgaagagttcgatcgttcacgcgccgcgcaattgattcggaaggtggggagcgagctacggtctgagggattcagccttcatcagcagaaaaccagaatcgtccctccaggtggaaggaagctcgtcctgggcctgctcgtcgatagggacgacgttaggttatcaagatcaatgcggtcccgcatcgctgaaaatgtgcgcggtgttgaaaaatttggattagccacccacgtactgcatcggcgattctcttccctcgacgggtttgtgagacatgttagtggtcttctggccttcgccactgatgtggaacccggttgggcacgacacatgagcaagcgttggcaagccgcgctcagggccaacaactggctcgattttacgtttaaccgctga

SEQ ID NO: 9184 - RNA, 1149 nt, synthetic construct
  source 1..1149: mol_type = other RNA
atgaccaccggctcaccacacctctatcggagagaggggcgagcaaggggaaaacctgaagcactgctagacgcggccttaacccaaacacagagcgttgaggcgaacggcctggctgctgtcctgaccctcaatcatttagcagtccgtacaggcgtgtcctacaactaccttcgagggattgttgagcgcaaatgggacccctatgatgacatagtgctgaagaggagaaacggtagggggatgcggcctatttctgccccccactctcctctgatgagagtgcagcgctggatcctccacagaattgtcgatcgggtaccagtccacgcggacagctacgcatatcaggcggggtctagtataagatcatgtgccagtcgccatgccggagcccgttggttagttaaactggacatccgtaatttcttcgagactatcgatgaaaggcgcgtgtacactgtattccacaaagccggatacgttcagcttgtggccttggagttggcccgcctttgcactcgttctgcggcccatgcctcccacgtggatagccacaggtttctttcgaatatgagggatcgcgtgattagtccgtatagccaggccgttctgggctttcttccgcaaggtgctcccaccagcggcgcattggctaacctgatcttttatgaactggacacaacattctccaggatcgctcaactcgagagaatggtgtacacccggtacgctgacgacctcaccttctcgactatcgaagagttctcacggagccaggctactagtctgatacgcgaagtggggacggaactgagacgagctggattttctctacatgagaagaagacgaggattgtgcccccaggcgctcggaaggcagtactaggcctcctggtagataataataaggtgcggttgaacaggatcgtccggggccggattacagataacgtgcgaggagtggagaagtttggtctggccgcccatgtcgcacatcgccgattctccagcttggacggttttgtgagacatgtttcaggactcctggcatttgctgccgatgtcgaaccagagtgggcacacgctctgggggagcagtggagaacagccctccacgccaataactggtccgaaccttccttctga

SEQ ID NO: 9185 - RNA, 1158 nt, synthetic construct
  source 1..1158: mol_type = other RNA
atgataacggactccccccacttataccgtaggaatggagttatcaactcagtgcctgaggaggttttgtctaatagccttatgcaggcaggccgggtcgaacaatatgggctggccagtatactgaccctcaagcacttggcagtacaagcaagatcctcatacggatttctgcgcgggattgtggagcgcaagttcgacccttatactgacatcaagatcaagagaactaacggcagaataatgaggcctgtgtcaagtcctagtcccgggttaatgcccattcagcggtggatcctggcccatatcgtcagtcgcctgggaacccaccccaacagcttcgcatatacccgaaataagagcataaagtcttgcgctagtaagcatctgggcgccaattggctcgttcgcctcgatgtgcagaatttctttgaatctatcgacgagagcagcgtgtatcgcgtgtttgctgaggctggatatcagcctctggccgcttttgaactcgctaggatttgtactcgatacgccccacatgctcaccacgtcgatgccgaaagattccgatctaaaagccactacgccacgattcgtcaatacaacatgccgtacatgggctttgtgccacaaggcgcaccaacatccggtgccctcgccaatctggtcgcgaaagatctcgaccttaccttaacccaggttgctgaaaaatatggcgcagcctacacaagatattccgatgatatgacattctcatccactagcaagttcactagatctaaagccctctcgcttattgaagaatcccggaccgcacttttcatgaacggcttcaggttgcatgacaagaagacccagatccagccacccggcgctaggaaaacaattctggggttgctggtggatggtgattcggtgcacctgaataagcggattcgttccaggatcgagaaccacgtacggggggccgagaaatttggtctgcgatctcattactcacatgtaaactttgcgagcctagagggattcgtcaatcacgtgtctggactgatcgcgttttggctggacatcgacccggagaactcccaggacattcagaaaaggtggaaagagacactacggcgcgatgggtggcatcaggtggactactggagaatgtga

SEQ ID NO: 9186 - RNA, 1242 nt, synthetic construct
  source 1..1242: mol_type = other RNA
atgatcaccggaagcccacacctgtatcggagccggggcatcaagaggaacgtggcaaccagtgtcatcgataacgctattgccgcggccgaacgagtagagaaaaatgggctcgccgcggttctaacgttgaatcatctcgcacattctacaggtgctgattatggctacctgagacagatcgtgacccgctcaattgatccgtacaccgacattgtaatagcacggagaaacggcagaaaaatgaggacagtgagctctcctgaaccctcactcctgcaagtccagcagtggattttgaggtccatcgccgaaaagatcccaacacacagttcaagttatgcctattctcctggtaggagcgtgaagcagtgcgcgtctaggcacgtaggggctaagtggctgataaagcttgacattagaaacttcttcgagtccattactgaggtccctgtctaccgagtcttcaggagagtggggtacgaacccctgcccgcactggaacttgctcgggtgtgtactagatacgacgagagggaccccggcatgcgcttagatcgggtgctagtcagggctaaagagtacagttccattcaagtttatcggaaaccactcctgggatttctcccgcaaggtgcacctacgagcggagcccttgcaaaccaggttgccatgccactggatgaacgcctttccgccatcgctgactctcgcggcctgatctacaccagatacgccgatgacatgacattttccagcggcggacctttcaccagaagtgcggcccttacactaattaatcaggtaagcggagcaatccggcagcggggattcgctgtgcacgaccaaaagactcgtatagtgacccccggcgctcgcaaagtggttctcgggttattagttgacggtgaccgggtgcgcctgactaaaaaaatgaggcagcgtatctctttgcatgttcgaggagtcgagactttcgggtttatcgatcacgcaaagcatgtcaagttttcctccgtggatgggttggtgctgcacgtgagcggcctgatatcgtatgcttcagacattgagcccgcctgggccgatgagtttaagcagcgatggcgtaatgttgtggccgaaaaactggacgtggagctgccatcctttaatcgtgatgtcggcggcaagtcatataagtcggggcagatcagacacctcgtgcctttgtctgcccgcctgcatcgccgagagaactga

SEQ ID NO: 9187 - RNA, 1230 nt, synthetic construct
  source 1..1230: mol_type = other RNA
atgcggaccgacagcccacatttatacagacgcgagggacgacgccggggattgtccaacgaagtgatcgaccgggtagagatggccagcgcacggctacttgcacacggcgtagccgttgtgcttacactggggcacctggcctggagaagtggagctccctacccatacctgaggaaggtcgtggagcggtctattgatccttaccatgcgtttgctataaacagacgggctggcaagaatcctcgcctgattagctctcctagcccccttctgatggacgtgcaacgttggattctcgctcgcatccttgatcatgtgaccccacaccctgcctcatacgcatatcggcggggggtcagcatcagaatgtgtgctgagcaacatctcggcgcgaggtggctggttaaaatggacctccacaacttttttcacaccatagatgagcgccaggtgttcaaggttttcgcagatcttggatatgccccgctgcttgccctggagttagcacggctgtgcacacgccgtgcatgggatggtttcccccacccgaccaggttccaggtgcgaaatcatcgtcactcagttattcctacttattcggcagatgccatcggcttcgttccacagggcgctcccacttccggtgctatcgctaatctggcagtcagaccactggacgaagccttggccgctctaggctctgcccacaggctcgtgtacactagatatgcagatgacatcgtcttttctagtgctggagcctttgatcgacgagccgccgccagcctgatgcacaaggctcgacacgaaatagcggcctgcgggttcgcagcgcatgacaaaaaaacacgcctgacaccacctggcgctaggcgtattgtattggggctcctcgtggacggcgacaaggtcagactcccctccgaaatgaggtcacgcattgccacacacgtgcatgctgccgagaaattcgggttgagggaacatcagctctccaggggtttcacttccgtgttagggctcgctaggcacgtggatggattgctagcatttgcgtcagacgtcgatcccgcatggactgatgacctgcggaccagatggagacgcaccttgctgcgagacgcctctgccctgggtgcctttgagatcagtgacgtctacaggcagagagacgacggcacgaccgctgcgtatacagtggccgccacgccctgggatgcactgtga

SEQ ID NO: 9188 - RNA, 1200 nt, synthetic construct
  source 1..1200: mol_type = other RNA
atgaccattggccctccacatctctataggcttcacggacgggttcgccagcaggacgaacacatgctgcaggcggccatcgaacaggctgctagggtggagcgcagggggttagcgcatgtcctgactctcaatcacctagcccaccgtactggcgcaccctacccctatctccgcgaaattgtcgaacggaagagagatccgtatcacgtttttgaaatccgaagaagggttggcggttctggcagggtgattagctcccccgacccgacactgatgcacgtacaacggtggatcctgtcgagaattctgaatcatgtccctgtgcatccagcgagcttcgcatatagaactggcttctccatccgggcatgcgcctctcaacacttaggggccgactggctggtgaaacttgacttgcataactttttccacaccattgatgagcggcaagtgtaccaggtgatcaggcaggctggctatacgaggctcgtcgctctggagatagcccggctctgcactagacagagcacaggaaccttccctggtagtcgtcggtttcacgctatgcgcattcatgatcgtgtgatcgctaactacacgacaaattgtctggggttcctaccccaaggtgcccccacatcaggcgcccttgcaaacttagtggctcgcccccttgacgatcgcttgaccgccattgccgacgatcaccagctggtgtacaccagatacgccgatgacattgtactctccggactggggccattcaatcgggctcatgcagcatccattatacgactcgcaggcaccgccatccgagagtcagggttcgagcctcacgatggtaaaacccgagtggttcctcccggcgcccgtagaatcgtcttggggctgctgatcgacggcgagaggttgcgcgtaccacgcgacactcgatctcgcatagaggcacacgtgtacggagccgagagatttggacttgtgcatcaccagataaacaggaagttcgcttcagccttgggactggtcagatacgtggatggactcctggcttttgctcatgacgtcgatcctacatgggctacaccctggtgggaaaggtggcggagacttgtactggatcaggccgccgcaatcgcgccatttgggccagacagtatcgttcgggcaccaaccagcgccgacagtcctgatcagtga

SEQ ID NO: 9189 - RNA, 1251 nt, synthetic construct
  source 1..1251: mol_type = other RNA
atggacaaactgagcaacgcctggatggtgagaggtgctcgggctcctacaggagtgtggcgagctacgagaacaagccccccaggccgcgatacgccaaaagtgggccacccaattgacagccccgcactgtatagatcacttgggcggcgcaatggggttacatcgtctgttatcgacgaggccctcgagcagatgaggcgagtacgcagacaggggctcacccctgtactgaccctggggcatctagcgcaccaaacgggcgcaccctatctgtatctgcggagggtcgttcaacggcggcaggatccctacactgagttctcccgccccaaacgtgagccgggcaagtctaggaccattgctgcgccggcacccgtactgatggatgtgcagcgttggctgttggctaacgtggtcagcccaattcctccccacggggcctcttatgcataccagcagggaagatccgcagtgcagtgcgcacagcttcacttgggggcgagctggttactcaagttcgacctccacgatttcttccattccgtcaacgaaagggccgtgcagagcatcctacgctcagtcgggtacaactcattgatatcttttgagatcgcccgagtgtgtaccagagtgcctggaggcatcacctggccccactttagatccgcctatcaagccatacctggctactccgcccctgtgctcggttaccttcctcagggtggcccagctagtggcgctcttgccaatctagccgcacggccactggacgaagcactgtcttcggtggccgaccgctaccggatgacatatacccgctatgctgacgacatgactttttccactctgcgctccttagatcgaagtacacttactcggtgcgtgagcgaaatcagtgccaccgtttctgcagccagatttcggctccacaggaagaaaacacgtatcgtcccacccggcgctaggaagattgtgctgggcttactggccgatggtgagagactccgactccctcgtcataccaggagaggactggaggatcacatcaggggggtagcaaagttcggtctgggggcccataaagagcatgccggatactcaagtgtccaaggatttgtgcatcacattgacggattgctcgcttacggccatggcgtcgatccagtttggactaagccgctggctgctcagtgggaaaggttgatgaatgcagcgggacttactgcccaggaacgcaggctgtggtga

SEQ ID NO: 9190 - RNA, 1023 nt, synthetic construct
  source 1..1023: mol_type = other RNA
atgctcacgctcgcccacttagctcaccaaacgggcgcgccatatatctatctccgcgagattgtgcagagggtgcgggacccctacgcagaattttcacgcccgaaaagagaaccaggtaaggccagagttatcgcagcacctgatggggtgctgatggatgttcagcgatggttgctcgctggtctgttcggacgcattcagccccaccgcgcctcttacgcctaccagcaagggcgatctgcagtgcagtgcgcccagcgacacctaggagcctcctggttgctgaagttcgatctgcacgatttctttcacagcatcgacgaaagagccgtccaagccctcgtccgggaatcaggctacaatcggctggtgagttttgagattgctagagtgtgtaccaggctgcccggcggaaatacagtgccttatactaggagcgcctaccagggtatacccacctataggaccgggacacttggcttcttgccacaaggggcacctaccagcggcgctatcgctaacctgattgcccggactctcgacgacagtcttgtcgccatagctgaccggtacgatatgacctatactaggtacgccgatgacatgaccttgtctacctcccgcaatctggatagatcagtcttaactagatgcgtagctgagattagcgctaccgttgcgcgaacacgctttaggctgcaccgcaaaaagactaggatcgtgccacctggcgcccggaagatcgtactcggactgctagttgacggtgatcgtgtccggctgccgcgtcatacaagaaggcggttggaagaccatattagagggacaacaagtttcggactgactgcccatgtagcgcatgccggctattcctccttgcaggggtttgtgaaccatatcgacggccttttatcgtacgctcgaggagtggacgcagcgtgggcagatcagctgaaggcaaaatgggaggacgctatggccgcagagggactgaacggccttgagcgtcacgcttggtga

SEQ ID NO: 9191 - RNA, 1056 nt, synthetic construct
  source 1..1056: mol_type = other RNA
atgcgtggcttagatgcacgcgggctcacacctgtcctcacgctggctcacctggctcatctcactggtgccccctatttgtatctgcgggagattgtgcagcgccggcgagatccttacacagagttctctcgacctaaaagagagatcgggaagactcgaacgattgcggcaccggaccctgtcctgatggacgtgcagaggtggctgcttcggcacgtgtttggaaggctcaccccccaccaggcttcatacgcataccagcagggccgcagcgctgtccaatgtgcccaacgccatctgggtgccacttggctcctcaaattcgatctgcataatttcttcccaagcattaacgaacgagcggttcaggccgtggtacacgccgctggatacaataaactgatatcgtttgagatcgcgaggctttgcacaagagtgccctgggtcgtggagtggccatattctggctcctcataccaaaccatagacacctatcggacaccccgtgtaggccgcttgcctcaaggggcaccaacaagcggagctttagctaacctggttgccaggccccttgacgaaacgttatccgctctagccgagaggtatgacctgacttatactcggtacgccgatgacatgaccttttctgctttcagacgctttgaacgacctgccctgacccggtgtgtggcagaaatcacccaggccgtcgcagcaactagctttacactgcataggaagaagacaagagtagtgccaccgggcgccaggaaaattgtgctaggcttgttggtggacggggatgaggtgaggcttccccgtcagaccagaaagcgcctagaagaccacatcagaggggtggcaaagtttggctttaccgcccacgtcgaacacatcaggttctccagtctccagggtttcacccatcacgttgacggtctgttggcgtacgcccagggagttgatgccgcatgggccagaccacttacccggcagtgggaggatctgctgactgctgagggattctccatcctcgaaagaagtcggtggtga

SEQ ID NO: 9192 - RNA, 1170 nt, synthetic construct
  source 1..1170: mol_type = other RNA
atgagcaccgactctcccgcggcctatcagagaatcggccggcagagaggggtgccagatgtagtggtggaggcagcactggaacaaattcgccgggtgagggctgtcaatctgacaccggttctctctctgaaacacctggctcatcttaccggcgctagctacatctatttgcgtgagactgtccagcgaaagcgcgacccatatgtcgaattcagccgtccaaaacgggctgagggccagttgcgcacaatcagtgcccctgatccgcccctcatggccgttcagagatggatattgcagagaattttctcaagactgcacccccactcagcatcttacgcctaccaagcgggaaggtccgctcggcagtgtgccgaacagcaccttggcgccaggtggctgctcaagtttgacctacacagcttcttccactccattaacgaacgcgccgtttttggaattctagcaggacagggttataacaggctggtttcgtttgaaatcgccagactgtgcacgaggtacgcggggcatgtgagaggcctcaatttcagcaagtttcgggccaccgccagttggcctcaccacttcacaatcccttcttactcggtgccatggctggggttcttaccccagggagcacccaccagcggagccatagctaatatgactgctttgcagctggacgagctgctgtccgacgtagccgatcggtatggccttgtttacacaaggtacgctgatgatttaaccttttcaactgtgggaaggctagcgcgcagtgctgcccgaagatgcgttggggaggtacaggctgcaacggcccaggcaggcttccaactccatcaacgaaagacccgtgtggtccctcctggttctcgcaaaattgtgcttggtctgttggtggactcagactgtgtccgactcccagctgacgcccggagtaggctggagacacatgtgcggggtgtagcgaggttcggccttgtcgcacacgctcagcattggaagtataactccctcactgggctgatccatcgagtggacggcctgctggcacatgcacgcgatgtggatcctctctgggtcgcccccttatggcgcagctggaacgatgccttggaggcccaggggttttccgacgtggagtttagacaatggtcctga

SEQ ID NO: 9193 - RNA, 1095 nt, synthetic construct
  source 1..1095: mol_type = other RNA
atggagggagctggccgcgcagcaatcctgaccctaggccacctggcacaccttactggcgtgagttcacacttcctcagacaggttgttgagcggaggagagatccatatcatgccttttccatttcaaagcggagtcccgagcgagggaaacggacgatttcagccccctccgccgagatgatgagcgtccagaagtggctcctgaagcgagtcctaaaccctgccatcggccatcccaacagcttcgcttatgagccgggtaggtcaattaggcaatgtgcggcacggcactgtggcgccagatggatcgtgtccctggacctgcacgacttttttcatagtgtggacgagaaaagggtgttccaggtcttcgagacactcgggtacaatcgcctggtaagctttgaattgtcccgcatatgcacccggctaattggaagaaatatcaagcctagtaacgtacggcccgagacttactccattagcgcatacgtttctgaaaacctcggatttctgcctcagggcgcgccaacttctgggaaactcgccaacctggttgctgcggacctggacgagagattactgtctctcgccacagaataccgccttgtgtataccaggtatgctgacgacttatttttttctagttctggcgacttcgacagagccgtggccgtgagattaatccgagaaatcggtgatctggtggctgtcagcggattcgagatacacaggaagaaaacccgagtccttacccccgggtcgcgtaagcagatactgggtcttctggtggatgatcttgccggtccaagattgacaaggcgcactagagctcaaattgaggcgcacctgcgaggggtcgagacattcggagtcgtggcccaccgcgaacatcggaggttcgatagcacgtggggattcgtggctcatgtatggggcctcttggcctttgctgcttcaatcgaacctgattgggcacgtccagcccgtttccgctgggaaaatgcattgagccgggatgggtggggctctgatgtgtttaggccggacctgtacttcgttaattcccatttggcagaacgcgaatcctga

SEQ ID NO: 9194 - RNA, 1128 nt, synthetic construct
  source 1..1128: mol_type = other RNA
atgattactgacagccctcacctctatgtaaggaacgggttggccgctggcctccctatcgagctacttgacttgtttgtgaggcgggcccaagccacagaacagcagggaatcagggcagttctgacgctgaaacacctggctcaccagacgggagctgatcatcgatacctgagagatattgtggggcgtgagatagatccttatactgagttcgaactgcgcgggaagcgacgtattagctctccacgcgctcccctcctagcagtccagaagtggatgttaactcacatactcaatcatgtgccctgccacccctccagctttgcatacgagcggcaaaagtcggtggcgcagtgcgcgagaagacacttgggggctaattggctcgtgaagctggacatgcatgatttcttcgccagtattgatgagaggcagatctttcacgtttttagtgagttaggctttgggcgccttgtctccttcgaactagcaaggctgtgtaccagaccaggaatcggagccagacattctgtcgcggctgaaaaagctgcctcaagcgctgactacacagtgattgataagtaccagaccgccgtcggcttaggcttcctgccgcaaggatcacccacctccggagcccttgccaacctggtgatgcgcgatgccgacatgcagatcgctgaggcagtagccggcacaggtattgtgtacaccagatatgcagacgatatagcgttctcaacatcccggaagttctctcggagggaagccagcgagctgatccggatgactgatcatattttgggacgctctggcttcctgagacacaataaaaagacccaggttattcctccaggcgcacgaaaaatagtgctgggcctgcttgttgacggggaccgtttgaggatcccggtcgacgctcggaaccgcatcatcaacgacatctggggtgctgaacggtttgggctgccagcccatgcaagacatcggggtttctccagcaccatcagttttggcgaacgactcgccggtatgctcgcctactgtcacgatgtggaccctaaatggacagcacccctttggcgcaggtgggccaaaatcctgtctgactatgagattcgatga

SEQ ID NO: 9195 - RNA, 1149 nt, synthetic construct
  source 1..1149: mol_type = other RNA
atgataaccgactccccgcacttgtatagggtccgaggcctactcgccgaccactcaacagccttgattgagaacgctatcgcccaggcacatcaggtcgaggctaggggacttgaagctgttctgagcctgaatcatctggctcggcgtactggggcgaccaggaattatctccgggacatagtcgagagaagactggacccatatactgagttccagaagacctccagtacgagagcacgcacaatcagcgcccctaggcaacctctgatggaagtgcaacgctggattctgagaaacatcctaggccgagtgcctgctggccccttctcctttgcgtacgagcataacaaaagcatcactatgtgtgcccgacgccatttaggctgcaagtggctgatcaaagttgatctccacgatttctttagttctatcgacgaagtcgcagtgtacgccatttttcatgggttaggataccaggcactcccatctctcgagcttgcccgcatttgcacccgtcagggtgtgggcgcgtctcacaagcgtcactttccctcagccagccgcgtagacaggtaccagcggatccccgcctatctgagtagggcgctgggattccttccccagggttcacccacatcaggcgctctggctaatcttgtaatgaagtccctggacgaacacatagccgcattgagccacccgttcggatttgtctacacacggtacgcagacgacctggttttcagctccgcagatagatttgacaggaagatcgcaattgggctgattcaccgagtgactgatcttttacgcacgcacgagttcattgtccacagggccaaaacaagagtggtgcctcctggggctaaaaaaatcgttctcggattgcaagtggatggtgatagagtgcgcctcccaccagatgcacggaggagaataaccgaaaacatcagaggtgttgaacgattcggcctaaccgaccatgtggcccatcgccattatagttctgtggtgggctttgtcgagcggatgcgggggctgctggctttctcgtacgatgtagataaggagtggaccgccccagtgtggattcggtggggagaagccttggaaagggccgggtattgggagcggactgcttggtga

SEQ ID NO: 9196 - RNA, 1140 nt, synthetic construct
  source 1..1140: mol_type = other RNA
atgaccctggactccccgcatttgtatcgagccgccgctgctcggctaggtatctctgcggagactgccaacaatgcgattcgcgaaacggagttactccgggatgccggcgctacaccagtgttaaccctcggccatctggctcacctgactggggccaagcattcatacctgagagccattgtggaaagaaggattgatccctatgaggagtttaccagaatgcgacgtaatggagggaagatgcggatgataagcagccccgagcctgtactgatggaagtgcagcgctggatactcaccaacgttcttacgcgagcaaaaccacaccatgccagctacgcctatactagagacagatccgttgcggcctgcgctcgtcgacatgtaggagctcgcttcatgattaagcttgacctgcacgacttttttcacagcatcaatgaataccgtgtttatagtctctatagaaacctgggctacaatcggctggtcagtttggagctgtctcggattacaacccgatacagtgaattcgctctgcaaactccgatccctgcccctaggacgggggattacccaatgatccccaggtacagggtcaactatctcggctttctgccacagggtggagcctcgagtggagccgtggctaatctggtagtccgccggatggaccacgaaattcagtccatggcgtccgaccattcattaacatatacccgctacgctgatgatcttgtgttgtccggcgcaggagagttctctcgcgatacatgtcgcgatgtggtgcggttgatccggaggatcgtgtctcacaacggcttccatctgcacgaaaaaaaaacaaggcttactagccccggggggaggaaggttgttctcggagtcacagtcaccgacagcggcattaaactttcaagagagatcaaggcaagattggccaaccatctgtacggcgccgggaagtttggaatcggcagacacgcatcctctcgcgggttcacttcaacagtgggttttgtcaggcacatgaggggcctactcgcatacgcccacgacatcgaccctgatttcgctgcacccctggcagcacgttggagggaggtggaggtgagagacggtacccggatagcatga

SEQ ID NO: 9197 - RNA, 1134 nt, synthetic construct
  source 1..1134: mol_type = other RNA
atgacctacgattcacctcatctgtacagaaaactcggacgcgagcgtggggtggacgatcaggtcctggatagggccatgcgccagatatcccgcttgagggcagccggagttacgccagtcctgactttgaatcacctggctcaccttaccggcgccaagtatgggtatcttcggagaatcgtggcccgggaactcgacccctacaccgaattcactagacaacgaaggacaggcgggaaaatgcgactgatatcagccccccagcctgttctgcgggacgtacaaaggtgggtgctggaccgcatcctccaccggatcccggttcacccagctgcatacgcttacgtgcccggaagaagcgtagcagcttgcgcccgctgccatattggcgctcggtacttattgaagttcgatctgcatgactttttccagtctatatcagagtaccgcgtgtttagtgtctacagatctcttggatatcagccactgattagcctcgagcttgctcgcctatgcactcgggatagcgccgcagtgtttgggcgacgtaccttgaccgcccctcaagtggagagataccaggctattcctgcatatcggtctggctcccttggttttgtccctcaaggctcccccaccagtggagcgatcgctaatcttgtgactcgcaggctggacaccggactgcagcgactagccgtatccgccgggctgacttatacgaggtacgccgatgatatcgtcctgggagggagcgatgccttcgacagggaacattgtcgtaaattggtgagagaagtccggaagatcgtgaggcacaacggtttttgtctgcaggaaaagaagctgagaatcataccgcccggggctaggcgtatcgtcttaggcgttgttctcacagacgacgggattacaattagtagggaggttaaggatcggctcgccaaacatctcttcggcgcagaccgattcggtattcatcgccacgcggagcactatggctttacatcggtgttcggctttgcgaaccacgtgacaggtctgctcgcattcgcggctgatatcgacccaggttatgccagaccattaatcagacagtggcaggcaattgagagccggtctggcgtgtga

SEQ ID NO: 9198 - RNA, 957 nt, synthetic construct
  source 1..957: mol_type = other RNA
atgatttccgacagcccacaccaatatcgccttcagggcgcatcccgagaggtgcctgcccaagttatcgagaactctattgcccaggctcaggtgactgaatccagaaacctgagagctgtcctcagtctgaagcaccttgcccaccagaccggttgctcttatatttacctgagggaaatcgtacagagagtcagggacccctattcaaccttctcacgccgtagaaggtcgggcgtgagaatgagaagcatatcatcccctaacccgccattgatggcggtgcagcgatggatcctgcgtaatatccttaaccatgtggaccctcatccctcttccttcgcataccagaggaataggagcattgtacagtgcgcctctcggcatataggggccgattggctgctcaagctggatctctttgactactttccaagcatctccgaagaggtggtgtactgggagttccgacgatctggatatagccggctcgtcgccttcgaactggctcggatctgtacaaggccaacgaatgagtcacccccgatccggagtcgcagcaaatatcgcgccattcccagctacgcctcagcaaaagaggccggcattttgcctcagggggctcctacatctggagcgatcgcgaatttagtgtcacgccaattagatattagcctgacgcggttggccaacgcaagcggtctaacatacactaggtactctgatgacctggtttttagtgggacaggacccctaaatcgcgacaccgcaactcagaaaatccgggagatcgacaacattatatcctcttgcggctttgaaacccaccggaagaagacaaggatagttacccctgggggcagtaaagattgtagcggaccctcaagtaatagtgtccgctccccaactgcttccagagtccaagctaaggatcaggacacccactcgagacgttga

SEQ ID NO: 9199 - RNA, 1122 nt, synthetic construct
  source 1..1122: mol_type = other RNA
atggtgattgattctccccatgcatatagactccggggccttcagcaggggcacgatccagaattgctccgaagagcggtggccgaggctgacagagtagaggggcgtgggctgacatcagtactgaccctaaagcacctcgcccaccagacgggcgcaacctacatctacctgagggagatagtgcaacgcaagcgggatccctataccgagattttaaggtcccgggcaaatggcaggcccatgagactgattagcgcccccgatccagtgctgatgtcagttcagcgatggatcctggaaaacattgtgggacgactcacggtgcatcctgcttctgctgcatacgggaagggtaacagtgtggcggcttgcgccaggcgacatgttggtgcctcctggctcgttaagatggatgtccacaacttctttcacagcatcgacgagcgcgccatatacaaaattttccagaacgtcggctattcttcactggtggctttcgagctctccaggatatgtactagacctgttccaggaagcccccatatccacccagtaaggcgcgacagagtgatcgaatcttattccacagctaacttaggcatcctgcctcagggagcccctacttcaggcgtgcttgccaatatcagtttttttgcttgcgatgaaatcttgagcagtctggcagaatcgtgtggattggtctacacccggtacgcagatgacattgtcttttccgccggagaaagttttacacgaagagacgcagacgcgctgatagagatcgcgcgtgacgccttacttgcccatgggctaactcctcaccgtggcaaaacacaggtggtgccgccgggtgggaggcatatcgtccttggccttttggtagacggcgaccgcgttcgcctcaccagagagttccgccaacgggtccaaacacatattagaggagtggaaaacttcggtctggctacccaccggaggcaccggaaattcgcaagcactgctggcctgattaatcatgtgaatggactgctggccttcgcctttgacgtcgatccagcttgggccggggagattcgcgcacactgggctagcatcttggccgcccagatgaatcggtga

SEQ ID NO: 9200 - RNA, 1149 nt, synthetic construct
  source 1..1149: mol_type = other RNA
atgactgtggcatctcctcatctgtatcggcggcacgccccagagaatacagatcgtcagctggttgaaagggccctggctcagagctccgcccctctttccaaggggctcccttctatcctaactctgaggcaccttggccatctgaccggggctgattacaagtatctgagatcggtggtgcaacgtgaatacgacggctacaggaccttcagtatcagaaagaggtcgggcggtacccggttgattgcatccccagagcctgtgctgggcgaggtacagagatggattgccagtaaagttctcaataaggtcagcgttcacaaaaattctttcgcttataagcccggctcaaaccccaaaaagtgcgcgtccgtacatcttggggcttcatggcttataaaaatcgatatccacgacttctttgagtccataaccgagaggcgcgtgtactattctttcctggactgtggatatcaacccctggttgcatttgaactgagtcgcctgtgcacacgcgtgttcaccggaaaaccgaacgtggggccgcagtggtccacaagacgaagacacgggtcaagagtctatgcaacttctgaactgggtcacctcccacagggggcacccacaagtcccatgttaagcaatatggtgtccttcgagcttgaccacaagctcagcaccctcgccaacgattacggttttgtgtacaccaggtactcagatgatctggccttcagttctggagagaagttcactcataaagctgccggagagtttgtccaaaatattgaccggatcctaaagagctttggccatgtaatacatcagcggaagacaacgattgccccacctggagccagaaaagtcgtcttaggactgttggtggacggaagcagcccccgactctccaaagaactcagggctcgagtgtcagaccacgtgcgtggcatcgagaagtttggcttagcaatgcacgcttccgaacgccattttgcgagtatctgggggatggtcaaccacgtgaacggtctaatcagccatgtccgcggcgttgacccagaactgggcagcaacttgcgctctcggttgacgactgccttggcgattcaggggtggtcagctgagacaattgccggtcacccttga

SEQ ID NO: 9201 - RNA, 1167 nt, synthetic construct
  source 1..1167: mol_type = other RNA
atgacctctatccccccacacctataccgaaagctggccccaaaagaactggatcctgtcattgtagatcgggccctggaccaactgttagctgtagaggctaaccgcttgcccggcatcttatcccttagacacttggccgccctaacccgtagtgactacctgtacctgagatccatcgtggcccgggagacagacgcctatcgtacctttactattaggaaacgctctggtggaggcaggctcatcgcagctcctcagcccgaattgatggccctccagcggtggatttcaaaggaaatactggcaaatataacgccccatgtggcgagccacgcttatgcacgcaagagctcaccactgaagtgtgcgaatctgcacgtgggcgctagttggctcataaaggtggacattcacgatttctttgaatcaatcactgagcggagagtgttcttcgcatttcgacagatggggtaccagcctatcgtcgcctttgaactggctcgcatttgcacacgtgtgcggattgatctgcccctaagggaccgaaggtttgccgccgcgcgaaggacagtcggaattgctaaatatgggcattcacagatgggctatcttccgcaaggcgcaccgacgtctcccatgctcgcaaatctcgtcagcttcgagatggatagaaaactgaccgagtttggggctgagaagggcctgacttacactagatactccgacgaccttatattctccagcggacgaagtctcagccacaagaccgcagagacatatgtggcgatcatctctaggatcatcaatagcttcgggcatgacgtgcatgaacgcaaaaccaccattgcccctccaggcgcgcggaaagttgttctgggtctgctcgttgacgacacaggggtgagactgcttagggagacacgcgatagagctgccgatcacgtgaggggcattgagaagttcggactggcagcccacgctactgagcgccattttgcttccctgtggggaatggttcggcatatccacggattgctgaggcatatgaacagtgtgcagcctgaggtcgccggtccactcttagcccggttggaagccgtacttgcaagagaaaagtggcaggggtcgttggatgacaacttctggctcaacgatcttttatga

SEQ ID NO: 9202 - RNA, 1149 nt, synthetic construct
  source 1..1149: mol_type = other RNA
atgatttctgccagtccccaccagtatcgtgcgtcggcattagcccgcggaattacacaacaaaccgtgcagcacgccttggaccaggccgaacaggctgagaagaggggagcgcctgctatcctgacgctgcgtcatctggcccacgtgactggggcggattataaatacctgcggctgattgtctcaaggtctgaagacgggtataagccttttaccataaggaagaaaagcgggggtggacggctaatcgcagcaccagagccccaactcctttccgtacagcggtggattagccgcaatgttttggccaacaggccagttcactctagcagtatggcctacgccccaggtgctagtcccctgaaatgcgccgctcgacatgtaggggctagatggctgctcaaatttgatatccatgacttctttgagagcattagtgaggacagggtatactgggcattcagatcctgtgggtatcagcctttgatcgcattcgaactcgcccgcatctgcaccagagtacacagcccgtacgtccagatagattcaagatggcggtctggccggactcatggtcctgcagaaatcaccgcctactctgatgatcgcctcggccatcttgcacagggggctccaacatctcccatgctgtccaacctggtgagcgagccaatggacgacctcttggcgaagattgcacgggaaaggggcctggtgtatacgcgatactcagacgacgtggtgtttagtaccggcactaccatcactcggcgcgaggtgagaaacctggttcacgatgtgaagcgcgtgttcaattccttcggccacctgttgcatcggaagaaagttgtgatcgctccgcctggagcgcgaaagctcgtcttaggcttacttgtcgatggagacgaggtgcgtctttcaagagagtacagagcccgagtggaatcccacgtcagggggattgagaaattcggcctggccgagcatgctgcatctaggcattttacatccgtctggggaatggtccgccacgtgggtggccttatagctcacagcagagctgttgatcaaacatatggcgacagcatgcagctacgactctcagctgccctggaagcctcgggatggtccgatgcctccccctga

SEQ ID NO: 9203 - RNA, 1233 nt, synthetic construct
  source 1..1233: mol_type = other RNA
atgatttctgcctccccaaatctctatcggtctgaaggagctgagcgctcaattgaccccctgattgtcgagcatgcattgcagcaggccttgcccgttgagcggaaaagactccctgccatcttgacactcggacacctggcacaccttacaggcattaactacgcctacctccgagcaatcgtggagaggcatgccgacccttacactcctttcagaatcggcaagcgcaaggggggctctagattgatctcagcacccgagccgctacttctcgccctccaacgctggctggcgaggaacgtgctgaataacatagaagtgcatcatgccagctgcgcatatgcacaggactgcagtccagcccggtgtgctacgagacatctgggcgctgcctggctgatcaaggttgacatccacgactttttcgagagtattactgagcgtgctgcctggcgggtctttaggagcgccggttatcagcccctgataagcctggaactggccagactgtgtacgaggcaacctcacggacgggagatagtgaacccaaagtggcacgtggaggatgcagggtcctattcgatccgtccttacagaactcgaatgatgggtcatctgccgcagggcgccccaacaagtccaatgcttgctaatctggcctcttttcgattggacgaagctttagaggctttgggggggcgctatggcatggtgtacacccgctattctgacgatatcgcattcagcaccggaggcaccttcgatcgcaaaagagctggtcagcttattatagaagtcgaacgtatcttcagatccttcggtcacgctctgcaccggaagaaaatcagcgtagcgccacctggagcgaggaaggtcgtcctggggcttctcgttcatgggtcacgactccggctaaccggcccgtacagacgcaggctagctgaccacgtgcgcggagtggaacagtttgggctgtccgctcacaaagctcacaggcactttgccagtctttggggcatggtgcggcatattcagggactgctgggatacgccgagagcgtggaggggaaagcagcgcacgcggatatgcgagccaggctcgatgccgcattagccagggatggttggcccgacggaatgcctcccgaaacccccatgccagcacagcaacccccacctgatgtaggctccgcagctgttacatcatccgctttacctcccgccggctga

SEQ ID NO: 9204 - RNA, 1152 nt, synthetic construct
  source 1..1152: mol_type = other RNA
atgatctcggcctctcctcaccagtatagggccgatggcagggcaagaggtagaccagagccggttcttgatgctgcgctagctcaagcagcggggccagaattacagggcgctcctgccatcctgacactgatgcatcttgctaagcgaatggacgtgtcctacaaatttctgcggagcgtgatcgcgagtaaggagggtacccactatagggactttcacatttctaaacgcgacggcgggggacgaagaatcgctgttcctagtcccgaactgatggcagtgcaacggtggatcgtccgcgaaatcctgcgtgataggcccgtacaccgggccagcttcgcttatgcacggggttgcagcatctacgcttgtgcacggaggcacgcttcagcggggtggttactcaagctggacattcacgacttcttcgagagcattcccgagaaggccgtctatagggtctttcgagagataggatacgcccgcctggtgtcctttgagctagcccgcttgtgcacacggccttgggtggcacctccaagagggaagagagccgagaggaccgtcgccaatcccagcagaagaggaattgaaatataccgccgcgagttgaccggttacctgccacagggcgcccctacttccccgatgctcagtaacttggtgttccgagttctcgacgaacatctttcacagcttgccaccaggcacgggctcatttacactcgctattctgatgacctgaccttctccggacccgcctctggatttagccgcgatcgcgccacggaaataatctcagaagttagggatttgcttgccactcggcgattcaggctgcatgagagaaaaattacaattgtgccacccggaggccgcaaagtagtgttagacctactcgtcgaccgggccgcaccacgtctgtcaagggagctgcgtgggcggctcgaagatcatgtgcggggcatagagaagttcggaattgcgccacatgcagcagctagaggcttcgcttccgcaacaggcatgatcaaccatatcgctgggctcctgagatttgcaggccacatccagccagctttcgccgatcccctgagagcccgatttgccgctgctttggcccgttggcggtggagtcctgtggactga

SEQ ID NO: 9205 - RNA, 1029 nt, synthetic construct
  source 1..1029: mol_type = other RNA
atgataagtgctagcccacaccagtatagagccgatgggagggcactaggacgtcccgaaccggtactggacgcagctttagcccaggctggtagagcagaagcgtcaggcgccccagcgattctaactctgatgcacctagccaagcgcatggacgtgagccatacatttctcaggtctgtggttggttccaaagaaggtacccactaccgggaatttcacatcagcaaacgcgacggaggcggcagaaggatcgccgtaccttcacctgaactgatggccgttcagcgatggattgtccgggaaatcctgagggaccgacctgtccatcccgcctctttcgcatacgccagagggagtagcatctacgcctgtgcaagacagcatgcaggggccgggtggctgctcaagttggatatacacgattttttcgagtccatttccgagaagagcatttaccgggtgtttagggagatcggctacggacggttggtggcattcgagcttgccagactgtgcacacgtccgtgggtggctcctccaaggggaacgagggcagctcgatccgttgctaacgcctcaagacggggaatcgagttctatcggcgggacctcacaggatacctcccccagggggctccaacttctcccatgcttagtaatcttgtgttcagggtgctcgatgaacgactgtctcaattagctgcaaggaacggccttatctatacccgctatagcgatgacttgaccttttcaggcccagcctccggcttctcgagagccaatgctgccgccttcattggccaagtccgtgagttactggctacccgtagattccggctgcacgagcgcaagattaacattgtgcccccgggcggacgaaaagttgtgctggggttgctcgtggatcgctccgtgccacgcctgtctagggagctgcgcaatagactggaggaccatgtccgcagcgcgataccccctgcgatggtcgtacggatcggtcctcccatctcgactttttctagttga

SEQ ID NO: 9206 - RNA, 1170 nt, synthetic construct
  source 1..1170: mol_type = other RNA
atgatcggggccagcccccatcgctatgttgtggatggtcgggccagcggccgaagcgatgaactactagttcgcgctctggcacaggctagatccgttgaggtcgctggagcccccgccatagtgacactgcggcacttggccgcgagaatgggcgtggactaccgatatttgcggtctgtaattgcgaacagatcaggagatcggtacagagacttctccatttctaaacgaggtggaggagggagacggattgccgtgcccgaaccaacacttatggcggtgcagcggtggatcgtgcgagagatactccgtggacgcccagtacatcctgactctcacgcctatgccgctggctcctccatagtggcttgtgcacgcagacattgcatggccggctggttactgaaattggacattcacgacttcttcgagagtgtaccggaacgctccgtgtacgatgtgttcaggaccatcgggtaccagccactggtgagcttcgagctggcccgtctgtgcactcggccatgggtggatccccctcaggataggcgggcagccagaaccgtatcaaatcacgccaacagaggcattgacctttaccgcagagaactgaccggctttctcccccaaggagcaccgaccagtcccatgctgtcaaacttagcctgtgtcggcctcgacggcaggctgtctagcttagcacgctcagctggtctgacttatacgcggtacagcgatgaccttacatttagtggtcctcccggaactttcgacaggagccacgcggtcgctatggttgacggggtccgtgatgtcctgagggatcacggctttcgaatgcatgagagaaagattagtatcgtgcctcctggtgggcgtaaggttgtcctcggactgctggtggacagggataggccgcgacttcctggggggcttcgccaaaggttgtctgatcacgtgcggggaatcgagggattcggcatcgccgcgcatgcagccgagagaaattttgaggccgttacagggatggtcaatcatatcgctggcctgctccggtttgcaagggacgtggagcctgccttcgcagacagactcagggtccgctttgaagctgcactcgctaggcacggttggggcgctgcaccagaatcggggtccgaaccatga

SEQ ID NO: 9207 - RNA, 2118 nt, synthetic construct
  source 1..2118: mol_type = other RNA
atgactactacagacgacttcgccgacctgacaccagagcaattcctcgaggccgtcgtgtcagggtcaatccacccatacaccgaacataggattcctaagagaagaggcggactacgcaccttgcatgctcccgtgcctcgcctttccgagatacagcaggccgtcctggctaggctggaaaccctgccagccgaagtgcaaccccatccggcagcttttgcttaccgcagaggtaggagtgtagtcgactgcgccaccgtacatctccgagcccacactgtgataaggctggacattgcagatttctttggcagcattcgagagcgccacgtccacgctgctctgaaggatgcttggacacgtcccacggagcctgagtaccgggtgggtttagtgaaggatgacaacggaagaaggaaaattggcctgcggcgggatggccgtacactggatacctatatcacagcaagattggttaccgtttctccgcccgaaccgagccagacttggaccaatcggggaactggaaggcgctcagtgtatttggcagcgacagggcaggaattctccgtgcggaggccacatttggtgtatcggcacacgcgtgagggctttctccctcagggcgcaccgacctctgggtacctcagcaacatcgtgatgcgcgacgtcgacgaggttgtagcccatcaggcagaaagccttgggctgagatatacccgctactctgatgacatgtatttcagcagtcgaggcctcgtgcggcatgatgacgttgatcgcctggttgccggcgtcaaagaggcacttgaacccctggggatgaagctgaacgccgagaaaacctacgtcgccagacctggagccaggcggtcagtactcggaatccttgtagacgggcctactccacgattgacaagggagtacaagcgccggattacgaagcacgttcgcggggccgcgagctttggcattgagcagcacagaaggcaccaggaattcgaggatctggcagaactggatgctcatgtgaccgggctcctctcttttgctcatatgatcgaacctgcctgggccgagaagcagctgactgcttggaagcgactgcgagggattcccctggagcacgaagaaccagtgtctgcgcagcacggcctcgacctaccatgggaggaggagatggaggtcagccaggccgacctggctaaggattccatcgacgatctgatcaggggcgcgcagaggtataggagctcttcagattatctccagatgctggaattcgttgggagatttaaacggtacgctccttttaatgccatggtcgtgcatatccagaaacccggtgcaaggtatgtattaccctccagtgagtgggagtccaagtaccgtcgcgtgcttaagccaggtgcgaagcctcttttgatatttcaacccagaggcccctacctgctggtgtacgacgtgggcgataccgaagcactacctggcgcactgccattgcctcgcgggattaccgcgcctgtgtcagtgtcgtccagagccggagaaagagaggtgctagaagtgtggcaccacaccgagactaacctcgccccattaggaattcgactgacattagttgaccatggagccagctcctgtgggagaacctatagaagtcggtccggcgggtctgtcaaacgtcccggaggtagacgaggagatcccccagagacttaccccacactattcgagatcgaagtcaatggtaatctccctctgctggaccggtatgcaacactggctcacgaacttggccacttattctgcggacacttaggggccggacccggtgaaacatggccagatcggcagctgcggcctctgagtgaagaagatgccgtgaaggcacatgctcggaatgaggtggaggctgagagtatcgcctacatggttcttaaacgtcttgacccagacgtccgcatgggagactatataacgggtcacctcggcccagacaggcaagtgcccgagacggtcgcattgaacctcactttcaaagccgccggccttatcatcgagatgggtaaaaagaggctctcctcggctaaattgcaaaaaccgaagaaatga

SEQ ID NO: 9208 - RNA, 2118 nt, synthetic construct
  source 1..2118: mol_type = other RNA
atgaccgcagcagatgatttctgggacctgaggcccgaggccttcatccacgccgtggtaagcggcagtatttacccctacacagaacatcggattcctaaacctcggggtggactgcggaccttacacgcacctattagacggctcagctggatacagcaggagatactggcacgcctgggcacactaccagctaggttccaaccacacccggccgcatttgcgtatagaaagggacgaagcgtcgtggactgtgctgctgtgcacctaagagcccatactgtgatccgcttggatgtggcagatttctttggcagtatccgggaacgtcatgtgcacgccgctcttaaaggtgcttggccccgaacagcagggcctgagtacaggatcgaactggtggaaggtgacgacgggtcaccggagatcggtctgcgcagggtgggacgaactctgggggcatacaccacagctcggttggtcaccgtctccccccctgagtcgaaccacacgtggcccaatagaggcacagggcggagggatgtgcgtctcgaagccactggtcagcgctttagtgtacgccggcccaccctggtccatcagcacactcacgaggggtttctcccccaaggggcacccacttctggttacttgtctaatatggtgatgagagacgttgacgcagtgctcgcgcataaggccgaatcctggggcctgagatatactcgatacagcgatgacttgtacttcagctcacgcggaccagtcagacctgaacgcgtagacaggctagttacagaagtgaagcgagcgctagagcctctgggaatgagactcaatgctaagaagacctatgtagcccggcctggggccagacgctctgtacttggcatactggtggatggcagcacaccacggttgaccagggcgtataaacgcaggatcacactccacgtcagaggcgccgcttccttcggcgtgatgcagcactgctatcatcagaagttcgaagatcttgccgaattggatgctcatgtgaccggtctgctgagttttgcccacatggttgagcctaggtgggcaggggagcaattggccgcctggaagaggctgcgggaaataccgctcgagcacgaggaacccgtgatgactcaacatggcctcgacctcctcttcgatgaggaggtcgacgtcagtcaggctgacttagctaaggcctccatcgacgatttggttcgtggcgcacagcgctatagatcttccgcggattatgtccaactgttagacttcgtgggcagatttaaacggtacgccccattcaacgcgatggttgtccatatccagcgccctggggcacggtacgttctgagcagcgctgagtggaaatcaaagttccttcgagtgcttcgtcctggcgcccagccgcttcttatttttcagccaaggggcccctatatgctggtgtacgatgtaggcgacaccgaggcgttacctggggcaaggcctttgcccagggaggtgacctcacccgtggctgttacctcgagggctggagccaagaaggtcgccgaagtgtggcatcatacagaagccaatctggccccactgggtgtgagactgacactggtcgatcacgccgcatcttcctatgggagaacttatccatcacgatccgatgggttcgtgagccgcccaggaggacgaccaggagatcgaccagagaagtaccccatcctttttgagattgaagttaacaggaacctctctctcctggaccggtatacgaccctggcccacgagctcggacacctgttttgcggtcatctgggcgctggaccaggagacgcttggcctgacagacgttggaggccccgctctgatgaggaacgcattgctgcccacgctcgtgacgaggttgaggccgaatccattgcgtacatggttcttaaaaggctggacccagatgtccaaatgggcgactacatcacgggacacttagggccggaccagcaggtgcccgactcagttgcactgaaccttacgtttcgggctgccggcctgattatcgagatggggcagaaaagagtgccagccgccaaactccagaaaactaagaaatga

SEQ ID NO: 9209 - RNA, 2118 nt, synthetic construct
  source 1..2118: mol_type = other RNA
atgacaacagctgatgatttcgtggatctggaccccgcccagttcctgaaggcagtcgtgagtggttcgatctttccatatacggaacaccgtatccccaagcatagcggcgggatccgaactctgcatgctcccgttcctcgcttgtcggaacttcaacaggggatcctcgccagattggagacactccctgccaggtttcagccccacccagctgcgtttgcctatcggggcggtcgtagtgtcgtggattgtgctgcaattcatcttagagcccacacagtgatcagactcgatattgcagacttctttggttcaataagagagaggcatatccacgccgcccttaaagacgcatgggcgaggcctaccgaaagagagtatcgcatagacttggttaaggatggggacggatgccgggaagtagggctccgacggataggaaggaccttgtcaacatacacaaccgcaagactcgtcacggtatcccctccaggaagcagccgtacatggaccaatagggggactggaagacgctccgtatacttggaggccacaggccaaagcttcacagtctcccgcccggaactgttatataaggacacgagagaggggtttctgcctcagggggctcctacttctggttatctgtctaatatcgtgatgagagatgtggatgccgcagtgacgcacttagcagagagccttggcctgcggtacacacggtactcagatgatatgtacttcagctctaggagactggttaggcatgagaaagccgaccggctcgttgacggcgtgaaaaaagccctgataccccttggaatgcgcctcaacactaaaaaaacctatgtcgcccgccctggagcgagacgaagtgttctgggaatcctcgtagatggccccactccaaggctcactcgggaatacaaacgccgcattaccaagcatgtcagaggcgccgcttcctttggcattgagcagcactcccgccaccagggattcaagggcctggctgagcttgatgcacacgtcacagggctgctgtctttcgcccacatggtggagcctggctgggctgaagaacagctggccgactggaagcggttaagggaaattccattcgaacacgaagagccggttatcgcccagcacggtctggactggtatggcgacgaagaggtggaggtgtcccagagcgacctggccaaagcaagcatagatgatctcgtccgaggcgcccagaggtaccgaagttccgccgattacctacagatgcttgagttcgtgggaagatttaaaagatacgctcctttcaatgcgatggtcgtgcatattcagaagcctggtgctcgacacgtgctgtccagttcagaatggatgagtaagtatcgtcgagtactgaaacccggcgcccagcccttactgattttccagccccgaggaccctacatgctggtctacgacgttggcgacactgaggcacttccaggcgctcaaccacttccacgtactgtgactgctccagcatccgtcagtagccgggtgggggagaagaaactagtggagatttggcatcacaccggtaccaacctggcacctctgggaatcaggctgaccttggtgaacgacggggccagctcttatggacggacctaccgcaccaggtcagacggctttgtgcaacggccgggatcaaggccaggagacaggcctgaacggtatcccagattgtttgaaatcgaggtaaaccgcaacctgcccctactggaccgctacgccaccctagctcacgagctcggacatctgttttgcgggcatcttggcgcagggccaggtgacttctggccggatcgcaggtcaagacccagctctgacgaggaacgggtgaccgcacacgcgaggaatgaagtcgaggccgagtctattgcttacatggttctcaagcggctggatccagacgttcaaatgggcgattatatcatcggccatctcggtgtggggcaacaggtgccggagtctgtggctctcaatttgacttttaaggctgccgggctgatcattgagatgggcgggcgtcggttatccgcgaccaagttgcagaagcccaagaaatga

SEQ ID NO: 9210 - RNA, 2097 nt, synthetic construct
  source 1..2097: mol_type = other RNA
atggcagatgacttcgccgatctctcccaggcgcagtttcggaaagcggtggtgagtggctcgatctatccctacaccgaacaccaaattcccaagcgcaggggaggcctgcgcattctgcacacaccagtcagaaggctgtctgagatgcagcgggggatcctcgctcggctggaacatctgcctgccggattccagccacatcctgccgcttgcgcctacaggtcaggcaggagcgtcgtggactgcgctgcagtgcacctcagagcgcacactgtgatacgtctggacatcgcggatttcttcggttcaattcgggagcggcacatccatgctgcactcaaagatgcctggtcccatctggccggacgggagtacagaatcgacttagtggaagatgggaatggtcgccaagaaattgggctcaggaggaccggcaggacacttaggacttttaccctggcgcgtcttgtaaccgtgtcccctcccggaccgaaccgcacttggacgaacagagggaccggaaggcgctctgtccacttggaggcaactggtcagtcatttagcgtttcacgaccagaccttgtgtataaacacacccgcgaaggattccttcctcagggcgctcccacctctgggtatgtcagtaacctggtcatgagagacttcgacgcggtgatcacgcatctggccgaatccctgggtctgcgatacacacgctattccgatgacatgtacttttcttcccgcaggctcgtccggcacgagcatgttgacagattgctggctggagtaaaagaggcactggagtccttggggatgcgactgaacacaaagaagacttatgtggcaaggcccggggcacgtagatccgtgttgggaatcctggtagacggcccagcccccaggctaacaagagagtataagcgccggatcacaaagcacttgcgaggcgccgccgcgttcggtatagaacagcaccggagacatcaggaatttaaggatctggtggaactcgatgcccatgtcacaggactattaagctttgcacacatggtagagcccggctgggccggtgaacagttggaggactggaaacgtctgcgggagatacctctagggcacgacgagcccgtgaccgtgcaacacggacttgatctaccttgggccgccgaagtagaagcctctcaggccgagttagctaaaacctcgatagatgatctcgtgcggggggcacaacgttatagaagctcttccgactatttggagatgcttgagttcgtcggtcgatttaagcgttacgctccttttaatgcaatggtggtgcacatccagaaaccaggcgccaggtacgtccttccaagcagcgagtggaagagcaagtaccagagagttcttcgccccggcgctcagcccttgctgattttccaaccgcgcggcccctatctgctggtgtacgatgttggcgacacggaggcactccctggcgctttgccactccctaaggccattactgctcccgtctctgtagcatctagagctagcgaaaaggaactggctgaagtgtggcattacactcaagttaatttagcccctctgggaattcggctgacactggttggccacggggccagtagctgtggacggacttatcgatcaacaagtgatgggttcgttgagcgaccgggaagtcggcccggtgatcatccagagaagtaccccactctgttcgagatcgaggtgaattggaatctgccgttactcgacagatatgtgacccttgcccatgagctggggcacctcctttgtggccatctcggctcagggccagaagatgcttggcctgaccgatttctgcctaaaacggtggaagttcacgctcgcaacgaagttgaggcagagagtattgcttacatggtcctcaagaggctggatcctgacgtccagatgggagactacatcaccgggcatttaggcccgaaccagcaggtgccagagacagtggcactcgacctggcctttaaagccgccggcttgatcatagagatgggtaaaagaaggattccagctaccaaactacagaaaccaaagaagtga

SEQ ID NO: 9211 - RNA, 2103 nt, synthetic construct
  source 1..2103: mol_type = other RNA
atggctgacgattttgcagacctcgcccctgcccagtttctggaggccattgtcagcgggtctatctacccctacaccgagcataggatccccaaacgccgggggggaatcagaactctgcatgctcccatccctcggcttagcagaatacagcaggaaatcctgacatgtctcgaggcactgcctgcgagactccagccacatccagctgctttcgcctaccggtctgggagaagcgttgccgactgtgccgcagtgcatctgagggcacacacagtgatacgcttagacattgccgactttttcggaaatatccgagagcggcatgtgcacgctgcgcttaaagacgcttggacccgtcctaccgagagagagtacaggatagatctcgttgaggatgaccacggcggacaggaaattggtttgcggcgcactgggaggactctgggtacatatgctatggctcgcctcgtaactgtgagcccacctgagccctcagagacttggaccaatagaggaacaggcaggcggatcgtccgcttagaggctaccggccaggacttcagtgtccatagaccctccctagtctaccagcacacgcgcgagggttttctgccccaaggtgccccaacatccgggtatttgtccaatatggtgatgcgggaagtagacgccgcagtgactaacctggctgaatcaatgcaattacgctacaccagatatagcgatgacatgtatttcagctccagacggcttgttcggcacgacgacgttgatcggttggtggccggggtgaaaagagcactcgtctctcttggcatgaaactcaacgccaagaaaacatacgtggccaggcccggcgcacgtagatcagtcctaggcattctggttgacggccccaccccccgacttaccagagagtataagagacgaatcacaaaccatgtgcgtggcgccgcagctttcggcattgagcaacacagagatcaccagaaattcaaagacctggccgctctggacgctcatgtcaccggactcctgtcgtttgcccacgtcgttgagccaggatgggctgataaacagctgacggattggaagcgacttcgacgcatcccggaacaggaggagcctgtgattgtgcaacatgggctggaattgccgtgggacgaagaagtggaggtatctcaggagaatctggcaaaagcgtcaatcgacgatctggtgaggggagcccagcgatacaggagttcgtccgaatatttacacatgcttgagttcgtgggccgattcaagcgttacgcgcctttcaatgccatggtggtacacattcagaggccaggagcgcgctatgtgttgccaagctccgaatggaggtctaagtatcgacgggttctgaagccaggggcacagcccctgctcatctttcaacctcgcggaccctacatgctggtctacgacgtcggcgataccgaagccttgcctggggcctggcccttaccaaaagcgattacagcccccgtgtctgtgtcaagtcgggccgatgagagggatgtagccgagctgtggcacaacaccgagacaaatctggcaccgcttgggatccggctgacactggttgataatgccgctagttcctgcggccgtacgtatccaagcagaagtcgcgggttcgtagaacgccctggttctaggccgggcgaccgatcagagacataccctactctttttgagatagaagttaaccggaatctgccccgcctcgataggtatgccactttggctcatgagctgggccatctattttgcggacacctcggtgctggaccaggggaaacgtggccggatagaaggctccggtccagttctgaggccaccaacgtccacgcaaggaacgaagtggaagcagaatccattgcatatatggtcctgaagcgcgtggatcctgaagtgaggatgggcgattacatcaccggtcacttgggaccagaccagcgggtgccagaactagtggcgctgaacctaacttttaaggccgccggtttgataatcgagatgggcaagaagcgtattcctgcaagcaagctccaaaaggctaagaagtga

SEQ ID NO: 9212 - RNA, 1983 nt, synthetic construct
  source 1..1983: mol_type = other RNA
atgagacttgtcgggtttagatcacacgagtacggagaatgcattaccgtggtgaccgacgcggcccataaggaatttctgtctgccgttgtctcaggcgccgtttacccctacgttgagcacgtagtcgccaagcgcaccagcggagtgagaactctccatgcgcccgtagagcagctagccagggagcagcgcatgatcctgacacaactacgggagcgtgggggatctgtccatccggcagcctacgcctataggacgggctattccgttgtcgattgtgcccaggtgcacatgaacgcgcatactgtggtaagactggacattgccgacttttttggatccatccgagaacggcatgtctatgaagtgttcgaggaactgcgtgatggacctacgcggtcgtatgagctgaccaggctgactacagtaagtcctccaacaagcaccgcttggcggaatcggggaactggcccgtctgtcaagagcggggtgatcgagagatcgccccgttacatgcataacagagagggattcctgcctcagggggcacccacttcagggattctgagcaatttagtgatgcgagccgtcgacgctcatctccatagttacgctgaaagacagggttggcgatataccagatactcagatgacctgtacttctcctcacgcaaactcgcggatcaccgtcagattgatcggctcattagagaggtgaaaaggaggctggggcttctgggtttgcacttgaacgataagaagacctgggtggctcgcccaggtgctaggagatccgtactcgggatcctagtggatggaccagtgctccggcttccgcagagctacaagcggcgaatcacaatgcacgttcgcggcgtatcttcttttggcatagctcatcatgcagaccacgctggctttataacggtggacgacctggattctcacgtgaccggtctgctatcatttgcacaccaggtggaacccgagtgggccgcagaacagctgcataagtggaggcgactcaggcgcttagctctgacccccagcgtgagtactgatgctgccgacctagttctcgctggcgccacggaggctaaagccagtatcgacgctcttgtggcaggcgcacaccgatatagatctgcacgcagctatgccgacctgttaagcttcgtgggcgcgttcaaaaggtactccccctttaatgccatgttgattagtctccaacgaccaggagcaaggtatgtcttaacagaggcccggtggcggtccgatttcagacgcgtattggagcctggcgcccaaccgctggtgatactgcagccaggtgggcccttcatggtggtgtatgacgttggcgacaccgaagcactgccaggcgcattggcccttccccctgaggttaccgacccagtgagcgtcagggccactatcacagctgccgacctccagcaaaggtgggattggaccgtgaataatctcgcccccttggggatccgtctgacttccgtcgatcacgccaattccagctgtggctccacataccgcgccaggacccagggtactgtcaaccgtctggcagccacagggcggacacaacctgaagagttccctctcttgttcgagatcgaggtgaacaaaaatcttaagccaattgacaggtatgcaaccgtcgtgcacgaactggctcaccttttttgcgggcacctcggcacgagtcccattacaaaatggcctgaccgccgaggaggtgctcagtctcggaacgaagtggaggctgaaagtataacccacatggttctgtccaggttagatccagacgtcgctatgggggattacatcctgggctacgttcggcgggcggatgatatgcctgacgtggcacttaacctgatgttcaaggcagcgggagaaatcattgaactgggctcaggaagaatccctactacaaaattgcgcgccgagcgcagagcttga

SEQ ID NO: 9213 - RNA, 1974 nt, synthetic construct
  source 1..1974: mol_type = other RNA
atgcactatatgactatggcttccgccgtcggaaagagtgccccagacaggggtgctaccgaacgctttctcgcccaggtcgtgaggggagaagtctttccttacacagaattcccagtggcaaaacgtacgagcgggattcgcgtgttacatgcgccagtgcctgagctggccgctaagcaactggagatcctggggcgccttcagagaacagccgtaaccgatccagccgcctttgcctatcgggcaggctattccgtggtggactgtgcaagagtgcacctgcgggctcacaccgtggtgagactggatgtggcgaatttcttcggcagtatcctggagaggcacgtctactcagccctccaagaggtcgacgatgcaccctggtccaactatacaactactcgcttgaccactgtttctccccctgggtcgcctgcttggcgaaatcgagggacaggtgagcttgtgaaagatggttcagtcgagcgcagtgaccggtacatgcataatagggaaggcttcttgccccagggagccccaacgagcggaatgctgtctaatctggttatgagaaaggtcgacgaggccctgagagcgtacgcagagcatgagggcctccgctacacaaggtattccgatgatctctattttagctcccgaacctttgtggctcaccggcaggtagatgcattagtcaggaaggtgagacagagcctggcagagttagggctccgtctgaacgatcgtaagacatgggttgcacgccctgggcatcgtagatccgtgctgggcatcctcgtagacggcccgactccgagactgagtcgggattacaagcgaaaagtgacagttcacctgagaggggctgctgccttcggtgtggccgatcacgcctcatttcggggttttagcgctgccgagcagttggacgcacacctgaccggacttctgtccttcgcacatcaagtggaaccagcctgggccgctgaaagacttgcgacctggaagcggctcaggtcactggggacttcgcacggcactgaagccctagctgaccccgctcaccagctatctggggctgccgaggccaaagccagcatcgatgccctggtggccggtgctcatcgataccggggatctcaagcatatgtagaactcctgaagttcgtcggaacttttaagcggtattctccctacaacgcaatgctgataaacttgcagaaacctggcgctcggtacgccttgaccgaacctcgatggcggactgagtacggccgggttcttgaaccaggggcacagcccttggtgattctccagcctggcggcccattcatggtggtttatgatgtgggagacaccgaagctctacgaggcgcccatccccttccgcctgagataacaaacccagtcgctgttcagtcccgcatcagtgaccccgagcttaagcagaggtgggactggacactcaataatttagccccgctgggagttaggctcaccctggtaagccacgcgaactcatcatgcggaagcacttaccccgccagaaggtctggtacggtgaccaggcttagcgcgaccggcaagacacgccctgaagaattctccctgctcttcgaaatcgaagtaaatacccaccttgccctggtcgacaagtacgctaccttggtgcacgagctggctcatctcttctgcgggcatgcaggcccaagtcctgttgcctcttggcccgataggcgtggcggctcaaaagcgcgcaacgaagtcgaggcagagagcgtggcacatatggtgctggggagattggaccccgacgtaacaatgggcgattatattctgggtcacttagacaaagatggagacatgcccgaggttgcgctcaacgtgatgtttaaagtcgctggagacattatcgagctagggtctggccgcattgcaacgaataagttgaggaaagagctaggaagatga

SEQ ID NO: 9214 - RNA, 1338 nt, synthetic construct
  source 1..1338: mol_type = other RNA
atggcggtggttcatatctccaaccaggggggagcaagccgaaggccaactcccactgctttcgtacagcaagtggccagaagagtggacgttcccgtcacatacgccagagacgtgctgactcgcagcatttttccatatcgccgggtggaggtgagaaagaggaccggcggacaacggattcttcattctcccgaattgcctctgatgaggatgcagcgcctgcttcttgacgacctccttccttctgctccgacgcacgcatcaagctacggctatgtgcctggtgcgtctgtgctcgactgcgccagcgtgcacttgcggtcccatacagtagtgcgcatcgatatcgccgacttcttctcttccataacggagcgccacatcttccgggccctaagcaccacagggtggccttcgcacattggtgggccagttgctggagcccggaccagtcacgtaggaccacggatgagtaggctgttggcctatgagcttgccgtgctcacaacggtcagtcccccaggctctgcaacttggcccaataggggcaccggctctcgcgtcatagacgaagattccgctatcccgcgagcacacccttatagcggccagactgaggggttcctgccacagggctcccctacctcaggagctctgagtaacctggtgatgaggccaatcgatgatctcgttcatgatgtcgcacgcaggatgcatctgagatttagcaggtacagcgacgacttgtttttctcatcaacccggcccatcactcccgataccgtggccagactcgttcacgaagtgcgcgcagccctgcagattattgggttacacgtaaacgactccaaaacacgcgtggcccgtcccggtagtagacgcacagtcctgggtgttctcgtggatcagagcgcgcccagagtcggacgggacgttcataggcgaatcgacatgcatctacacggatccagaaggtttggcatcgatgagcacgctgaacaccgtggctttattgatcctgaagatttccggtcccacatgcaagggttaatatcctggattcagatcgtcgagccgggtcgtggacacagatacgccgaagattgggctcgggccatacgacattctcgtctctacgcatctccagacctggctctgggggagtcgattgcggccctgtcacctgtgaatccacctaccgagtcagctgctaagcagtccatcgacgatctgatcgtcgcaggcgtccggtaccgaagcaccgtagagtacttggaattactgaggtttattgagcgattccatcattatgcccccagtacaagatgttcatga

SEQ ID NO: 9215 - RNA, 1947 nt, synthetic construct
  source 1..1947: mol_type = other RNA
atggccgccgattccggactggatggcgacaggctcactgccttactgaaccgctctacttggccctacagtgtgctgcagcacaggaagccgggtgggggtagtcgcaccctactcaccccggcacccgatctgatgcggctacagaggcgggtccttgatgaggtactagcccaccacgctgtgcaccctgcggcttatgcttatcggccgagaaggagcgtcgtagaatgcgctcaggtgcactgtagggctcatactgtggtgaggctggacgtggctgggttttttgacaacatacgggagcggcatgtgtacgcctctttgcgcagacggcccgcaattggaggtcccctgtctgccgtgcaagcctacgagctcaccctcctgtgtaccactactccacctgacagcgaatcctggatcaatcgcggtacaggggccaggcgacttgggcaaagaagcacggacccacttgtcgcccgggcctatccatatcaggaccagcgcgagggcttccttcctcagggtgcacccacatccggggcgttgtcgaatctagttatgtacgaagtagatgtggagctttctggactcgctgatcgattgggcctgcggtacacgaggtacgccgacgatttaatctggtcaagcagggcgttggttccgcggcgcattattgcccagctggtgaccgatgtgcgtacagttctggctactaaagtgggcctccacctcaatgatgctaaaacgcgtgtgtcacggccaggaagtaggcgtctcgtcctgggactcctggttgatggatccgccccccgcgttccacgcgaaacatacagaaggctcgagtgccatgtccgaggagtgcgcatcgcagggttacgcgcacatgcggctcatatggggtttgagactcctgaggcggcccgcaacgctgttgatggcctgctgagctgggtgcggttcgtcgaaccagcaaagggccgtctgctgaccgatgcatggtcacgagcactggaagtaggcgatgtcgaactgttgggggaccccacctccaccgaactgccaagtgatttagacacgggcgaagcacgtgaaagcattgccgccctgcttcgccacggttctgaatatagatcgtcagctgagttcgcagacttgatgagattcatcggggggttccatagatacgccccttttaatgccatggtggtgcgactacagcgcccaggctctacattcgtacttaccgaggccagatggcggcgggagtataggagagttcccaagcccggagcccagcgcataatgatttttcagccgaggggaccctacatggttacttatgacgtgggcgacacagaacccttgcgagaggcccctccactgcctcacggtgttacagacccagtcagtatcagaacagctatccctgtacaggctctggaaaccgcttggtccaccctcctggataactccgttagatggggggtgagggtgactctggtggaccatgccgcaagcgcctgcggtagaacctataggacgcaaatgaccgaccaacttgtccgaagacccggccctaggggcaaaggagaggacgtccggcctctccggtttgaggtcgaggtgaatagaaacctcccagtcccagatcgcctcgcaaccctggtgcatgagctggcccacctgagctgtggccacctaggaaagcaccctgaacttccttggctggaccgacgtggcgggaccagaaggagagacgaggtcgaggcagaggcgacaacatacttagtgttgagccgattggaccccacactgactactgacgactacctcttaggccacttgggagagggcacagagctccctgatgacctgcggcttgatttgatggtgtcttgcgcttcaagactgctggaaatgctgctttcccgtcagccctga

SEQ ID NO: 9216 - RNA, 1917 nt, synthetic construct
  source 1..1917: mol_type = other RNA
atgcgtgatgtcttggccaggcgacgctcaccgtaccggcagtttgcaatacccaaacgggctgggggcatgcgtgtgatacacgcacctgaacccgagctgcagatcctcttacgcagagtgctgcggacagcactagaccaactgccacagcatccaatggcgttcgcctataggaaccgtacttccatcgtcgagtgtgcacacgttcacctccgggccgacacagtgatcaggctagatattgcagacttctttacctccgtacgtgagcgttatgtgtttgaagctctgatggccctgactgacgacgagtggttaccattggggcgaccttctaggcttgctgcacacgaaatggcgagactaacaactgtcacgcctgacgatagtggggcttggcttaacagaggcaccggcacgcttaccgttgacgaccgagcccgcccaaggagctacccttataagggccagcgagaaggctttcttccccagggcgccccaacctctggtgctatctctaatctcgtgatgcgccccgtcgatgaggccatctttcaagtggcggaaaagctggggctgcggtatacaaggtactcagacgatctgtacttctcttccagacgccgggtgctgcaccacactgtcgatgctctggtgtctggagtgaggccacccctcgctgagctcggactacacttaaacgcgcacaaaacaagagtagctaggggcggggcaaggcggacagtacttggtatgctggttgatgggcatactctccggctgcctcgcgagcaacataggaatattgaactgcacctcagaggagcagatcgccacggcctggagcaccatgccgaatcgagaggatttgacagtgtcgaatctctggagcgccatgtgtcaggcttgatcggctgggctcaacacgtggagcctatgaaaggtgccacctaccggagtcactggcacaggacaaggtcacggagcagcgcggctgcaaatccccaggtggagcatgccgacccaaccgtgtccgtggatgacagcgccagagcttcaatcgatcggctgctcgcccagggccatgccttcagacagagcaaggactatgcagagtttattgggttcatcggccgcttccgaggatactctccattcaatgccgccatggtgagactgcagaagcctgggagtcgcttcgtggccaccgaacagaagtggagaactaagtatcggcgcgtaattcgaccgggtgggcagcctctggtgatgctcagacccgggggaccctatatggttgtgtacgatgtgtccgatacagaggcgcttccgggctccaaacccctccctagacacgttactgatccgctggctgccgactccagcttaaacagcgccacggtggaacgcctgtggaaggtcacaatcgacaacgctatcaggcatggcatacgtgtgaccttggtagacaattcccccgctcacgccggttcggctagatggtcacgcctggagggacatgttactcggcccggaaagaaatccggggccacccctgaaacctacagcttgacccatgaaatagaggtttcacgaaagttatccgcagtggaccagtacgtcactctggtccacgagcttgcacatatctactgcggacatcttggtacgcctgatgtggccctgtggccaagtagaaggggtggagttgtacgggatgaggttgaagcagagagcgtcgctttcattgtcatgtgcaggttggacccacagtttacaatgggcgactatctcctgggctacttgagtaacagtaccgaaattcccgatggagtcagcctccagaggatgatgcaagtggcctctgatattatgcaaatgggacagcggcgattgaaagccggggagatttga

SEQ ID NO: 9217 - RNA, 1089 nt, synthetic construct
  source 1..1089: mol_type = other RNA
atgtggctggccgaccctcgggactttctgctgggcctgaaactggcccgacttttgggggacgctggtctgggcgcagagagaaccagagccataatccgcagagaggtcgatccgtaccgcgttctgactgtgcccagaatccgtgccgccgccagagaaatccggaagcctgacgcagatctgatggcctttcagagggccctcctcgctgaatggacaccaggacacgttgcgcatccccgcgcattcgcctacgcaaggggtaggtccattgtagactgtgctcggctgcacctgggagcagagctggtggtgaggctcgacatttcaaatttctttcacagcattacggaaaggcacgttttccgggcacttcccgggccacactcccgtaattccttcgacgctgcccagataacccgcttagtcacagcaccctctaccagcccattatcatggaaccagcggagaacaggagccatccagttgtgcaatcccaggcagtgccgctgttggccccttagatgcgagaaggtgcgtgctaattattttggacacgcgccagagggctttctaccacaaggcgcccctacctccgggctgctttctaatttggtaatgcgggaattcgatcagagaatgtatgaatgggccgaggcgaacaggtgggtgtactctaggtatagcgatgacatgcatttcagttcgcggcgacctcgagctcacacagatacggatagactcgtgactcacgtgcggcgggagttaggacggctaggcatgcacctgaacgataaaaagaccacagtagctcgccgcggtgctcgaagacaagtcctggggttgctcgtcgatgggcatcacctgagactcacccgcgaatataaaagggagttggagctccatacacgcggcgttagtgagttcggtttggaaccgcatgcccatcactgggggtttgagaacgcaggcgcacttgtgactcacgtcaacggcaggctcgcgcatgccactcatgctgaacctgactggggagtgcctgctcgagagcgttggctggccgctaccactcattacagcgtgtga

SEQ ID NO: 9218 - RNA, 1122 nt, synthetic construct
  source 1..1122: mol_type = other RNA
atggtcgaaagactggatcctaacctgagatcatacttcgatctctccagcctggtccaggtgagcggggctgattctggctttatcgaggacgtggtggaccggagactgtctccatactacgtttctgccgtgcccaaacgaactggaggcaagaggcatatcgaaaaaccgaatgccgagattctggctatccagcaacctattctacgcgacatcctgatgactaggagtcccagcgagaaagtgttctcatacgttaaaggtcgctctcctgtgcagtgcgcacgtcaacatctgggcgcgcggtggttgctgagagtagacctcaaggcctttttctactccattagtgaggtggacatttactacctgttcctgaaggaattcggtttcaagcagctgaccgcattccagttagcccggttggtgaccgtagtatccgacgattccctggaggtgtctgaggtggatcttcttaaagcccacccacacgtcagtaagtatcggagcaggtatgtcgcgggttatactccccaggttctcggccatctgccacatggtgcccccaccagtggggctctgagtaatctggtttcaaggcaactagaccacgccattgctgccctcgcggtacagcatgaattggtgtttgcacgctattcagatgacatctatctcagcgcaaggaggcctattacaaggactcaatcaacgaaagtcctctccgacttgagcggagtgatacgaggaaacgggtttgtggttaaccagacaaaaacgcggatgagcttcgaggatgacaagaagttagtgcttggaatacacgtcgacggcgatcgcctaaggctccgtcgagagtaccgggatcgcatcgactatgaattgcacatgatcgaaacccacggcgcagagtctcacgctcagaagcgaggggataagggagtcgcttttctcctggggcgcgtttccggccttatcgcccatgcccaggatgtggatccagaatggggccggggacgacgtgcaagatttagagccatactcatggacgggaaatcgacagaagctcttttacacaagcacctgaccgagcgcagagagcggcttagatccacatga

SEQ ID NO: 9219 - RNA, 1194 nt, synthetic construct
  source 1..1194: mol_type = other RNA
atggagagcccacatctatatcgctccaaagccccgattgggctggacccagctgtgatagaacgcgcaatccgcctcagcacgacacagtctgccaacggggtgcaacccattctgactctgaagcacctggccaaccaagccggagtcggcttcgtcttcctggaacgggtgtgcgatcgaagcatagacccctatgttatctatggagtgaggaagcgagttggcagctcacgcaggatgatagcagcccctgaggagcagctgcgggttgtgcagcgttggttactggatcatgtgttcaccaatatgcacgtgcactctagtgctttcgcttatgtgaaggggagaagcgctcctatggcagccaggctgcacctcggggctaactggatgctcaaactggacgtgcgcaatttttttcacgccttcgacgaacgacaggtatacgatgtcctggcgggcacaggctactccgacttggtgcgcctccaggtggctcggatttctactagacacgttagggagtatctcccttggcttcccgagaaatacagagagtcccgttcccaggaaggtgcatccgccgcacggtttgctcataccgcggctgagatagatgcatttgagcttacagcgttacctcatgatggaggatcacggctcggatacctaccacaaggagcccccagttcgggtgccatctctaaccttctgtcacgggaacttgacagggacttggccgaactgggcatctctagaggcttggtttacacccggtacgccgacgacatcgcactgagcgctagtaccccgttttcaagaaaagaagcggaggcgctcatgcacgatgcttccagggccctgcgcaagcacgggttagagccaaatcatactaagacccgtattgtgcgccccggattgcccatcgagttgctcggggtgagggtcgatggcgaatacacaagggtcagtagaagagtacgggagaaaattgagttccatattcgagccatcgagaagtttggtcttgcagcccatgccgcccacgcaggtttcggagatgcaatcggctgtgcaaatcacgtaatcggcctggtcagatacgctcatgacgtcgaaccacagagagccggcgcttatttcgctcggattgaacgagccatccctgggctacaggttaggcctctgtga

SEQ ID NO: 9220 - RNA, 1194 nt, synthetic construct
  source 1..1194: mol_type = other RNA
atggagagcccgcacctttataggcgtaacgcaccaacggatacagaagccagcgtgatagacagagcgatccagttgatgtctctgcagtcacggagtggggccaccccaatcctaaccctcaagcaccttgctgtgcagtctggcgttaggctctcattccttgagagaatcgcagacagggaactcgatgcatacgacgttcacgaagtgaaaaaaagagggcgctcctccaagaggctgattgctgctccccacgacgagctgctgagggctcagcgatggctcctggataacgtctttgcccacgccagcattcacagcgccagctacgcctaccagactggaagatctgcaaaattgtgtgcgcagcaacatttaggcgctcggtgggctatcaaactcgatgcgaaggatttctttcaccagtatgatgagtttcaggtgtttaacctgctgcgcggctttgggtactcacccttagttcgcctggagatcgcccggatttgcacaagacatgtaagtaccgaccaggactggctccctgataagtataggcaaccgactcgtctgaggtcgataccagagctgcctccagctgaatacatgtggagtggacctgacctgattgacgtggaagcatatgcacacctgccacatagtcagggacgacgcttgggttatctaccccagggagcccctacctcaggcgcaatttctaatgctttggcttacgatctcgaccagtcgtttgagaaacttgcagaagctaatcgaatgacctacactaggtacgccgatgacattttcctgtctagctacagtatcttcgagcggcccagcgcggagcagatagtgcatcaagcccattccattttcgaacaacacgagttgcagcctcacgcccgcaagtcccggatactgacaccaggtcgacccatcgagctgcttggcatccgggtcgacggcgagtccacacaactacctaagcgcattaaaagcaagatcgaatttcacatccgcggagtcgaatcattcggggtccatgtgcacgcctctcattccggcttcagagagggtctggggttcgtaaactatctggaaggcatgatccgatatgccatcaatattgagcccgaaagaggaagaagatggaatcggaggctccggcatgccttatccgggcgtgtgtga

SEQ ID NO: 9221 - RNA, 1191 nt, synthetic construct
  source 1..1191: mol_type = other RNA
atggaatcccctcacttatatagaaagaatgcgccttctgacctggacccggcagtcgttgagagggccatccaactgtcacaggctcaagaggccgcaggagtggcgccaatactgtcgcttaatcatctggccgtgcaggcaaacgcccccctgaaagtactggaaagaattgctgcccgagctgtggatgcataccatatccacgagattcgaaagagagatcgggtgtccaagaggatgatcgccgctccaacacccgagcttcggcaggtacagcgctggttgctcgataacgtttttgccagggttcccgtgtcaccgtacgcctttgcatacgtggaaggtcgctctgcacctcaatgcgcccggagacatgtaggcgctacttggctagtcaagctcgatgtgaaagacttcttccatgagttcgatgaggcccaggtgttctcagtgctgcgcagcgttcagtattcggccctggtgtctttggagattagccgtatcgttaccagacatgtctccacccctcaggcttggctgcctaagaaatatgccagtactagcccacgccgcccaatgccagatgccgaactggtccctgacctctttgatcatgcagacgatgcgcctgagtacctgagccacccccagggagtgcgactagggtacctacctcagggcagtccctcttccggcgcaataagcaacatcttgtcccggcagctggacgaggaactcgctgctttagcaagtgcccgtgggcttactttcacacggtacgcagatgacataacgctgtcttccggtgaaattttcaacagggggagagctgaaaagatcctccacgaggcgaccgccattttgcacagaaataggcttacaccaaatcggcggaaatctaggatcgtgacccccgggcttcccttggaggttgtaggagtccgcgtcgacggtgacgaatcacggctgccgcgtcgactgagagacaggattgagttccatctccgaggaatcgaacagttcggctttgccgctcactccaggcacgtgggctttgatgacgtgctcggatttagcaactttctgtatggcctcattaggtacgctcacgacgtgcaaccaagcttagccgccgcctatttcgctcgcgctgatgcgcactttcccgcagcccaggtcgggagttga

SEQ ID NO: 9222 - RNA, 987 nt, synthetic construct
  source 1..987: mol_type = other RNA
atgtctggggtgtcctacgccttcctgcgccgagttgtcgagcgggagagtgacccatacaatatttataccattcggaaaagggatgggaaatcgctgagaagcattgccgctccttctgaggctctggccgccgttcagcgttggctgctggatcaaacttttgctagaatgccatccaccccttggagcttcgcttacgaaaaggacaatagctccgtcaagtgcgcccaggaacatctgggtgctacatggctgttgaagatggacttgaaagactttttccatcaaacagacgagcgtgacgtgtaccacctcctacgaaagtatcgctactcagaattagtagcatttgagcttgcacgcatcgtgacacggtctgtaagggatcctcaggattggctgccccccaaatatgcgtcaaccgttgaatggcgacgcggagccggatttccgtacggcaagagggtgcggctcggatatttgccccagggtgcgtctacctccggggcaatcgccaacgtccttgcctccggacttgacagagccctacacgagctcgctatctcccacggcacaacgtacactagatatgccgatgatttaacctttagcggcggtccatatgaccgggcctcagctagagagtttgcaagcagcgtcactagtgcaatcttcgcagctggctacactcctaataagaaaaaaacgcgcttgatcgcccctggaaggcgtctggaagtgctgggggtgcttgtgaacggcagtaagctcagggtgcccgctagattccgaaagcgggtggaagcacatctctacgggctcgagagccacggcgttatgggccacctgcattctcgcggtttcagagacatagatggaatgtctaggcacatactgggcttaattgcccatgtacacgcggtggattcatcgctggcgaaggtctattacaccaggttcgccagtgcattcccaaacccctga

SEQ ID NO: 9223 - RNA, 1155 nt, synthetic construct
  source 1..1155: mol_type = other RNA
atgaatctgtccccgcatctgtaccgcaaaaacgctccctctggattggacggcgccgtggtagagagggccattaagctcacctccgagcagagagctaggggtgtggaacctattctgactctgaaccacctcgccgccctttcaggaaccagcggcaattatctccatgccgtcgtggaccgccaagtggacggttacgacctcttcaatattcgcaaacgagcatccgggcggcggcgttcaatagctgtcccacaccccgaattggccaaggtgcagaaatggctgcttacagatgttttcagcaaagtcactgtacactctgactgctttagttacaggcacgggatcagcattaaggactgcgcaagtcggcatcttcatgctgagtggatgttaaaagtcgacctaagtgacttctttcaccagatagatgagagacacgtcttcggggtggcctcgtccctgtatgaacccctagtggccttcgaagtgtcacgaatcgtgacaagacagcctcacgtgggccaaccctggcttccgaagaagtatctgcggacagttcaccagattccaaccaagtcttcttacccttataagcgatcagaaaagatcggctacctcccacagggggcatccactagcggctatatcagtaacctggtcgctaaacccctggataccgcccttagctctatcgcggcggcactggagttgacctatactcgttactccgatgacctggcctttagctccgctcgcgtgctctcaagaagtcaggggctggatgttttgcgcgaggtcgcaagaatggtgggcaaaacgggctttcacatcaatgagtctaagacgagattttctacacgtgccaacggcctgaatctactgggactgaccgtagatggggaatcgctcaggctccaaaggcatctgcggacaagaattgagtttcacgttagtggagttgaaaggttcggagctaacgcgcattcaattcactgtggattccgggatgtgctgggcatgagccatcacatcctgggtcttttggcttacgcaagccatatcgagccagccaaggcctccatatggcgcgcaaggttagatgccagccgagacgcattgctcttcggtgcgcctttagctgagtga

SEQ ID NO: 9224 - RNA, 1029 nt, synthetic construct
  source 1..1029: mol_type = other RNA
atgttcatatccaagaggcctatccctgacctggagcaccttgccctggctgttggactgcggcctgagtacctgagagatgtcgccgctaggcgctctgacccgtatcatgagttccaggtcgccaaagctcgaggctccgttcggaccatagccgcaccagagcccgatctcgctaaggcgcagagatggattctcgataatatgttcctcggttctcacgctggagggcgcagcttcgcctataggaaaggggtgagcgtaaaggactgtgcaactgttcacgtaggggcaagatggctggtcaaactcgacttacaggacttttttcacagcatcgattccaggagagtggcgcgtatcttccgaaaggtgggctgcgacgaggtgacctcggtgcaactggctcggctgtgcactcgtcggaactcaggcagtattggacagctcgccggtccaaccccgcttgattatttgccccagggcgcccccactagtggaatgcttgccaatctggccgccgagaacctggacaggtcgatgtcccgcttagcatcacggacagccctgaaatacacacgttacagcgatgatcttacctttagtagcgaagaggacttttctagagcaagcgcatttgcactgattcggggtgctagaggagaaatcgcccggaaccacttctcaatgcacgaagataagattaggatcagtcctcccggctcccgcctcgtagtcttgggattgctggtcgactccgatagggttcgcctgcgcggggactttaaaaagacacttaaatggcatgtgtacggctgtgctagattcggccccaatgaatacagtgcttctcgagggtacgccagcgtggaggactatcagagccatgtgggcggtctattcgcgcatgccgtggatatcgaaccagagtgggctgccccattgcagcgatcttggaaggaactaacggcggcacaagccgaagccgcttctgctgggtccttagtggtgtcagcatcaggcgactga

SEQ ID NO: 9225 - RNA, 981 nt, synthetic construct
  source 1..981: mol_type = other RNA
atgcttatcaataagaggcctattcctgacctggaacatcttgcgttagccgtcgggttgcgtcccgcctatctaagagacgtcgctgcccgatcgatcgacccataccgtgaatttcaggttgccaaggcccggggttccgtgaggacaattgcagcaccagagccggatctcgcaaaagctcaaaggtggattctggagcacatgttccttggctcgcacgccggagccagcagtttcgcatatcgaaagggtgtgtccgttggggattgtgcgagggtgcatgtgggagcccgttggctggtcaagctcgatctgaaggatttctttcacagcgtcgacgcacggagggttgcgaccatatttcgcaaggtgggctgcgatgacgtgacgtctgttctgctagccaaactgtgcacaaggagaaaaaatggatctcggggtactctgacaggagccaccccactcgattacttgccgcagggcgcccctacctctggtatgctggctaatcttgccgctgaaaacctggacagatcaatgagtcggcttgctagtcggtacaggctcatgtacacccgctattccgatgacctcaccttctcctcaaacagagatttctcacgcgcttccgctttcgcgttagtcaggagcgcccgcggcgagatcgcaagaaaccattttagcatgcatgaggacaaaattagaattagcccacctgggagccggctggtagtgttgggcctgctggtggattctgagcgagtgcggatgcgcggcgacttcaagaaaactctcaactggcacgtgtacgggtgtactagatttggacccgacaaatatagtgcatctttgggcttctcctcaataagcgagtaccaggcacacgtaaatgggctatttgcccacgctatcgacatcgaacccgagtgggcaggagctctgcatgcccgatggaaggaaatcacagctccccgctga

SEQ ID NO: 9226 - RNA, 981 nt, synthetic construct
  source 1..981: mol_type = other RNA
atggaactaacaaacctgcagcagctcatgcagaaaacacaggtgagtgaaaccgctttgtttgatctcatgcgcggacaggttgatccttatactgagttccggattcccaagggccgtaatggggccttcagaattatagctgccccctcaagggacctggggaagttgcaacgaagcatcctggacaatatcctgagcgctcctcagagagcctcccaatctttcgcctatcacagaggagtctctattacggactgtgcacgcgttcattcaccggcaagatggctcgtgaagctggacttaaaggacttttttggctctgtgtctgccgtccgagtggccgctgccttttccagtattggacttactgaagaattcagttcacaactcgcgttcatttgcactcgtcgtgcaggggaagagggtaccaggttccttccacagggtgcgccaaccagcggtttgcttgcgaacttagtggcagccgctttagacgagtcgctcgtgctgtttgctcagcacctgaacctgcggtactcgcgctacagtgatgatctgatcttctcctccagtggaacattctccaggagcaaggccttgcgcatagtcaggcaggtgcgcagcaaagtcgcagctcacggctttaccctaaatgaggacaaaatccgcatcagaccaccgggctcccgacttctcgtgctcggaatgctggttgactcagagtaccccagactgaggcacgatttcaaacggcttatcgagtggcatgtatatggcagcgagcggtttggcatcgccgaatattcagcgtctagagggtttgcatccattgagagctacctgcggcatgtagatgggctgctggcccacgccttggacgtccaacccgattgggctgcacctatgcggcagaagtggaacttcataagctctgccccagctggcggtctgctaaggcctcctagggaggtgccctga

SEQ ID NO: 9227 - RNA, 1230 nt, synthetic construct
  source 1..1230: mol_type = other RNA
atggagctgctgccctttaatcctattgtcaaaccgtctcgcgtggctccagcgcaaattaacagcttacgctaccttctcagactccacaacctggagaatcctgaggagagtatcctgtacccatccgcccatgtggccatatcatcccacaacaccgccgagatttggcttgatcacgagaagacaactagcctccgtaaggtacccttatactataaatatcgatctgtgcctaagcacagtggcggcaggcggattctgtcagaacctagtagctcactcaagtctctacagcggtggatcctcagacactgtttcaccgacgatatggtgtcgccagccgcctatgcgtatcgacccggcagaagcatccaggactgcgcagctgtgcatatcggggctaagtggctcttgaagctcgacttaaaagatttcttcgggggtatttccgaagcccgtgtgtatgaactgtttagggctatcggatacaaggagctggtcgcattcgagctggctaggctgacgacttttctccctgacaagaatatcaggagaaatattcaggccctatacaacgaaaaatttgagatcaccccagccgcccggaactacacaaaactcgaaatcagtatcgacagctcctcaggcccgtaccctagatatcgcgggagcgctggcaagataatacggggagttttgccccaaggcgccccaacgtccggcatcatcgctaatatttgcgccggggaactggataaagaacttgccagtctggcactatataatggattgaggtactcccggtattgtgacgacctgtttttcagccccagacccgaccatgaacatttcgataggtcttttgcaggattaattattcgagacgtcaatagagcagtgctgaaacacgggtttcgcatcaaccagggtaaaactcgcgtggttccacccggatccaaaaagttgattctgggccttcaagttgacgattctgtgaggttggatactgctttcaaaaagaacatagattaccacatacgagggatcgcaaagttcggattgcagcagcatgtcgcacataccaaggggaccccacctcccgttctgtctttcctgaatcacctgcagggtcttattgcttttgcgaaaggcatcgagtactggtacggagagacacgggagacaaacctgaagcgtgccctttcagtaggtgaagtcacacgctga

SEQ ID NO: 9228 - RNA, 1068 nt, synthetic construct
  source 1..1068: mol_type = other RNA
atgtccaacagggggggcagtcgcaatctgttccgcgaaatccagaaggtgaatcatgattgctcgaagttcggcgtttctccgatatatactttgacccatctgtgcgttgtggccaaggtcgcacacaaagacgcgagggatgtcatcttcaaccatcaggctcattataagagcaggaggataaagaagaaaagcggcagcggctaccggaccatctatgaaccaagtccccagctgaagagccttcagaaaacaatcctgcataactgtctccctacggccccagctagtgagttgtcctttgccttcgaaactggccggaatacactggcagcagcagggcaacacgtaggcgccagagcgatgatccacgtggacgtgagagatttttttacctccgtggcctctaaacagatttactctgtgtttcacaatctcggatatcccgagctgctgtctctcgaaatggcactgatttccaccgtagggcacacggtcactctgcgccaattcgtggaagacggcctggtgtacgagattctagaccctggatatctcccccaaggagcttccacatcaggtaaactgagcaatatggtttgtgctgacttggatgagaaactgtccgcgatctcacataaatggggaggggtgattacaaggtacgccgacgatatcacttttagttcaccagtccccctttctcgtagcaagtgtacatcaatataccacgatctccgtaaagctctgcttcagagtgggttcgttaccaactctcggaaaactaagatcttccctaacgtccgagagttcaaaatgttaggtttatgcgtcggccaggagaatgtatggctcaacaagtcgtataaaaagaccctcagagcacacctatacagccttgagaagtttggaatttttaagcacagcgtgtctcggaacttcgactccgacttagagtttatgtcctacatgtggggtcactacgcttattgcgccaatgtggataagaaattcgccggggagttgagatcacgactggaagccgccggaattcgcaagatttga

SEQ ID NO: 9229 - RNA, 975 nt, synthetic construct
  source 1..975: mol_type = other RNA
atgacacacctctgcgttattgcaagagtctcgcatgaggtcgcacgtgacgtgatcttcaaccatcgtgtgcattataagagcaggcggctggcaaaacggccaggccatgggtacagaactatctacgaaccctcagctccacttaaaagtttacagcgcgctatcttgcagaattgtctgcctaaagcgagccttaccgacctgagcttcgcctttgagacaggcagatcaacgtctggagctgcacggcgacacatcggagctagaagtatgattcacgtggacatccaggacttctttgactccattcgatctaggcgcgtgtattcagtcttcgctcaactggggtacccggaactgctggccttggagatggcggtgatagccagcgtaggccacgaagtggccctcaggggagagaacgataaggggttcacctatgaatttcttgaagaaggccgcttaccacagggtgcctccacttctggaaagctatccaacctcgtgtgcctccgcttggacgatctcctgctgcagattagtgatcgatggggtggtgtagttacacggtacgctgacgatatttcgttttctacccctcgccccctttccagaaaggagtgtgccagtatatactttgagatccaagatgccgttcatcgttccgggttccagctgaaccctagaaagactaggatactgccccggggcaatgagtttagaatgttaggcctatgcgtgggacagaagcacgtctggctgaacaaaaattacaaaagcgcaatcagggctcacctgtatggggtggaagagtttggaatatcagcacacgccatttctcgggggtttgatagcgactatgagttcatgaatttcatctggggccactacgcctattgtgtcgacgttgatgtgaccttcgcgcgcgaattgaggtccaggctcgagatcgccggcgtaagccgaatttga

SEQ ID NO: 9230 - RNA, 1005 nt, synthetic construct
  source 1..1005: mol_type = other RNA
atgacccataatgtggtaccggtctatacgctggcccacctctgtgtcattgcgaaagtgccatacgaggccgcacgcgacgttattttcaaccaccgagctcactacaccagccgcaagctcgtcaaacgctccggtctgggattccggactatccatgagccgagtccccagctgaaatctctccaacgggctatcttgcagaactgtttgcctagggatgcaagttctgctttatcatttgcctttgaagcagggcggaatacttctcaggcggcccgacaccatataggggctagggcaatgatccacgtggacattcaggattttttcggatccataggaagcaggagggtctacagcattttcgctaaactcggctacccagagctgctggccttggagatggcctttatcacatccgttggtcacgaagtgacactgagaggccctgatgacagaggcgtgccttatgaattcttaaaggaaggccggcttccccaaggtgcctccacctcagggaaaatcagtaatcttttgtgcagagaacttgacaatttactcagcgagatcgctgtgaagagaggtggcgtggttacccgatacgcagatgatatcagcttttcgtggcctaacccactgattagatccgagagtgggactattctggctgaaatagaccgggcagtcagtgaggccggcttctctctgaaccggaagaagacaagggtaatcccaaagtctcacgagttcaggatgctgggcctatgcgtaggacaggaaggaatctggcttaaccgcaattacaagtcccatatacgcgcccacctgtacggcgttgaggagttcgggctatctgagcatgccatttcccgtgggtttcactcagacctcgagtttatttcattcatctggggacattatgcttattcagcctatatcgatcccagctttgcgagcgaagtgagagcacgtctggaaatggccggcgtgcccgacgtgtga

SEQ ID NO: 9231 - RNA, 1068 nt, synthetic construct
  source 1..1068: mol_type = other RNA
atgaaaaggcgaaatgcgacggaagcactgattcggagtgtcagacggatcgaaaatgactgttcccgcagcggcgtgcttcctatttttaccctggtgcacctgtgcgttgtgtccaaaactccctataataccgccagagatgtgatcttcgatccgagggtacattactcgacccgccgcatggccaaaaggagtggttcaggctttcgctcaatccatgagccatctcctcctctgaaggcactgcacagggccattctcgagaattgcctcccggtgagtggcgttagtgacatggcttacgcgtttcaccctggccgagatacgctagccgccgtacgggcacacgtaggagctcagtcaatgattagagtggacatcaaggacttctttggatctatcgggacaagaagagttgcagccatttttatgaatctgggttaccccgagttgctggctcttgagatggccttactgactacagtgggccacgaagtgattctgagaggcgagcacgacagcgggccaatatatgagattcataaggaggggcggttgccacagggagctagcaccagcggtctactcgccaacttgatatgcgcacccttagaccagcttctgagcatggtggctctccaatgggatggggtcatcacccgttacgcggatgacatctgtttctcatcccacactccaacatctcgtgaaaaatgccaggatatactgcgggacatcatttgtgccatcgaatctcaggggtttaagctgaacagcaagaagactaggatacaccccaaaggtaaagtgttccgcatcttagggctctgtgtcggcgagtccgacgtctggctgaaccgaaactataagcggtctttggagtctcatatccatggagtcaagaagttcggactcatcaaccattcctactcgaggggatacggctccgatcttgaattcattgagttcatgtggggccactatgcttattccatacatgttgatcccacattcgggatctacctcaaaaatcagctgcaagaaaacaacatcgtgagcatttga

SEQ ID NO: 9232 - RNA, 1107 nt, synthetic construct
  source 1..1107: mol_type = other RNA
atggtcgggatcgccagtccccatgcctatagtgcagccctgtcagctagggggggtagccctcagctgttgcgcgagatacgtgagatcgacaggctgacccgctcttcacatgtaattccgctatatactttaactcatctctgcacagtggccaaagtcccttacgaggccgccagagatgtaattttcaaccacagagctcactactctgcccgtaagctgaagaaacacagtggaaaaggctttcggaccatacacgctccctctccacatctcaagagcctccagctggctatcttggagaattgcctacccaaacggcccacttctgatttgagttacgcttatgagccacgccggaacacccttgaagcagccagaagacacatcggcgcaaagacgatgatccagcttgatctcgccgacttctttggctccatatcaagcaccgccctgtacaagacatttgttgggttcggctaccctaaactgctggcattcgaaatgtccctgattagctctgtgggacatgaagttacgctgcgtggcccagatgagaaaggagtggtctatgaactcctgaagtccggtaggctccctcaaggagcgtcaacctccggtaagctaagcaacctggtgtgtattggcctggaccagctcctgggggaagttgctacagcctggggaggcattatcacacggtacgcggacgacatcacattttccactggtcacgcagtgagcagatcggagtgtaatagcatattgagagacttaaagtccgctatccacgtgtccggcttcactatgaatgagcggaagacccgagttacccgcagtggacaagagcaccgagtgctcggactttgtgtggggcaggattctgtatggctgaatcgcaactataagaattcgattagggcacatctttacgggttggagaaaaacggccttgctgaccacgggattcacagggggttttccagcgatcaggaatttatgtcattcatctggggacattacgcctattgcgtctatgtggatccagacttcggcgcagaaatgcgagcgaggctggagttagcgggtgtggaacgggtctga

SEQ ID NO: 9233 - RNA, 1113 nt, synthetic construct
  source 1..1113: mol_type = other RNA
atggtggaaaagatcgcaccgcatgaatactttaaggagcttagcgagagggggggctctcggcagctgcaaaaagtgattacgaaggtaaaccaggaatgtgctgaaaataatgtcctgcccgtgtatacattgaatcacctttccgtcatttccaagatccctttattcgtgaccaaggacatcatcttcgaccacagtaaatactacacaaggcaaaaggtggcgaagagatcctctcccggctttaggacaatttatgcccccaagttccctctgaaacaactgcagcgtgctatattgtctaactgcctgcctaacaatggacaggttggcatctcgtatgccttccagaagggatcaaatgccataagtgcttgccgacagcacctgggtgcacggggaatggttaaactcgacgttgctaacttttacgggtccatctctaccccctccatttaccgaatcttccacagcttaggttatccagagctgatgtcaattgaaatggccctcatttgtagcgtggggcaagtagtggagatgcgccccgatgaccagagcggaaagatctataaaatcaagaaacgggggcgtctcactcagggatcaccagcctctggtctgctgagcaatatccattgccgcaagcttgatagaaccctagagttgatagcaagagatcacggtgccatcgtgacacggtatgctgatgacattactttttcaactcgggagccaatgtcccagtacgtagtcaactctataattggcagtagtatccatgcgctcaaaaggcagaggctgaacttgaaccgccgcaaaacgtccgtcattagaaacgggcgcagcttcaacctacttggcctgagggtggcagatgacggcctgcatctcaattccggatataaatctaccgtgagaaatcacctgaagaaggccagcctgcagggggttagtaaatactccttgagtctcggctacagctcagacttagagttcatctttatgctgtggggccattacgcatacagcatgggcgtcgaaaaggattttgccgctgagatatcgtcaaaactacacaccctcgggattcctcgacttactgcctga

SEQ ID NO: 9234 - RNA, 1134 nt, synthetic construct
  source 1..1134: mol_type = other RNA
atgtcagtgtcatctcacgctttcacggagggactgttcgccgcaggcggttctcctgctctactcaggcagattcacagggtcaattttgactgcggtaacgccggggtcaccccactgtacaccttgggacatcttgcgttcttatctgcagttccacatggggtgctgcgcaggatgctgctcgaaactaagtcacactatactgaacagcgcctcgcaaagaaaaagccaggtactggatacagaacaatccgcataccaagtccggcactgctgaaagttcagcggtttattctgggcagatgccttcctcctggtccctcctcccctattagttacgcgtatactaggggacggggaatccgcgatgccgcagaacgacacgttggggccagaaccgttatcaagttagattacagcgacttcttttcctctgtgggcagcaaggcggtatatagagtcttcgagagtgccggctaccccgagcttctggcttttgagatggctatgctttgtacttatggtgccactatacagctcaacaatgaggtcaatgggaatagaccttataagaacgtgtccaggcggtttctagcccaaggggcccccacatcaggagctttgtcaaacttcgctcttcgatccctggataagagcttgggcgagtttgagttgagcggcttcacattaacaaggtatgctgatgatatcaccatcagctcaccgcgcaccatgacccagaaagaagtaggctcccttatccggaacatcaccgaactgagctcgacgtacaatctgtcgctgaacaaatctaaaacacaggtgctccggaataagaattctttccgtatcctcggactctctgtcacatctagcggcgtggggctcacccgaccctataagcgtagttttgaatcagagctgttcggcatcaaaaaaggaggcttgtccaaccaggctatttaccgggggtacagcagccctatggactacattgcattcctgtgggggcatgtggccttcgccaagggaatagacccaatttggtcccaacgtatgagtgaaagactggagtccatgggggtgccctttatcgacgccattggcgtgtttggcagcagtctgccctga

SEQ ID NO: 9235 - RNA, 1086 nt, synthetic construct
  source 1..1086: mol_type = other RNA
atggaggcgcagcaccgcggattggacaaggatacgattgaggcatccatccgtcagtaccagtcaatgttggactgtgggatcctgccgatcttatcactcaagcatttcgctaaactcgttaacgtggactacagctatctgcggaggatcgtgggcagaaagattgatccatataaaaccattgagcagcagaaacgatccggcggtaccaggcttattagcgcccccgagaagcacctccaggatacacaaagatggatcctggattatgtcttatccgatgctaagactcatccccttagtttcgcctacgaaaatgggaaatccatcttgaagtgtgctaaaatccatgtaggaatgcgatggatgattaaactggacctgcggaacttctttgatagcattaaagaaaaccggatttacaaagtgttcagggaactcggctaccctagtctggttagctttgagatgacccgcatctgcacaaggtcacaaggctttaactcgatcaaaaaggtcgcaaataagtatcctgttatccatacttacctgtatggagcctccgggtgccttccacaaggtgcaccaacaagtgggaagttggcaaacatagtgtgttatggcctagatgaggagattaaccggcttgccataagaaatcgttttacctactctaggtactctgacgacattttcctctccacatgtgattcttttaatcgcaagaaagctcaacagataattagctgcgtgaacaatttcatccataaggaaggattctctctacagaaaaagaagactcacattataactcctggggcgagaaaaatcgtcctgggtctgaccgtcaccgaccaaggcgtcaagcccatgcggggatttcgaaagcagatagagagtgacattcacggcgtgaagaaattcggtctggtgcagcatgtgcagcaccgccactatcacagcatcttttcattcatcaatcacgtggatggctgcatagcctttgtatacggaatcgacagccagctgggggacagatacaagaagcagtggggcgaagccctctctaggtataatctgtga

SEQ ID NO: 9236 - RNA, 1110 nt, synthetic construct
  source 1..1110: mol_type = other RNA
atgtcgcctccacacctgtcatcagcgaacgaagaaacttcatgcgaggaagctgcaattgttagccgaatgcgggagatcagtggcatcatagagtccaacgatgcccatcccatcttcaccctgaatcatctcgcgtacgaggccggtgtctcctacggcttcattagatcggtggtcgccagaagaatcaatccctaccgccattacgagatgcggaaaagaaggggaggctatcgtgttatctcttccccagtacctgacctagcacgggtccaacgctttatcctgcggaagatcctgtctgtgcaaagggacaatccagctagctacgcctatagagaaggtaagagcatcaaggattgcgcatcaaggcacataggaagccgctggatgatcaagatggatatcgaagacttcttcgggagtgtgaattctaagcaggtgtactttctgtttagggacctgggttatagctccttggtaagcttcgagctttctagactggtgacatggggctgttctcccactgcaatgaattggcagccttacgactacaagatctcagattatcgacatagcatagtgggatccttacctcagggcgcccctacaagcggcaaaatagctaacctaattgctagggatcttgacaagtctcttcacggattagcaaaaacctatggcgccatttacacccgttattccgacgatattatattttccttccggcgcaacattacgaggcccgaggctcgcgtgatcgtcaagaagtcctatgatctcatgagggccaacgggttctctccgaacctcaaaaaaaccgccgtaattcccccaggagcacgaaagattgcggttgggctcgtggtgtcagacaacgtgtacttgagtcgcgagtttaagcgacgtactgagaggttggttcacggggtctataaggagggcgtggtcccgtttagtgaaagagccaagttccgcagtccaattgggctgattaattacatcgaaggaagcctggcctttgctgcccacattgacagaaaatgggctgaagggcagcagcagaaactgctctccagtatgcggaaaaatacaaaaatccggtga

SEQ ID NO: 9237 - RNA, 1023 nt, synthetic construct
  source 1..1023: mol_type = other RNA
atgcgctcagtggaggagtggaaacacttcttcctgtctcgaggaatcgccaatgaactgatcgagcgctacctgaagcaaatttccctgctgtccaacactaaatccccaatcattttcgaattggagcacctgtccctactggttggggtcaaatatgaagtgttgctcaacatgatacgagggtcaagcagctattatcgtacctttagcatcaaaaagagggctggaggcgagcgggtcattgaggcaccatacccctccctgttgcagtgtcaaacgtggatctatcaccagatactgttaaagagccctgtccatgattgtgcgcatggctacgtccccgggaggagtatctttacaaacgctaccgtacacctggggtgcaagaccctgctcaaaatggatttcaaaaacttcttcccttcagtgggtataggttgggttattaagttcttcagcgagctgggctacgataagaatgtggcttacgcacttgcagccctctgctgtaatcgagggcgtgtggttcagggcgcctccacatcaccctacctcaccaatattctcctatacaacctggatgaccggcttttcaagctttcttcgagatccggactcaggtacacaagatatgcagacgatctgacttttagcggaggttacatttctacgaaattcgtggacttagtcagttctatggtaagcgaatttggcttggtgatcaacgattcaaagacaagactgctgatcgaaaagaataagaaattggtgactggcctatctgtgagtggaagttctcttcgcataacccgcgaaatgcggagatcgattactaaggacgtgttctatattgagaagtacggcctctttagccatgtttctcagatgaagatcaaagaccctttttatcttgagagcattgcgggaaaagtggctttttggatccaggccgaaccgctgaattcctttgccctccggtgcagggacatcttagccggtaactttagtagagtagagtga

SEQ ID NO: 9238 - RNA, 1083 nt, synthetic construct
  source 1..1083: mol_type = other RNA
atgaaaaaaatcgacgagtggaagcggttttttgagaagaggggggtgatccccgaactcattgaaaaatatttggaccagatcgctcgcttaaacaagagtggggcaccaatcatttttgaggttgagcatctaagtctcttgatcggtataaagtacgatacactgctgaaaatgatacacgggggcagcagtttctaccgaaagttcaccattaaaaagaaaagcgggggagacagagtcatcgaggccccctacccaagtcttatgcagtgtcagaactggatctatgaaaatatactcctcaagtgcgaggtgcatccgtctgcccacggttacgtgcgggggaagagtatcttcacaaatgcgtcccctcacctgaacaggtcctcactgcttaagatggattttgagaacttcttcccctctattaagattggctgggttgtgtctttcttctcccgtctcggatacagcaagaaagtatcatttgctttggcctccctgtgttgcaacgatggatgcctggttcagggtgccccaacctcgccatatttgaccaatatcctgctgagaagactggacaaaaagctttttcaactggctgccaagtctgatattgcttacactcgctatgcagatgatattacatttagcgcgcagctcattccttcctatttccctggattggtggcctctatctgtgcccggtacgcccttaagatcaatagcaacaaaacgcagttgctggtcaacaaaaataaacgggtcgtaaccggcctttcagtgtcgggcgagtcactcaggattactcgtgaattaaggcgaaaaatcaagcaagacctgttttacatagaaaaatacggcttactgagccatatctcctcccaaaagatcaaagaccccttctatctcgactctattctgggaaaggtcaatttctggctacaggctgagcctgctaacgaagaagcactgtcatataaggaaatactgctgagctactttagcaattctaaggtggacgtgctccttaaacgcaagtccactagacgcagcgtcggcctactggcagcagagtga

SEQ ID NO: 9239 - RNA, 1026 nt, synthetic construct
  source 1..1026: mol_type = other RNA
atgaagaaacttagcgagtggaaacaatttttcttgtctagaggactgagtcaagaactgatacaacgctatcttgatcagataaaaatgctggcaggctcaggatctccggttatcttcgagctggagcacttgagcctgctggtcgggattgattcaaagacagtgctagccatggtgcatggctcttctagtttctaccgagcatttaccatcaagaaacggtccgggggggagaggatcattaatgccccctacccaagcttactccagtgccagaactggatctatacgaacattctactgaattgtcccgtgcatgataatgcccatggctatgtccgcggacgctccatcttcacgaacgccagcccccacctgaattgcgctgtactccttaagatggacttaaaggatttcttcccttccattggaatcaactgggtgataaatttcttttccgatctcggttatagtaaagtggtcgctcaacttctggcagcgctctgttgtaatagaggcgccctggtgcagggtgctagtacatcaccatacctcaccaatattctgctccgtcggctggacgaacgcttcagcaggctcgcccagaagaataacctgaattacactaggtatgccgacgatatgacatttagcggtggatacatttccaagaatctacctcagcttatttcctctattaccctcgactacgggttgaccgttaacgacgctaaaaccagactgatgatcaacaaaaacaagaagatcgttactggcctgtctgtggctggcactagtttaaaaattaccagggatttgaagcggacaatcaagcaggacgtattctatattgaacggtacgggtttctctcccacgtgtcacagcagaagatcactgacccattctaccttgactcgatctttgggaaagtcaacttttggctgcagacagaacctggcaacgcggaggcaatcagatgccgtgacatcttgcaccccaactttggtataagccgactgtga

SEQ ID NO: 9240 - RNA, 1029 nt, synthetic construct
  source 1..1029: mol_type = other RNA
atgaagaagataaacgagtggaaaagatttttccttagtagaggtattcctcagaagacaatagaccaatatctggatcagattaagttgctaactgtgagcaattcccccataatctttgaggtagagcaccttagtctccttctgggaatcgaatatctgactattcaggctatgatcaacgggacaccgaagttctaccgcgagttcatcattaagaaaagggcaggaggaaaccgaacaatacacgctccttatccaagcctgctgcattgtcaggactggatataccagaacatcctactcaattgtgccgtgcataataatgcccacggctatatccccaagaggtccatctttacgaacgccagcccacacctgaattgcaaagtcctgctgaagatggacttgaaagactttttcccctccatcggtatcgggtgggtcgttaacctctttagcggcctgggctattctcatggtgtttcatacgctctcgcctcattatgctgcaacaatggatgccttgtacaaggggcgtccacgtccccttatttgaccaatgttctgctccatggcctggacgaacggttaaccaaacttgccagtaaatctaatctgaaatacacccggtatgccgatgatatgaccttctcagggggatacattagcaacaaaatgcctgcgttaattgaatcaattgtcaatgactacgggctggtcgtgaatgccacaaagaccaaactgatgatcaacaagaacaagaagattgtgactggcctctccgtggcagcagatgctttgagaatcactagggagctccgacgcagcatcaagcaggctgtgcattacattgaacgttacggttttctgtctcacgtgtctcaggagaaaattaaggacccattctacctggatagtatcctcggcaaagtgaatttctggctgcaagcagaaccccactcgtctgatgcaaaaaactgtcgggacgtcttgctaccatatttcggcaagaactaccaggcctga

SEQ ID NO: 9241 - RNA, 1080 nt, synthetic construct
  source 1..1080: mol_type = other RNA
atgaatgaggccgtcgttaagacctggagaaaacattttgaaagacgcgggatcagtcgagagttaattgaaagttacctgccctacattcagaaattgtgtaaaacctcctctcctgttatctttgagtttgaacatctctcgctgctcataggggtggaacagcatgagctgcgtaaaatggtaaacgctccacacgctttctacaggtccttccagatcaaaaaaaggagcgggggtttgcggaaaatttgcgccccttacccatccatgttaatgtgtcaggattggatctataacaacatcctcatcaacaaaccggtccacagcgcagcccatgggtttgtgcccggaagatctatctttagcaatgccagtgcccaccttaactcaaagtgccttatgaagatggacttgaaggatttcttcccttccattccaatcaattgggtggtgaactacttcctgtcattgggatatgcagacaacgtgtctttctatctggccgctctttgctgtagcgagggtcgcctagtgcagggatctagcacatccccctatctgacaaatattctgctgaagaatctcgatgagcgaatctcgctgctggcaaaatcatacaacctcaattttaccaggtatgctgacgacctaacattcagcggcgaatacatcccgcacaagctgattggggtcgttactaagataattgttcagtacggactggcagtgaacgataaaaaaacgcggctccaaatcggctccaatcaacgcatagtcactggcctgtcagtagccggttcaatgttggctgtcccccggaccttcaagagggaccttaagttagaactgcacttcatcaagaagtatggttatggcagtcacgtgtctaagatgaagatccggaatccttactacatagagagtctaataggcaagctcaacttttggctccaggtggagccatctaacatggacgcgctgtccgggattaagcttctcaaaggcattcagcaaggcgagattagcttgctgcaaagatccgtgggagatagcgatcagcttaatctgcatgcgtga

SEQ ID NO: 9242 - RNA, 1047 nt, synthetic construct
  source 1..1047: mol_type = other RNA
atgactaagtctgtcaaggactggctgaaacacttcgagaggcgaggtatatcacgggatctcgttgaatcctacctgccgtacattaaaaagctgaatcaaacatcttcccctgtcatcttcgagttcgagcatttgagcttactgataggtgtggaccagcatgaacttcgcaagatggtgaacgcccctcacgccttctaccactcctttcagatcaagaaacgcagcgggggcatgaggaaaatccacgcaccgtatccctccatgctcatgtgccaggactggatctacaaaaatgtgttgatcaacaagcccgtacactcagccgctcatggcttcgtaccaggccgtagtatctttacaaatgcgagcgtgcacctgggcagcaaatgcctgatgaaaatggacctgaaggatttttttccatcagttcccatcaattgggtcatcaactatttcctgagcctcggttatgccgataatgtctccttttatttaggggccttgtgttgttgcgagggaagattagttcaaggctcggcgaccagtccttatctcacgaatatactcctgaaaggtctggacgagcggatctctttgctggccaaagcatacggactgcgctttacaagatacgccgatgatctcaccttttcaggaaactatatcccccataagcttataggcgtggttagtgaaattattgtccagtatggcctgcgggtgaacgacaaaaaaaccaagcttcaggtaggggctaatcaaaagattgtgactggactatccgtgtctggcaatgcactcgcacttcctagaaaattcaagagggaactgaagatggagctgcacttcattaagaagtacggatacgtgtcccatgcttctaagaagaaaattaggaacccatactacattgattcggtgattgggaagttgaacttctggctacaggtggagccagctaacatggaggctcttagtggactggaactcatgcgagggatccagctggggcatgtctctagcctacagagccacgtgtga

SEQ ID NO: 9243 - RNA, 1023 nt, synthetic construct
  source 1..1023: mol_type = other RNA
atgaaaaaaatatcctacgagagttggagaaagtattttcttagcagagggatcagtcccgactacattcaggcctatctgagctacattgagaagctgagctccacatcttcgcctgtgatctttgagttcgaacatctctccaagctgatcgggattgagtacgacgcccttaggtccatggtgaattcaccatcttcatactacagggtcttcaatatcaagaagcgggccggaggccttcgtgaaatacatgccccctacccaagcctcctgatgtgtcaggattggatctatcgaaacatcctcttatcaaagccggtgcacgcagcagcacatggcttcgtaccttcacgatccattttttccaatgctagcaaacacctggggaagaaatgtctactcaagatggatatcaaggactttttcccatccatcaagatcaactgggtgattaagtatttccagactatcgggtatgccgacaacgttagcttttatctggcttccttgtgctgcagcgacggcgcactggtgcaaggctctagtgcgtctccctacatatctaacctgttgctgtacggtctggatgcgcgcctgagtcgtttagctaaaagttacggtgtcgaatatacacggtatgctgatgatttgaccttctcaggggactatatacctcatttctttatcggattcgttaccgagattgtgggtgattacggactttctgtcaatgaaggcaaaactagattgaagattggagacggtcaaaaaatcgtgacgggcttaagcgttgcaggagagaaactaaaaattccccgcgagcacaaacgccggatgaagcaggaactccactttattaggaaatatgggtacctctcgcacatggccaagcagaaacggagggacccattcgccctggaaagccttctgggcaggttttcattctggttgcaggccgagcctgacagttccgatgctcgcggcggagtagagtacctcaagtctataagatggctgtga

SEQ ID NO: 9244 - RNA, 1035 nt, synthetic construct
  source 1..1035: mol_type = other RNA
atgaataataacacaattgtgaagaactggctcggctattttcgacaacggggcgtgtcaggactgcttattgaggtctatgccgagtacatcaaaacactggttgggaactccgtccctgtgattttcgagttcgaacacctgtcgcggctgattggtatagatcaggctagatttagggccatggtgaattcacctagtagcttctacaggaccttccacatcaaaaaacgccttgggggtctgcgcgaaatatcttcgccctttccctccttactgatctgccaggactggatatacaagaacatcctactgaacatcccagtccactcctgtgtgcacggatatgttcccggacggagtattttcaccaatgcgactccacatttgaatgcgcggtgcctcttgaagatggatataaagaactttttccctagcatcaagattgactgggtggcaaacctgtttaatcagatgggctatgccgataacgtctccttttacctggccagcttatgttgcaaaaacgggcgccttgtacaaggcgccagcaccagcccgtatcttacgaatatcctgctgagaggcttggaccacaggctctctagcttagcaaaatcctacaacatggaatacactaggtatgcagatgatctgaccttctctggcgaatatattcctcattctgttatcggagtggtgggggccatcatctcagactttggcctggagccaaacgtggagaaaactagactccagatcgcacgtaatcagaaaatcgtcacaggattgagtgtagctggggaatcactaggcgtgccgcgaagcttcaagcgcgagttgaaaaaggacctgcattttattcagaagtttgggttcgagtctcacctcgctaagaaaaagataaggaagccattctacattgacagtctcatcggtaaggttaatttctggctgcaggcagaacccgctgatcagtacgctatgcaagccctttccatgctccagggaattcatgagcgtagagccgtatga

SEQ ID NO: 9245 - RNA, 1032 nt, synthetic construct
  source 1..1032: mol_type = other RNA
atgaatgaagcactcattaaacagtggctggcacattttagaaaaagaggcgtgtcaggtcccctcatagatgtctacgctgtttatatccggaccctgattggtaatagtgtccctgttatctttgagtttgagcacctgagcagactgattgggatcgaccaggccagattcagggcgatggtgaatagttcctctagcttttacaggacctttcatattaagaaacggttgggtgggctgcgagagatctcttctccgttcccttcactccttatttgccaggactggatctataagaacattttgctgaacatccctgtgcatagctgtgttcacggatatgtgcccggacgatcgattttcactaacgccgctccccatctcaactccaaatgtattctcaagatggacatcaaagatttcttcccatctatcaagattgactgggtggccaacttcttcaaccagttggggtatgccgataacgtctccttttaccttgcagctctgtgctgcaaggatggctgtctcgtgcaaggcgcatccacaagcccatacctaacaaatatactgatgaggggcctggatcaccggttgtacaaattagcccagagttattcaatgaagtacacccgctacgctgatgacttaacatttagtggggaatacatcccacatactgtcatcgaggttgtggatagcattgtgtccgactttgggttagaagtgaacactgacaagacgcggctgcaaatcgaccgtaatcagaagatcgtaaccggactgtccgtcgctggcaagagtatttcaatgcctcgctcttttaaaagggaacttaagaaagagctccacttcatccaaaaatatggctatcagtcacacctgagcaagaagaaaatccgcaagcccttctacatcgattctcttataggaaaggtaaatttctggctgcaggccgaaccagcggacacatacgccataaaaagcctgttcatgctacacgagatacagaagggaaattccatttga

SEQ ID NO: 9246 - RNA, 1032 nt, synthetic construct
  source 1..1032: mol_type = other RNA
atgaacgacattaaaatacgtaactggctgtctcatttcaggcaacgaggcgtctccgaggccctggttgagatatacgctgagtatatcaaaacgctcgtgggaaactctgtcccagtgatcttcgagttcgaacacttaagcagattaatgggcgtggatcagacccggttcagagctatggttaattcaccctctagtttctatcgcacattctacatcaagaaaaggcttggcggcctgcgggaaatttcatcgccgttccccagcctcttaatgtgccaggactggatttacaagaacattctgatcaacattcccatccacccgtgtgctcatggattcgcacctgaaaaatctattttcactaacgctacacctcacctgaaggcgcgctgcctgcttaaaatggacatcaaggacttttttccatccataaagatcaattgggtggccaacttttttaatcagatcgggtacgcagacaacgtcagcttttatctggcaagcctgtgttgcaaagaaggtcgtctggttcaaggcagtagtacttccccctatctcaccaacattctcctctacggtctggatcagagactttttggacttgccaagacctataatatgacctatacacggtacgccgatgacttgacgttctctggtgagtatatcccacacactgtaatagacatcgtgaagtcaatcatattggattttgggctgaagcctaattccgaaaagactaggctgcagattgataaaaatcagaagatcgtcacaggcttgtcagtagccggggacagcctaagcgcgcctagatccttcaagcgcgagctaaaaaaggaactccacttcatccgaaagtttggatacgagagccatttggccaagaagaaaattaggaaacccttttaccttgattccctcatcgggaaagtgaatttttggctgcaagccgagccaaatgatcagcatgctaaacaggcactggtgaccttgcgggagctgtacgaaagtcgaaagatttga

SEQ ID NO: 9247 - RNA, 1050 nt, synthetic construct
  source 1..1050: mol_type = other RNA
atgattaagaagacatttgacaacaacagttcattagactcaaaagtaaacaactggattgagtacttcaataatcgaggtgtcagtctggaactgatcgacgaatataagaccttcattcttaacctgatctccaaggatctgcccgtgatattcgaacttgagcatctctccttgctgctgggaatccagtactctgagttcctcaagataattaacaacccagatgagtattacaggaagtttgacataaagaagagaaaggggggaaaacgggaaatactagcaccactgccgagcctgcttcactgtcagaggtggatctataaggagattcttacaaagtctaagacgcacaataacgctcatggcttcattagcaacagatcaatcatcactaatgcgtcactgcaccttaacaagaaatgcatcctgaaaatggacatcaaagactttttcccctcgatccccattaattgggtgattaattactttagctccctgggatatcctaacaacatttcctactatctatcagccatctgttgctgcaacgattctctccctcagggcgcagctacaagcccatatctgagcaatatcttgctgttttccctggatgatcggttgaccaagttgagcaagaagtacaatctggtgtactctcgttacgctgacgatatgaattttagtggggagtacatcccttcccacttctcggaaatcgtttctgagatcattctctcctatgggctcgaagcaaataaaaacaaaactcaactcctcaccaaaaaaggaaaacggattattactggcctgtctgtcagcggcgagaaactgaccttgccacgcaacaaaaaaagagaaatacgcaaggaggtgcactacatcgagaagtttgggtatctcagtcatgccgccaagctaaaaatcaagaatcctgcctacattgactccttagagggtaaattaacattctggctgcaggttgagcccaataatgccttcgctaaaagtggcttgctccttatcaagagcataagggaatga

SEQ ID NO: 9248 - RNA, 1047 nt, synthetic construct
  source 1..1047: mol_type = other RNA
atgaccttccaaaagctggataaggtgcaggaattgaagataaattcctggtacctgtatctcaagaaccgcggattgccttcagacctcatcgacgagtacatttcttatatcatatccctgatcgacaagaacttgcccattatatttgaactggagcatctcagtaaactgctgagcatcaactacatcgagttgttaaagatcattaactctcccgagaactattacagagagttcaatatcccaaaacgaaaaggtgggactcgtaatatactaagtccttacccatctctgctccactgtcagaagtggatctacaagaatattttatcgaagatcgccatccatgatgccgctcacggcttcattaagaaacggtccatcatgtccaacgcagaaaaacacgtcgagaagaaatgcatcctgaagatggacatgtctgatttttttccaagtatccccattaactgggtgataaacttcttccatagtcttggctatagtaacaacgtctctttttacctgagctcaatatgttgcttgaacaatggcctacctcagggtggggcaacaagcccgtatctctcaaatattctcctggtaagcctggacaggcgacttaccaacctgagcaaaagctataagctggactacactcggtacgcagacgacatgacttttagcggcgattacatccctctgaagttctccgaaatcgtgtcacagattattgacaatttcgggcttcacattaataacgataagacgcagcttatcaccaaacccggcaaaagaattatcacaggagtttcagtggctggaagcaagatgaccctgccgcgcgataaaaaaagagagattcggaaggaagttcactacatcaaaaaatttgggtatctctctcatgcgtccaagatgaaaattaggaatccagcctatctatccgtgttagagggaaagctcaatttttggcttcaagtggagcccgataatgaatatgctaaacaggccattgtcttcatcaggacactgaagaatatatga

SEQ ID NO: 9249 - RNA, 1032 nt, synthetic construct
  source 1..1032: mol_type = other RNA
atgaagaagaacaacacgattgaatattggatctcctacctgatcagccacggcgtgtcactggatataatcgaggagtacaccccctacattaccaatctggttgacaaaaatctccctgttatcttcgagcttgagcatctgagcttactaatcggaatcaagtacttggaactcctcaagatgatccacagcccagattccttttaccgagaatttgacattcctaaaaagaaaggtggggtgagacatattgtgtccccatatccgtctctcttgagctgccagaagtggatctataataacatcctgaagaagatctccatccaccctgccgcacatgggtttaatctgaatcattcaattgtcacgaacgcccaaagtcacttaaataagaagtgcctgctgcagatggatgtgaaagacttcttcccatctctgcccattaactgggtcattaatctgttttcttcacttggctactcacacaatgtctcgttcaatctggcgagtctttgttgtttaaacgacaagctgcctcaaggagcagccacatctccctatctttccaacattttgctcgtgggattggataaaaggctgtcacttctcagtactagctaccagttaacttacacaagatatgctgatgacctctgtttcagtggcgagtatatcccgcacgaactgattcaaaccatagagagcattattatcgactacaatctgacccccaacaagaacaagacaaggctacagcttaataacaataagcggatagtaactggcatctccgttagcggtccaaaagctacaatacctcgccagctcaaacgggagctgaaacaggagctctattatattcagaagcatggctacctctcccacgtgactaaaatgaagataagtaaccccaaatgcctacagtccttggaagggaagttctctttctggttgcaggtagaaccagacaacgattttgccaagaaatctctgatgtttctgatcaaactgcgtaaagagaacacctga

SEQ ID NO: 9250 - RNA, 1035 nt, synthetic construct
  source 1..1035: mol_type = other RNA
atgaataagaaatacaatatcccatactggaagaagttctatcgctctagaggcctgtcagatgaaatcatcagtatttatcttccgtacatcaaaaagttgcagaaaaataacgcacccgtgatcttcgaatttgagcatctgagcaagcttttagggctcaagcgagctgagcttagcaaaatagttaactcaccagagtccttccacaggaaattcacaattcctaagaagaaaggtggccagcgggaaattgtttctccttatccttccctgctgcactgtcaaaagtggatttatagaaacatactcctgccgcagcccattcacgattcggcgcacgggttcgtcccaaaccggtctatctttacttacgctagcatgcatttgtctaagaaagccctgctgaagatggacttgaaggacttcttccctagcatcagcataaactgggtaatttgttacttctcttccctcggatatgccaacaatgtgagcttttacttagctagtctgtgctgctacaagggacatttgtcccagggcagctccacatcaccctacctcacaaatatcttactgaaaggtctggataagcgactgcagaaactatccacaacctatcagctcatttattctagatatgcagatgacttgacctttagtgggaagtatataccccacagctacattgagattgtcaacgcctgcatcgtggactatgggctggaggtcaatgaagataagactcggctacataccaaacccggccaaaggatagtgacgggactgagtatcagtggagatgaactcaaactgcctcgtaaaactaaacgcgagctcaaacaagaaatccattacatcaagacctttggttacatctcacacattagcaagaacaaaatttccaatccatactacctcgagtcactgatcggcaaggtgaacttttggctgcaggccgagccagacaatctgtttgccaaggactccttgaaccaccttcttgagatcaagaggtcggcactatcttga

SEQ ID NO: 9251 - RNA, 1005 nt, synthetic construct
  source 1..1005: mol_type = other RNA
atgaaagactgggaaaagtacttcatcgatagaggccttccaactgacactatatcaacctatctgtcctatattagccagttgtcggagaatcaggtgcccgttatttttgagttcgagcacctcaccaaactgctgggattgaagagaaacgtcctagccaaaatcgtgaacagcccagaacactttcatcgtaaatttagcatccgcaagcggtcaggtggcaaacggattattgtgagcccttatccaagtctcctgtactgccagaagtggatctacgtcaacctcctgttaaaacagaaggttcacacagcagcacacgggtttgtgcctggaaaaagcattttctctaacgctaagctccacctgtccaaaagaagcatgttaaagatggatcttaagaacttcttcccaagtatccctatgtcatgggtcatcaatttctttcacgacctaggctacgctaaaaatgtgtcatcctatctggccagcctctgctgttacgagcataggttatctcagggagcggccacatctccctacctgagtaatcttctccttaagaatttggatgatcgcctgagttcgatatctaactcctatcgcctccaatactctcgatacgctgatgacataacttttagtggggactatatcccgtccaagttgattaagatcattgaggagatcgtagatgactacggtctggcaattaatcagaagaagacacggctgcataccaaaccgggacaacgaatcgttacggggctatctgtggtaggcgaggaactgaccatccccaggaagatgaaaagggacctgaggcaggaagtgcacttcatacggaagtatggttaccttagccatatctccaaaatgaagattaaccatcccttctacttggaatccattgctgggagatttcagttttggctgcaggccgagcctgaaaatgagttcgccaaagaatcactgacatatctccaaaagatcaagggctga

SEQ ID NO: 9252 - RNA, 1005 nt, synthetic construct
  source 1..1005: mol_type = other RNA
atgttcgaacagtggatcgattttcttaacgatcgcggagtgaagaccgaagtcatagagagcctttccccgatcattcagacactgtcttccaacaagttgcctgttatatttgagtttgagcatctcgctaagattctcggattcaatgaagcttcgctcgcctctatgattaactccccaagcaatttttatcggacattctatatccccaaaaggcggggtggaaagcgagaaatatgtagcccctatccttctctactggagtgccagcgttggatctacaagaatatcctgctgaaactggatatccattcggccgctcacggctttgcaccaggcaggagtatcataaccaatgcaaaatgccacttgagtaaaaacgcggtgcttaaaattgatctgaaggacttcttcaactcaatccccatcaattgggtaataaacctgttctactccctcggctatcctagaaacatctcattctatctagcttctttgtgttgcctcgaaggcagcttatctcaaggggccgtgacgtccccctacctctcaaacctgcttgttaaacaactcgacagcagactgaccaacctgtcattaaaacatcacctggtgtactctaggtacgcagacgatatgtcctttagcggggcgtacgttagtaagaacttcattagctcagtgggggaagtcatcactgatttcggtcttatggtgaatcattctaaaactagcctgcgcaccggaaatagcaaaaaggccatcacaggtatcatcgtgagtgggaatcgactcagggccagtaagcagttaaagagaaagttgtcccaggaggtacactacattaagaaattcggctttctatcccacattaataagctgaagattcgcgaccctaactataaactgtcactgattggcaagctcaattttctgaaacaggtcgagccagacaacgagtttgctattgacgcccttaattacctgcggaagttggagtga

SEQ ID NO: 9253 - RNA, 1035 nt, synthetic construct
  source 1..1035: mol_type = other RNA
atgcacaaagagaagcacattatcagggcctgggaggagcacttcaaagaccggggcatcagcagcgacctcatcgtgcagtataccacttatataaagaagttgagcgaaaacgacctcccaatcatctttgaaatcgagcatctgtcccttctgataggaatcaacctgccctcattacgaaagattattaatgctcctgagaagttctatcgcactttttcaatccccaagagacggggtggagagcgggagatatccgctcccctgccttcactactagcctgccaagattggatttacaagaatcttctcgcaaaaattagcatacacgatagcgcgcatgggtttgtccctggccggagtatcctcacgaatgcaagtccacatctggcccaaaaagccctgttgaaaatggacttgaagaacttcttcccttcgatccccattaactgggttatgaagttatttagtgacttcggttacgccaacaatgtcgcgttctaccttgcctcaatttgctgtctgaacgaaagtctggcacagggatctgctacatctccctatctcagcaatattctggtgaaagggttagacaagagactgaaggctctttctgattcctatcatttggaatacaccaggtacgccgatgacctgaccttcagcggaaattatattccacatacatttccctccaccgtagaggagatcgtgtccgactttgggctggaagtgaatattgaaaaaacccgcctgcacactaagccaggccagaggattgttacagggatatcagtggcgggtgctacaccgtctctgcctcgagccagtaagcgtcaaattagacaggaggctcactttattcagaaatacggccttatctctcacatctctaagaaaaagatccgtgcaccaacgtacatcgattccatcgaaggcaaactcgccttctggttgcaggtcgagccgaacaacgagttcgcacgcgaaagcctctcccacatcaggaaaatacgcagagatcatcagtga

SEQ ID NO: 9254 - RNA, 951 nt, synthetic construct
  source 1..951: mol_type = other RNA
atggttacgacttctctgaagaacgccgtcctgttgcaggatttgccagtgatatttgagctggagcatttgagcaagattattggtgtggagatcaggaccttgcagaaaatgatctactgcagccgaaagttttatagatcctttagcatacccaagcggaatggcagtcgccggcagatcgacgcaccttatccaactctgttactctgccagaagtggatctacgaaaacatcctgaagaaaacatcggttcaccatagcgcacacgggtttatcgagaaaaaaagcattatcaccaacgccttacctcataaaaacaagaagactctcctgaagattgacctgaaagactttttcccctcaatccccctgaattgggtcgttaaccacttccttagcctgggctacgccaacaacgtatccttttacctagcgtctctttgctcgttggaagggaatctatgtcagggagcgccaacatctccctacctgagtaacattcttctaaccggcctggataaccggttaacgaaactggccgcatcatattgtctcgagtacacacgctatgctgacgatatgacattctctggaaattatattccgcacactctcatcgtgaccatagagaatgtgatctcctcctatggcctttccgtgaattcagaaaagaccagactccatctgaagaaggggcagaggattgtcaccggaatatctgtaagtggcgattccctgagtgtgcctagagagtacaaacgcgctctcaagcaagaaattcacttcattgagaggtacggttacatctcacacgtgagcaaacttaaaataaacgaccctctgtatctcgaaaagctgatcgggaaagtcaatttctggctccaagtggaaccagagaataatttcgctaagcatgccctcaagctgcttcgtgctgcccgaaaatga

SEQ ID NO: 9255 - RNA, 1026 nt, synthetic construct
  source 1..1026: mol_type = other RNA
atgaaaaataataagatcaagtcctggatcgatttttttgccgatcgcggagtcagtaatgagcaggccaacctttacatccagtatatttctggccttcttgactcaaattcacctattatattcgagaaacagcatctgagccaccttatcgggattgatgaagccacactggatcggatgatatccagtagcaaagacttctatcgtgaatttaacatcccaaagaagaagggtggcatgcgcaaaatcgtcagcccatatccttcactcctcatgtgtcaaaagtggatctacaagaacatattgctgaatgacaaaccccatgacgcctgtcatggatttacacctgctaaaagcatcatcaccaacgcttctattcatctgaacaagccatgcctcctaaagatggacctgaaagactttttcccctctattccgataaactgggtgataaattacttcaaacacctggggtatacgaacaacgtatctttttacttagcatccttatgctgttatgacaggaaattggcacagggtgcgtccactagcccgtacctgtcaaacttgctgcttaagggcctggacaacagattaaataatctgagcaagaagtaccggctgagttatagtaggtacgcagatgacatgtgcttctccggcagttacatccctaacaaaattatcggagtgattacagagatcatcaaaaagttcggcttgtctataaacgaggaaaaaaccagcctcctgattcactccaacaaaaaaattatcaccggcctgagcgtttccggtcaacagttgtcactccccagggagtataagagaaagctgaagaatgaactccacttcattatgaagtatggatacatttcgcacattactcagcaaaagatcaaagatcccaattacctgttttccatcctagggcgagtggggttctggctgcaggtggagccaaacaatgaactggctatctcttcgagagattacctcctaagcattctcaagtctaattga

SEQ ID NO: 9256 - RNA, 1029 nt, synthetic construct
  source 1..1029: mol_type = other RNA
atgaagaataatgacatcaatagttggatggagttttttcttgacagaggagtgagctcggatcagatcaattattacatcccgtacattgctaaattgctgaaaaccaactctcctataattttcgaaaagcagcatctggcccatcttatcggtatcgacgagtctattctagacaagatcatcagttcccccaaccatttctacagagagttttttatcccgaagaagcgcggtggactccgaaaaattacttgtccctacccaagtttgttgatgtgtcagaagtggatatacaaaaacatcctcctcaacgatactccccacgtcagctgtcacggattcacaccttcaaagagcattattacaaacgcctcactgcacctgaagcagaagtgcctccttaaaatggatgttaaggacttctttccctccataccaataaactgggtcatcaattactttaagggcctggggtattctgataacctgagcttttatatgagctccctgtgctgccacgacaagaagcttgctcaaggcgcgagcacgtctccatacttgtccaacttactattgaaagggctcgataaccgtctgaataatctatccagaaagtacaggctgacctattcacgatacgctgacgatatgcacttctccggagattatattccttcagatctggtaggcgtgataacttctataattaacaactatgggctctcagtgaacgaaaaaaaaacagccctttatatcaagagcaataaacggatcatcaccggcatctctgtggccggcgacgagctgagtctgccaagggattataagcgcaaactgaagaatgaactgcacttcattgagaaattcggttacatttcccatatcacccagaagaaaattaaagaccccaactacctctacagcattctcgggagggtgaatttctggttacaaatcgaacctgacaacgacgcagcaattaaaggccgggattatctgatgcgggttctgaagaataatttatga

SEQ ID NO: 9257 - RNA, 1026 nt, synthetic construct
  source 1..1026: mol_type = other RNA
atgaagaataacaatatttccgcatgggtcgactttttcgctgaccgcggcgttagtgatgagcaaactgacttatacatacagtacatcaccgtgctcctgagcagcgaggtgccaatcatattcgagaaacaacatctttcacacctgattggaattgatgaatctatcctggataaaatggttagctcctcaaagaacttctacagggagtttaacattcgaaaaaagaagggaggtgagcggaaaatagtatctccataccccagcctcctgatgtgccagaagtggatctataagaatatccttctcaaggacaaacctcacgaagcctgccatggctttacaccctctaaaagtataatcaccaatgcctctatccatctggacaaggcctgtctgcttaagatggatctcaaagatttctttccgagcattcccattaactgggtgattaactattttagacagctgggttacagtaataacatctcattctacctggcaagcctatgctgttacgagaaaaaacttgctcagggagcaagtaccagcccttatcttagtaatttgctcctgaaggggttagacaatcgcttgtccaacctgtcaaagaagtatcagttatcttactcacgttatgccgatgacctgtgtttcagcgggaagtatatccctaataagatcatcggagtgatcacgaacataattgcgaactacggcctccaggtgaattccgacaagactagcttgctgattaaggccaacaaaaagatcatcaccgggatttccgtcacagggcaaaaaccatccctaccaagggaatacaaaaggaagttgaaaaacgagctgcacttcattaaaaagtacggctatctctctcacatttcgcagcagaaaatcaaggatcccaattatctgctttccattttgggcagagtgtccttttggctgcaggtcgaacctcacaatgaactcgctataacatcgcgggactatctactgtctatcctgaagaacaactga

SEQ ID NO: 9258 - RNA, 1026 nt, synthetic construct
  source 1..1026: mol_type = other RNA
atgaaaaacaatgaactggcgtcatgggtggacttctttgctgataggggtgtgactgatgaacagattaacatctacattccgtacattaagaagattctggagagtaaggtccctgttatttttgagaagcagcacttggcccatctcatcggcatcgacgagaacactctcgacaaaatggtgtcttcgccagactccttttatcgggagttcaatatactgaaaaagagagggggcacacgcaagatcgtaagtccttatcccagcctacttatgtgccaaaagtggatttacaagaacatcctccttaaggactcacccgacaaagcatgtcatggcttcaatccatccaaaagcattatcacaaatgcatccgtgcacttgggaaaagcgtcactcttaaagatcgacatcaagaatttcttccccaccattcctataaactgggtgatcaactactttaagaagcttggatacgcagacaacgtcagcttttacctctcagcactatgctgttacgaaaaaaaattagctcagggcgctgccacctccccctatctttctaacctattacttaagaagctggatgatcgtctggagaaactgtccaaagcctaccatctcagctattctagatatgccgatgatatgtgctttagcggggactatatcccgtacaacattatcaacattatcacggagattatcgagtcctatggactcttcgtcaacaaggataaaactagcttgctgatcaatgccaacaagaaaataataaccgggatttctgttagtggcgaaaccctgtctctgcctcgggagtataaaaggaagctgaaatcagatctccacttcatagaaaaatacgggtacatcagccacattagtcgaaagaaaataaaggaccccaattatctgttgtctatcttgggtaaggtgaatttctggctgcagatcgaaccatccaatgagacagccattaatggaagggatatgctgctggctatcctgcgcgaacactga

SEQ ID NO: 9259 - RNA, 1035 nt, synthetic construct
  source 1..1035: mol_type = other RNA
atgaaaaaaaatgagaatgaactgaccctctggatcgacttcctgatagatagagggatcagttccgaacagatagccctgtatgtcccctacattagcaagctcttggaaagcaatctgcctatcatttttgagaaacagcaccttgctcatctaattgggatcgatgagaatactctcaacaagatgacgtcctctccacactcgttctatcgaaactttaacattccgaagaaaaggggaggctttagagagatttttagtccttatccctccctgcacatgtgtcagaagtggatatacaagaacattctgctgaatgacaagccacacaatgcatgccatggctttactccatccaaatccatcattacaaatgccgccatccatataggccaaagctcactgctcaagattgacctcaaaaacttctttccaagcattcccatcaactggataatcaactttttcaagcggaaaggctacacacataatgtgagtttttacttagcctcactgtgttgcaataacaaggtaatggcccagggcgcaccgacctcaccttacctttcaaaccttctgctgaaagggttggataaacgcttatacaacttaaccaagaagtacaacatcaaatacagtcggtatgctgacgacatgttcttttctggaaactacatcccctatgatttcattcgcgtgatcactaatatcatagaagactacggtctgaacatcaataaagataagacagcgttccttatcaacgcaaataagaagatcattaccggcatttctgtgaacaataatacactaagcctgcccagggagtataaacgcaaattgaaaaatgagttgcacttcatcaagaagtatggttacttgagccacattaacaaacaaaagatcaaggatcccaattatctcttctccattctcggaaaaataaacttctggcttcaggttgaacctatgtctaagaaagctatcgagagcaagaagctgatcatttctatcctgaagatgggggcttga

SEQ ID NO: 9260 - RNA, 1032 nt, synthetic construct
  source 1..1032: mol_type = other RNA
atgaacatgaaaaaaaatacgctggagcactggagcgagttttttcacgatcgaggtatctcctatgagctgttcgaaatttacctcgtctacattcagaagctgatcagcaccgattcacccatcatctttgagaaggaacatttgagtcagctcctgggcataaacgacagcattctgaataagatgatcaactcccctaataatttctatcggaagttcacaatcccaaagaagaggggcggcgatcggaatattgtggcgccgtacccttctctgctgtcctgccaacactggatctacaaaaacattctcttaacagagcagcctcactattcgtgtcatggattcactcccaaaaagagtatcatatcaaacgccaaaatccatatcgggtctaaaaccctgctaaaaatggacctggaggattttttcccttccattccaattaattgggtggtccgctactttcagcaaagaggctatgcaaacaatgttagcttttatctggctgctctgtgctgttacgacgaacacttggcacagggcgccgccacaagtccgtatctttcaaatctgttactaaagggtcttgatgagagacttacaaacctctgcctgaaatataatctgaagtattccagatacgccgatgaccttacgatcagcggagaatacgttccccatactttaatcgaggtcatcaccgagatagtatctgactacggactgaaagtgaacataaaaaagaccgctctcttgatcaacgctcgcaagaagattattactgggatcgccgtaactgaagacaatatacgagtgccacggtcttttaggagggaacttaagaacaccatgaatttcatcctgaaatacgggttcatttcacacgtgacccaattgaagattaaggacccctactatctcttctctctaattgggaaagtgaacttcttgatgcaggttgaaccagagaacaaaaacgcacgtgaatggaagagtacactcattaatatactcaagagccagtga

SEQ ID NO: 9261 - RNA, 1026 nt, synthetic construct
  source 1..1026: mol_type = other RNA
atgaacaaaaatgatatccatagttggttggtcttttttcaagaccgaggtctaagccacgacctgattaacaagtacattccctatatcatcaagttgcagaagaacaacatccctgttattttcgagaagcaacacctatctcatctgattgggatccaggagcgggtcttagataaaattatcatcagccctagtaagttctatagggagttctctattcctaaaaaacagggcggcgtgcgggatattaagtcaccatacccctccctcctcatgtgccagagatggatctacaagaatatcttactgaaggattccctgcaccccaattgtcatggtttcacccctagtaaatccatcttcacaaatgcaaacctacatacaaacaagaagtgcattctcaaaatggacctcgaaaatttctttccctcaataccaatgagctgggtaatcaactacttcatgaaaatcggctatactcataacgtgtcatttagccttgcctctatttgctgttacgatcgccacctggcgcagggagcagctacatcgccgtacctgtccaacttactgctcaagaagtttgacgctagaatagaggccctctgtgtcaagtataacgtgacttacagcaggtatgccgacgacctgactttttctggggagtacatacctcaccggttctcatccattgttgaagagataatcgagaattacgggcttacccccaataaagaaaagacccgtctcttgataaatgctaaccagaaaatagtgaccggcatctccgttagtggagagaatattgcacttccacgcaagtacaagagaaagctgaagaacgaaattcactttgtgattacgtacggctatgtcagccacatcaacaatttgaagatcaaagaccccaattatcttctggccctgttgggaaaagtgaacttctggctgcaggtagaacccaaaaatccactggccctgcgagggaaagaatatctgtctaaagtgcttagggataaatga

SEQ ID NO: 9262 - RNA, 1014 nt, synthetic construct
  source 1..1014: mol_type = other RNA
atgaaaacgaacgagtggagggcttactttgaagaccggggagtgagcacagccagaatcgataagtacgtgtcttatattgagtgcctcagcaagaagaatcagcctgttatctttgagctggaccacctcagtagtttactgggtatccagatcgagtatctgtcaaagatgattgcctcttcacactctttctataggaaattcagtattcctaagcggagtggcgggaaaagagagattcttgcgccgtacgagtccttgttgacatgtcagcagtggatcctgaaaaacatcctcaaaaacattcctctgcattccgccgcacacggcttcagatcagggaagagcataaagaccaatgccctggcacatatcaatggaaaggcactgctcaaaatggacctaaaagactttttccccagcatccccctgtcttggatcattaagacctttcaggacataggctatgcgccaaatgtagcctactacttagcttcattatgttgctacgatgagaaactggcccaaggggctgctacctccccagctctgtccaatatcgtcctgacaagcctagacaagcgtcttgatcgcctcgccaaaaagtgctctataacttatacccgatacgccgatgatctgactttcagtggggaacacatccactcaagctttagcaagcttgtgactaagattgtcgacgaatatggcctcgttgtgaacacggacaagacacgcctcaaagtgaaaaacggcactcgcattgtgaccggtatcggaattcttaacggcaggttgtccatcccccgggaatataagcgagaactgaaaaacgagatattcttcatcaggaaattcggatttgtctcgcatctctcgaacaaaaagataagcaaccccaattacattaactccttgttgggtaagatttccttttggctatacatagaaccagataatcaacttgcaattgactctcataagctggtactgcagctgatcaatgattga

SEQ ID NO: 9263 - RNA, 1014 nt, synthetic construct
  source 1..1014: mol_type = other RNA
atgacacttctcgagtggaagaactactttcaggacagggggatcgagccagacctggccaagaaatatctggcctacataaaaggactgcagaagaacaattgccccgtgattttcgaactcgatcatttatcacaactcttggagattgacctgaattacctggcgaggatgatctctgcatccggcaacttttatcgtagctttcacatccctaagcgttcaggaggtgttcgagaaatctgtgcaccacaccatagcttactaagctgccaaaggtggatcctgcagaacatcctgaataacatcgatttgcaccctgcggcccatggattcactgctggaaagtccatcaagaccaatgcaatttcgcatctcaattccagcgctattctcaagatggacctggagaacttcttcccatctatccctcaggcttgggtcatccaggtgtttaaagagttcggctatgcgcccaatgtgagctattatctgtctgccctgtgttgttgcgacggggcattggcacagggagccgctaccagtccggctctgagcaatcttattcttagatcactggataagcgcctgtccaagctcgctagaacatgcagcctgatatacacacggtatgccgatgatcttacgttctcaggtaaacgcatccactttagtctcccaatcaaggtggaagagattgtcaaggagttcgggctaaaagtgaacacgaaaaaaactcgattgaaattgactcacggcgcccgcatagtaaccgggatttgtataacaaacggcaagctgtctgtgccccgggaatacaagcgcgagattaaaaacgacctctttttcatacggaaatttggttacctgtcccacattgccaacagaaaaattaagaatcccaactacctttcctctttacttggccggatcagtttctggctattcgttgaacctaccaatgagtttgccatcaagggcaggaataccgtcctcgaactgatgagaagttga

SEQ ID NO: 9264 - RNA, 1014 nt, synthetic construct
  source 1..1014: mol_type = other RNA
atggagtcgacacaatggaggtcttatttccgagatcgcgggatacctaacgaactgaccaaaagctacgtctcttatgctggcagcctccagaaaaagaacttacccgttatctttgaattcgagcacctgagccttctgctcggattaaacattgagccactggcacgcatgatcgcctctccttcaagcttttacagggagtttgcaatccccaagcggagtggcggaaaacgcaatatttgcgcccctcatgagagtctgcttctagcacaaagatggatcctgaagaacattctggaaaagtccgaagtgcacgtagcagcgcagggtttcttgcccgggaggagcattaaatccaatgccctgatccatctgaactcgaagaatctcttgaaaatggacttacgggatttctttccgtccatcccaatgtcctgggtaatcaatgtttttaaggattgtggatacgccccaaacgtcgcctactatctggcctctttgtgctgtcactcagaggctctcgcacagggtgctgcgacgtcacccgctctgtctaatattattctaaagagcttcgacaagcgtcttactaggttggccaataagtgcggcctcaaatattcacgctatgcagatgacctgaccttctcaggggagactattcatcacagttttagtggcgctgtggagaagatcactgctgagtacgggctggccgtgaataaggagaaaacacggcttaagataggccacggagctcgggtggttaccggcatcagtattcagggagggagactggccgtgcctagcaaattcaaacgtgaactccagaatgaggtctttttcattcgaaagttcggtctgcttagccatctgtccaacagaaagatatccaatccaaactacctgaactctctcctcggcagggtgtccttttggctacacatcgaaccggaaaacgaaaaagcccagcttgcgagaaaattgatcatggacacaatgaagatatga

SEQ ID NO: 9265 - RNA, 1014 nt, synthetic construct
  source 1..1014: mol_type = other RNA
atgaatatttccgaatggagatcatactttctggaccggggaatcaaggaagacctcctggggatttacctgtcatatattcgcaagctcaacaagttcaaggttcctgtgattttcgaactcgatcacctcagctcactcctagggatcaatgtgaaatttctgacacgcatgatctccagtccagaggacttctatagaaatttcctcatcccaaagagatctggcgggaaacgagagattagtgcgcctcaccagagtattctgtattgccagcgttggatactcgtgaatatcttaacccatattcccatccactattccgctcatggcttttgtgctggcaaatccatcaaaagcaatgcacagatccaccttaacagcaagtcccttctaaagatggacctgaaagattttttcccctctatacccaaaagctggataatcaacattttctcagatttgggttacgcgcccaatgtgagctactacctggcaagtttatgttgctataacgatcacttggcccaaggtgctgcaaccagccctgccctgtctaatatagtcctgaggggattagataacaggctgcagtcgcttgccgataaatgcggcttgagatactctcgctacgccgacgacctgacattttccggagataaaatctccgtaaactttccagaactcgtcgaggggatcatacataattatggacttaccgtgaacaaggacaagacgcggctaaaagccaagtttgggagcaggatagtaactggcgtctccatctcaggtggctctctgagcgttccacgggaatataagaggaacctgaaaaacgagattttcttcattcgaaagttcggcatcctttcgcatgtgagtaagaaaaagatcaagaaccccaactacatttattctttgctgggaaaactggctttttggtcttacattgagccggagaatgaataccctatcgaggccaaaaagttcctggttgagttgatcaaggactga

SEQ ID NO: 9266 - RNA, 1011 nt, synthetic construct
  source 1..1011: mol_type = other RNA
atggagtgcacttggaataactatttctcagatcgcggcttaagtccggacattattaagcagtacgtagcgtatgccaataacctcgagcgaggtaatctgcccgtagtgttcgagatcgagcatcttgcaaacctgatcgggatcaagtaccctgaaatcaacaatattatcttcggagccaagagtttttacaggaccttcaagataccaaaacgacgcgggggctgcagagttatacagagcccatatccaagcttactcagctgtcagaagtggatatacaacaacattctcaagaaagtccagacacatccttgcgcctatgcatacaaggaaaacatttccatcattcacaatgcgtccatccacctaaacgcagattttgtgttaaagttggatttgtcggacttttttcattcaatcccaaaatcctgggtggtgaattttttttccgaactgggttatgccaataacgtctccgtggcccttgctagcctgtgttgtgttaatgacagcctccctcaaggcggcgtgaccagtccagctctctctaatatattggtcagctcactggatgagcggttgaacaggcttgctcacacgttcgatctgtcttactctagatacgcagacgacatggttttttccggcaagcggattcccgccaccatcattaaatatgtgacaggcattatcgagtcttttggattcgccatcaacgatgagaaaacaaaactactcatcaaggaacggcagaaaataattactgggatcgacactaccggacccaaactgacacttccccgcaatcggcgtagagaaattaagaaagccatgttcttcatcaacaagcacggactggtcgctcacatgaacaatgagaaaatcaggaaccctaattacctcctgtcactggaaggtaaaattaggttctggctgcaaatagaccccgaaaataacgaggctaagaagttcctgggggacatcattagaatcaagctgaattga

SEQ ID NO: 9267 - RNA, 1011 nt, synthetic construct
  source 1..1011: mol_type = other RNA
atgaacaaaacgtggcgacattattttatcgataggggcattaatgatgaccttttagaccagtatgtgatttacgccgataatttggagaaaaatggtcttccagttattttcgaagttgaacacctgagcaacttagtcggcattaagtaccctgaaatcaacaacctgatttttggaaccaagtctttctatcgggagtttaaaatcccaaaaagacgcggcgggtacaggactattcagagtccctaccctagtctgctctcttgccaaaagtggatttacgacaacatattgcagaaaattgagacacacccatgtgcttacgcctacaaaaagaattgcagcatcatcaaaaacgcaagcgtacatctaaatgaaaatgtggtcctgaagctagacttgtcagactttttcatgtccatacccaaatcatgggtgattaacttcttctcaaatatcggctatagcgggaatgtatctatagccctcgcctctctctgttgcctgaatgacagtctgcctcagggagcagtgacatccccggcactgtccaacattctggtgagctcccttgacgagagattatatagactggctagcgtgttccagctgaattatactcggtacgccgatgatatggttttctctggaaagaagatttctaagtcgatcatcaagtatatcgcggagatcatagaatcctttggatttaccctgaacaccaagaaaacaaagctcctgatcaaaaaaaagcagaagatcgtcaccgggatcgacattacggggagtaaacttacactgccccgtaacacccggagggaaatccgaaagactatgttcttcataaagaagtacggcctgatctcacacatgaacaatgagaagatcaagaatgtcaactaccttagctcgctcgagggtaagatacgcttttggttgcaggtggatcccgagaacatccaagctaaagagtttctccatgatctcattcgcatcaaattctcctga

SEQ ID NO: 9268 - RNA, 1014 nt, synthetic construct
  source 1..1014: mol_type = other RNA
atgaataataactggcatgattatttagccgatagaggtctgaacaatgcacttatcgaagagtacctggcttatattaatcgtctggaagagaattcgatccctgtgatatttgagaatgaacatctctccagactcctcggcattaagtaccctgaattcaacaagcttatttttgggactcacaagttctatcggaagtttaaaattcccaaaagaaagggaggctacaggatcattgcaagcccttacccaagtctgtttagctgccaaaagtggatatacaataacatcctcaagaagattcccacacacgtttgtgctcaggcctataaaaaggaccatagcattatcaagaacgctaacctgcacctcaataacgacgtgatgttgaagatggacatcaacaatttcttttcggaaattccgattaactgggtgatcaagctgttttccgatctgggatattctaaaaatgtttctttcgccctggcatcactttgctgtttggacggcgtattgccacaggggggagtgacttcccctgctctaagtaacattctaatgctgagcctggataacaggcttcataaattagcggagaagttcgacttaatttacacccgctatgccgatgatatgtttttctccgggaagaaaatatccagcaagctgatcaattacatcaagaatattgtcgaggagtataacttgagtatcaatgaaagcaagacgaaacttctgaccaaagagaaaaggaaaatagtcacaggcatcgacacctcatcctctaagctaacactcccacgagccacccggcgcaacatcaaaaagtctatgcacttcatcattaagtacgggctcatcggtcacatgaacaatgtcaaaataaaaaaccccaactacctgctgtcactggagggcaaaatacggttctggctccaggtggaacccgagaatcaggaagccctgtacttcctgaacgagatcttgaagatcaaaaaactttcttga

SEQ ID NO: 9269 - RNA, 1017 nt, synthetic construct
  source 1..1017: mol_type = other RNA
atgaaaaataattggaaggacttctttgagtcccgtggaatcaaggacgattttattgacaactatctcaagtacatcgagtacatcaacaaaaatgagataccggtgatctttgaggttgagcatcttagccacctcattggcatcaaataccctgaaatcaacaatatcatctactcaccctctgacttctacagaaagttcgaaattccaaagcggaatgggggcagcagggaaatttctactccctaccccaccttgatgaaatgccaaaggtggatctatgaaaacatattgtcaaagatcccgactcatcagtgtgcttatgcctataagaaagaccactccatcataaagaatgccagccagcacgttaacaacaagaacatcattaagatcgatctgaagaatttcttcccatcgattcctattaactgggtgattaacctttttgtcaagctgggatactccaataacattccttttattcttgctgcattgtgctgtaatgagaattgcttacctcagggggccgtaacaagccccagtctcagcaatatcctgctgtatagtctcgatgacaggctgtttaaattaagtgaaaaactgggcctgacttatacaagatatgcggacgatatgatattctcagggaagcacgtgtccccaaaaattatcgagtacatccgccacatcatcgagacatatggtttcgagctgaacaatagcaagaccaaaatactatctgcagacaaacgcaaaataattaccggcgtcgatatctctaacaatgagctgaaactaccccggcgcaccaagcgagaagtgcggaaggtgatgttctttattaagaagtacggtctgatgaaccatatgagtaatctcaaaatcaagaaccctaattaccttctctccttagagggaaaaattaacttctggctgcagatcgaaccaacgaacgaggaagccttgtcatacagagatattatacgtgtcctgaaaaagtggatttattga

SEQ ID NO: 9270 - RNA, 1017 nt, synthetic construct
  source 1..1017: mol_type = other RNA
atggagcagaactgggaagagttttttaaaagtcgcggcatcaaagaaagttacatcgagttgtacctccagtatattaagtctatcgacaagaacgacttacccgtgattttcgaaattgaacatctaagccacatgatcggcattaaataccctgagataaacagcctgatttatggaaccaagaatttctaccgaaactttaagatacccaagcgaaacggcggcgttcgcatcatcgatagcccatatccaagtctcatgaaatgtcaaaggtggatttatacgaatatcctgcttaagctgagtgtccaccactgcgcctacgcctataagaaggacacatccattgtcaaaaatgcttctcagcacttgggaaatgagtgcattttgaagctggacatcaccgacttcttttcttcgatcaaaattaactgggtgattaacctgttctcacgcctgggttattccaagaaaatctcttttagcttagcggcactgtgttgtcttcataataagctgccccaaggggctgtgaccagcccttgcttgtcgaatatattactttactcactcgatgagagactcttccggctgtcagttaaacttaagctgaagtatacaaggtacgccgatgatattgtattctcaggagacaatattcatcccaacactatcatctacatccgttccattattgattctttcggctttagcatcaacgagagaaagaccaaactcctgaacaataagaagcggaagataattactgggatcgacatctctaataataatctcagcctgccgcggaagactaaaagggagctaaggaaatccttccattacatcaacaaattcgggttgatagggcacatgaactccctgaagataaagaacccaaattacatccagtcccttgaaggtaaagtgagattttggctgcagatagaacctgataataaagaggcactagactatctctttttgctgaagaaactcaacctgctgacaatctga

SEQ ID NO: 9271 - RNA, 1005 nt, synthetic construct
  source 1..1005: mol_type = other RNA
atgagaagagaatgggaggatttctacctcgagaaaggcataaacaccaatttcattagcacctatcttgactatatcaaagcactggagtcccgcaatattcctgtgatttttgaggtagagcacctctctaaattaatcggaatcaaataccctgagattaatgacattgtgttcggtacaaagtcgttctatagggaattcaagattcctaagaaaaagggcggatatcggaaaatctccagtccctatccatctttacgaaagtgccagacctggatacacgaaaaaatactttattctctgcgaacccataaaaacgcctttgcatacaaaaagggaaaatcaatcatcgacaatgccgagcagcatctaaataaccactttctcctcaaagtcgacattaaagattttttctccagcatcccaattaattgggtgatcaaactctttgatagcctaggttacgcgaagaatgtgtcctacgccctggctagcctctgctgtttgaacggctgtcttccccaggggggcatcacttcaccctccctgtcaaacattctgctgtatccactggacgaaaggctgtccaaattggcactgaagttcaacttgaaatacagtcggtatgctgatgatatggtctttagcggggaagctatcccgtctaagttcatttcttacgtcactgacattatcgagagttacgggttcattctgaacaaggaaaagacgaaattgctgaataatactaagcagaagatcgttacagggatcgacgtgtcaaaggataagctgcaacttcctcggaagacaagacgcgagataaaaaagatcatgtactacgtgaagaagtatggcatctttagtcatatcaacaacgagaagatcaaggatccaaactacattaaaagcttagagggaaagatacgtttttggctgcaggttgaacccgacaaccaggaggccaggagctacatagaacacatcaatcaaatgaagtga

SEQ ID NO: 9272 - RNA, 1029 nt, synthetic construct
  source 1..1029: mol_type = other RNA
atgaagaagaggaaagagctaactaccaaactctgggaggattatttcttggatcgggggctgagcagtgagctgaggaagacctaccttgaatacataaacttcatctccgagaaggacttaccagtgatctttgaaactgagcatctctcgaatctcattgggattaactatcagtcactgaacagcatggtgaacaatcctgattctttctaccgcagtttcaagattaaaaagaaaagggggggctcaagagaaatctccgctccctatccgtctcttatgatgtgccaaacctggatctatgagaatattcttgtggactatcctatacaccactgtgcacaggcataccggtctaagcacagtatagtgaccaatgctaaaattcacctgggctccagaacaatcctgaaaatggacctcaaggatttcttttctagcatccctatcaattgggtcatacagttctttagcaacctgggttaccccaataatctgagctatgcattagcctccctgtgctgcttagaagattgtctgccacagggcgccccaacaagtcctgccttgtcgaatatcttgctaataagcctcgatcggcgactgtatcggttgggaaaaaaatacaacctctcctacacaaggtacgccgacgacctggtcttttcagggagttacatcccacataaatttatcaaggtggttgccaatatcgttacaaacttcggtctgaccattaacgacgagaaatcacagctaataatcggagacaagcaaaagattgtcacgggtatttctatttcaggctccagcccctgtatcccccgcaagactaagcgcgagatcaagaaggagctccatttcattaaaaagtacggactggtgtctcacgtaggaaagatgaagattagaaacccaaactatctggcttccctggaaggcaaaatccgattctggttgcaggtagaacccaacaataaatttgcgctcgaatcccttctttttattagaagcaaacgtgcttga

SEQ ID NO: 9273 - RNA, 1023 nt, synthetic construct
  source 1..1023: mol_type = other RNA
atgaataagaccctcaaggaatggaagagcttttttgaggatcgcggcattgagctagagctgattaaggaatatctggaatacatcgatcggctggaaactaatgactgcccagtcatattcgaagtggagcatctctccaaattgatcggcatcaactatgaggacctgaataaaatgatcttcggggagaaatctttctaccgcacattctatatcaaaaagcggtctggtaataaacgggagattagcgctccctacccttcactggccctgtgccagttgtggattaaggaaaacattctatcactggataagtctcatttctgttcccacagctatactaagaagcgcagcattctgtcaaacgcaaaaatccacatcaactccaattcaatactgaagctggacattagagacttcttccctagtattaagataaactgggtgatcaactactttagctcactcggttattccgaaaatgtcgcctttgccctggctagcctttgttgcctcaatgatacgcttccacagggaggaagaacctcgcctgacttatccaatctccttttaaaatccctggacaagaggctgtacaggctggccaaaaaattttcctttaagtacaccaggtacgcggatgacatcacattttctggcgatgacattcccgcaattttcataaactacgttagtgacatcctggtgaattatggctttgtgttgaacaacaacaaaattcgactcatcaagggcgataagcaaaagattatcacagggctcgacgtatctggagagaaggttcgtttacccagaaaaatgaggcgagatcttaagaagcaagtgtactacatcaagaattatgggctattgagtcacgtctctaaacagaaaatcaaagatccgaactacatccagagcctcttgggaaaactggctttctggatgtatgtggagaagagtaacaaagaagtaaaagggatgtatgagttcataaagagtcttaacagagacaattga

SEQ ID NO: 9274 - RNA, 1023 nt, synthetic construct
  source 1..1023: mol_type = other RNA
atgaacaatactctcaaggaatggaaacgcttttttgaggatagggggatcgagcctcggataatatccgagtatttaaagtacatcgacaaactcgaatccagcgggtaccctgtcatttttgaagtggagcacttgtccaagcttataggaatccgttatgaagacttgaataagatgatcttcggctctgagagcttctatcgaacgtttaaaatcaaaaagcggtcaggagggaaaagagaaatttccgccccctatccgtctctggcactgtgtcagtcatggattaaggagaatatactagagctcgacaagtctcatttctgtaatcattcctatgcgcgcaaaaggtccatcgttacaaatgctaaaatccacgtaaactctaacagcgttctgaagctggacattagagacttcttcccaagtatcaagatcaactgggtgattaactatttcttttctctcggctatagtgagaatgtggccttcggtcttgcctcgctttgctgcctgagcgatagtttgccacagggtgctcgtacttcgccagatctgtctaacctgctgctcaagtccctggacaagagactgtataggctgagttcaaagttctcctttaaatatacccggtacgccgatgatattaccttttcaggcgacgacattcctgtagtctttattaagtacgtcaaggatatcctggtggattacggcttcgaacttaacgagaataagataaggctcatcaagggtgagaaacagaaaatcgtgacaggactggacatcagcagcaacgatatcagattacccagaaagacccgacgcgatttgaaacgccaagtgtactacattaggaagtacggactcctaagccacgtttctaaacaaaagattaaagaccccaactacattcagtcacttctgggcaaattggcattctggagctacgtggagaaaaataacaatgaggctaaggaaatgtacgaatacatcaagagtttaaaccggaatgggtga

SEQ ID NO: 9275 - RNA, 1119 nt, synthetic construct
  source 1..1119: mol_type = other RNA
atggctcttaagtcccctatctttcgcgaacgcaatctgaaagattttaacgcgatgcacagccttgagggatcgttctacaagtcattccccatgaaacggtcgcaggagatcaaaaactggcaggtgttttttgcagacaggggggtcagcgagagtctcatagagcaatatatgccatatgttgagaaacttctcgtagctgacttgccaatcattttcgaactcgagcacctctctaagctgatcgggatcgaaatttccgaactgcataagatgattggaaattcctccaaattctacagggaattttctattgccaagaaacgggggggccggcgtactgtttatgccccatatcccagccttctgatgtgtcagacgtggatttatgagaatattctgaagtctaggacagtgcatttttgctgtcacgcatatagacacaagcgctccattataaccaacgctacacctcatttgaacaagagagcaattttgaagatggatatggagaacttctttccctccatacccattaactgggtcatcagattcttctctgatctgggctactccaataacgtggcatactacctggccgccatctgttgcgttgaaggttccctgccccaaggggccagtacaagccctgcgttgtccaatatccttctgaaacatctcgataaccggctgtatcagctgagcatcaagtacaacctgtcatacacccgctacgccgacgacctaactttctcaggcgagtacatcccaaataggttaatcaacgtaatcagcaacattgtgagcgactgcagcctgagtgtcaatgaacgaaaaacctcactgataataggcgataaacaaaagatcgtgaccggaatttctgtccagggcgaaaatttaagcctgcctagagcttctcgacgtcagatcaagaaggagattcattacatcaaacagtatggactagtgtcacacatcagtaagttgaagatcaaaaatccgtactatctgcactctctcgagggtaagctaaggttttggctccagattgaaccggagaatgaaagtgtgctggagaacttaaatttcatcctcgagcttaaagacatatga

SEQ ID NO: 9276 - RNA, 1032 nt, synthetic construct
  source 1..1032: mol_type = other RNA
atgaaaaagaaacaggagctcgagatcaagtcctgggagttatttttcatcgatcgcgggatcagtgaacatttaattgcacagtacatgccttatgtaagaaacttgacacaagccaacctgcccgtcattttcgaaatagaacatttgagcaagctgatgggcgtggaactaagtgagcttcagaagatgattgcaaacccccgaaggttttatcgggaattctctatccctaagaagcgtggcggtagaagacccgttagcgccccctacccaagcctgctgctttgccagacatggatatatgagaacattctcaaagctatctctgtgcacttctgctgtcatgcctacatcgagaaaaagtctataatctccaatgccactccacacctcggaaagaccgctatactcaaaatggacatggaagagtttttcccgagcatcccgatcaattgggtgattaacctgttctcaaacctgggatacgctcacaatgttagttattatctggccagcctatgctgtcttaatggggtcctgccacaaggagcatccacatctcctgctttgtccaatattttgctgaaacaccttgactcacgcttgtataagctcagcaagaagtataagctggcgtacacccgatacgcggacgatctcactttttccggagactatatcccacataaacttatcgatgtgattagtgacgttataacagataccgggctctctgtaaacaagcaaaagacgagcctcataattggcaacaaaaagaaaatcgtgactggtatcagtgtgcagggcaataatctgaccttaccccggtcatcaaaaaggcagattaagcaggagatccactacattaaacagtacggcctgatttcacacatcagcaaactgaagattaagaatccttactacatccaatccctggaaggtaaactacggttctggctgcagctggagcctgataacgaatttgcatcggagtctcttgcctttatttccaaactgaggaaggtctga

SEQ ID NO: 9277 - RNA, 1038 nt, synthetic construct
  source 1..1038: mol_type = other RNA
atgaacagcaagaagacggaacaagtggtcaacgagtggaaattctatttccttgaccgggggattagcgatcacctgattccacagtatttgagctatgtggagaagctcacaaatcagcagctcccaattattttcgaggtggagcatctgtcagttctaatcggcattgaatatggcgaactaaataaaatggtgcatgatagttccaagttttaccgtgagtttgaaataccgaaacgcagcggaggtaagagatgcatttcagccccatacccctctctcctgatgtgccaggattggatatacaacaatatcctcaaaagtcggaacttacacttttgcgcccatgcttacagaaccaagaaaagtatagtgaccaacgccaaaaaacatttgggaaagaatgccctattaaagatggacatgcaggactttttcccttcgattcctataaactggatcgtcaattttttctcgggcctgggatatagcgacaacgtggcatactctctggcgtccctttgttgtctgaatgacggtcttccacagggagcttccacaagccccgctctctctaacattctccttgtgtctctggacagtaggctgtataaactgtctaagtcctacaatatctcctatacaagatacgcagatgatatggccttttcaggcgattacgtcccccacaagatcatagaggttatcaccgatatcatctatgacttcggattcaaagtcaatgagaagaagaccaagttgatcattggggacaaacagaagatcgtaactgggatctccgttcaaggcgaattcctcactctgcctcgcaagactcggaggctgatcaaacaagagatccactacattaacacatttggcctggtgagccacataggtaagatgaagattcgaaaacccaattacttgttatcactcgaagggaagctgttgttctggaggcagatcgagcctaacaatgagtacgtacttaacaacctggaaaaaatttcctctatcaaatgggggctgtga

SEQ ID NO: 9278 - RNA, 1032 nt, synthetic construct
  source 1..1032: mol_type = other RNA
atgcccgactatcaaattcaaaaatggaagaccttcttccatgaccgtgggatatctgattatctgatcgtgcaatacctcccttatatcgaaacgctcgtgtcaaataaggttccggtgatttttgaaatcgaacacttgtcaagactaattggcgtcgacataactcaactgcggaagatgatcaactctcctcagcatttctatagagaattctccatcccaaaaaggcgggggggacatagaaaaatcctggccccatacccgagtctgttaatgtgccagacctggatatatgagaacattctcaagtctattcccatacacagttctgctcacggatatgtgaaagagcgctcaattctcagcaatgccacaattcatctgaagcaaaatgccctgctaaaggtcgatctgaaagacttttttccaagcatctccatcaactgggtgattaatctgttttccagtttaggctattccaacaacgtaagttactacctcgcagctatctgttgctgcgatgagtgtcttcctcagggtgcagctacttcaccatacctctccaatattctgctggtaaacttggattacaggttgcataagcttagctctaagtaccacctaaattatacacggtacgccgacgacttggttttctctggtaaatacataccccacaacctgatcaacatcatcagctccattatcgcggattttggactgaacgttaaccaggccaagacaagtttaatcatcggcaataagcagaaaatcattaccggcctgagcgtccagaaaaacgaacttcagcttcctcgcagcaaaaaacgacagatcaaacaggagatctattatatcaagaagtacgggcttattagccacatatccaagctgaagattaataagctcaattaccaccagtccattgagggcaaacttaggttttggctccaggtggagcccaacaataagttcgcactggagtcattgaattacattcactcgctgcagaacatcctgataaattga

SEQ ID NO: 9279 - RNA, 999 nt, synthetic construct
  source 1..999: mol_type = other RNA
atgaaaaaaatttctctgcgcatgcaagaatgggagctgttcttcaaaaataaaggagtgtcgacggacctgattaacatctatctgccctacattgagtacttggagagccagaatcttccggtagttttcgaagcagaacatctgagtaacttacttggtattaagccagtcattttatacaagatggtgagttccccatcgtctttttaccggtcctttgatatcagcaagaaaaagggaggcaagcgacgtatctcttccccttaccctagcctcctaatttgtcagaaatggatctatgagaacatcctcatgggcttaaaaacacactattgcgcccatggttacatcaaatccaagtcaatcgtgtcaaatgccaaggctcacctgaatgagagagtcgttctcaaaatggacctgcaagatttctttgacaccattacaatcaactgggtgattaacctcttctcaaagctcggatacgcgaacaacgtgagttatatcctggccagcctatgctgttttaatggggctttgcctcaaggagccgccacatctccagcactgtctaatattcttctggtgcaccttgacatgagaatttatcgcttggctaagaaatacagcctcacctatactcggtatgctgatgatctgacattcagcgggaactacataccccatacctttatcgagatcgtaaacgagataatagtggacttcggcttgaacgtcaataagcagaaaaccaagctaataatcgggaataagcagaagattgtcactggcattagtgtcaagaattcacggcttcagctccctaggaagacgaggagaaccttgaaacaggagctcttctatatcaagaaatatgggctgatctcccacatatccaagctgaaaatcaagaaacccaactacctggatagcctgcagggcaagttcgcattttggacttacgtggaaccccataatgaatttgccaggcacgtttga

SEQ ID NO: 9280 - RNA, 1029 nt, synthetic construct
  source 1..1029: mol_type = other RNA
atgaattcaatccacaaaaatcagattgcgtcctggaacagattctttgatgataggggcatatcctctcatctaacacagcaatacattgactacatcagtaaccttatctgcgccgacctgcccatcatatttgaactggaacaccttagtaaacttacgggaattaatatcgacacgctgtgcaaaattatcggtgacagcagccatttttatagggatttctccattgctaagcgccgaggagggaaacgtctcatttccgctccttatccaagcttaatgacttgtcagacctggatctatgagaacattttgaagaaaagtccatctcacttttgtagccacgggtactcacctaacaagagcattattaccaatgccaggcctcaccttgggaacaaagcaatcctgaagatcgacatcagagattttttcccctcaatatctatcaactgggtcatcaagtatttctcagacctgggatattccaacaatgtggcatattacctggcatctatatgctgtctaaataaagccttaccccaaggggctccgacatctcctgccctgtcaaacatcctgctgcgtggcctcgatcggcgcctgtacaagctgagcaagtgctacaatctgacctacactaggtatgccgatgacctcactttctctggagaacatctcccatataaggtgattagtatcatctcacagatcgtgtctgactacggtctgagtgttaacgagaaaaagacctcgttgattattggcgataagcaaaagatcgtaacagggctatccgtcagaggcgatacattacagctcccccgatcctcgcggcgggagattaagaaagagatttactacatacgcaagttcggcctcttgagccatatcagcaagctgaaaatacggaagaccaattacctggactccttggagggcaagcttagattttggttgcagatagaaccaggtaataaattcgtgcaggagagtctcatcctcattctgagcatcaaaaactga

SEQ ID NO: 9281 - RNA, 1029 nt, synthetic construct
  source 1..1029: mol_type = other RNA
atgaaaaacacccacaagaataaaattgcaggctggactaagttctttgatgaccggggggtttcaagtcacctctctgagcagtacattggctacatatctaacctgatatgcagtgacttgcccgtaatctttgagcttgagcatttatcaaagctgactggtatcaacatcgataccttatgcaagattatcggaaacagtaatcacttctaccgcgaattttcaattaataagcgcagaggcgggacaagactcattagcagcccatatccgtctcttatgacctgtcaaacctggatatacgaaaacatccttaaaaagtcccctatccaccactgctcgcacggatactctcccgataaatccattatcactaatgcccatcctcatctggggaagaaggccatcctcaagctcgatataaaagacttcttcccctccattccaatcaactgggtgattaaatacttcagcgacatcgggtattctaataatgttgcttattacctagcgagtatctgttgtttggatgaagcactgcctcagggcgccccaacaagcccaatgctgagcaacattctcctgaggagcttggatagacgtctgtataagctatcaaaaacgtacaatctcacatatacccgatatgccgacgatttgacattttccggaaaccatattccccataagatcacttctgtcatcgagcaaatcgtcctggactatggtcttctcgtgaacgaaaaaaaaacgtgcctgataatcggcgacaaacagaagattatcaccggcctatccgtgcggggtgacaggttaaagctgccgagggcatccagacgcgagattaagaaggagatttactacatacgaaagtacgggctgctgtcgcacatatccaagctgaaaatccggaaaacaaattatttggctagcctcgagggaaagctgaggttttggcttcaggtggaacctgaaaacaatttcgctcaggagagtctgactctgatcctgagcattaaatcatga

SEQ ID NO: 9282 - RNA, 1041 nt, synthetic construct
  source 1..1041: mol_type = other RNA
atgaccaaaagcgccgaggaaattaagaaggagatcaacgactggaagaagttcttcattgaccatgggctggagacaaatctcatcagtgactacttgagctatatctctagtctgatcgagaataatgcccccgtgatctttgagataaaacacctctcccaactaataggaatcaacacgagcgagttactgaaaatgatttactccccaagcgatttttaccgggaattcgaaattgctaagaggagcggcggaaaacggaaaatcagcacgccatatccatctcttaagaaatgccagaggtggatttacgagaatattttgaagaagcagtccgtctcgtcacatgcacacgggtacgttcaatctaagagtatcattaccaacgctacaatccacgccggcaaaaataacctgctcaagatggacatcaaagatttctttccctccatcagtattaactgggtcattgtgtttttcaagaaactgggatatgcacatgacatctcattctatctcgcgagcctgtgttgcctgaaaaaccatcttccccagggtgccgtgacttccccgtgtttgtccaacatcctgtctctttcattggataatcgactcggcaaactgtcaaagaagtataaggtcacttatacccgttacgcagatgatctttttttctccggcgataagattcctttaagcctaatcaagtccgttactaacattgtaacaagttatggtctgaacgtaaatactgaaaaaacccacctcatcagaacaagcaaacgcaagatagttacaggggtggctgtgcataacgaagtgattaccctgccccgcacctacaaaaagaatataactaacaccctgtaccacatcaaaaagcacgggtatttgtctcacgtctcaaaactgaaggtgagaaatccttactaccttgagtctttaattggcaagctgaatttttggcagcagatcgaacctgacaacaagttcgtggaaaaatctatatcgtacctcaaggagataaaaaagcagtga

SEQ ID NO: 9283 - RNA, 1041 nt, synthetic construct
  source 1..1041: mol_type = other RNA
atggccatgacagccgatgcaattaagaaggaaatctccaattgggaatccttcttcgtcgaccatgggattgaagagaaatttacttcggactatatgtcctacataagcccgctcattgcaaataacgtaccagtcatattcgagattaagcacctgagccagctgataggcattaacgctcccgagctcctgaaaatgatttacagcccttccaatttttaccgggaattcgagatcgccaagcggaccggaggcaaacgcaaaatttctaccccatacccctcactgaaaaagtgtcagagttggatctacgagaatatcctgaagaatcgcacaatcagcccgtatgcgcatggatatgtgcaaacaaggtctatcatcacgaatgctaaaatgcacgtcggcaagaacaacttactgaagatggacatcaaaaatttcttcccatcaatcagtatcaactgggtgatcgtgtttttcaaaaagttgggctatgcccatgatatatctttttacttggctagtctgtgctgtctgaataacagactaccacagggggcagtgacttctccctgcctttctaacattctcaccctcagcttagataatcgtttgggcaagctgagtgaaaaataccaggtcacatacaccagatacgcagacgacctgttctttttcggagaaaaaatccctcttagcttgattaagtcagtgactaacatagttacgtcctatggacttaacgtgaacattgagaaaacccacctgatcagggcttcaaagcgaaagattgttactggtgtcgccgtacataatgatgttatcaccctgcctagggcgtataagaaaaacatagccaacaccttttaccacattaagaagcacggttatctctcccacatctccaagttaaaagtgaaaaacccctattacctcgagagcctcatcgggaaacttaatttttggcagcaaatcgagcctgataatgagtttgtgaagaactcgatttcttatctaaagaagctgaagaaacagtga

SEQ ID NO: 9284 - RNA, 1050 nt, synthetic construct
  source 1..1050: mol_type = other RNA
atgaaaaacgaatttctgattagtccattgaggcagaatctcgatgattggaaagactttttcaatgacagagggcttgaagaatccttaatcaacgactacatctcatatatcaagcccctgctcaggaataacgtgcctgtaatattcgagattcaacatttgagtctgctgattggcgtgccagttatagagttgaaaaagatgatcttcagccctaatcatttttaccgcaccttcgagatacctaaaaagagtgggggctcccggcagatcacaacaccgtatccgtccctgaaaaggtgccaaaaatggatctacaacaatatcctgaagaagaatagagtccatcagaatgcccatgggtacgtcttgagcaaatcaattctctccaacgccgccacccatgtcaaccagaagaatatcataaagattgacatcaaggacttctttcccagcttgaaaataaactgggtcgttaactatttcaagagacttggatacagccacgatatttctttctatctgtctagtctatgctgtctgaataattctctcccccagggtgcggtgacttctccctatctgtctaacattctgactctttcccttgatcggaagttaagcaaatatgcagaaaatcacggtctgaattatagccggtatgccgacgatatttttctgtcgggcaactttgtgccactcgattgtttctccgaggttaaaaagatcattaagggatacgggtttaacataaataacggcaaaagccgattcctgaatgagaacaaacgtaagatcgtgaccggaatcgctgtgcacaacgaattcatgacgctcccccgaacaaaaaagaaggagctgatgaacgtgttttaccacattaagaagtatggctacatctcacacgtagcaaagatgaagatcaaaaacccttactacatcgactcacttatcggacgcttcggtttttggaaacagattgagccaaataataccttagtgattcactgcctcgcttacctaaagaacattaagtcgaacatctga

SEQ ID NO: 9285 - RNA, 1035 nt, synthetic construct
  source 1..1035: mol_type = other RNA
atgtcccatgaaatcgagcaggtgaaaacaccaaaacaatggcgtctgtattttgatgatatcggactgaaggaggagtacatcgagctttatattgacatcgttgaaaggctgtacaagaacaaaaacccaatcatcttcgagatagaacatttctctaaactggtgggcgtagaggtgcaaaccttattttcaatgatattcagcgaagagaacttctatcggcagttcgctatcaaaaagaagctggggggcgaaagaatcatcactattccgagccccagtctgatgcttgtgcagagatggatctataaatacattctgaagaccaagaaggtccattatgccgctcacgggtttaacttcaacaaatcaatcatcacgaacgccaaaatgcacgtcgggcacaaagtttttctgaagatcgacctgaaggacttctttccttcgattccaatatcttggatcgtgaactactttaatcaacagggctatccccccaaaatatcctactatctagcaagcttttgtactttcaatgaatgcttgcctcagggcgcaccaactagtcccatactttccaacattttgttctaccaactagacaagaagttgtacaagtacagcaagaagaataatctcacctataccaggtatgcggacgacctcattttttctggagactatattcctctgaaattccggaattttgtcatatacctcattaagcagtacggttttaaagtaaaccctaagaagacaagtctcaaagtgaatgccggacagaacattgttacaggcatcctgattaaggatgatatcttcgtgcctaaaaaatacaaacgcaagattagacaggagatgttctacatcaataagtatgacttactctctcacatctcaaacgccaatattaaggatccgaattacatttactccttgcaggggaggattaactttgtcatttccgtggaacccgagaatgaggaattcatacgctacaaaaatgagattgatcgaatcatcaagggttga

SEQ ID NO: 9286 - RNA, 1038 nt, synthetic construct
  source 1..1038: mol_type = other RNA
atgtcatatacgatagaaagtgtcaaaactccgaaagagtggcttatttattttgaggatatggggatcaaggaggagtacatcagtatctacattgagataatcgagaagctatacaaaaacaagaaccccattatcttcgaaatcgaacacttcagcaaactggtgggggtcgaagtcgacgtgctgctgtctatgattttcagcaagaagaacttttaccgacagttcaagattaagaaaaagcttggaggcgacaggctgattacagtgccttccccaagcctgatgatggttcagaaatggatttacaacaacatactcattgacaagaagatccactatagcgcccatggctttaactttaacaagtccattatcaccaacgcgaaaatgcatgttggacataaggttttcctgaagatagacctgaaagatttctttccatccattcctatcaattggatcatcaactactttaagcagcaaggatatcccccaaagattgctttttatttggcaagtctctgcacactggataattcattacctcagggggctcccacctctcccattctctcaaatatcctgttctataaccttgacaagaccctctacaagttcagtaagaaaaacaaccttacatacacaaggtacgcagatgacctcgtcttctctggtgactacatctctttgaaatttcgtaacttcgtgattttcctgatcaagaaatacggctttaaggtcaactccaaaaaaaccagcttgaaaattaacgccggtcagaatatagtaactggaattctcgtaaaggattccgtgttcgtgccaaagaaatataaaagaaaactgcggcaagagatgttcttcatcaataagtttggcatcttgagccacatagccacttcgaatatccgcgatcctaattatttatattccctaatggggcggatcaattttgtgctgtctgtggaacccaataatgaagagtttatagagtaccagaacaaaatcaaggccatcattaagaaaggctga

SEQ ID NO: 9287 - RNA, 1041 nt, synthetic construct
  source 1..1041: mol_type = other RNA
atgttatattccatcgaacctgttaagtctccgcaggaatggagaacatacttcgacaatatcggattaaaggaggagtatattgagatctatctccagatcatcgaggagttgtatagaaagaagaatcctatcatcttcgaaattgagcacttctccaagctagtcggcgtggaagtgaccgtgctgctgagcatgatttttagcaaggagaaattctaccgccagtttaaaatcccgaaaaaaaaaggtggcgagcgcactatcacagtccccagcccatccctgatgttggtgcagaaatggatctacaactacattctcatcaacaagaaaatccattactccgctcacggcttcaacttcaatcgatccataataactaacgctaaaatgcatgtagggaataaggcattcctgaagattgatctgaaagatttctttccctctatacctattggctggatagtcaattactttaagcagcaaggttatccacccaaaatcagtttctacctggcctcactgtgcactctcaaagatagtcttccacagggggcccctacatcgcccattctcagcaatattatcttctacaaccttgacaaggtgctgtacaagttttcaaaaaaaaacgcccttacctataccaggtatgcagatgaccttgtattcagcgggaagtatatcagtctgaagtttaggaacttcgtgatcttcctgattcggaaatacggatttcaaataaacagcaagaagacgtctttgaaggtcaatgccggccaaaacattatcacaggaatactagtcaaggacaccatttttgttcctaaaaagtataagcggaagctgcgacaggagatgttttacattaagaaatttgggctgctctctcacatagcgactaccaatattcgggacccaaattatgtgtattcactgatgggacgtttaaactttgtgttgaccgttgaacccgagaacgaagaattcatcgaataccagaattacatcaagaggattctcaaaaaagctgattga

SEQ ID NO: 9288 - RNA, 1020 nt, synthetic construct
  source 1..1020: mol_type = other RNA
atggacaaaaaggagatcaagaagtggacaaactatttcctggatgtgggcttaaaggacgaatatatcatcgagtaccaggacctgattaccaatttaattaagaatgacgtgccagtcatctttgagattgatcatctgtccaagttggtaggcatcaatgtcagcacgctgtacgccatgattttcagtactgaaaaattctaccggacttttgaaattcccaaaaagaacggaggcatgcgcactataacgacaccccataagtctctgaaactggtacagaaatggatacaccacaacatattgaaatacaagtacgtgcacaaatcagctcatgggttcgtcaaaaataggtccatcattaccaatgcactgatccataaggagagtaaagtgttcctgcaactagacatcaagaacttttttcctagtattccactgaactggataatcaactatttctacaagcttggctattcaaagaagatttcattttacctcgcaaagttgtgttgttatgagaatagcctatgccaaggcgcgcctacatcccctatactgagcaatcttgtgttctttgccctggataagaagcttaatcactatgctgacaagaacaacataatctacacaagatacgccgacgacatcgttttttctggtgataacatcccactctctttcaagaacttctgcatctttctcatcaaggatttcgggttcaaaatcaactcgaaaaagaccaaattgaagatcgaggtcggacagaatatcattgccggtatacagatcaaggattccgatatttgggttcccaaaaaatacaagaagaaactcacccaggaactgtattacattcagaagtatgggctgatttctcacatcagcaaacgtcgaattaaagacccgaactatgtttattccttactcgggaaagtgaattttattcttagtgtggagcccggaaataccaaatttctcgaatacaagaacctgctcaatagcatcattaaatga

SEQ ID NO: 9289 - RNA, 1020 nt, synthetic construct
  source 1..1020: mol_type = other RNA
atgacaaagcacatcgccaagaactggactaagtattttgaggatataggactgaaagacgaatacattgaggaatattccgaagtgatcaagaaactcgtcggaaacaatgtccccgtgattttcgaaatcgaacacctgagtaaactcgtggggattaacgtttccaccttatattcaatgatcttcagtacggagaaattctatcgttcatttgatattctccagaagaatggagagaatagacgaataacaactcccttcaaaagcttaaagaaggttcagaaatggatttaccagagtatactgaaacaaggctacatccataaatctgcccatgggttcgtagagaagaaaagcattattaccaatgcctccgtgcacaaaagctctaaagtttttctgcaactggatatacggaagtttttcccatctatccctctctcctgggtgattaattacttccataagctcggctattctaagaaactttccttttatctggctaaactatgttgctataaggaaagcttggcacagggcgctccaaccagccctgctctgagtaatttgatcttctttggccttgacaaaaagttgaacaactacgccattaagaacaatattctctacacaaggtacgcagatgacatggtattttcaggtaccgagatcagcctgaacttcaagaatttctgcatcttccttataaagaagtacggatttaaggtgaactccgaaaaaacacgcctgaagataaacgtcaatcagaatatcatcactggcgtccagattaagaataataacatctttgcgccgaaaaagtacaaaagggagctgattcaggacctatactacatcaagaagtttggtcttatctctcacgtctcgaaaaagagaattaaagaccctaactatgtgtacagcttgttagggaaaattaacttcgtgctgtcaatcgaacccgagaatctggagtttatcaactataagaacatcctgaagaacatcatagagtga

SEQ ID NO: 9290 - RNA, 1017 nt, synthetic construct
  source 1..1017: mol_type = other RNA
atgtctaataaggctaaagagtgggtggcctatttcaatgatgtgggactccaagaggcctacattaatgagtatgggctggtcgtggagaaactcctgaagaacaaagttcccgtgattttcgaaattgaacacttgtctaagctggttggtatcaatgtaaaaactctgtacagcatgattttcagccctgaaaagttttatcgggagtttgagatcccgaaaaagaaaggaggtactagaaagatcaacgccccctttaaatccttaaaaaaggtccagcaatggatctacatcaacatcctcaaagtgaagaataagaacgcatatgctcacggctttcttgacgggaaaagtatcatcacaaatgcacgcgaacacattaatagctccgtgtttttacatctggacatcaaagactttttcagcagtatacctataggctggattgtgaatttcttctattctctgggctatagcaaaaaaatatccttctacctgtcgcgtctgtgttgctttaaggactgcctggtgcaggggtcttcatgtagtccagcattgtccaacatactccttgtcaaccttgatcggaagttaaacaaatatgcgttgaagaacaaccttaagtacagcaggtatgccgatgatctggtgttttcagggaactacatttcactctcttttaggaatttctgcagctttttgatcaaaaactacggcttcaagattaacaccaaaaaaacacgactcaaagtcaatgcctcccagaatataattacgggcattcagatcaagggtaatatcttgtcagtgcctaagcagtataagagaaagctaaaacaggagatctactacattgagaagtacggattcatttcccatgttaacaagaagaagatcaagaacccagactacctcgctagtctgatcggacgcgtaaatttcgtcctgaatgttgagcccaacaacctggaattcaccgaatacaagaagatactatcgaatctgatccagtga

SEQ ID NO: 9291 - RNA, 1023 nt, synthetic construct
  source 1..1023: mol_type = other RNA
atgcaactctctcagtgggagacatattttcaggacattgggattagcgagcagtacattgacgaatacttggagattatttcgaaactctccaagaagaaattgcccattatcttcgagattgaacaattctccaaacttgtcgggatcgagctgaatatactgtacaagatgatattctcacccgagagcttctaccacgagttttatatcaaaaagaagaagggcgggcgtaggaagatagtggtccctttcccctcattactgctcattcaacgatggatttacaagaatatcctgctcaagtgcacatgtcacagcaacatccacggattcatacagaagaagtctatcatcactaacgccaaggcacatattgggggaagagatttcctgaaactggatcttcaaaacttctttccctctatcagtctgaattgggtggtgaggtattttaatgaactagggtacccgaagaagatatcattttacctggctcgcttatgttgctacgaagagggtctaggtcagggagccccaaccagccctttcttgtctaacctgttgttattttccctggacaaacgcctcaacaatctggcgaaaaagaatgagagcacttatacacggtacgctgacgatattgtgtttagcggtgaaaagatcaccaagggattttatagtctcgttgaaagtatcgtaggagatttcggcctcactctgaatgagtccaaaacccagctccggaaaaataaaacccagaacatcattacgggcatagttgtagtgaatgatggcattaaaatccctaagacctacaagaagaagatcagacaggagatctactatatcaacaaatatggcctgatgtcccatctgtctaaaatcaggaacaaaaacccaacatatctactttccttgcttggcaaaatcaattatgtcctttcagtggagaatgacaaccaggaatttaaagactaccagaagaagatggaaaacttcatcaaaaacccactgaactga

SEQ ID NO: 9292 - RNA, 1014 nt, synthetic construct
  source 1..1014: mol_type = other RNA
atgaaactcaagtcccctaaggagtgggagggctatataaagagtcgggggctggagccagaattagagaagacactttcagcatacgcatcaaatctgtcttctaaaaacttgcctgttatcttcgagctagaacatttgtccaacatattagacatcgaacatgacgagatgcgcgttatggtgaatgggagcgactggttttatagagagtttgagattcccaagcgcaggggtggtgtccgcgtgataaaagtgccctattccagcctgatgcacgcccaatactggctgaaagaggccattctcgacaaagaattcatccactctaaagctcacggcttcgctaacggaaagagcatcaaaagtcatgtggagtgccattgtcactctctccacattctcaaactcgatatcaaggattttttcccgacctttaaaaagagctgggtagccaactactttaaccagctgggctacgcaccgaatgtggctttctatctggctaatcttactaccgataccgtgagtcttgtgcagggagcgccaactagccctgttctgtccaacatcctttttcgtaaagccgatcgggcattaaataagatcgcggtcaaatacgaactttcttactcaagatacgccgacgatatgtgtttttccggcaattacattcccaagaagctgttgcggctcgttgagcgtattctaagatatttcgggttccagttgaattcgaggaaaacgtatctggggcctgtgaacggttgccacattacaggcattaaggtcgtcgacggccagttgaaggtcagtaggaagctgaagagagaactgcgcaaacaaatacacttcattgggaagtatggactgctctcacatgtgaacaagaaacggatccgagatgtattcttcgtggagcgactgatgggacagctcaatttctggaagtttatcgaacccgagcacgaatttccaatcgaagccctaagcctgctgaggcagaagctgtga

SEQ ID NO: 9293 - RNA, 1095 nt, synthetic construct
  source 1..1095: mol_type = other RNA
atgagagcggccaaccgaaagttatttgatcatttgctgtttctcctgacaaatatgtcgaaacagaaagagatcaacaaatggaagacattcttcaagaatcggggcctctcagaagagatttctgacaagtacattaactacatcacaaagctgcttgagaaccgaaccccaataatcttcgagtttaatcacttggcactgctgctaggaagacagcccttctacctcgcctccgtggttaatgcacctaacaatcactatcgtagcttcaagctgaaaaaaagaagcggcggctttagggagattaccacacccttcccggcgcttctcgagatgcaatactggatcttcaacaacatcctaaaaaacgttagtatcaacccttgcgctcacggctttgctcacaagaaatctatcattacgaatgccaccttacatgccggccagaatgaattgctgaaactggatctgaaagacttctttccgagcatcaacatcaatcgcattatttatgtgttcaagtccctggggtaccccaatgaaatagcattctatctcgcatctatttgttcctacgaagaatcacttccacagggggcccctactagcccagtgctgtccaacatcattgccaaacagctggataagcgcctgattaacctggctaagaaatacaacctcaaatttacccggtatgctgacgatctcacttttagtggaaaaaacattccagcaaagttcattgagtatatcaaggtcatcatagaagaagaggggttcgaccttaacgaggctaagactaggttatacaagtcaaatcgtaagagaatcgtgaccggaatcagtgtgttggaaaaggagataaagatacccagggagtacaaacggaacctgcgccaggaactacactttatcttcaagtatagcttcgagtctcatataaagaagaagaagattcggaaatccaattatcttgagagcctgattggtaaagtaaatttttggttgtcagtcgaacccaagaatggttttgccctggacgccaaaaaaaggctctttgagatctacaagaattattaccctcaacagtga

SEQ ID NO: 9294 - RNA, 1035 nt, synthetic construct
  source 1..1035: mol_type = other RNA
atgaccagcgacgccattatcgagaagtggaacaatttctttactcggaagggcattaaccagaccttacacgacaagtatatagagtacatcaaaattctcgtcaagaacaatgtgcctataatctttgacttcaatcacttgcgactgctcatgggacgatcggatctgtattttactagcgtaattaatagccctgagaaccactaccgtagttttaagcttaaaaaacggaacggggggtttagagaaatattggccccttatcccgctttgctggaaatgcaatactggatctacaataacattctcaagaaaatcccgatcagcccctactctcatggcttcgcccataaaaagtccatcatcaccaatgctaagattcatttagggcagaaagaactgctgaagcttgatttgaaggacttcttcccatccataaagatcaacagaatcatctatgtgttcaaatccctgggctacacaaatcaagtcgccttttacctcgctagtctgtgctcatataatgaaacacttccacagggcgcacccacgtcaccataccttagcaacattatcgcaaaaaaactcgacaaaaggttaattaggctgtctaagaagtacaagctacattataccaggtatgctgatgatctgacgttctcaggtgattctatcccagccaaactgatcgagtacattaataacatagtgaacagcgagggatttacattgaacagtgagaaaactcgcctctacaagcatggtgggaaacgcattgttaccggaatttccgtgaacggaaaggagctgaaactacctaaggattataagagaaacctacggcaggagctgtacttcataatgaaatatggttacgagtcacacatcaagaagaaaaagatccgcaaggttaactatctgaatattcttctcggcaaggtgaatttctggctgtctgtcgaaccctccaataaattcgcgctggacgcacacagttttctgctcgaaacatataaaaagcacaataagtga

SEQ ID NO: 9295 - RNA, 1020 nt, synthetic construct
  source 1..1020: mol_type = other RNA
atggctaaagaccttattaaggagtggtacgatttctttactgtcaagggaattgagccccagctgcgcgacatttacatcgattatatctcactcctatcagagaataacgtgccaatcatctttgaatttaaccacctggcattattattgggcaggaaacagcattacctggcctccgtagttaacagccctgagaatcattaccgtgaatttaagctgcctaagcgaaagggggggtatagggagattagtgccccgtatcctgcactcatggagatgcaatactggatctaccagaacatcctgaagtctatccggatacactccagtgcgcacggattcatcaatagcaagtctattatcaccaacgccaagatacacaccggccagacagagctgctcaagctggacctgaaggacttctttccaagcatttctctgaatagaatcatttccgtgttcaaaaatgtgggttatccaaaccagatagctttttaccttgccaaaatctgcacttatgaagagtgtctgcctcaaggagcccccacatcaccctgcctgtccaatattatcgccaaaaacctggataaaaggctaatgaaattggccaagagcctgaacctgaggtacacgcgctatgctgatgacctcacatttagtggaaataagatccccgcaaaagtgatagagtacatcagcactataattgtcgatgagggcttcgtgattaatcaggacaagacccggttgtataagaacaagggtcagagaattgtgaccgggatctccgttctggagaaagaacttaaactcccgcgggaatacaagcgcgtccttcgacaggaactgttcttcatcgaaaagtacggcttaaaatcgcatttggctaagaagaaacagagaaaagcgaactatatcttcagccttataggcaagctgaatttttggctctctattgaaccagaaaatcaattcgcactcaaaaacattgagaaattgaagctcatcctaaactga

SEQ ID NO: 9296 - RNA, 1023 nt, synthetic construct
  source 1..1023: mol_type = other RNA
atgaaagatgaccagtactcccagtggaaaaagtattacgagagccgaggaatcctgccagagattcaggacaaactcctcaactacgctaagatccacatagataataacacacccgtgatctttaatttcgagcatctaacactgcttctgggacgtgagaagaattatctgtcctcagtagtgaattcccctgactcgcactatcggaagtttaagataaagaagagatcagggggcgagagagaaataaccgccccatacttgtcattgttggagatgcaatactggatttacaggaacatcctcatcaatgttaagattcactatgccgcgcacggctttgcacaggataaatctatcatcacgaacagtagaaaccatcttggtcagaaacacctcctgaaaatggatttaaaagacttcttcccttccataaagctgaacaggatcatttacattttcaagagcctcggctatccaaacattatcgccttttacctggcaagtatctgctcttataagggccatcttccacagggatcacccacctcccccatactcagcaacattgtttctattaccctggacaatcgcctggtcaaatttgcccggaaaatgaaattgagatacagcaggtatgctgacgaccttactttcagtggtgataagatcccgacaaattacattaagtacatcaccgacatcatcaatgatgaagggtttgaagtgaatgatactaagacaaagctgtatcttaaggccggtaaacgaattgtgactggaattagcgtgatagggaatgatcctaaactgcctagggagtataaacggaaactcaaacaagaattgcactacattttcacctacgggatcggctctcatatggccaaaaagaagattaagaagatcaactacctgtatcgcatcattggcaaagtcaacttctggctgaacatagaacccgacaacgagtatgctcgcaacgcaaaggctaagttactattactgatcgacaattga

SEQ ID NO: 9297 - RNA, 1020 nt, synthetic construct
  source 1..1020: mol_type = other RNA
atgtctaacaaagagactttcaataaatggcagagttatctagagagccgaagggttcaggaggatgtgaaagaacaatacctttcatacatccggatcctcctggataagaatgttcctatcatcttcacttttgaccacctgtcccttttactaggaaggagcaaaaattacctcgcttctgtagtcaattcacctgacaaccattatagagaattcaagatcaagaagcggagtggcggatttagaaaaatcaccaccccattccccgctctgctcgaaatgcagtactggatctacaacaacattttaaagaagatccccattcatagttcggcccacggttttacacacaaaaagtccatcattacgaattccaagattcacgcaggcgaaaatcatctcctgaaaatagaccttaaggacttttttcccaatattgacatcaaccgaatcattttcatctttaaggaactgggctaccctaacattatagcgttttatttggctcagatttgttgctttgacggcaccctgccgcaaggagccccaacatcccccattctgagcaacatcgtaaccagacgcttcgataagagactgatacatttagcaaagaagttcaacttgaagtacacccgttatgcagacgatttgacattctcagggagcacgatttctgccatttttatatcttacgtgaacgacattgtgatcgatgagggtttcgtgataaatgattccaagactaggttgtatcagaagaaaagtaaacgcatagtgacagggatcagcgttattgagaaagagatcaagatcccacgcaactataaacgggatctcaagcaggaactgcactatatcttcaaattcgggctcaaatctcacatgtcaaagaacaagataaggaaagccaattacctgttcgtgatccttggcaaagtcaatttttggctgagcgtcgagcctaagaacgaatacgccctcgaggccaaaactaagctgaaagagctgatttga

SEQ ID NO: 9298 - RNA, 1053 nt, synthetic construct
  source 1..1053: mol_type = other RNA
atgacgaaaaaagagattttacgggaatggagactgtatttcgaaaataggcaggttagaaaggacatttacgagaagtacattgtatacatcggagttctgttggagaacaatgtgcccattattttcaatttcgaccatctctgccttcttcttgggcgaagcaatgagtatttgagttccgtcattaattgtagttctaaccacttccgagactttgaaatcaagaagagatcagggggacaccgggccattacagcaccttatccagccctcatggaaatgcagtactggatatacaacaatattctcaaagccatacccataaattcctcagcacacgggtttactcataagaagtccattatcactaactctaacatccataaaggacagaaggaactgcttaagctggacctcaaaaacttttttccgtcgattagcatcaacaggatcatctacatcttcaaacagctgggctaccctaataacatcgccttctacctctccagcatctgctgttatgataatttcctaccacagggtgctccaacatctccaatattaagtaacatcgtaagccgcaagttggataagaggcttattaccctcgctaaaaagtttgccctgaaatataccagatatgcggatgatctaaccttttcaggcgatattatccctgctaaattcatcgactatgttacagctatcgtgtgcgacgaggggttcgaagtgaatataaacaagacacgcttgtacaagtccaaaggcaaacgtatcgtgactggtatatcagtgagtggagacgtcatcaaggtgccccgcgattataagaggaagttgaaactggaactgcactttattaagaagtatggcctggagtctcacatcgccaaaaagaaaatacggaagtacaactacctgttcagcctggtgggcaaagtcaacttttggctgagcgtggagcctaagaatcaggaggcactggattatcaaattctgctgaacgagtacgtcaaaaagatccaacagcccttagacatcaccctctga

SEQ ID NO: 9299 - RNA, 1095 nt, synthetic construct
  source 1..1095: mol_type = other RNA
atgcttaagcataagaaagaggtggcacaccacttgtttttggacatgacaaagaaccaaatctacgagtcctggaagtgcttcttcattgagcgcggccttgatgaaaaatatagcagaccatatctagtgtacatcaaaaagatgttgtctaatgggttgcctattatattcgaaacggagcacctgagccttctactgggacggagtgcttcatatctgaactcagtggccttctctccttcatcccactaccgccagttcaaactgaagaaaagaagtggaggctttaggactattgacgttccttatccggctttactggaatgtcagtattggatctaccgtaatatcttatccgtggttcctctgaattactgtgctcatgggtttgtccccaaaaaaagtatcatcactaacgcaaaggtccatcttggtcaaaatgtcctcttaaaactggacatcgaagatttctttccaagcatctctaaagatcgagtaataggcgtatttaactttctcgggtaccccccaaaggtgtcatacttcctcgcatctctgtgttgccttaatgaatgcgttccccaaggggcccctaccagtccgaccttgtctaatattatatcctacaacctggacaagaggatcctggccttctccaaaaattttgagcttaagtacaccaggtatgccgatgacctggccatctctggtaagaacctcccaacaaagtatattgattacctccgggtcatcgtggaagatgagggatttaaaattaacgtgagtaagacccagctgtttactagacagagcaagcggattctgacaggcgtcagcattggcagcggcaagctgaaagcgcccaaagaatataaacgagtgctgtttcaggagctcttctacattaagaagttcggtctaaattcccacatatcgaagatgaaaatccgcaatcccaactatatacagagcctcgtgggaaagctgaattatatcctgtcaattgagaaggacaacttcaaagctattaactatctcaactacctcaaggagaactacaattcccagattatcaagatagacatctactga

SEQ ID NO: 9300 - RNA, 1053 nt, synthetic construct
  source 1..1053: mol_type = other RNA
atgacgaaccacaaaattatctacaacaagtgggaggactacttctcaaatcggggactggaaaaaaacttgctagacagttatctggtttacatcgacggactcctgaccaataacctccctataatttttgagtccgagcacttaagtcttctgcttgggaggaacgaggtgtaccttaactcagtcgtcttctccaccgagctccattaccgggattttaaactgagaaagagaaaaggcgggttcagaatcatctctgtaccctatcctgccctgctcgaatgccagaagtggatccataagaacatactgtccaaggtcaagatatctccctacgcccatggctttgccaagaagaagtcgatcgttaccaatgcccgaaagcatactaaccaggagcaccttttaaagatcgatctaaaggatttcttcccaagcatcaagaagggtcgtgtgatagctatgttttgcaagctcggatactctacagaggtgtccttttatcttgcgtccatatgttgtaaaatggactgcctgccacaaggtgctcccacttctcctagcatcagcaatattattgcaaagagcttggataataggctattcgctctcagccagaaatttgaaattcggtatacaagatacgccgacgatctggcattctcaggcggtaacatcccagcaaggttcattgattatgtgacagaaatcgtcaccactgaatcattcgagatcaataatagtaagactcaactgcacaaaagcaaggggaaacgcattatcaccggcgttgccgtgaatggagaaattgtaaaagcgcctaagtcttacaaacgaaaattgtttcagacgctgtactacatcgaaatttttggcttaaacagccacaggacaaaattgaaaattcgcaaccccaactatttggagtccctgatagggaaactgaattatgtgctcactattgaaccggacaattctaaggctaaaaactatctgaccatgctgattgagatcgacaagagtcgcacacacaattcggtgtataaatga

SEQ ID NO: 9301 - RNA, 1041 nt, synthetic construct
  source 1..1041: mol_type = other RNA
atgagtaaaaaaaggattctgagcaactggtctaatttctttgagcagagaggtatccctgaggacattcgggaaatatacctcaggtatattaagaagctgcttgtgaaggacgtgccaatcatatttgatttcaatcacctgtccaaactggtgggacggcagcagtggtatctggcatcagtcgttaataacacttcatctcactaccgaacattcaatctgaaaaaaagatccggagggtttcgggagatcagtgtcccctaccccgccttactgggcgttcagtactgggtgtataagaatatcctgcagaagattccaatcaataacagctctcatggcttcgcgaaaaacaagagcattatcacaaacagcaaaatccacctaggacagtctaatctcctgaagatggatttgaaagattttttcccatccatacacctggcccgtgttatcaaggtgttcaaagctctgggctacacgaccaaggtcagttactatttagcatccgtttgctgtattaatgattgcttaccccagggggctcccacctcacctatactttctaacattatttccttcgaccttgatcgacgcctgtatttgttcgccaagaagtttaacctcaagtactcaagatatgccgacgatcttaccttttcgggcgaaaatatcaacgtcaagatgattcactacatcagcgagattatcgtatcggaaggttttatcgtgaacgacaaaaaaaccaggctgcacaaggaatccgctaaacgcatagtaacagggatctctgtggcaggaagcgagctcaagctgcctaagaaatataaacgcgacctcaagcaagaactctattacataaacaagtacgggatccatagtcatgtgagctcagtgaacattaaacatactaactacatcgacgtgttgattggcaagcttaatttctggctatccgtagagcctggtgacgagtttgtggtcgagcaactcaagatgttgtacagtattaagtatccagaaagcatcccgaaatga

SEQ ID NO: 9302 - RNA, 1026 nt, synthetic construct
  source 1..1026: mol_type = other RNA
atgagcaagaaagacctgtttttctggaactcatcctttactaaggctaagatcaatgatgagatcaagcaaaactatctgagatatattgaggtgctgctgaacaacaaagtccctatcatttttgacttctttcacctcacacttctgttgggtcgcaattcaaaatacctatcgtctgttgtgaatagcaatatttcacattaccgagagtttgaaatccctaaaaaaaagggcggaacccgcaagatcaccgcaccctatcccgccctcttggattgccagaggtggatttacaacaacatcctcaagaacattaagattcacccctgcgcgcagggtttcacaaagaaaaagagcattatcacgaacgcgaagatacatgtgaaccaagacgaattcctcaagatcgatatcaaggattttttcccgtccataactatcaaccaggtgattaatatcttcaaatcctttgggtacacacagaaggttagcttctatttagcctccatatgctgttacgaccagaaccttccccagggcgctcctacaagtcctattctatctaatttagtcgctattaccctggacaaaagacttttcgcattcgccaagaaatttgacctgaagtatactcggtacgccgacgatttggccttttctggaaaaaagataaccagcaaacaccttgagtatatcaaagagatcatttcagagtgtggattcgaggctaacgacgaaaagaccttcctgcaacagaaaaagagtaaaaggattatcaccgggataagtatcagcgataatacgattaaggtgccaaagcaatataaacggaaactgaaacaggaagtgcattttatccgtaaatttggcgcattgaatgtcatacggaggaataagatcaagaatccaaattacctctactctatcattgggaagctgaatttttggatgtccgtagaaccaaataatcagttcgccaagaaagcatacaacgatctgaagcagttcataaactacaactga

SEQ ID NO: 9303 - RNA, 1020 nt, synthetic construct
  source 1..1020: mol_type = other RNA
atgagcaacaaaataatccagggttggaaaagttttttcattaaggccaagatttccgtcgaagcccgggagatctacctgaagtatatcagtacactcttatccaataaggttccgatcatttttgacttctatcatctgaccctgttgctcggaaggaactcggagtatctcgcctcagtgattaatagcaacacatcacattaccgcgaatttcagatcccaaaaaagctggggggctttagaaccatcctggctccataccccgcgctcatggacatgcagaactggatttacaagaacatcttaaacgatgtgaagatacacccatgcgcgcaagggttcactaataagaagtcaattgtcacgaatgcaaagattcacatcaatcagaaggaattcctaaagattgaccttgagaatttcttccctacaatcacaataaatcaggtaatcaacgtgttcaagaatcttggttacactcataaggtgtccttctatctggccagcatctgctgttataataagaatctgcctcagggagctcctacgtctcccattctcagtaacattattgcacttacccttgataaaaggctcttcgcattagcccagaaattcaatctcaaatatacccgatacgccgatgaccttgcctttagcggcgatgagataaacctgaagcacattgactacattaagaacataatcaacgagtgtgggtttactctaaatgaggctaaaaccgtgctgcaaaagaacaagaacaaacggatattgaccggcatttccatcgctggcgaaactgtcaaagtgcccaaaaactataaacgcaaactgaaacaggaagttcactttatcaggaaatttggcatcctgaactatatccgtagaaataagatcaagaaccccaattacttgtactctatcctgggaaaattgaatttctggctgtctgtagagcctaagaacgagtttgcaaaaaaagcctacaatgatctgaagcaacaaatacagtga

SEQ ID NO: 9304 - RNA, 1029 nt, synthetic construct
  source 1..1029: mol_type = other RNA
atgagtaagctgaagctgtacaattactggtatagcaacttcgagaagagcgggatcaaatccgagttcgtcgaaaaatatatggcatatgtctctaagctgttaaacaacaatgtgcccatcatttttgactttaatcacctctgcctgctgttgggtcgaaacggccactacttggcctcagttgtgaattctaatgtatcccactaccggatatttcagatccccaaacgttcggggggacataggaacataagcgctccttatcccgccctcctcgaatgtcagtcctggatttacgaaaatatcctggcaaagattaagatccaccccgccgcccaagggtttaccacgaaaaagtccatcattacaaacgccaagatacacataaaccaaaaccatttcctcaagatcgacctgaaagacttttttccttccatcactatcaatcaggtgattaacgtgttcaagtcaattggatacaccaacaaagttgcctattatcttgctagcatctgttgctgtgaaaacgtcctgccacaaggcgctcctacatctccagccttgtccaacatagtaggtaagacattagataaacggctctacagtttcgctaggacttacgacctgaaatatagcagatatgcggatgatcttgcatttagtggcgagcagattccatcaaagtttattgagtacatcagcgacattatccgatcttgcggattctctgttaatgaccggaaaacaatccttcagcagcagaaaaatcgcagacgcataatcaccggcattagtatctcggatgatgctataaagatccctagagagtacaagagaaaacttaagcaggagatccactgtattcgcaagttcgggatttcaagccatatcaggaggcaaaagattaagaaaaccgactacctgctgtgcgtgattggcaaagtgaaattctggctatctgtggaaccggagaatcagttcgcaactcatgccctcaatgatttgctaaacatcgcgcagcagtga

SEQ ID NO: 9305 - RNA, 1065 nt, synthetic construct
  source 1..1065: mol_type = other RNA
atgaataccagggagcagaatattatcctgaagaattgggaacagttctataacagcagaggagtcgagcccgagctgattaaagtgtacatgagttatgtggagaaacttgtgaatcagtctctgcctcctatctttgatttccggcacctgtcacttttgctgaacattaacgagtatgacttagcgagtatcgtgaacagccccagcaactattatcgcacattcgatatacctaagagaaatggaggctttcgtaccattaccgccccttacccctcattgaaaaatatccagaagtggatttaccacaacattctctccaatattaagatacatggctgcgctcatgggttcgccacttcaaggtccattctcactaacgcaaatgtccacattaatcaaaagtgcctcctcaagatagacttgaaagacttttttccctccatcccaatgtcttatgtcctccagctgtttaagtcgctcggatatgcaccgaaggttgcgttttatttgtcgagtctgtgttgttacgacgaatgtttggcccaagggtccccggtgagcccagctatatctaacatcgtagctaaacacttagatcgccggctttaccgaatcgcaaagaagtataatcttaactacagcaggtacgctgatgatatcgccttcagcggggaaagcataaacgtaaagttcatcgagtacatcaaagagataattacagattgcgggtttttcgttaatgaaaacaagatcaggctgtataaagaatacggcaacaaaatcctgacgggaatctctctagccaccggtgtgccaagactgccacgggactaccgacgctctctggagaaagagctctttttcatctacaagtacggcatcaaaggtcacatcagtcataacaaaatccggaaatccaattacctggagtcaattattggcaaggtgagatattggctgatgatcgaacccaacaatacattcgcccagcaaatgtacgaaaagctatatgcagagtacaagcttcagctgaacacttccgacattgaagttttatga

SEQ ID NO: 9306 - RNA, 1047 nt, synthetic construct
  source 1..1047: mol_type = other RNA
atgactgacttgcagctgcaaaaaatgatggaactgtggaaggcctactatagatcacgcgggattgccccggagtttgcaaatcagtgtctcgcctacgctcgttcacttctcaaacaggatatgcctgtgatcttcgatttgcctcacctgtgcctactgctcggcctagacgtgagttacctgcattccatcgtgtacggtgctgataagcactatcggaactttttcatcaggaaaaaaagcggaggcgtgcgtgagctgagtgcaccacactataccctaaaatacgtgcagacttggatatatgagaacatcctctctaaggtgaaggttaactactgcgcccacggattctgccctaagaagagtattgtaaccaacgccagggtccacgttagtaataaatacctgttgaaactcgatctgaaggatttttttccctccattacccagaatcaggtgattaatgttttcaggagcctgggctacagcaatcacgtcgcattttatctgggctctatttgttgtgttgacggccaccttccacaaggggcacccacatctccagcgctttcaaacattattgctcatcacctggataaccgcctcctgggggtggctaagaaaatgggctacaagtatacgcggtatgctgacgacctcgctttctccggagacttaatcaagcccgtgttcgtccagtacgtcgtgcgaatcatctcggaatgccatttcatagtcaatgcctccaaggtgaaactgtacaaaggaaacggggcgaagatactgacaggagtatccttagccaatggtcaaatccgcgtccccagagagtataggcggaaacttgaacaagagctttactacatcagcaactatggtttaggcgagcatataagacgccggagaatcaagaatcctcattatctggagagcgtaattgggaagacagaattttggctgatgttggagccagaaaatgaattcgcaaagcagtctctggagtacttgcgagccctctacaaccagaaatataaccagtga

SEQ ID NO: 9307 - RNA, 1044 nt, synthetic construct
  source 1..1044: mol_type = other RNA
atgatcaagaagtatccacacgagtggaaaaagtattttgactctcgctgtattcctcagaatgtgcaggatgagtacttgtcttacattaagaacctgcatgaccaagatattcccatcatatttgaaatagagcatcttgctctgctgcttggaatggagatcagcgtgctgaatcgcatgatatttggtacaaaaagtttctatcggacgtttgaaataccaaagaaatccaaggatagcgttagaattatcgacgccccttatccctctttattgtctgtccagcagtggattctaaagaacatcttgaagaacattcacatcgatgattcagcccacgcgtatatgaagaagaagtcaatactcactaacgtcacccctcacctgaacaataaagtcctcctgaaaatcgacctcaagaatttcttccccaacatagaaaaaaaccgaattatcgctgtattcctcaagctgggctacacacaaaacatttcctttgccctggcatctctatgcaccttaaataaccacttgcctcagggcgcacccacgagtccgacactttcaaacattattgcttataggctggatcggaggctttccagcctgtgcaaaaagagcgacatggtgtatactcggtacgccgacgacatggtgatcaccagtaagtacattagccttaaaacaaaggacctgattatcactatcatcgaagattgtggtttcatcgtgaataaggataaaacctacttatccaccaatcagaacaaacgaatcatcactggaatatccatccaagacggcactaccaaaattccaaggaagctcaaaagagagatcaaacaggagatgtactatctgaataaatacgggttctactcccatatcaacaagcgcaaaattacaaatcccttttacttggaaaggatcagagggcagatcctcttctggaatttcattgaatcagatagtaccctggcaaaggagatgctgtcggacatcaatcgtatcattgagatagttgagaacctcagccagtga

SEQ ID NO: 9308 - RNA, 1032 nt, synthetic construct
  source 1..1032: mol_type = other RNA
atgaacaatactaaaatcatctcgatcaaggagtggaagagcttcttcaagagccgcggaattgagcagtcacttattaacgaatacatttccaacatcgagaaattaaaggacaagaatctgccaattatctttgaaatagagcacctgtcatacttagtcaatatcaacattgagatcctcaataagatgatcttctctaataagagcttctaccaggaatttaagattcccaaaaggaataaaggagagtttcgtgagatccatgcaccctatcccagcctgaaatgtgttcaggattggatctataacaacattctacagtacgcaaagatccattacaacgcccacggctacgtgaaaaacaagagtatcaagacaaacgctaagaaacacctgaacaagaaggagctgttcaaaatagacctgaaagacttctttcctactattaagataccgaggatcattgaacaatttaaacggctcggttattccaaaaatatgagtctgtgcctggccaccttgtgctgtcagaatgattatctgacacagggcagccctacttctcctgccttatccaatctggtggcttacaaactggataaaagacttacagccctcgctaaacggaataatttggtctatacacgctatgtggatgatattgcgatctcaggggacgatatccatcactttctccagaaacttatttgcgagataatcgaagaggagggttttattgtgaactacgagaagacctatctgaacaaggaaaacagcaataagagactcttgacgggcataataattaaggatgacaagctgaccattccacgagaaaccaagaggaaactcaaacaagagatctattacatcagtaagttcgggataaagtctcaccttatctccatcaataacaagaatccctactactatgaatctctcttgggaaaactacaatactggaaattcattgaaccaacctccaaagacgtagacaagctgatcaagattcttaacgactcaatatga

SEQ ID NO: 9309 - RNA, 1056 nt, synthetic construct
  source 1..1056: mol_type = other RNA
atggacgaacaaattgacagcacagccgatagatgggtggagcatctgggcggaaccattaagtcacgcccattcagagaggcttgcacagcctacgcatccaggttagttgagaacggctttccggtcgtgttcaatctccagcatttggcgaaagtgaccgggcttaagacgagagtcgttggcagccaagtttttagaaccgaacggtactataggaagtttagcattcctaaaaggactggagggctgaggactatccataccccctacccgtccctgctactatgtcagaggtggattaactaccgggtgctcaccggaatccgggtgcacaagcacgctcatgggttcgtgagtggccggagcgtgctgtcgaatgctctgccacacctccagaaaagatggatgcttaagatggatatcaaggactttttcccttccatctccatacgcaggatcgtaccaatttttcggaggtgcgggtattctcgagacgtgtcatacttcctgtccagacagtgttgcctcgaggacgtccttccccaaggcgctgctactagtccaactctgagtaatattgtcttgaagcgcactgatagtcggctcacagctttagccgagtctttcgccgccacctacacgcgttacgccgatgacttgacattctctggggattatctccccgcacgaataatagacatcgtatcaaggattgtcactgatgaaggattccgcgtgaacaccgcgaaaacgagactggttggccctaaaggccgcaagatcgtgactggtgtgagcgtctctggtgcatctccccgactgccaagacagacaaaacgggtgcttcggcaggaattgtttcacctgcacaccaagggttatgcaaagcacaccgccgtccgccagatcctggatcctttgtatgccgagcgactgctggggaaactgtcattctggctgcagatcgagcccgacagcccttttgcgcgtcaggccctcgactggatggcagaagtacgcggaacattacaagttcttggtcgtcatacatga

SEQ ID NO: 9310 - RNA, 1029 nt, synthetic construct
  source 1..1029: mol_type = other RNA
atggaaaaagatgagatccagctttggaataagaacattagcgaagccgtaagttctaaacggtgggtcaaggcttattcaaaatacatagacgtgctgtccgaaaactccgtgccggtgatttttgagatcgatcacttggccgagatcctgggcttacggagcgatctgctggtgagggccgttaacagcgtggaaagattctaccgcccattcgaaattcctaaaagtagcggcggaacacgaaagatcaacgcaccctatcccgtgctgcttgatatccagcgttggatcggagcccatatattgagtcaggtcagaatctccgaacaggcacacggatttgtaaagaataggagcatcatccgaaacgcaagagagcatctcggtaaggaatgtatgctgaaaatggacatctccgacttcttccccgcgatatctcttaagcgggtgatcacaattttcctgtttctggggtactcaccttctgttagctattatctctctgtcctttgctgcctcgagaatcaattgccccaaggtggggcagcctcaccacagatctgtaatatcatcgctaccccgctggataggcgcctgatgtcactcgctctagcttactctttaaattacacacgatacgccgacgacctgacgttttcggggcgctacatccctattaagttcatcaaaattgtggagtccatcgccagcgatgagggctttgagattaataacaagaaaaccaagctcatgagagctaaaggccggcggattgtgactggaataagcattgggaccggggagttgaaactaccaaaaagtactaagaggtccttaaggcaggaagtctactggttggaacgtaatggtatttttgcggagagtggaagagacggcatattcgaccctctttatgtcgaccgcctcctcggcaagctgaacttctggcgctctattgagccagagaacacctatgttattgagaagattgataggctgaaggaactgatcatatcagagtcctga

SEQ ID NO: 9311 - RNA, 1053 nt, synthetic construct
  source 1..1053: mol_type = other RNA
atgtccgccaaaaaccggctgggatctagtgcttggagaaaacattttgacagcatcggatgcccatcggatcttaagagtacgtatttggcctatatcgatcgaatgaccggacgggggttcccccccattctggacttcgggcatctggctagcctccttggacgcactccagcttatctggccagcgcaatcaatggcaccaagtgtcactacagacagttcgtcattccaaaaagacgcggtggagcccgaacaatctcagctccgtatcccgctctgctcgaatgtcagcagtggataaatcgagagatcctcgagcacatagacgtgcactctgctgcccacggctttcgtagaaagcggtcaattgcgactaatgccagccagcacctgaacaaggcctgtctgctcaaaatggacattaaggacttcttccccagcataaagctgaggagggtcattgccgtgtttcgcgacttagggtatcctaaaaacatttccgtgtacttgggcaggctctgctcactcgatgggcaattgcctcagggcgcagcaacctctcctgccatgtctaacatcatcgcgaagcagctggattgccggctactgggtgtcgcaaagaaatggagactgaggtacacaaggtatgctgacgacctttgcttctcgggccctcatatctccatccagttccctaagctggtgagcaggatatgtgaagaagagggcttacagattaatgcatccaaaacacagctctgccggtctaaggggagacgcattgtaaccggactttctgtttccggcgaacgtttacgagtaccccgggcgtttaaaagagaggttcgtcaagagatgcactacatcaaggttcacgggtactggtcccatgtgagtaagcgcaagatccgcaacccattctacttgcaatcattgtacggcaaactaatgttttggaggtggattgaaccggataatagtttcgtgaacagcgcctttgatgtcctgcggaatctggtgcatgagaacggtgagtttgagaaagattga

SEQ ID NO: 9312 - RNA, 1044 nt, synthetic construct
  source 1..1044: mol_type = other RNA
atgattgaaaaaaacataaacatcgagccatgggctaatctgatcgctcgccgggttaggcgccctagcattagaaccgcagcgcttaaatatattgagcgtttaatcgccgtgggcgtcccacccattttcgactttgaacacttatcagagctggtaggtgtgcaccgtgccatcctcgctggattcgttgagtctgctggcagcttttacagaacgtttaaaatccccaagcagtccggtggttttcgcgaaatttcttccccggtgccttcgttgctcatggtccagcggtggatcaaggaaaacatcctggatgaaataccagtccacgacgccgcccacgggtttgtgaaggggaaatccgtggtgaccttcgcgcagccccatgtaaataaggctgcactgcttcatatcgacgtatcggactttttccctagcattgatttgaagagggtttacgtgttgttcaggaatataggatatgcccccaatgtcagcctcttcctcgccagactgtgctgtgtgaacgggcgattaccgcaaggggccccaactagtcctagcatctccaacattattttctcaagtatcgatgctcggctcattggactgggttgcgttgccaagctggactatactagatacgcagacaacattgtcttttctgggaattacatcaacatcaagttcctagacatcgtgagtgagatccttagcgagaactctttcaaagtgaaccggaaaaagacatttctgagtacaaaaaaaggcaagaggataattgcgggaatctcagtgtccggcgagcggattagcctcccacgagacacccgccgaaatctcaggcaacaggtccatgggctgctgaagttcggcttttttgagcatacagcccacatcggagatttggatcctatatacgcagagagagtcctgggccgcctgctattctggaagtacgtggaacccaataattcatatgttgcatcctctatacaggccctgaggggcatgcagatggatcttgattctcaggtgtga

SEQ ID NO: 9313 - RNA, 1134 nt, synthetic construct
  source 1..1134: mol_type = other RNA
atggatgggatcctcataacgatactgattatcaccggctttcttatctacaagatgatcagcagctctagaaaacaggagggttacaagaggtggaaggccaccgctagcgggggtaaggaggagagcgcctcaaagtctgagagcgggcacggagcttggttaagacgagcactgggggttacagcgccgcagtctccttatgttcccaaatttgacgacgagtccgtagtctggtgcgcctcactgctaggcgtggaggctaacaagctcaaagaaatcctcgagaatattccgacacactaccatgaattttgggtgcgtaagcggagaggagggtatcgcatgatttcagccccccttaaggaactgcaaagtatccagactaccattaacagccgcatcttgtctagtgtgactaccatccaccccgcggccgttggctttaggtgtggaagaagtgtagtggataacgcctcacctcatctcggaaagcgttacgtcctgaagatggatattcacgacttcttcttctccattcggtcccctcgcgtaaaggccaccttcgaaaaaatgggttacccagctaacgtcgcaaaagtgttccgcactctgtgctgcctacacaactccctcccacaaggagcacccaccagccctgccctctctaatatcgtcggctatgagatggacaaaaaactggctgcactggccgcggagtacggcttaacttatacaaggtacgctgatgacttaacattctcgggggatgtgttccccaaagaacagattatcccacgcatcaagcagattattcgggacgagaagtttgagccaaatcataaaaagacccggtttttgcacgaatatgaccgaaaaatcataacaggcgtgtccgtttcctctggcgtgaagttgacgattccaaagactaggaaaagggagatccggaaaaacgtctacttcatactgacaaaaggccttgtggagcatcagcggagaattggtagtaatgatcctgcctatcttaaaaggttgattggagaactgtgttattggcgatccatcgaacccgacaatacctacgtgagtgattcaataatcgcactgaagagactggaaaagcattactga

SEQ ID NO: 9314 - RNA, 1131 nt, synthetic construct
  source 1..1131: mol_type = other RNA
atggatggcattctgattacaatcattgtcattacagccttcctggtttataaaatgatctcctcaagcagaaagcaagaggggtataagagatggaaagctacatcaagtggcaaggaggaaaaaaccaccaaagtaaagtgggagcacggtgcctggctgcgacatgcactgggggaaactgttccacgcgtgcagtacgtgcagaggttcgacgagtccgccgtcgtgtggtgtgccaacctgctcggcgtcgagactgctcaactaaaggagattctccgtgatgtctcggagcattaccgtgagttttggatgcggaaaaggaaaggcggctacaggatgatctctgccccggataaagaacttcagagtatacaaacgacgattaattcacggatcctgtcttctgtgacaatgattcaccctgctgccgtggggttcagatccggtcacagcgtagtagataatgcttcaccacatctcggcaagcgatgcgtgctcaagatggacattcacgacttctttttttccattaggagccggagggtcaaaaaaacctttgagaaaatcggatatccggagaatgtgtccaaggtgttgggtgttctctgttgcctgtatcggcatcttcctcagggcgctccaacctctcctgcacttagcaacatcgtcggctatgagatggacaagaagctagcggccttagcggtggaatacggattgacctatacaagatacgcagacgatctgaccttcagcggagacgtgtttcccaaggaacagataatcccacggataaagcagattattcgcgatgaaaagtttgaacccaatcacaaaaagactagcttcatcaacgagtacggtcggaagatcatcaccggggtgtccgtttcttcgggagccaaacttactatccccaaagctcgcaaaagggaaatacgtaagaatgtctacttcatcctcactaaaggactggcagaacaccagagacgaatcggaagtagcgatcccgtgtacctgaagcgcctgatcggggaattgtgctattggagatccatcgagcctgacaacgcatacgtttctgacagtataaaccgcttaaagtgtttggagaaggggtactga

SEQ ID NO: 9315 - RNA, 1131 nt, synthetic construct
  source 1..1131: mol_type = other RNA
atgaataagatcctgattaccatcctgatcattacagggttcctgatatacaaaatgatctcttcttcccgacgccaggagggctacaagcgatggaaagctactgggggagggaaagaggagaaggtggacaagactaagtgggaacggggcagctggttatctcatgccatgggcgtaacaaccccagtcgccccatatacccctaggtttgagaaagaagcagtaatctggtgcgccgccctcctcggagttgaagtgaatcgcttggaggaaattctgaataacgtctcaggtcactaccaggaattttggatgcggaagagaagcggcggatacagaatgatttccgcccccgataaggatctccaagccattcagagcacgatctattcacgcatcctgagctccgtgacaatcgtgcatccggtggccgtgggattccgatgcggtaggtctgttgtcgataacgctgcgccacatcttggcaagcggtatgcgctgaaaatggacatccacgacttttttggtagtatccgtagccccagagtgagacagacctttaagaagattggttatcctgagaatgtgagtaaggtgcttggagccctatgttgtttgcacagacacctaccccaaggagcaccaacaagtccggctctgtccaacatcgtggggtatgaaatggatcgcaaattggcagcactggctgcggaatatgggctgacttacactagatacgccgacgacctcacgttcagcggggacgttttccctaaagagcagataattcctcaggtaaagaggattattagggacgaaaaattcgagcccaatcacaagaaaacccattttatgaaccagtcttcacgcaagatcatcaccggcgtctccgtcgcttcaggagttaaactcaccatacccaagtccaagaaaagggagatacgtaaaaacgtgtacttcattctcacaaaggggcttgcagagcatcaacggcggatcggcagtcacgatccagcttatctgaaacggctgataggcatgttgtgctactggcgtgccatcgagcctgataacacttacgcttcggacagcattgcagccttaaaaaggcttgagaagggctactga

SEQ ID NO: 9316 - RNA, 1134 nt, synthetic construct
  source 1..1134: mol_type = other RNA
atggacggtcttctcatcaccattctgatagtcacagggttcctcgtgtataagatgattagctcctctaggaagcaggaaggctacaagaggtggaaggctacggggtctggagacacagcgaacgaagaaaccgcgggtaataaatggaagcatggagcctggctgcgacatgccctcggtgtgacgactccaaaggcccgcacctatccagtatttgatgaggaggccgtggtgtggtgcgccggacttctaggcgttgaagcggtccgcctgaaagagatcttacaggatgtttcctcacactaccgcgagttctggattcgtaagcgaaagggcgggtaccgtatgattagtgcccccgacaaagaactgaagtcaatacaggatactatctatcaccgcatcttactgcccgtaaacgtgcaccccgtagcaaccggctttcgcaggcaacactcgatcgtggataatgtcagaccccacctcggaaaaagatgtgtgctgaagactgatatccacgactttttcctgagcatacgttctccacgagttaaacaaacctttgagaacattgggtaccctaagaacatttccaaggttctgggggagttatgctgccggagacggcatctgcctcagggagcatcaacatctcctgctctgagcaatatcattgcatatgagatggataggaagctggctgctatggccgaagaattcggccttgcctacacccggtatgcagacgacttgaccttttccggcgacgtgttcccgaaagagcaggtgctcgtcagagtcaaagagataatcagagaggaaaagtttgagccgaatcatgaaaagacccgattcttgaacgaatacgaccgcaaaattatcacagggatcagcgtgagtagcggcgtgaaactaactataccaaaagcacggaaaagagagattaggaaaaacgtgtacttcatcctgacaaagggtctggctgagcaccagaggagaatcggctcacatgatcctgcctatctcaaacggttgattggcacactttgttactggaggagtatcgagcccgataatacttatgtcagcgactccatcgctgccttgaagcggctccagaagggagactga

SEQ ID NO: 9317 - RNA, 1185 nt, synthetic construct
  source 1..1185: mol_type = other RNA
atgaacaccacaatttatatctctaagtactccagttcttcattcttcatccctatcgacacaatgaatggcattctgatcgcagtcttcatcgtgacgtgcctgcttgtgtacaaaattatatcctcctctaggaaacaggaaggttacaaaagatggaaagccggcaatagagacaatactgagcacactgctaacgccgggaccacacgtaagggatggtttagccagttattcgaaacttccgccccccggatctccccttggtttaaagaggaggccatctcccagtgcgccaatcttctgggagtggaggaggtaaagctcaaggagattctgaaagacgtgagtgctcactatcgagaattctggatcggcaaaaggagagggggttaccggatgatctctgcacccgacgatgagctcaagcccattcagggggctatcaaccacaggattctaagctttgtcaacgtccatccggcagctaccggatttcgctgtaaaatgagcatagcggataatgtgcggccccacttaggcaagcagtgcgtcctcaagaccgacatacacgattttttttcctctatccgaagcccaagagtgcggaacacattcgaagctatggggtaccccccagacattgccaaggttctggggaccctttgttgtctacatagatgcttacctcagggcgcgtctacatcgccagccctgtcaaacattatcagctatgagatggataagaaattgtcagccctggccgctaagtacggcctgacctatacgcggtatgctgatgatctgaccttcagcggaaatgtgttcccaggagagcagattctgtcccaagtaaaacaaatcgttcgcgaggaaaagtttgaactcaaccataagaagacaaggttcttgaaggagcatagtcgtaagataattaccggtgtttcgatatcttcaggagtgaagctcactattccgaaagcacgcaaaagggaaatccgcaagaacgtccactatattctgactaaaggcttggcagaacaccaaaggcgaatcgggagccatgaccctgcgtaccttaagagactgattggcacgctgtgttactggcgcagtatcgagcctgacaatgcctacgtgagtgattcaataactgcactcaagagcttggaaaaaaaatattga

SEQ ID NO: 9318 - RNA, 1122 nt, synthetic construct
  source 1..1122: mol_type = other RNA
atgaatggcattttgatcgctgttctgattgtaaccggactgctaatttacaagataatctcatcctcccggaaacaggaggggtataagaggtggaaggcaggaaatcgatctaacactgaggacacaactgatactgaaaccacacgtaaaggatggttcagccggtattttggcaccagtgcgctcatcacaattccgtggttcgatgaggaagctgtggtgaagtgtgcaaatttgctgggcgtggaggaggctgttctgaaagagatcttaaaggatataccgggccattaccgggagttttggataggcaaaagaaagggcggttataggatgatctctgcccctgacaaggatctgaaggccattcaagatacgataaatcacagagtcctcagcttcgtcaacttgcaccccgccgctacggggttccgatgtaaaatgtctatctctgataacgtgcggccacacctcggcaagccctatgtgcttaaaacagacattcatgacttctttgggagcattcgcgggctcagggtgcgcaaaatgttcgaaaacatgggctatccacccaaaattgcgcgtgtacttgcggccctgtgctgcgtcaggcgatgtcttccccaaggtgcttcgactagccctgccctgtcaaatatcatcagctacgagatggacaaaaagctcgccgccttagcaaccgagtataacttagtgtacactcggtacgcagacgacctgacatttagcggtgacgtgtttccagcccagcagatcctgcctctcatcaaacagatcattcgcgaagagaagtttgaaatcaaccataagaagaccagattcctctcagggcacaagagaaaaatcatcaccggtgtctccattagttcaggggttaagttgaccatcccaaaagctaaaaaacgggaaatacgcaagaacgtgcacttcatcctgacaaagggacttgccgaacaccagcgcaggattggatcccatgatcctgcatacctgaagaggctgatcggaatactatgctattggagaagtattgagcccgacaatgcatacgtcagtgattccattgccgctctgaagggcctggaaaaagagtactga

SEQ ID NO: 9319 - RNA, 1116 nt, synthetic construct
  source 1..1116: mol_type = other RNA
atggagctgttgttctgtatagtgactgttatcaccgctcttctggtcttcattatcatccggagtagtaaatctcaggagggctataagcggtggaaagccgggaactacgtgtctgacaccccttatgcaaaggaaaaaaagacaagcgccttgtttcctagatctttgttcggaaaagatgccaatttcttcggagccaaaaggtttaaagctgaagctgtttcatggtgcgccaatctcctggcagtcgaggaggacgctctcagggaggtcctggactatgtgcctcgccaatataagctgttttacattcggaagcgctccggcgggttccgtgcaattactgctccagaagataagttaagagtgatgcagcagaccatctaccaacggatcctgctgcttgcccacgttcacccagcggtaaccgggttctgcccaggcaaatccgtagcagataatgctcaggcacatctcggcagaaagaacgtgctcaaggtggacattcacgatttttttccttcgatcagaagccccaaagtccgcgcagctttccgggagatgggttattccggaccgattgccaaggtgctgggagagttatgttgctgctacaagtgtttgccacagggagcaccaacatcccccgccctgagtaatataattgcgtatccgatggacaaaaagatgatggctcttgccgacgagtacgggctagtgtacaccaggtatgccgatgacttaacattcagcggcgactacctgcccaaagacgaggtgctggcgcgtatccatggcatagtaagggaagaagggtttacgattaatgccaaaaagacacgctttctgtcagagtacaaaagaaagatcatcactggggtgtccgtcagctcaggcgaaaaaatgacgatacccaaggtgaagaagagggagattcgaaagaacgtccactacgtgctaaccaagggactcgttggtcaccaggaacatattggtagcacagatcccgtctacctgaagcgactgttgggcaacctctgttactggcgatctatcgaacctgataacaggtatgttagcgatagtatcactgcccttaaacgcctcatgtga

SEQ ID NO: 9320 - RNA, 1116 nt, synthetic construct
  source 1..1116: mol_type = other RNA
atggaactactcctcgccatcgttatagtggtaacaggctggctggtgttcagtattatccgaagcagtaagggccaagagggttataaacgttggaaagccggtaactacgcaggcgagaatccttatgctaaggagaaaaaggagtccgttagcagcctcaaaaacatattcggcagaaaggccgtagcctttgggtccaagagattcgatgcgggcgctgtgtcttggtgcgccagtctgcttggcgtgaaggaagacacactccgggaagtgttggactatgtacctaggcagtacacgcagttttatattaagaagcggtcagggggtgtgcgcattatcaccgctccacaggggcaactccgtgtaatgcagcagaccatttaccaaagggtcctgttactggccaatgttcatccagccgtgaccggattctgccccgggaaatcagtgtctgataacgcgcgcgtccacctgggaagaaaaaatgtgctgaaggtggatttgcacgacttctttccgagcattcggtcgccgaaagtgcgggcgacctttcgcgaaatgggctacagtagacctatagccaaggtcctagccgagttatgttgttgcaatcgctgtctgccccagggagctccaacttctccagctttgtccaatattatcgcatatcctatggataagaagatgatggcattagcagacgagtacggactggtctacactcggtacgcagacgatcttactttctccggggacttcctgccaaaggataaggttctgtcgaggatcgatcaggttattcgagaggaaggatttactatgaacgtgaaaaagactcgctttctgcccgagcataagagaaaaattatcacaggcgtcagcgtgtcctctggcacaaagatgaccatccctaagacgaaaaaaagggaaatcaggaaaaatgtgcactacgtcttgaccaaaggtctggcttctcatcaggagcacatagggtccacagaccccgtctacctgaaaaggcttctcggaaacctgtgctattggagaagcatcgaacccgacaaccgatatgtttcagacagcatcgccgctcttaagtcactcatgtga

SEQ ID NO: 9321 - RNA, 1113 nt, synthetic construct
  source 1..1113: mol_type = other RNA
atggaactgcttctcgggatagtgattgtggtgacatgctggatggtggtcaggatcatccgcagctcaaaaaatcaagaaggctacaagagatggcgggctggtaactacgcctctgaaaacccatatgcgaaggagaaagcatccggtcccctctcgcagggatttttttccaaacgcatcaggacatcaggggctaggcgctttgatgacggcgccatcaggtggtgtgctaacctgctggcgacggaggaaagtcgcctacgagaggtcctcgattatatcccaaggcagtacacatgtttccatgtgcgaaaaaggtccggtggcttccgctacatctctgcccctgccggggacttccgaagcatgcagcagaccatttaccataggatcctgttactggccaatattcaccccgcagtaaccggcttctgcccaggcaagtccgttagcgacaatgcacgtgtccacttaggcagaaagaacgtgctgaaagtagatttgcacgactttttccccagtattcgctcaccaagagtaagagctgcctttcgggagatgggatactccagaccgatagctaaagtgctggccgaactgtgctgtctgagatgctgtctgcctcaaggggcccctacctctccagccctttctaacatcatcgcttaccctatggacaaaaagatgatggcgttagccggcgaatacggtcttgtgtatactagatatgcagatgatttgactttcagtggggactatctccctaaagacgaggtgctcgttagaattcatcgtataattcgcgaagagggatttaccatgaatgttaagaagacccggttcctgtccgagcataagcgtaagattattactggcgtcagcgttagcagtggaaagaagatgaccctgcccaaggttaagaagcgggagatacggaaaaacgtgcactacgtcttgactaagggactggtggggcaccaggagcacatcggcagcacggatccggtctatctaaaacgactcttgggaagcctctgctattggaggtcaatcgagcccgataatcggtacgtgtctgactcaattacagcactgaaacggcttatgtga

SEQ ID NO: 9322 - RNA, 1080 nt, synthetic construct
  source 1..1080: mol_type = other RNA
atgactgtaatcctcgttactatcctgatcttcatttgtggcatgatcctcctgataatcagagagaagaagaaagagaaagacctgctgaatcggcacttgcctaatgacaactcgtttagaaatggcagtgtgttttatcatactggtatttgtaggcaggcagtgtatgacccggaagccttgaagtggtgcgccaccttcctgaacattggcgaaaaggaactatcatccttcctgcatcaccctagcgagtggtacagcctgttctggctggctaagcgaggagggggctaccgaatgatagccgcgcccaagaaggagcttaaagctgtgcatcggaccatctacgagaagatactgatcaattctgagatccaccccagtgccactggctttcgcaggaataaatccattgtggagaacgtgaggcctcacctagggaacgcccaagttcttaaggttgacattcatgacttctttggttccatccgcaaacacacggttcgtcgtacattcaagcagcttggatacgaatctggtgtagctaaaatcctggcagccctgtgctgcaaatccggacgcctgccacaaggggcccctacaagtccagcattgtctaatattatcgtcgcaggaatggatgaacagctcgcggctataagcagaagcgtcgggttgacttatacacggtacgctgatgacttgaccttttcagggaatctctccagtcatcatgcctttttagcgcaggtggaaaaggtcgtcgcagagcacaaattcgccttaaacagaaaaaagacacgcttccttgatatgtcacaccggaagatcattacagggatttccgtgagcagcggtaccaagcttaccatcccaaaggtgtttaggcgggagattcgaaagcaggtctatcacgtgctgaccaaaggcctggctgaacaccagaaatatattggctcttcagatcccgcatacctcaaaaggctcataggaagattaagctactggcatgccgtagagcccgataacacgtatgtgatccgctctctaaaagctctcaaggaactgaaccactga

SEQ ID NO: 9323 - RNA, 1167 nt, synthetic construct
  source 1..1167: mol_type = other RNA
atgaacatcaacattgtaatcctgattatcgtcttaggactgtggttgttgtacaagttgttttcctcagggcgtaaggacgattataacaggaatacttcctcatacaatcgcaatgctgataactacgacaagggggaagagaagaagaagaaccataggaagttcatcttcagtttcctgcagagagaaaaaaataagacagaggtgaaagcgaaaagacaaggttttctgaccagaattttctcgactcccctcccttttgacgatgcagcgatcacctggtgtgctaacttcctgatcgtcgagaagaaaacactgatcgagatcctgaaggatacctcagatcactatacacacttcaaactgggaaaacggagtggcgggtatcgcacgattagcgccccaaataagactctgctcaacattcagcgcgtgatctacaaaaggattctgctatctgtcaacttgaatcctgcctccatgggttttcgacagaacatttccgtggctcataatgccaaagcccacctcggaaataagcagattctcaaagtagacatcgttgacttttttggctccattaaaaagcaaaggataattgagacgttcgggaaaattggctatccctctaatatcagcgaggtgctggcagaactctgcaccctcgagggcaagttaccccagggtgctgccaccagcccgactttatctaacattgtggcccatgaaatggacgtcaagcttgtgagcatcgcccagaaaaataatcttacctacacacgctatgcagacgaccttacgtttagcggagagaatatctttttcgagctgatatttagtgagatcaacaacatagtccgggaaggcaagtttatcatacagcgtaagaagaccaggttcctaaccgagaaaagacggaaaatagttacaggtatatcagtgagttccggcaaaaaacttatgatcccaaaagccaagaaacgagaaatccggaagaatgttcactacattcttactaagggcctggctgaacaccaacggttcattgggagcactgatccttcttacatgaaaagactcatgggatacttgaacttctggctgatggtggagccagataacgaatatgtgaagaagtctataacagcactgaagaagatctga

SEQ ID NO: 9324 - RNA, 1167 nt, synthetic construct
  source 1..1167: mol_type = other RNA
atgaacaccattcttgttatcctcatcatcgctctcgggttatggctgctttataagctatttaactctggaggcaaagatgattataacaggaacacatccggctataacaggaacgccgacaattacgatagaggagaaacgaagaaggagaataacaaaaagtcaatcttctctttcctgcacaaaaagaaaagcaacacagaaaaaaaggctaaaaggcagagcatcttcgctcgtatattctccgagcccttgccttttgacgatggcgcaataacatggtgtgccaattttctgatcatcgacaagaataccctcattgggattctaaaagacactagcgatcattattcccattttaagctggggaagcgatcaggcggctacagaaccatttccgcccctgatgctactctgctgaatgttcagaagatcatctacaagcgcattctgctctcagtgaacgtccacccagccagcatgggtttccgtcagaatattagcgttacgcacaacgcgaaaacccatttaggtaataagcagatcttgaaggcagacatcacggatttcttcgggtcaattaagaagcaccgcatcattaaagcttttaggagaatcggatatccggccaatatcagtcaagtgctggccgagttgtgcacattggagaacaaattaccccagggtgcggtcactagtcctaccctttcgaatattatagcctacgacatggacatgaaactggcttccgtcgcagaaaaatctaatctgacttacacccgatacgcagatgaccttactttcagtggcgagaacatcagttttgaactgaccctgtccgagatagacaggattattcgcgaggagaaatttgtgctgcagcggaagaagacaagattcctcacagaaaagaagagaaagatcgtaacaggcataagcgtctcttctggagagaaactgatgataccaaaggcaaaaaagcgggaagtgcgcaaaaacgtacattatattctcaccaaggggctggccgaacaccaacggtttattagttccactgacccatcttacatgaaacggctaatgggatatttgaatttctggctcatggtggaacccgataatgagtacgtgaaaaaaagcatcgcggcccttaagaaggtgtga

SEQ ID NO: 9325 - RNA, 1083 nt, synthetic construct
  source 1..1083: mol_type = other RNA
atgaatattatccttgtggtcttctttatcgtactgatgctctggttgctgtttcggttgttaaacttcgatggaaacaacgtggatgtggagaagaaagaaaacggctccgtgttaaaagctaaaaagcagtctttcctcgcccggattttcagcaagcccctcccttatgatgacgaagctataacttggtgcgctaatttcctaatcatagacaagaataccctgatctccattttgagaaatacttctgcgtattactcacatttcaaactggcgaaacgtagtggcggctacagaaccatcagtgcacctaatgaagccatgttgaacatccaaaggatcatctataagagaacactgctgactgtcaacattcatccagcctcaatggggttccgcaagaatttttccgtgactcacaatgcaaaggctcacctcggcaataaccacattttgaaggtggatctctttgacttctttggctcaatcaagaaggacagagttatcaagacatttgagaagatcgggtatcctgtgaacattagccaggtcctcgccgagctatgtactctgggaggaaaattaccacagggcgcccccacaagcccgactcttagcaacattatcgcatttaacatggacatagaacttgcttcaatcgcacagaagaattctctgaggtacacacgctacgccgacgatcttaccttttcgggaacggatatagccttcgagcccctgctgacagacatcgatgtaattattcggaaggagaactttatcattcagaggaaaaagacacgtttcctgaccgaaaagaaacgaaaaatagtgaccggggtcagcattagttccgggcagaaaatgaccattcctcgggccaagcgacgcgagataagaaaaaatatgcactacatcctgaccaagggtctggtcgagcatcagcgcttccggggttctacggacccagtttatctacaaaggctgatgggttacctgaacttttggcttatggttgagcccgagaatgaatacgtgaagaggtccatcgcagctctcaaaaaactcaaaattacctga

SEQ ID NO: 9326 - RNA, 1146 nt, synthetic construct
  source 1..1146: mol_type = other RNA
atgaacaccacactgattatcctgctaatttgcttagggctctggctcctttataaagttctgaattacagaggtggggatgtcgacaattataaccgaaatattgactcctacgacaaaggagagaaaaacaaatctaagtccaggatcttctcttccaggaagtctgactccgacttcagcagtaatcctgccaaaaagcagggcttctttgcccggttattcagtgtccagctgccatttgatgacgaggcaataacctggtgtgcaaactttctgatcattgaaaaggacgtcttgatcggaatccttcggaatacgtcacagcattactcgcactttcgaatcagcaagcgctcaggtggtgtgcggatcatttctgcgcctagccccgccctcatgagcttgcagaagaccatctacaagagaattttggtatccgtgaatattcacccagcggccactgggtttaggtccaatacaagtatcgtacagaatgccaaagctcatcttggaaaaagccagatccttaaggtggacatcaccaacttcttcgggtcaatcaaaaagaggaaggtcataaaagtctttgagaacataggatatccccccaacatatcacaggtgctggctgaactgtgcaccctggacaacaaattaccgcagggggctccaacttcccctgtgctgagcaacatcattgcctcggacgttgatgtgaagcttgctgccctgagccaaaagaaagagctctcatatactagatacgcagatgatttgaccttcagtggctctaacattgatttcgaaacaacgctagccgaaattgacgaaattctgtttaaggagcggttcatcatccaaagaaagaaaaccaggcatataactgagaaacgccgcaaaattgttacaggaatcagtatctcttccggcgagaagatgacaattcctaagagcaccaaacgcgagctcagaaagaacgtgtactttatacagactaagggcctggctgagcaccaacgtttcattggctctactgatcccacatatttgaagcgtatcataggccaactgtcattctggcacatggtggaaccagataatgattttgtgaagaagagcctcagtgcactcaaaaagctgtga

SEQ ID NO: 9327 - RNA, 1173 nt, synthetic construct
  source 1..1173: mol_type = other RNA
atgaatattgctctcgtgattttgatcattttcctggtcctgtggatcttttacaagctcctgaattactccggaggagacgaatactctagggatacacgtaactacaacaggaaccctgataactatgacaagggtgaagaggtaaaaacaaccccgaaaaaaagcattttctcagtgttttccagggagaaaaaagttaaacaggcaaagaggcagagctttttcgagcggatctttagcgctcccctgccattcgatgacgccgcgattacttggtgtgccaatttcctggctgtcgagaagaatgaactcattgacattcttaagaacacgagtatccagtactcacacttcaagctaggtaaacgttctggcgggtgccggaccatcagtgcaccaaacaacgtactcctgaatatccaaaagaccatctacaagcgcatactgttgtccgtttccatacacagcgctgccactgggttcagacaaaatgtgtcggtgatccataatgcgaaggtccatctggggaagacgcaaatcattaaagtcgatcttgctgacttctttgggagtataaagaaaccccggatcattacagcctttgagaagattggataccccagtaacatcagtaaagtgctggcagaactttgcagccttgacggcaaactgccacagggggcggcaacttcccctacactctctaacataatcgcttatgacatggatgtgaaacttatagccttggcccgaaaacataatttaacatactcgcgctatgccgacgatttgactttcagcggcgaggatatcgcatttgagctgttcttgtccgaaatcgatggtattgtgcgggaggaaaagtttgtgatccagagaaagaaaacccgctttctcaccgagaataagaagaagataatcaccggagtttctgtctcctcaggcgagaagctgaccatccctaaaagcaagaaacgagagataagaaagaacgtgcactatattctcacaaaaggtctagccggccaccagaagtttattggatcaactgaccctagctatctgaagagaattgtaggctatctaaacttctggttaatggttgaacccgactccgaatatgtgaagaagtcattaatcgccctgtctaagctgcagggcaaatcttga

SEQ ID NO: 9328 - RNA, 1164 nt, synthetic construct
  source 1..1164: mol_type = other RNA
atgaacatcctgttgggcattctggccatcgcactgctgtatctcctgtacaagttgttctataagaagcgcggagacgagtattcacgcgatacatctgggtacgaccgcgggaccaattcgaacgagaaggaagagaggcctaaagaccagccaaaaaagtccgtcttcagtttttttggccggaagaatattgaaaaaccgcaaatcgccaagcgtcaggggttgatagccaggctgttcctggccccattgccctttgacgataaagccattacgtggtgcgccaatttccttgtgattgagaagaacatcctgatcgatatacttagggacacctctaaatattactctagattcaggctgggaaagcggagcggaggttttagagagatatcagcccccgtcacagctctgctgaatatccagaagaccatttacaagagaacactactctccgcaaacgtacatactagttgtaccggcttccgacaaaacgtgtccgttgttgacaacgcgaaaccgcacctcgggaagccccacgtcctcaaagtggacatcgtggattttttcggtagcattaagaagagccggataatcaaagtgtttgagtcctttggctacccaagtaatatatcacaagtactggccgagctgtgcagctttgaaggcaaacttcctcagggcgctgcgactagcccagcactgtcaaatattgtggcatatgatatggacgtgaagcttatgagtatcgctcagaagcacaacttcacgtacacacgctacgctgatgatttaacattctctggcgagaatattctattcgaggaagtcttatctgaagtgaacaatatcgtgaaggatgaaaaattcgtgatccagagaaagaagaccagattcctgactgagaaaaaaaggaagattgtaaccggtatcagcatctcatccgggaagaaactcatgatccctaaaagtaagaagcgagaagtgcggaaaaacgtccattatatcctcactaaaggactcaccgaccatcagcgttttattggtagcactgacccttcttatttgaaacggctgctcggatacctaaacttttggttaatggttgaacccgacaatgattacgttaagaaatccattgcttccctgaaaaagctttga

SEQ ID NO: 9329 - RNA, 1083 nt, synthetic construct
  source 1..1083: mol_type = other RNA
atggacatcctcatatacttcgccattgccatcattatcatttgggcaatcttcaaattgctgaattacgacaattcagccgaaaaagacaagacaagaatcaacaacaaacctcagagtccagggctgtggcagcggattacagcccctcacgtgccatacgataaccaaagtttaagctggtgctctaaattgctggcggtggatgttgttgaactcaagaaaatcctggcctacagggacattcactataaatctttccgcattggaaaacggtctgggggctatcgcactatcagcgcaccaaacgagcagttactgaacattcagaaaaccatctacaaccgcatcctgcttcccgtgggtctgcatccagcagcaactggatttaggaaggacacctcaatcaaagataatgctaagccccatctcggcaagcgactggttctaaaaatggatatcgtcgacttcttcggctccatccatgagtatagagtacgaaaaatcttccaggctattggataccccgtcaatgtctctgacgtgttggctgccctctgctgtctcagacagcgtctcccgcaaggtgcacccacaagccctgccctgagcaatatagctgcccttgagatggataagaaattggccgctctggctaccaagtataaccttacctacagcaggtatgcggacgacatgacctttagtggtgatgagtttgagaaggacaagctgataaaaatagtgaccaaggccgtgcaatcggaaaactttgcagtaaagaggtccaagacgcgctatatgggagaaaagcagcggaagattgtcactgggatttccattagctcaggcgagaagatgactatacccaaatcaaaaaagagacaggtccgacagcaagtgcactatattctgacgagggggcttgatgcccaccagcgtcacatcggcaataatgatcctgcttacctaaagcggctcgtgggctacctgaatttttggttatccgtggaaccggagaaccggtacgtgagaaactccatcaaggctctggcgaagataaagacagtagggatcgtttga

SEQ ID NO: 9330 - RNA, 1164 nt, synthetic construct
  source 1..1164: mol_type = other RNA
atgacaggtcttgtcatcatcagcgtcgctgtaattatcatttggctgatctacaagtacagtcgcaaagaagatgactattctaggaccacggaccactacaatcggaacccgaaggggtataacaaagagattaatacgtctccttcttatgccaataatcgtaaacactctacaccccctcccaaggtggagaagaaggggatattctcacagctgttcgagagaaagccaagcctgcccttcgatgataaggctataacctggtgtgccaacttcttatcagtggacgaaaacgcgctgcggttaattctcgcctaccagagtaactattacaagaaattcctattgggcaagaggagcgggggttacaggacaataagtgcaccacaggaaccactgataagcattcagcgcaccatctacaggcggatcctggctcctgttaatatccatccagcagctaccgggtttcggcataagaaatcagtcgcggataatgcccgcccccacctcggaaaagactacatgctcaaagttgacatcatcgatttttttggctcgattaaacgtgacactatacgcaagacatttcagaagatcggttatcccctaaatattgcagaagtgctcactttcctgtgctgcttgcgaggccaactccctcaaggagcccccacttcccctgccctttccaacattgtggcctatgagatggatcagcagctgtatgccttggcaacagaaaataacctgacctacaccagatacgcagacgatattactttatccggaaactccttggccaaagatgagatcctgcccgctattcagagaattgtgggcgaagctcgatttaggataaagcacaagaagacccggtatatgaccccaaacagaagaaagatcatcacaggcatcagcgtgagctcaggcgaaaagctgaccatcccgaaaacaactaaacgtgagattcggaaaaacgttcatttcatcacgactcgcggactcaatcgccaccagcaacacattaaatcccaagacccttcctatctgaaacgactgatagggcagctctgtttttggcatagtattgagccacagaacgagtacgtgcagaagtctcttgacgtacttaagaagatcgagaaaaggatcagatga

SEQ ID NO: 9331 - RNA, 1092 nt, synthetic construct
  source 1..1092: mol_type = other RNA
atgactactaccctcctcacaacactggctattctctttgggatcctcatgctggtgttgacccttagggaaaagcagagggagcggaggaaactttccggttccacacctgacgcgccctacagacaacagccaccacccgccaaccccccatctacagatcgagatccattgaatgacatatatggagcagatgcgattgctcggtgcgcggcccaactgtgcactactgagggcgagctcagggacgtactacgcgacatcagatgggctggctatactacattctggatggccaaacgccggggtgggtaccgcaatatcgaagccccaaatccgcaccttaaagccattcagagagcaattctggacagacttttgacccctctacccgtgcataccgccgctacgggctttaggcctgggttgagcatcgcagataatgcaaggccgcatctgggccgacgacgtgctctaaagactgatctgcatgatttcttcggatccattcgcagacccgcaatccgccgggtctttagggatatgggctttgatgcacacatcaccaaagtcctggttgacctgtgctcacaccggaacagattacctcaaggagccccgactagccccgccttatccaacttggtcgcagccaagatggacgaaagacttaccgctctgtcactccgccgcggcttaacgtacaccaggtatgctgacgacctgacattttcgggcgacagtttcaatagaaatgagttgattgcggacatcaagcacattgccgcctgtgatggtttcaccctcaacgcaaaaaagacgaggctcatggcttctagccgccgaatagtgaccggactgtcaataggaagtggtgagaagctgacactgccccgtgaacggaaacgagagatacggaagaacgtgcatttcgtactgaagtacggggtgaccgagcacagagagcggatccattctagcgatcctgcctatgtgaagcggctcatcggggaactttgtttctggcgtagtatcgaacctgagcacccatttgttaaccgtgctctgagacagctgcgcgccctgaggtga

SEQ ID NO: 9332 - RNA, 1032 nt, synthetic construct
  source 1..1032: mol_type = other RNA
atgaaggagcattatcagatttggctaaaggccatcgaagagtccaatactatgagcgagaacgacaagaacgcattctcaaaagtggtaattgctctctccaaatctggcgccccagtgattttcaatgtcaagcacctggctctcctgattggcgtcgatttccgggccctaaaacggatgttatatgtcagagacaggttttaccgctctttcagcataaagaaacgcaatgggggtgagcggctgatcgaggcaccttaccctagcttaaagatggttcagcgatggatactggacaacatccttgttcccagtgcgttcgtacatccctgctcggtggggtttattagcaagaaaaccatcacagataacgcccggccacacctgggacattcagtgctcctgaagatggatatcaaggattttttccccagcgtaaccgaagagttagtgagatcctacttctccaacctcgggtaccgcagcgatcttgcctccacgctggcctatctgtgttgcaaagacggacgccttccccagggaagtcctacttcaccaatgctcagtaacgtcctgttttatgagatggacaatcaactctctaagattgctttctgggacggtctttcttataccagatacgctgacgacctggccttttcaggggatagaatacggatctccatcatcgataacgtggctgccatagtccttaagtacggcctccgaatcaataatgagaagacaaggcgctccggcagcacctctagaaaaattattactggcgtttccgtgtcttcaggagaaaagttgacaattcctcgtgaagttaaacgagtcatcaggcaaaaagtgttttacgtgctcaaatacggcttgacagaccacctgaagcacatccagtcgcgtgatttgctggcaggctacaggctgctggggctgctagcgtattggcacagtgtggagccggaaaataaatatgtgttggacagtagcaaggcactgggagaaatgttgaggggtgaatga

SEQ ID NO: 9333 - RNA, 1068 nt, synthetic construct
  source 1..1068: mol_type = other RNA
atggtatggaaactgctgaagagtcttttttctacgtctttccataaggaagatgtgccagacgttcacgccgacacccaggtgcagaacaacaaaatcaactctaagtcactgaggccttctgtcgaatatctccttactaaagacctaggtcacctgtgtgaacttctcgagatcgataataaaacccagttagccccaattctactgcaccccgaggagtactaccgaacatttcgtattcccaaacgcaatggcaaaagtcgattgatttccgctcccttcacgccactgtacaggatccagaagaagatttacgagaagatcttgatccatgcccgggtccacagcgctgcaaaagggttttgcataaataccagcattgtgcataacgcaaaggagcacttacacgcaaaggatctgctgaaagtagacattaggaatttcttccctagcattcatcagagtcgcgtggtggctatattccggaatctcgggtatgagtacactttggcttatcagctcgcgtatctgtgctgtctgaatggaaagctcccacaagggtcccctacatcccctgccctgtctaacctagctctgttaagattggatagtaaactttcggagatagccggcaacagacagctcatttatacacgttacgccgacgatctcagcttctccggtaatatccttagcaagaacgaacttctcgctgagatctcaaaaaccgttcaggaggaaaagtttatcctgaacaagaagaagaccagatttatcaccggagcaaaaaggaagatcattactggcatctcgatttcaagcggaaagctgacaattcccaagtccaaaaagagagagatccgcaaagtgatctactatataaagactcgcggcatagccaagcatttgttgcacattaattccaaagatgcagaagactggtacctggagaaaatcctcggctatctgtcattttggcgggccgtcgaaccggaaaacgcgtacgttttacagtctgtgaagtatatccaaagcctgcggaaacaactgctgtacaaaaagtga

SEQ ID NO: 9334 - RNA, 1026 nt, synthetic construct
  source 1..1026: mol_type = other RNA
atgaatgagcagcaaaataatatagagatctggtaccacgagatagataaggcaaatgatttaacaagcaggcagaattcctatgccaaaaagtatgtggccacacttttgaagaataatgcggtagttatcttcgatttgtatcatttggcctgcctgatcggcatcaagtaccacatactactgaagatgtctcatagcagtaagcacttttactacgacttcaccattaaaaagagaaacggcgacgaccgtgttatatcagctccatttccgagcctgaaatacacccagaagtggatttaccaaaacatcctggcaaaagcccccatttccccgcatgccaaagggttcgtgccaaatctgagcctcctgaataacgctgaaccccaccttcatcaaaacgccatattacagatggacattgccaacttttttccatcgatcagctggaagagggtctataacgtgttcaagaacatcggttataataaccggatctccgccgctctcacaaatctatgctgtaaacacaacagtctgcctcagggagctccaactagtcctatactcagcaacattatcctgtcgaagctcgacaaacgcctttccaaactcgcagagaaacactcccttacttatactagatacgctgatgacattacattctctgggtatattatccccaatgagctgatcaacatcataagctacatcattgaagatgaaggatttattgtgaacaacaacaagacgagaattgcgcgcggaaacaagaagaaaatcgtcaccgggatttctgtgaattctgaatacctgaccatccctaggaaaaagaagcgggagatccggcaggcaatttactatatcaaaaccaaaggcctctcctctcatatggagaatatcaataacagtgaccctatttacatctatcgattattgggttacctgaatttttggaagttcattgagcccgaaaactcatatgtcatcgattcaatccgcattattaagtcacagctgtga

SEQ ID NO: 9335 - RNA, 1077 nt, synthetic construct
  source 1..1077: mol_type = other RNA
atgtcatatgacagcgaggagaacattgaacagaagctgaaaattatccgaaagtacagcaaacagaaaaatcactacgaatcgctcctgaaggatatctcaatcatggaacagaaaggatccatcctgattatcaataacaagcacctggctgacctcgtgggtatttccttcgacgggatcttgaagatcattaacagcagtcaaagcttttattacagcttctctatccccaaaaagaatggcgggtatagagtgatctcaatgcccttcccctcactgatgaaagttcaacgttggatatacgaaaatgtcttgttgaagcaccagattcataaggtagccaagggcttcgtgaaagagttatctatcaaggataatgcatctgaacacttgggatccaaggagcttctcaagatggacatccaggacttttttcctagtattagcaaaaagcgcattatctccatattcaaacgcctgggctacaacaataaagtttcttattcgctggccagcatctgttgcctcaaccagtgccttcctcagggagcaccaacatcccccaccctgagcaacatcatagcctacaagttagataatcggatccagggcttagcgaataaattcaacattatctacaccaggtacgcagatgatctgacatttagtggtgatacattccctccgtttttttattccactatacagagaatcctcctggaagagggcttcaacgtcaataaggacaagaccagactaattaaagaaggtcgccagaagattgtgactgggatatctatcagttccgacaaaatgaccatcccaaaaattaaaaagcgggagatcaggcatgctgtctatttcattctcaagcgagggctatttgctcaccaacaagccattggaaactatgacccaatatacatcgataggattattggctaccttcatttctggcagttcgtagagcctgagaatgagtttgtgcggaaaagtattatcgagataaagacgaaccttgcctcactggaagaggagtttaaggtgtatatagactctaacctgaagtactga

SEQ ID NO: 9336 - RNA, 1071 nt, synthetic construct
  source 1..1071: mol_type = other RNA
atgtacgaggccctcaacaactgggatctgtacttagacagtaagataaaggacgcaaaagttagatctgtgttaaagaagtacgttaagaacttgctgtcaaataacaccgtgatcattttcgagttcaatcacctgagtaagctcctgggcatagaaaaatcctacctcagccgactggtcttcggcactcactatttttaccagagctttaccattcccaagtctaatggggaggaaagactgatcaacgcccccaaggatattctgctggacattcagcggtggatttactataacatcttgaagggtatttccctcaatgacaattgcgtcgggtatagagagggatattccattcgcaacaatgtcgaaaagcatctgaataaagagtacctattgaagctagacctgaaggactttttccctagcatcaatattgagagggtaatcgctgtgtttaaaaatctgggctatactccatccatttcttacattctcgcttctatctgtacacttgatggatacctgcctcagggctcgcccacaagcccatgtctttctaatattattgccaaaaggcttgatgcgaggatcaatggtctgtgcaagaaattcgacctggactatagcagatatgccgatgatattacgatttcagggaataagttgccaaaaaagatgatctcctacatagagaacatcatagtggacgaaggttttgaaatcaacctaaacaaaaagcggctgctgtacaaaaacaaccaacgtatcattaccggcgtgtcaatctccagcgggtaccttaccatccctaaaaaaaagaaacgcgagttacgacaaatcatgttctatattgagtgctatggactgagtaaccatttgtttaaaaaggggctcaacgatcctatctatctcgaacgcataataggctacctttacttttggaaattcctcgagcccaacaacaaggatatcatcaggtatttcagtatcatcaagaaggagatgatcaaacagaatgaatacttcacagactttcggatcccgaatttcgaatttataggatga

SEQ ID NO: 9337 - RNA, 915 nt, synthetic construct
  source 1..915: mol_type = other RNA
atgaaccaggatctagattattggttcttctttatcgacaagagcttcagaaagatcaaggtgcggaaggccctgaaaatatacgtggagaaaattctgagcaccaacagtccaatcattttcgaattcaaccatctttccctcctgttgggcatagagaaggattatctcgccaagatcgcaaacaaaagcgctctcttttatcacgagtttcacatccctaaaagaaatggggaactgaggatcattaacagtcccaatacaatccttctgggcattcagaggtggatttatcagaatatcctgagccatattcagctgcacgagtcttgcacaggatttcgcaaagactacaacattaagcataacgcgagcaaacacttaaactctaacgtaatcctgaaaatggaccttaaagacttttttccctcaattaacaagcgacgcgtcatttcagtctttaagaacatcggttatacccggaatatttcgtacaccttggcatcattatgttgtaaggacgactctctaccacaaggtgccccgacttctcctttcctgagtaatatcatagctaaacgcctcgaccggaggttgaatgctctgtgccagaagttcaatttgaattacacaagatacgccgatgatctgaccatctccggagatacgatatccaagaagcttataagctatatctccgatatcattaacgacgaggggtttatcgtgaatcaggataaaactaggctcctctacaaaaataatcgtaagatcatcactggaatcagtatttcctctgacaaactgacaattcccaagaaacgtaagcgggaaattcgacactcaatttacttcatcaagaagtacggcatattcgaacatgttaacagacaacagaaagtggacataatctga

SEQ ID NO: 9338 - RNA, 1074 nt, synthetic construct
  source 1..1074: mol_type = other RNA
atggaaaccgccaaatacaaccttaatatccagagactgatagaagataccttccggggagagaaaaccctcaatgccttgaatatatactccaagggcctgattaacaagaatcttcctatcatcctctctaaggaccacctcgctagcttgctaggccacccattaaatctgatcaacaacgtaatctactcaccagaatctttctatcggtccttctatatccctaaaaagaacaataacggtaagcgagtaatccacgcccccaaggggatccttctggacctgcagcagaagatttacgagtacatactcagtgctatacctgttcacgaaaaagcgacgggctacgtcgcaaacaagactataaaagataacgctattccacatctgaataccaatgaaatcctcaaggtggacctgaaagactttttcccctccattaactttaaccgagtgatcaatgtctttctgaaagccggctacactagggatattagtttcagcctcgcacgcatctgcacattgcataattcgctacctcaaggtgccccaaccagcccgatcctaagtaacctcatcattaagcgtttagatattcgccttgagaagctctctaaaaaactgaagctgaactatacaaggtatgctgacgacctgacatttagcggagattccattaccatttcattccttcattacgtgaagagcattattaattccgagggatttaaggtcaataagaagaaattgcggatcctgcgcaagtctcacaagaaagtgatcactgggattagtattacgaacaacgaactgaaagtgcccagggagaaaaagagaatagtgaggcaggccgtttactttattaagaaacacgggttccttaatcacttggagcatatagacagattcgaccccatcatgctggaaaagctcctgggctatgcgtattattggaaattcattgaggatagcgagtcctctaagtcaatcatctctgttctgaagctggagatcgcaaaattgaactccagcacatcaaatttacatactcacctggagtttgtgaaatga

SEQ ID NO: 9339 - RNA, 1083 nt, synthetic construct
  source 1..1083: mol_type = other RNA
atgaaggtggtcagcccctcatccttcttcaccatcatgacacaggagcaggagtttgagatcaataaatggaatggattcatcagcgagaacattaaaggggataagacgaagaaagcccttagcctatacgttgagaaactgattcaaaaggataccgtggttatcattgactttaaccatctggccatgcttcttggtattcaagcaaatactttcgcatccatcatcgctaatacagagagcttttattacaacttcgaaatacccaaaaggtctggaggcacccggactatatctgcgccataccccgtgcttttaaacgcacagaagtggatttatgacaacatcctgaacaaaatcaaggtgcatgataacgccaaaggttttataaagaagacatcaattgccgacaatgcccgagtgcacttagatcgcgactacatcctgaaaatggacatcgaaaacttttttccttccattaagatgaaccgggtgatgtccatcttccgaaatctcgggtataccaaaaagatatcctactacctatcgtctatttgctgtctccacggatttttgcctcagggagcagtcacttcaccttgcttgagtaacattatcgctaaaagaatggatgctcggatcaccggactcgccgctaggttcgcgctcaactatacgcgctacgccgacgatttcacactgagtggggacattctgccacccaaaattatcgactatattgaggaaatcgtgaatcaggaaggcttcctgatcaataagaagaagacctcactcatcggtaaagggaagcagaagataataactggcatttctatctccagtggcgagctgaagatccctagggagaagaagcgtgaggtgagacagagcgttcactacgtcctgcgcaatggcttatttgaacatcaaaagcacattgactcttttgatccgatctatgtagaaagactgctggggtatctgttcttctggttgagtgtagaaccagacaataattttgtcaagagctccataagcaaactcaaagattacacaaaagtcttggatggcattaactga

SEQ ID NO: 9340 - RNA, 1041 nt, synthetic construct
  source 1..1041: mol_type = other RNA
atgaacgacaacaaaaatatcctcgtgaaagaatgggacgcatttatttctgagaacatcaggggcgctaaaacacagattgccgtcaagacgtacgtgaataagctgatatccaacaataccgtggtgattcttgactttaatcacttggctctcttgctaggcatcgaagttgatgttctggcccgcattacatcacacagcgagagcttctactacgactttgaaatccccaaaagggatggcaaatctcgtaacattagcgcgccttatccagtacttctgcagagtcagcggtggatatacaaaaatatcctgtctaagcagcctatccatgactgctctaaggggttcaaaaagaatacctccatagtcgacaacgcaaaagtgcacctcaaccagaagattctcttaaagatggatatagaggacttcttcccctctattaaactgaaccgggtaatcagcgtgtttcgcgtgctcgggtatactaagaagatttcatactatcttgccagcatttgctgttataagggggctcttccacaaggcggagtcacttcgccctccctctccaacattattaccaagagattagattaccgcctgaatggtttagccagcaagtttgacctgaagtacactcgatacgcagacgatttcacattcagtggtgaatatctaccgatcaagatcatagactacattaagtccatcgtctctaatgagggatttaagatcaaggatagcaagacaaagatgataggttccaagcgacagaaaatcgttaccggcatctcaatctcctcagggaaaatgactatcccaagaaaaaccaagagggagctgagaaagaacgtgcattatttgctgaaaaatggactgagcaaacatttggagcacaatcggattaatgatcccatctacacggagagaatgatcggatatctgcatttctggcacagtgtggaacctaacaacaaatatgtcaaagagagtctgaaaaagctcaaagattacagtatccaactggattcatga

SEQ ID NO: 9341 - RNA, 951 nt, synthetic construct
  source 1..951: mol_type = other RNA
atgcagatcgattcacacgtacacatgcttctcggcattagtaccgaggaggaattgagcgtgctgtctagaattatagctagcccaagcaatttttatcgggagttcaaagtgcccaaaaagagcggtggaacacgcaccattagctcaccgtacccgtctttagccatcatccagagtaacatcctcaataacctttttttcccatttgaggctaattcttccgcctacgcttatgtgaaaggcaaaagcgctattgatcatgcacgaatccatgtcaacgggagtgaactgttaaagttggatatcaaggacttctttccctctatttctcggcaaatggtctttgaggccctgcaaagatcaggcgccaaggccgacgtttgcttctacacgagtttgatttgcatcctagataatgggttgcctcagggggcctgtacatcccccgcactgagcaatctggtgttttcacctatcgatgtgaggctgactggcctggcgaatttcttcggcctgaagtactcgcgatacgctgacgacctggcgttctcaggggagtttattcctcgtgatttggcatcccttgtcggagagattctcctggaatacgactttcacctcaaccacaaaaagacccagttaaaactggcggggaggaaaaagatagtgactggcgtgtctatttcctccggtcaggtcagagctccaaagtccttcaaaaggaagctacgcgcccagatttatgaacttgagaagaacatcggaagtctggcaaggctgcccgacttcgacccacttatatatgaacgcctcatcggacggataaactatctgctacaaatcgagcctgaaaacaattatgcaaaggtaaaaaaggcctacctcagcaagtgtcatcaggacttcctcggtctggttgatgaacagatcatctccgcctttgtttga

SEQ ID NO: 9342 - RNA, 954 nt, synthetic construct
  source 1..954: mol_type = other RNA
atgcagatggacagccatatccttaaattgctggggatatcctcaaaggaaaaccttgccatcctctcacgtatcattgcttctcctccatctttctatcgcgaattcaagatccccaagcggagcggaggtgtccggactatatctgcaccatatccttccctgtcttacatccagagtaacattttcaactcgttcctaagctccgtagagtgtaatctctcagcctacgcgtatgttaagggtaaatccgcaattgatcacgctcgcgtgcatattaacggaaaagaactcttgaagctggatataaaggatttctttccaagcatcagcaaacagatggtctttgaagctctgcaaagagaaggcggcgagaattctgcctgcttttatatctccaacctgtgcacattaaacgatgagttgccacagggggcctgtacctctcccgttctgagtaatctagtattttccccgatcgacattcggctaagtgccctggctaagtttctcgggatcgactactccaggtacgcggatgaccttgctttctctggcgactttatccctcgcgacctggcatccctggtgggcaagattatactggagtacgggttctttttgaacgaaaaaaaaacccagttcaagcttgacggccgaaagaagattgtgacaggagtttcaatttcgagtggtgagctcaaagcaccccgggtgttcaagaggaaactcagggcacagatttacgaactggagcgaaatgtgagcaatttagccaggctgcctagctttgaccccttggtgtacgagagactgctcggaagactgaattatctgttgcaaatcgagccggaaaatcagtatgccaaagccaagaaaaagaccatcagtgagagccaccagagattcctgggcctcgtggatgagcagcaagtcgtctcacttctgttatga

SEQ ID NO: 9343 - RNA, 948 nt, synthetic construct
  source 1..948: mol_type = other RNA
atggaatttgaagtgtatcccattctggggattggtagcgtggaagagcgtgccatcctgtcgaggatcatagctgaccctcccagcttctaccgacggttcaacatccctaagagacgcggaggagtgagagtgattcacagccctttcccatccctggccaatgtgcaaaagtctattctgactaacgtgcttgcagacataccagtctcagaatacgcatttgcctatgtcagtgggcgcaatgcaattctgcacgctaaagtgcacagggagagccctgagctgctgaaactcgacatcaataggtttttcccctcgatcacgcggcagatggtttttgaggcgctgcagtctcatggattgagctctaaggtgtcatatttcctctcttggctttgcacacataagaacgagcttccccagggcgcctgtacatccccagtcctcagcaatatcgtctttagcactatggactttcgtctttcccgccttgccagtgaagtaggcctaagctactccaggtacgctgatgatatggctttctccgggggctacgtacccagaaacttatcacggtccatctctaaaattctgttggagggtggcttctacctgaacgagtccaaaacccagttaaagctagccgggagtaaaaagattttggttggggtcagtatctccaccggatgcctaaaggccccaaaggaattcaaacgaaagctgagggcccagatctacgagctcgagaaacactcaggaaatttgagtgaagtgaacgattttgacccgctgatctatgagcgggttctgggtcggataaactatctcttgcagatagagccggataatagatatgctctcgaaaaaaagagagaattatctgagatgcatcaacgcttcctctctctgggcgcaggcttttcagaggcgctgaattggatgtga

SEQ ID NO: 9344 - RNA, 969 nt, synthetic construct
  source 1..969: mol_type = other RNA
atggataatattgagtctcagattgaagtgtccgggctgatggccttgtacagagatttaaacctctccgtcgaggatctagctattgtgtcccgtatgattgcccgaactgacctgttttaccggtcctttcggatccccaagcgaagaggcgggacacgcttaataagtagcccctatccgaccctcgacaaaattcaaaagagcattctgcagaatgtactggaagactatctgccacatgattctgcctatgcctacgttaaaaacaagtgcgctgtgggccatgccagatatcaccttggtagccgggagatccttcagcttgatattaaggagtatttcccttcgatctccagacagatgatcttcggagccctatcccgcaatggctgcgatcccaagaaggcttcatacatctcaatactctgcactctgaagaatgcactccctcagggagcatgtacaagccctatgctttcaaacctggtgttttttccgatcgatgtacggttctcaaaactggcatcgagtttgcgcctgagatacagcaggtacgcggacgacatagtttttagcggtggaaaggtgccaagggacttaccaggcctggtgaggaaaatcctgctggaccaccacttttgtctgaacgaagataagacccagttcaaaattttcggggctaagaaaatcataacgggagtcagcatctctagtggtgtcctcaaagcacctaaggcgttcaaacgtaatttgagggctcaaattcatgagctagaacggaacaaattccacctgtctagtcagaaggagtttgaccccctggtttttgagcgcatcctcgggagggtgaactacttgctccaaatcgagccagacaatattttcgcccttcagaagaaaaaggtcctctctttccatcaccaggaattcttgggcctgatcgatgacttttgtctggacatctga

SEQ ID NO: 9345 - RNA, 969 nt, synthetic construct
  source 1..969: mol_type = other RNA
atggacaacattgaggatatctactcctatcagggagatgtccaggccttgtgtatggctttggagctcgatcatacgcagtccctgatactgccgagggcaatcgctcgaccagatctgttctatagattcttctctattccaaagaggaccggcggtctgcggaaaattcgcgccccctatccagcgctggcatctattcagaagaggatcctcgactgtctcctggctgagaagcatgttcaccacctctcatttgcttacgtaaagaataaatcagcgatcgataacgccaaggtccatcttacaagcaaggagattctgaaactggacatccaagattacttccctagcatcgactctcagatggttatagaggctctcatgagaaatggcttctccagcgcaaccgccttttatatatccaggctatgtacagtggacggagcactccctcagggcgcttgcactagtccgatccttagcaatctcgtgtttaatcccatcgacaatcgacttgcaaagttggccgaaaggctgaaccttcgctactcacgttacgccgacgacatcgtcattagtggggagcgggtgccccgcaacctgataaaccttatccgaaagattctgatcgagcggcggttcagtctaaacgaaaaaaaatgccagttgaaactgtctggctcaaagaaaattataaccggtgtatcgattagttccggagtgatgaaggcccctaaagcctttaagagagagctgcgcagccagatctttgccttagaaaaatattccggcgacttaagcaaattgagagaattcgatcccttatttttcgaaagagtggtggggcgtctgaattacctactccaaatcgaaccctacaacgagtacgctcggaaaaagaaggcgactatttgctcttatcaccaaaagctgctggggctgcacccaatggcccaacctcagtga

SEQ ID NO: 9346 - RNA, 969 nt, synthetic construct
  source 1..969: mol_type = other RNA
atgacctctttaagcgcctttgcaactgatctgaacctgtgggagattaaggacttctccattcagatcctgtacgggattctcgcagattcttcaaaatattatcggagcttcgagattcccaagcgtagaggaggcaataggactatccacagtccatacccggttctggcgcagatccagaaggagttgttgttgattctacaagaccggtgcgggactagcgaatatgcatacgcttactgccgggggaaaaatgcaattatgcatgcttctgcccatctgggctgtgacgagctcctcacagtggatgtggaaaactttttcggctccaccacgcgacagcaggttcaccaagccctgctgggagcctcattcgagaacgactttgcacatttggcatcattggtagccaccctccacggcgtccttccacagggtgcttccacatcccccctcttaagcaatgtggtgttcagaccccttgacggacgcttagctaggctcgccagccatcttcagataaaatacacccggtacgctgacgatctagcatttagtggtgataagatccctagaaatctccctaagctgatcggaaaaatcatctctgagaaggggtataaactgaatcccggaaagacagccctgaaaataaggggggccaagaaaattataaccggcgtctcaattagcagtggcacgtccaaggcgccacgacagtttgtcagggccactcgtgccgctgtgcacaaccttgaaaagaacatcggaaagctgagtgctaccaacattctggaccctcttgcctatgaacgcacactgggtaagataaattattggctgcagatcgaacctcacaactactacgccgctaaaaagaaaaaaatcctgtcggaggctcaccaacgctttcttgaactcggcgcgggtttcaacctggataattatatcgagaatagagcctga

SEQ ID NO: 9347 - RNA, 969 nt, synthetic construct
  source 1..969: mol_type = other RNA
atgacaatcctttctctgttttccgctaccatgaacctgtgggagattgaggatttcagcactcagatcctagggggaatcctggccgacagcgaaaagtactataggtcttttcaattacccaagcggaaggggggcatgcgggaaattaactccccgtaccccgtcctagctcagatacaacaggcgttgactaaatatcttcgcgatcagtgcttcgtgagtgagcatgcatacgcctattgcagaggtcgaaatgccgtaatgcatgcaaccagccacctgggatgtgacgaattgctcactgtggacattcacgacttttttggatccattacacgccagcagattcaccagtcgttgctgaagaattcaatcgatgcttcctattcccatatcatatcagtcctcgccacccggaaaggcattttaccccaaggtgcgcccacgtctcctctgcttagtaatatcgttttcagccccctcgatctgaggtttagccggctcgccatcaagctgggcataaactatagcaggtatgccgatgatttggctttttctggaccaaggatccctagaaatctgccaaagctcgtagaaaagattctgtctgaaaagaactacaagctgaatccgcaaaagaccacactgaaaattaaaggcgctaagaagatcattaccggggtgagtatcagtggtggcacgcctaaacctccaagaaaattcgtgcgctcagtcagagcagaggtgtaccaggtggagaaaaatattaacaagctgagctctctcagcacaatagaccctctatcatacgagcgtgttttagggaagcttaactattggctccagatcgagccacacaacaaatacgccttggacaaaaaaaacctgatcagtgaggcacaccagaatttccttaatctgtcctcatccttcgaccgaaacgaatacctccagcagctgatctga

SEQ ID NO: 9348 - RNA, 969 nt, synthetic construct
  source 1..969: mol_type = other RNA
atggacatcctggagagcttttccaaagaactgaacctgttctccctcgacggtttttcagtccagctcctggctggcgccatagcagactcttctaagttctatcggtcttttaagatacctaagagacggggtggaaaccgcgagattagtgcaccctttcctttcctggccaacatccagaaggccatcgcgaataaactgagagatagaatccccagttcggacaatgcctttgcttacagggaaggacgaaacgctatcatgcatgccagtacgcaccttgggaacagggagctcttgaccgtggatattcgggatttcttcggctcaattacacgtcagcagatccatcagtcattgttggagtgcaattttgatgggaacttctcccacatttcttccctgctaagcactttacacggaacactgccccaggggggttgtgctagcccaattctatctaatctcgtgttctacagcctggacataaggctcgcccgcctagccagcgctttagacattacttactccaggtacgcagatgatctggccttttctggcgattatatcccacgaaatctgcctagaatggtggaaaagatcatcaaggaaaagggatttgcgttgaacaacgagaagaccaagcttaaaatcttcggcgcccgcaagattattaccggggtcagtatatccagcgggaaaccgaaagctccacggcaatttgtgcgagcacttcgcgctgaggttcatgcccttgagaacaacaaaaataggttgcactcacttacagtgttcgaccccctgcggtacgagagagtactgggcaaactgaattattggctccaaattgaacctaacaatagttacgccatagaaaagcgtatcggaatcagcatcgcacaccagaaattcctgggcttatccgcgaatttcaaactcgaggactatattcaactcgttgcatga

SEQ ID NO: 9349 - RNA, 975 nt, synthetic construct
  source 1..975: mol_type = other RNA
atgcctgaaagcgaggacttgctggcgctgctgaacatctgtgaaatcgagtcgtccaacacccccgtcctgttctctgtcttgggcagtcctgataagttttaccgtagctttaaaatccccaagcggaacggaggttttcgcgtgatagacagtccttatccttcactagagataatccagagaagtatactgcggaatgtgctctccaacttcccagcacacccgaacgcgtatgctttcataaaggggcgtaatgccattactcacgcctcacatcacttagcctgtcgagagctcattaccctcgatatcaaagacttctttccaagcatcacccgccagatggttatagatgcactaattgagaacggcctggccaatggggtggctaattatatcagcctgctctgctgcctgaatggcacacttccacagggggcatgcacaagccccgccttgtctaatctggttttcgaaaggatcgatgagcgactctcacggttagctaagaccctcaagctgaaatactctagatacgccgacgatctggccttttccggcgatgccattcctagggacatgccacaactgatcgagagaatcctcgagtcacgggatctgaagctaaacaaggaaaaaattcgccttaagattgctggcgctaagaagatcattactggtgtatccatttccagtggaacactgaaagcacccagagaattcaaaaggctcctgaggacgcagatttatgaattagagaagaatatcgacgacatcagccaaatgcgctcgttcgatccccttgtgtacgaaagagtgcttgggcggttgaactacttgctgcagattgagcccaaaaatgcttttgccctgcagaaaaaagccagcttgtcccagcatcatcaaaggtttcttgcactctcttctggacagtggccagcgcttttcccggacgcagacctggccgcttga

SEQ ID NO: 9350 - RNA, 945 nt, synthetic construct
  source 1..945: mol_type = other RNA
atgacaattaatgatgaaacccttgcggaactggtaagacacctcgagattgatgaacaccttctcctgaccctcgtggctgccatctctagtcccaataagttctataggtcattcgctatcccaaaaaggagaggagggatccgagagatcgagtcaccataccctagcctgggatccatccagaaggccattttgcgcaaaatacttgatggctttagtgtccatccctgtgcccacgcctttacgcgtaaaaaaaaggctctggaccacgctgcataccaccttggctgcaaagagctgattacattggacatcaagaacttctttccttccatcacccggcaaatggtatttcaggccctcaataacagcggcttatccagtcatttctctttctatatatcgctgctgtgttgcttaaacgacgtgctccctcaaggagcttgcacaagtccagcgctgtccaacgtcgtttttagccagctcgacgaacgcctacaccggttagcaatacatctgggtctaaagtatagcaggtacgcagacgatttggcctttagcggcgagaaaatcccgagaaatatgatcaagaccgttcagaaagttctcgccacaaaggggttcgaactcaatactgagaaaacgcggctaaaggtctttggtgcaaagaagatcattactggggtgtccatcactagcggcattccaaaggcccccagatcattcaaacgatccttgcgcgtgaagattcatgaactggagaaacatattgacaacttggcttctatgaagaagtttgatcccctggtgttcgagaggaccctcgggaagctgaattacctgcttcaaatagaacctggaaacgagttcgcactgaaaaaaaaaaagcttctgtctgagcagcaccagaagttcctgtctctgggtcggcaggtgcagtga

SEQ ID NO: 9351 - RNA, 933 nt, synthetic construct
  source 1..933: mol_type = other RNA
tccctgaaaaacatcctgtctaagtttgagatcccaataagccgcgaaaacgtgagcatcttcaacaagatgatttcagagccctcggcattctatcgagaatttaagattccgaaacgcaaaggtggcattagaaccattacagccccatacccaaccctgagctacattcagaagctcattagcgagcggtatctgactaaagtcaaccccagcgaacacgccttcgcttatgtgaaaggccggtccgtagttgatcacgccagggtgcatctcaactccacagagctcttgacagttgacattaagtcctttttcgacagtatccggcagcagactatatttgagatctaccaatctctcggcctttcgtactctgaagctgcctatctgacccgcatttccactctaaatggcgggttacctcagggggcctgcacctcacctatcctgagcaatatcgcgttttaccctttggatgttagacttaacaatctcgcagaaaagctgggcttaaagtattcaaggtacgctgacgacctggcattttcaggaaccgtcgtgcccaagaatctgcatcgtacgattgatagtataatcaagtcctacaacttcgaactgaatcagtcaaaaacgaaatataagctcgaaaagagcaagaaaatcattaccggtgtgtccatctctagtggagtcttaaaggccccaaaaagtttcaagcgagcgctaagagctgaagtgtacaaactggagaaatacaaagataatctgtctgacatggatgggttcgagccccttatctatgagaaaaccataggaaagttgaacttcgtgttgcaagtagagcctaacaatctctatgcacaggagaagaggaaaacacttatcagtgactacaaggtcttttctagcaaggccactaatctgatctga

SEQ ID NO: 9352 - RNA, 933 nt, synthetic construct
  source 1..933: mol_type = other RNA
atgcattacaataacgatttcagcattttcatccagaacctcggactcgaggcttcccatgagacacgcgctatcgtatcctccatcatacatgccagcgaaaaccactatcgatcctttaatatacctaagaggaagggaggctatcgtaaaattgatagcccatatcctacgctgaaacacctccacggcgttattctggacgtgtttcaggacaaacttaagtgccacaaaaattcgtttgcgttcatgaaaggtaacagtgccatcggtcatgcaaagcaccacctcgattgtgaagagctcctgacagttgacatcgagaacttctttccaagcatatctagacagatgatattcgaagtcctacacagcgtgggcatgaagactaacgattccaactacatctcttatatctgcaccttgcggaactctttacctcaaggggcctcgacctcaccaatccttagtaatgccgtgttttaccctattgatattatactggaacagatcgctcttaagtttgacctgaaatatagtcggtacgcagacgatctcgcatttagcggaattaatattccccgaaatctgccctcactgatcgagaaaattcttatgaatagggggtttaacctaaacaaatccaaaaccaagttgaagatcaagggagccaggaagatcatcactggcattagtatttcatcaggcaaactgaaggtgccgcggtcttttaaaagagacttacgcgccaatgtcttcgagttagaaaagttcaaacataacctgttcgagatgaacaatttcgaccccttgatctatgagagaacaatcgggaagctgaattacttgctgcaagtggaacccgaaagcaagtacgctaaaattaagattaagctgctgctggagtcttacaaggacttccagctctcttga

SEQ ID NO: 9353 - RNA, 939 nt, synthetic construct
  source 1..939: mol_type = other RNA
atgacagacaacaatattgtgaatttgctggaggtcatctcaatcaagaatacctcccacaacataaaaatcattaccaacatcctgaactcaaacaaaaactattaccgcttcttctccataactaaacggaaggggggcgtcagggagatctcttctccatatcccaccttgaaattcattcaacagaacatcaagaagaacatattggaaaagatcgtggtaaatgacaatgcctatgcctacattaagaataagtcctacattgaccatgcaaaaatacactgcgatagcaatgaactcctcacactggatatcaaagactttttccctaacatttaccgacaggatgttttcaacattttttctcagtacgggttttgtgatctgcagagcaattatctatcatacctgtgcaccctaaataatacactgcctcagggtgcttgtactagtcccattatctccaacatcatctttaacaagatcgacaaccggttatataagcttgctctttcttttggactgaaatattctaggtatgccgatgacttagccttttccggtaagaagattccgtcaaagatcatcaaattggtggctctcatcctggaggaatacgatttcatcgttaacgagagcaaaaccaaactgaagaagaagggcagtaaaaaaatcataactggggtgagcataagtaacggagaaattaaagcccctaagagttttaaacgtaatctgagagcggtgatttacgagctcgagaagaataaagacaacatcttcaaaatgccaaacttcgaaccacttatttacgaaaaaacgattggcaaactgaattatctcctgcaaatcgagcccgagaataagtacgcaaaggaaaagaaggagaagctcatatcgaattacaaggagttcattagcagccccatgctttga

SEQ ID NO: 9354 - RNA, 912 nt, synthetic construct
  source 1..912: mol_type = other RNA
atgaataaagataacctgtttgagttactcgaaatcgacgagtcctttattaacgctgttaatgccatctcctatagccccgagcatttctacagaaaattccacatcccaaagaaaaagggagggtttagagaaattcatgctccctatcctagtcttctggctttacaaaagatcatcagcgaaaaaatccagccttatttgaaaatccaccgaagctgcttttcataccggaaaaacatcagcttcattgacaacgccgcccaccatctcggaagtaaagaaatcctgtccctcgacattgaggacttcttcggcaatatatcccgccagaaagtgttcgacgtcttaagtcagtcgggcttcaataaccacctgagcaatgagattacttatctggtcacctacaaagattatctaccacagggagcccctacatcccccatcatctctaactcaatcttctacaagatagatgcgcgactgtataaattgagcgagaagctgaatcttaagtactccaggtatgccgacgatattacaatttctggtgaaaagatcccgtctaattttccgcgttacattgaggatatattgttgcaacatggcttctcactgaacaaggggaagacgcgcctgaaaaaaggtcaccagaagaagattataacaggcgtatcaataacctctgggcgggtgatggctcctaggatatttaagagaaatctgaggaccgagatttatcacctcgagcgcaacaattacgcaatctctagtcccatcgatccaatgctgtacgaacggctcatcggcaaacttaactttcttctccaggtggaaccagagaacacttacgcaattgaaaagaagaaggcactaattgagaagtacaagaagattatcctgatgatctga

SEQ ID NO: 9355 - RNA, 906 nt, synthetic construct
  source 1..906: mol_type = other RNA
atgaaccaggacatcttcgagtttctggccatttctgaacaacaaagcccaaatctgttcgccatctcacatagtccatcttctttctatcgcacctttagaatcaaaaaaagaagcggtggctacagggagttaaagtcgccctaccccctactattagaactccaaaggataatcttagagaagtcatctcagctcctgaagatacatgacgtgtgcttctcctaccggaaggaaaagtccttcattgataacgccaaatatcatttgaacggagagtgcatcctgacgatggatattgaagattttttcgggagtataacccggcagatggtcctggacacatttttgtttaacggtttgacactggagctgagtcagcagctttcttacctgactacctgtaataattcgctcccccagggggctccaacttcaccaattctgtccaatgccattttttatcgtatagatgtgagacttagcgctctgagcaaaagccttgggctgaagtattcacgctacgcggacgacctcgtattctctggcaaaaacatccctaaaaacttccctagttacatcagcaatatccttaggcagcacggctttagcttgaataacgagaagactaagctgaaactcaagtctagccggaaaatcattaccggaatttccatttcctctggaacactcaaagtgcccaagccgttcaagagaagcctacggtccctgatccacaatttcgaaaggagttccttttccgtttccagctcacgcaaccctatgatttttgaggagataatcggcaagctgaactacctcttgcaggtcgaacctcacaataactatgcacaggaaaagcgaaaactgttcctttcagagtaccgaaagtttatcagttattga

SEQ ID NO: 9356 - RNA, 1029 nt, synthetic construct
  source 1..1029: mol_type = other RNA
atgacggatgaaactctcgctggagcgcttagggaaaggggcgtcccagtgcgatggatcgatgcttatgagagttatgcacagcgactcacagagaacggggtaccggtcatcttcgaactgaaacatctggccatcctgaccgagatcgacttgagttttgttctctcttgcgtctacgccacaaatattcactaccgaatcttcattatccccaagaagacaggtggtaccagagagatatgcgcccctctaccagcccttctaagtatccagaggtggattaatcaccaaattctggagaagttcgcggtgagtgagttcgctcacgcatacgtgaatggacgctctatcgtttcacacgcccagaaccacagaagcgggagagtgcttctgaagatggatcttcaaaatttctttggatctatcaccttgtccatggtgttgggcatttttagggccgctggttactcacgtaatttaagcttcgacctggctaaaatttgtactttaggcgattttgcacctcagggcgcagctacatcaccaagcattagcaacattatcttctaccatatcgaccaggcgattggctcgatctgtgccaaaaacgagttaatctatagccggtattctgacgacatatgcatttctggcaggcatatctcaaaggagataattgcaacgctgcgcgaactcatcgaatccaatggctttgctatcaatgataaaaagaccaagctggccaccagcgcagggagacggatcgtgaccgggatatccattgggtccggacgtatgctgcctactcgcgctttccgcaaggacgtcaagcggaggttggcccggatccggaagataggggtgaactccgccatggtagaggacggagatccctttgttctggacagactggtcggtaaactgcatttttggagccacattgaccccgataacaaaagaatacgcgtggccctcaacgaaatgatttccctcgccaaaggagaatcgcagactactggcacatga

SEQ ID NO: 9357 - RNA, 1026 nt, synthetic construct
  source 1..1026: mol_type = other RNA
atgatcaactctgatccgctggaaagtgcgcttgttgagctccgcgtgcccagccattggattaaatcctacttgcagtacagagatcgactggagagctccggctttccctgtatcttcgaactggaccatctggcttaccacctttcattcgagccttccgccctaagagtcctggtgcacaatccccaggggtcttataactttatcgagattccgaagaaacgcggtggaatacggaaaattagcgcacctttacccgcattactgtacgcccaaaggtggattaagaacaatattgtcgacaagctcaatatagatgaaagtgcccatgcttacgtgcgtacacggtcgatcgtcacccacgcacggcttcacattgaaggacgtgtcatctatagaacagatataagggacttctttggttccatctcattcgactctgtggtaagtctcatctacagtctggggtattcccaggacgttctgtttgatattgccagcatctgctgcttgcatggcagtctccctcagggcgcctctacctcgccagctctctccaacgttattttctataaaactgacagggctttgtccacgctggccagctcttttgggctgagatatagccgctacgcggatgacctctgtttttcaggagaacacattccacgaaagttcattgataagagcacctccatcttgaacgcagacggatacatcctcaattctgagaaaacacggcttgaaacaagcagatcacgcagagtcatttgcggcctgagcataggtgatgggagggtaaagccagtgaagtcattccgcagggctgtgagagccgagactaacaactttttaaagcaaactaaggagcgctctgtggtatattgggaagttaccccattctttatcgaccggcttctgggccgactaaatttctggaaatcagtggagcctgacaataaatggatagtggagcacgaacagatcgtgcggcgtaggatcaggaccatcctggagatgtga

SEQ ID NO: 9358 - RNA, 933 nt, synthetic construct
  source 1..933: mol_type = other RNA
atgtacagggctggccagattctttctctcattcatgagatttgtgaaaagtctggtctacctaaagataaaatcactgccttggcctataggaatcgcccacgctatcgtattttccatatacacactgggaaaaagcagcgactcattaaagcccccattccaagcctcagagcagcccagaaggcccttgctgctatcataagcgagaagctcaagcctgaggagtgcgctcatggctatgtgactgacaggagcgtgatcacccacgccgcgagtcacctgggcaaaaaagccttctttaagacagacatcgttgactgcttcggaagtattaattttcccgaaatagccaacaccctacgagaggcaaaatacaacagcgttgactcatttattgcagcttccatcgcgacggatgaaggctccctgcctcaaggggctccgagttctcccctgttatgcaaccttgttctgcggtccgtggaccgtccactgtctaaactggccgataagttgtgtgccacatatacccggtacggagatgatattgtcatgagcgcagacgattttgacatcaacatcatctcaatcgtaaggaatgtactgtccagacacggctttaagatgaatgaggacaaaacctacatcgcaatcgaacctcagcaaaacatcattaccggaatcagtatcgcaacagggtaccccaaggtgcggaagtcattcaagcgccaggtgagattagaaacacacctgctgctgaagaagggaatagtctcatacctcgagtccgatggttatatcgaccccttcgccgcggatagagtcttgggtaagctgacgtggtggtcgcacgtggaaccagacgctgagttcccgaaaaagcattctataatgattcggagcatgatgaaagaggtggctcgcgggtga

SEQ ID NO: 9359 - RNA, 1005 nt, synthetic construct
  source 1..1005: mol_type = other RNA
atgaatacagttaacgaatgggcggagttctttagggatcaacaggtgcctgaggatctgatactgaggtacctgccatatatagagagacttctgacgaagaatgtcccgattattttcgagggtaagcacttgcggaaacttttaggaatcgagagctccatgttgcgcagcttagtgttcaatgggtccgctttttaccggtctttctccatccccaaaaggtctggcggcgagcgaacgatcactgccccatatccagagcttgccaatgcacaggcctggattaagcaggagatcctagacaacctgaaagccacccccagcgcgactgcatatgttcaagggaagtcgatcctggaaaacgccaacgaacacgtaggcaagaagatgctgctgaaactggacgtcgaagattttttcgggtccatagacgtgaagaaaattaccgctatttttgagtcatgcggatacaccaacaaagtgtcttatctcctggccagtatttgtaccttagatggtagccttccccagggcgcacctaccagtcctcagctatccaatctggcttcaatccccctcgacaatcgtatccatgccttggccaaaaagttggaactcacatacacacgctacgccgacgacattgcattgtcaggagagttcattcatagtaacgttatctcctacgtggaagatatcctcaagtcagagggcctgaagctgaacagtaataagactcagctcaagcagcccgggaaaaggaagatactcacaggaatcagcgtatctagcgagaagccaatgattcctagagcgtataagagacaactacgggctgaagtctttaacgccctgcataaagctcagcacgaacttccattcgatcctctcaacatagaacgcctgatcggtaaacttaatttcgtgctgcacgtggaaccggagaaccagtttgcacgaagatctctggaggctctcaaacaaaaaaagatcgctccctga

SEQ ID NO: 9360 - RNA, 1029 nt, synthetic construct
  source 1..1029: mol_type = other RNA
atgaccgagattatcaaatcaagctgggatcatcttgttggcaccaagagccctgacggacgacagaaagagattttcaagaagtacattcaggacctggagaagaatggtctacccgtgatatttgagtttgaacactttgcgtatctcctcggaatgaccacaagtactctggcccaaactatcatcaatccggaaaagagctacagatccttccacattaagaaaaaaagagggggctcacggctcatcaatgcaccctatcctctaatctcgtatatccagaaatggataaacaccaacatcctcagtaaaatcaagaaccatgaatcctccttcgcctacaaaaagaattctaatgcctacttgcacgctctgcagcacatagacaccaacgaaacactgaaggtcgatattgtagacttcttcgggagcatcaagaaaatcgatattgttcgcctgttcagagaactgggctatgcagataatgtgagtctgtatctggcttctgcttgcacatatgccaactcattaccacaaggggcagtgacgtccccaaatttgagcaatatcatcttctactctctcgataacaggttttatcacttggccattaaacttaaccttacttactcaaggtacgctgacgacttattcttttcaggtgagaaaatcccatctaacctgtacaagtctatcaagagtattctccaatctagtggcttcagcattaacaaggagaaaacacggcatatcactaatggcaaacagaagatcattacggggctcgccgtgaaggaaaattccgtgcggatacccaaatcctaccgcaggaaattttgtcaggaggcctacatttttatcaagaacgagaagtccaatagcagcatggagaacattaatttcgatcctatactgattgaccgtttgatcggaaaagcgaactatattcttaaagtcgagaagaacaacgaacgaataatgaagttactgaagcagctgaatgaaataaagctgaacaccttttga

SEQ ID NO: 9361 - RNA, 1035 nt, synthetic construct
  source 1..1035: mol_type = other RNA
atgaaccagctgtcctacgaaacatggttagattttctaaagaaggaagggtacggacataaacagtcggaaaaactggccgcctacgcacacaaactggcctcaaacaatgtacccattatcttcgaaatagaacatctggcaaagttactcggagtggaactgagcctgttgtcgcgcatttacggggtgagttcctacttttaccggtccttctctattaaaaaaagatcagggggagcccgcaacatcaagctaccataccctaagctgaagtatattcagcagtggattaagcaagagatcttggataatctaacagtggacgagaatgctttcgcatatgtcaagggaaaatccaacatcgagaatgctaagctgcacattggctccaatgagctcttgaaactggacattaaggatttctttggaaacgtgaaggtggagtctatcgaatcaatctttcgatcttgcggctatactgatgacgtaagttatctcctcgcccgtctgtgcacatgttttgggttcctgccacaaggcgcacccacctctcctacgctttccaacctcgttttacaggcgttggacaagaacctcgctcattttgcgaatatcaactcacttaccttctctagatatgccgacgatatttttcttagcggcaaactgatcaccaaggagataaaacaagacgctgtcgaaattgtcgaaaagagcggcctgccgatcaatcacaacaaaactaaaatcatcagggggaacacctgtaaaataattacaggcttgatcgtcaccgacagtactgtgagagtgccaaagaagatcaggcgagagttccggaagaatagcttcttcatgctcaaaaataagagtagccagatggatggttctagggccaagctcaaccctctgctgattgatgagataataggcgttggtaactacatcatccgggtggagcccagcaataagtatgttgagagcgtccttggtgagcttcaggagctgaaaaaagacctgtttggtaagtga

SEQ ID NO: 9362 - RNA, 1032 nt, synthetic construct
  source 1..1032: mol_type = other RNA
atgaagcccatctacgacaagtggtttaattttctcaaggccagtaatctgtcattacagcaatctgaagccctcgccaagtacgcttcccgactggaaaatagtaattttccggtcatttttgagcaaaaacacttcagcaaactgctcggtctagagcttaacctgcttagccgtatgactggcgcttctagcaatttctaccgctccttcgaatttaagaagaagaaaggcggcattagagctataagatccccatacccaaaactggcgtatgtgcagaagtggattaagaaagaaatccttgaagaaatccccatttccaagagcgcattcgcatacgtcaagggaaggtcccatatagacaacgccaaaaaacacatcggaagcaaagacctgtttaagatcgacataatcgactttttcgaccagattaagttcgaaaagatctataacgcctttattgcttgcgggtattctcataaggtgagtttcgacctgacacagttatgtactttctggggaaagttgccccagggtgcaccaacctctccttccttgtccaatatcgtcttgaagaaactggatgatgagctctttaatgtgtgcaaggcctcgtcactcacctacacaaggtatgccgacgatattagcgtgtctgggatagagatctctcctaagatcagaaacgagatcattgaggtagtcgagaacaacgggtatcccgtgaatcacaagaaaacctatttcgctcagggtaaagccaaaaaagtggttacagggctgattgttaccgatagcgaggtgcgcgtgtcaaaatcgatgcggcgggatttcaggaagaagtcatttttcctgttgaaaaacggagtaaacgagctcaatggcaaaaataagcctatcaacccactgtatatcgatgagattataggcctagcaagttacatcctgaaagtcgaacctaacaataagtacgttgcgacggagctgaagaacctcaaaaaactgaagcaggatttattccttaactga

SEQ ID NO: 9363 - RNA, 1032 nt, synthetic construct
  source 1..1032: mol_type = other RNA
atggcagataacaatctggatcgaaagatcttctttaagaaaaatggcctatcggagagccagagtataaagttggacatctatgctaagaacctcgaatctaaaaatctgcctatcatctacgaactcaaacatttgtcaaaattgctgggaatggaatatgctctgctgtcgcggatgtctgggatcaatcggttcttttacaggagcttctccattaaaaagcgcaacgggggccgtcgcataatcaattccccttaccctaagatttcctatgtgcagaactggataaaagacaagatcctctcacaagtgcccatttccaacaatgcctatgcatacgtcaatggcctctctcacattgagcatgcgagacagcacattggaagcgatgttttccttaagattgacctcctggattttttcggccagatttccgaccagagagtcaagaagattttttctgagttaggatacacagacaagttgagtcttcaactcgcgcggctatgcacttgtaatagcagcattgctcagggagccccatcctcacccatcctgagcaatatcgtactgaaagaactggacgaaactctgtttacgatcgccaatagcaactctattttatacacacgctatgcagatgacatctattttagtggaaaacacgtgtcaaaaggcttcttctcaaaaatcaagggcgtgattaacaacttcggtatggtcatcaacgaggagaagagcaagatatacaagtctcaccacaagaaaatcgtaaccggtataatcgtgaaccagaaagagattcgagccccaaagcatatgaggaggagatttagaaccgagtcctacattcttctcaaagataagttcaaggttttcaacggggagagggggctgtttaacccgaactacatagacgagattctggggttaggtatgtacatcctgagtgttgaaccccagaatgcctatgtgatcaagatcgtgaaaagtcttaaagccctgaaaaaggaatttgctcaatattga

SEQ ID NO: 9364 - RNA, 1032 nt, synthetic construct
  source 1..1032: mol_type = other RNA
atgatggaacagagccggtggtttaagtttttcatagagaacgacctcaataagagccaggcccagctccttaccaaatacgcgcagattctagaactgaagagcctgcccgtgatctttgagcttgagcacttaagtaaactgctcggagttgaattgtcacttctgtcaagaatttgtacactcaatgaacggttctaccgattgttctccttagaaaagaaacatgagggatttagacacattgagtcaccctatcctaagctgaaatacatacaaaggtggatcaatgataacattctgtccgtgctcgccgtgcacgacaatgtgtattcatacctccagggtaagtcgcatatcgataatgctaaaatgcacattggctgtaagcagatgctgaagctggacttagtgaacttctttgggcatatcactatttcccaaattgagaaagtcttcatcgaatgcggatatacaaaggacttgtccaacaaactggccaagatctgtacctactatgatcaccttcctcagggggctcccacctctccagcactgtccaatatcatcttctacgagctggattgcatcctttacgacatctcccagtccaacggtttaatttatactcggtatgccgacgatctgtgctttagcggcgacaatattagtcagtacgttgtggacgacattttgtcacacctgaagtctcatggctttagtatcaacgatgaaaaaagcagactgctaacgggcaaccagaggaaggtcgtaacagggcttctggtgcaatctgatacaatcagggtcccaaaaaaggttcgacgcaagttccgtaaagattcttactacctcatcaagaacggatatgacaacctcggtaatgagcgcctgttcaatctattggaagtagatgagctgataggcatagggagttacatcaaaaaagtcgagccgcaaaatagctatgtgtctaatgcattgattgagctcaacaacataaagaactctctgatgactagtaccagctga

SEQ ID NO: 9365 - RNA, 1032 nt, synthetic construct
  source 1..1032: mol_type = other RNA
atggtgtttcaggagtcccgatggttccaattcttcattgagcacaagttgtctagcagacaggctgccttgctgaccgagtacgccattaacctggaatgtaattcggtgcctgtcatctttgagatcgaacatctttccaaactgttgggaatcgaactgtctttagtgagcagaatgacaggcgtgagcaatctgttttaccggcagttcccactaaaaaagagatcaggcggaataagaacaatagaatcgccctatccaaagctagcttatgttcagcgctggataaagaatcacatcctcgaaattaaaccgatctcttccaacgccctcgcgtacgtgcaggggtcctctcacatcgaaaatgcaaaacgacacatcggggccaaagaactcctcaagatcgaccttgttgactttttcgagtacatcaaactatctacggtcaagtcaatattcactgagtgtgggtatactgaaaaggtgtcccaccagctggctaagctctgcacacttcgggacaggctcccacaaggagccccttcaagtcccgttatttccaaccttgtgttggtggagctggacaagaggctccagagcatttctaagaagcatgaactggtctacacccgctatgctgatgatctgtgcttcagcggccatgcaatttcagatgagttctttagtctggtgaaagatgagattgaaagtgaagggtttgtagtgaaccaaaacaaaagcggggttgtacggggacacaaacgcaagctgataaccggattagtcgtgtccgagtacggcgtcagggtgcccaagaaaatgcggagggagtatcgtaaacaagcacattacatgctgaaaaatggcattgagcagttaaacggtaatatgggtatgctgaatccccttcatattgatgaggtcatcggcaagggtcagtacatcctgagcgttgagcctggcaacgcctatgtaaaagacagtctgtgcatgctgctcaagctgaagaacaagttgcttatcaagtga

SEQ ID NO: 9366 - RNA, 1029 nt, synthetic construct
  source 1..1029: mol_type = other RNA
atggcttatcaagagagccgatggtttaaatttttcaacgagcaacagttgtccgcaaaccaagccacccttttggctaaatatgcacagacccttgaatccaattcagtgccagtgatttttgaaatcgagcatctcagcaaactcctgggcatggagctgagcctgctgagtcggatgaccggggccagctcgctgttttacaggcagttctccctgaaaaagagaagcggaggcgtccggttcattgacagcccctaccccaaacttgcctacgtccagaggtggatcaagaacaatatcctggagacacgcccagtcagttctagtgctttcgcctacgtgcagggaggtagccacatagagaacgcacgaaagcacattggggccaaagagttactcaagatcgacctggtagattttttcgggcacatttccttctctagcatcgtcagtatatttgaagagtgtgggtactcaagatctgtctccacacagctcgccaagctgtgtactttgtggggcaaacttcctcagggggcgcctacttcacccgtgatctcaaatctggttctcctggcccttgataagcgtttgcaaaatctctccgataagaacggcttagtgttcacaaggtacgctgatgacctgtgcttttctgggaacgaaattaccgaagaattctattcctctgtttatgacactttggagaatgagggctttgtggtgaatgagaagaagtctggattcgttctgggtaataagagaaaactcattacgggactggtagtgtctgaaagcggagttagggtgccaaaaaagatgcgccgcgaataccggaaacaggcgcattacatgataaagaacggcatagagcagctgaacggagaactaggcatcttcgacccgctctatatcgatgaagtcatcggcaagggtcagtatattttaagtgtagagcctgataatgcatatgtgaaagagtcgctatgcaaactgtcaaagcttaagtccgacctgctagtgtga

SEQ ID NO: 9367 - RNA, 1035 nt, synthetic construct
  source 1..1035: mol_type = other RNA
atgacagaagaaaaatccccatggtacgagtttttcttgaagaataacatcggatcccggcaagccaccgcgttatctgagtatgctagtaggctggattgtaacggggtccccgttatttttgaaatgaagcacttcagcaagatcctcggactagagttttcacttctgagcagaatgtgcggagtcaactcttactattaccgggccttctacattaaaaagaggcgaggcggtgtccgggtgatccagtctccctatccgaaactgtcctatgtgcagggctggattaaggataatatactcgacaaaaaccggatcagcaaacatgcttttgcatacagcaaaggcaaatcgcatatagataatgccaaatgtcacattggaagtagcgagttgttgaaaatcgacctggagaacttcttcgaccaaatttccataagtgcagtccaggaaatctttctgcgctttgggtacaccgaaaacatatcatttaaactcgccaagctctgcactcttagggacacattaccacagggtgctccctcaagccccgcaatttccaacattttcctatacgagctggacaacttccttgccagttattcagagatcaacaagctgacgtatacccgctatgcggatgatattgtcttttccggcgagcgaatttctaatgagtctatcgtggatatcaagaaatacatcacatcctacgggctgaagataaatgagaagaagagtagattggtgaagggtgcccagagaaagatcgtaactggcatcctggttggcgacaccgacgtgagagtaccaaaaaaactgaagcgtcaatatagggcccaggcttttaacatcattgaaaatggtttctcggtgttcgatgggagcatcgggaagcctaatcctctctacattgacgaggtgttcggcaagggacagtacatcctttccgttgagccttggaataagaaagtggtggaactgcagtcttcactgcgcgagctcatgaaggaaatgagcgaaaatatttga

SEQ ID NO: 9368 - RNA, 1035 nt, synthetic construct
  source 1..1035: mol_type = other RNA
atgtcttccgagtatattcggtggctggactacctgagaagcaatggtgtacaaaataaacaagccaggatactagcagaatatgcgcacaatctagttaagagtaatctgcccgtcatcttcgaaatcgagcatttctctaagctgcttgggatcgaactttccctgctctcacggatgagtggtgccagctccctgttttataggggcttctcaatccctaagaaacggaaaggagtgaggaagatagacagtccttatccaaaacttgcatacgtgcagctgtggatcaagtctaacattctggaaagactgcccatttcggacaatgcctacgcgtacaccaagggtcgatctcatatccagaacgctagagcccacatcggcgccaaggagttgctcaagctggacatgcgtgattttttcaaccgcattagcaggttgcaggtggagcaggtctttctcaagtgcgggtattcagataacgtggctagcgtattgagcaatctctgctcctacaacggagtccttccacagggcgcctctacctcccccattcttagtaacattgtgctgaaggagttggatgacgtcatacagcacgttgctgagaagtattctcttatctacacaaggtacgcagatgacatcaccctctcgggaaatagcatcagcaaaaacgtgtgtaacgaagttatgcaatacatagaggaattcggcttgccggttaatgaggaaaaagtacatctgctgaaacagaacgataaaaagatcgtcacagggctgatcgtgactgactcatctctccgtgtgtccaagcagatgcgcagagcttaccggcaggaaagttactatctgattaaaaacggagagacgcaatttgatggctccactaaaccattaaagcccctatatctcgacgaggtgattggcaaagggtcctacattttacaggtggagcctgagaatgactatgtccgaaatacactgcgcgatctgagcaaattaaagtcacgcctctttagcaacgtgtga

SEQ ID NO: 9369 - RNA, 1035 nt, synthetic construct
  source 1..1035: mol_type = other RNA
atgtcacctgagtacatccgttggctggattacttatgtagcaacggggtccacactaaacaggcgaacgtgcttgctgaatatgccaataacctggccatttccaacctgcccgtcatcttcgaggtggagcacctttctaagctcctgggaatcgagctggggctgcttagcaggatgtccggcgctcctagcctgttctacagatcttttcgcatccctaaaaagagaggcggtgttcggggcattaggtccccataccctaaactcgcttatgtccaaagttggttgaaggaaaatatcttagagtgtcttaccatctccgacaacgcatacgcctacaccaagggccgctcacatattgagaacgccagagcccacattggtgcgcgcgagttactcaagctggacatcaaagactttttcaatcggatatccaagagccaggtacgacaagtttatataaactgtgggtacgctgagaacgtagcatccgtcctgagtaatctatgcacatataatggaactctaccccagggtgcctgcaccagtcccatcttgagcaatataatactgaaggaactggacgagacactgcaggatatcagtggccagtattcattgacttatacccgatatgcagacgacattacgttctctggaaattcgatctctgacgatgtctgctccgaactcattcaccatattgaggaatttgggttgccagtgaacgaagataaggtgcggctcctcaagccaaaggacaaaaaaatagtgacaggactcatcgtgacagataggtcactcagggtgtctaaaaagatgagacgcgcataccggcaagaaagctactacctcattcgtaaccgggagcgacagtttgatggaagcatcaaacccctaaagccgctgtacttggatgaagtgattggcagagggagttatattctgcatatcgagccaaacaatgactatgttagggattcgctgaaggaacttctggagttgaaatcacagctgttctctaatagctga

SEQ ID NO: 9370 - RNA, 1035 nt, synthetic construct
  source 1..1035: mol_type = other RNA
atgtctccggagtataaaaagtggttcgaattcctttgcacaaacgatgtgtcagaaaagcaggccacacttctagcggcctatgcagacaggttgctcaaatctaatctgcccgtgatttttgagattgaacacctgagcaaactgctcggcatagaactgagcctcttaagtcggatgtcaggaatgcctccctttttttatcgtaactttcagattcccaagaaacgagagggttttagagagatttgctcaccttacccaaaacttgcgtacgtccagtcttggctgaaagagaatatcctggatggactcactatctccgataacgcttacgcttacaccgagggacgatctaacatccgcaatgcccgggcacatattggtgcacgcgaacttttgaagctggacatcagaaacttcttctataacatcaagactttgcaggtcaagagggtgtacctgaattgcgggtactccaacaatgtcgctagcgtactctctaacctgtgtacgtacaatggccgtttgcctcagggggcctgtacaagtccaatactcagtaatatcatcctgaaggaactggatgacgctctccagaacatctcagagaaatattccctgacctatactagatacgccgacgacctaacctttagtgggaattcgattagcgatgatgtgcaaaatgaaatcaaggccaacatcgaaggcttcgggctaccaataaatgaggacaaggtgcggttactcaagcccaaccaacgcaaggttgtcaccggcctgcttgttggtgatagctccctgagggttccgaagaaaatgaggcgcgcataccggcaggagtcatattacctgatcaaaagcgggaaaagtcaattcgatggcagcattaaaccattaaagcctctgtacttggacgaggtaattggcaggggatcctatatattgcaggtggagcccgataacgactatgtgagagactctctcaaggagctgtccaagctgaaatcccaccttttcagcattgactga

SEQ ID NO: 9371 - RNA, 1038 nt, synthetic construct
  source 1..1038: mol_type = other RNA
atgaaatctaatgagcgggaatggatcgatttctttattgagcgcaaggtagacttaaatcaggcaaaaatcctgaccagctacgcaataaacctgcaggaaaagagcctccccgtgatctttgagatcgagcacttcagcaagcttctcgggattgaactaagccttgcgtcaaggatcgttacaaaacctgaacgattctaccgggtgttcaatgtcaagaagagacgtggtggatcacgtgtgatttcatctccttaccccaagctgtactacgtgcaatcttggatcaaagataacattctccagaagattcgggtacatgagtcagcctttgcctataaaaagaacactagccacatcgacaatgccagggtacactgtttttcggacgaaatgttgaaggtggacatctccaaattcttcgacaatattctcaagtccaacattgtggacatatttgtgaagtgcgggtactccaaaaaactttccgagcaattggcctcattttgttcgcaaggagatcatctgcctcaaggggctccaacaagcccagtcatatctaacatcttcatgttcgagctggacaatagactctccaaggtcgccgaggagaacaacttgaagtatagtcggtacgcagatgatatctgcttttccggaaagagaatctctcagaaccttctggagctggttaaccgcgctataactgattatggatttcagctgaacaaccgcaagaccaggctgtataagagccaggacgtgaaaagtgttaccggcatcgtcgtgagtaatggcaagttgcgaacacccaaaagaattagaagggaattcagggctgactgccaccatttactgtctaatggttacctccagttcaatggcgaactgggcgtgtttaatccgctgatgttggatgaggttattggcaaagggcgctatatactgagtgtggagccagaaaaccagttcgtctctgatcagatgtccaaactggctacgcttcggagcaaatatctctccctaagtttatga

SEQ ID NO: 9372 - RNA, 1038 nt, synthetic construct
  source 1..1038: mol_type = other RNA
atgaaaattaatgaaaaaaggtggatcgacttcttcattaaaaacaacgtggacctggaacaggccaagatcttgaccctatatgcagtcaatatacagaaaaagtccctgccagtaatttttgagatcgagcacttctccaaattgctgggaattgaactgtctctggcttcccgcatcgccacgaaacctgaaagattctaccgacttttcaatatctcgaaaaagcgagggggaagccgcgccatttcaagcccctaccccaagttgaactacatccagctgtggattaaggaaaacatactcgaaaagtgtcctattcacgatagcgccttcgcatatcggaagaatagaagtcatatagacaacgcacgtatgcactgcgacgcgatagagatgctcaaggtcgacatctctggctttttcgataacatatctgcctcatatatcgtaaagatcttcgagaaatgcggatatagtaagaagctatcagagcaattagctaacttttgttctcactctgatctacttccccagggtgctccgacatccccaataattagcaacattcatatgtacgagcttgacaagaaactctcagatgtgtcctcagagcataatctcatttacactagatatgctgacgatatctgtttttccgggagggagatcagcgttaatctcctgaacatcgtgaataagctggtcaacgagcacggccttaagttgaataaaaacaaaactcggctgtacaagagccagcatatcaaaagtgtgacaggcattatcattagtgatggcaagctgcgcacccctaaaaaaatcaggagggagtttcggttggattgccattacctgcttaagtacgggtatctgcaattcaacggagaatttggcccatttaatcccctgctcctggacgaggttatcggtaaggggagatacatcctgtctgtggagcctgaaaaccacttcgtgaagtgccagttaagcaaactcattaccctccggaattcctatttatcgtttaatgaatga

SEQ ID NO: 9373 - RNA, 1029 nt, synthetic construct
  source 1..1029: mol_type = other RNA
atgttgaatttcagtcaatggaagtcattcctccagtctgaggggatttctgagcaacagagcgagcacctggccaactatgctgaaagattggcaaataggggcttcccagttatcttcgaattagaacatctgagtcgcctgctgggtgtggaaaagaactacctttaccgtgtgatgttcaaagggagcgagttttacaggacctttgaaataaacggacgacgcaagaaacgattgatctccagcccctacccaatacttagttacattcagtcctggattaaagaacagattctggagaagttcgtggtaagcgaacatgcctatggctatgtgaagtccagatctatcctagataatgcaaagtttcatctcggctgcacagagctcctcaaactggacatcaaggattactttgctcacatttcccgggctatggtcaaccgcgttttcaatgaggccggctttacccccaagctttcgtaccagctgtccaagctgtgttgcgtttatggctctttgccacaaggagctccctcaagtccgaccctaagcaacctggtcatgagggagttagatcagagcctgttctatctctcagacttctacaacatcaagttttcacgctacgccgacgatcttgcatttagtggtaaggccataccttctgattttatcgtaaaagccgtcaagcagatcgagaactatggcttcatgctgaaccacgaaaaattcacgcaccgtaagattaatcaagggaaaatgatttctgggctctccatttcaggtgactttgtcagagtgcctaagaagactaggcgggagttcagacagaaacaccactatatgatgcttaacaaagagaaatccttcaatggcgtgcatggagactttgacctgttgagcctagacaagttaatcgggctcggacagtttatcaaattcatcgagcctaacaatacttttgtgatccgggcggtggatgacctgaatctgctgaagaaagaaatattccggacaggatga

SEQ ID NO: 9374 - RNA, 1029 nt, synthetic construct
  source 1..1029: mol_type = other RNA
atgttgaactctagtcaatggaagagctttttagtgaacgaaggaataagtgtggagcagagtgacctgctcgctaattacactgagcagctgacgagttccggtttcccggttatcttcgaactagagcactttgccgtgctgttgggtgtggagaagaattacctctacagaatgatgtataagtcaagagagttttacaggactttcaagatctccggcaaaaagaagaagcgtctcatcaacttcccttacccaattctgtcttacgtgcaaagctggataaaggagcacatccttgaaaacatcgaagtctcagaacaggcttatgggtatgtcaaaagccgatccatcttggataatgcaaagctgcacctggggtgcacacagctgcttaaattggacttcaaggactttttcggccacattagcatccatgatgtgaagcgggttttcagggacgttggatttacaccaaagctctcatatcagatggccaagatttgctcagtaaatgggtgtctaccccaaggagcgccctctagtcctattctttctaatcttatcatgcggaaactggataacgaactggcccatctcagcaagttccacaatattaagttttcccgctacgcagacgatttagctttctcaggtgaaatcattcctagctcgttcatcgtcatgattgtcaaaataattgagtccaacggatttaccctgaaccataagaaattcgcccataaaaagtccggccagaaaaaaatggtgaccggcttatgtatcaccggcgatcgggttcgcgtgctgaaaaagacacgacgcgaatttaggcagaagcatcactatctgatgctcaataaagagaaatctttcaacggggactacggagacttggatgtgctatatctggataagattatcggcctggggagatttattaaattcatcgagcccaataacacctttgtctccaaagcagtggaggaccttgcctctctcaaaaaggagctgtttagcatagtatga

SEQ ID NO: 9375 - RNA, 1041 nt, synthetic construct
  source 1..1041: mol_type = other RNA
atgagcgctaattatcagattaaagattgggaggagctcatcaacaactcttccttatcaaagaaggagaagaaggaaaaactattcttcatcaggtccgcctaccacaacggagtaccagtcattctggatcttgaccatttagctcatctgttggggcttaaggtgggggtgctgtcagcgatgatcaaaaagcctctgagattttatcggcagttcaagatccccaagaaacggggcgggtttcgtgacattgtgaccccttatgagagcttacttgaagttcaacaatggatcgtggaacacgtactgagcaaattccaggtacacgacgcagcacatgcttatgtcaaaaagcgcaatatcgcccagaatgccagtattcatgtgggttgtgatgaaatgctcaaaatcgacctgaaggactttttcccatccattaagataccccgagtccgggaattgtttaacagggttggttactctaaagaagtgagttactacctcacaaatctctgttgcttgaacggatcaattccccagggggcagcttccagcccgatgatctcaaacatcatactgttcaacctggacaaacgcctgtcggttttcagtaagaatcacggagtcaaatacagccgttatgcggatgacctggtcttcagtggcaactttcagtcttttggtttcaagaacctggttatcatgaatattgaggacgagggatttaaagccaacaccgataaaacaagagaatactgcgaaggccacaggaagatgattactggcattgtggtggagaaagatcgcattcgcctccctaaggccaagaggcgggagatcagaaccgaagtgtattttcttatgaagtacggcattttcgaccaagtgaaacgatataacgatatctactacgccgatagggtgctgggcagattgaattactggaagcagatcgagcccaataatgagtacgtcatagactctataaagtccatcaagaaactctatgaggagacgctaaagcagataagcacttga

SEQ ID NO: 9376 - RNA, 1032 nt, synthetic construct
  source 1..1032: mol_type = other RNA
atgaaggtggagtataaaatctcggactgggaggatctgattaatgagagctcactgacgaaaaaagaaaaggtagagaagatgctgttcataaagaaggcttacgacaataatgtccctgtgatattggacttggaccacctttctcatctctttggactcaaaaaagggatagtcgcctccatgatcaatagcagccagagcttttatagagagttcaagatcccaaaaaagcgtggcggttaccgcgacattgtgaccccttaccagagtctgctggaggcccagcagtggattattgaacacatcctgtccaaattcaaggtacatgatgccgctcacgcttacgtgaagaagcggaacgtcgccatgaatgcaatgaggcatatagggtgtgatgaaatgctaaaaatagacctcaaagacttctttccctctattaagatcccacgcgtccgggagctatttaatagagtgggttattctaaggcggttgccggatatttgacaaagctttgctgcctgaatggttcaattcctcaaggcgcagccacttcccccatgatctccaatattatcctgaatagtctggacaggaggctttatgtgcttagcaagaacattggcgtgaaatacagtcgatatgcagatgatttggtgttttcaggggaacacatcccccacgaatttgctctcaacgtggtgaagaacattgaggattatggcttcaacatcaacattgttaagtccaggcactacaagtcacaacagagaaaaatgattaccggaatagttgtcggcgatgacaacatccgcctcccgaaggtcaaacgtcgagaaatcaagaaggaggtacattacttaaagaaattcggggtgctggatcaggttaaacggtataacgacatctactacatcgatcgggtgttaggaagactgagtttctggaaacagatcgagccagacaacatctacgttctcaacagcatcaaagaaattaagaagatgtacgaagagttcctgaaatcttga

SEQ ID NO: 9377 - RNA, 1050 nt, synthetic construct
  source 1..1050: mol_type = other RNA
atgtcatacacaatcaatgattggaagaagactatagagacgtctaatctgtccaaaatcgagaagattgagcggatgcagtatgtagaaagtgccttcaaaaacaaggtccccgtcattatcgacactaaacacctgagccagctactcggactgaagatcggagtgctcacctctatggtccagagcccgtcaagcttctaccgggaatttaagatacctaagaggaaaggtggatatcgcgacattgtcaccccatacaaaagcttgctcgaagtgcagcaatggatagccaaacacattttaagttgcttcgagatacacccttcggcttacgcatatgtgaaaggcaagaatatagcccaaaatgcaaagctccatatcggtagctctgaaatgctcaaaatcgatctaaaggacttctttccatcaatcaaaattccccgcgttcgagaactcttcaagaggctgggctacaacaaggaggtgacttactacctgtccaaattatgctgtctgaaggaacaattaccacagggcgccgcttcctcccccttgatcagcaacattatactgagcaacctggacaagaggctgttcaagttcgcctcgaacaaccaacttatctatagtagatatgcggatgacttggtgttttcaggggacgctatcccatctgactttcggatccttgtggctatgaacatccaggatgaagggttttcccttaatcctgataaaaccatcgaatattctgagaatcagcgaaaactgattacaggcgttgttgtaaagaaggattccattagactgcctaaagatttgaggcgcgagattaaacagcaggcacattatattctgaagtttggcattctcgaccaggtcaagagatacaatgacattttctacgtggatagaatccttgggcgtcttagttattggaaacagatcgagcccaagaacgagtacgtgatcaataccctgaaggagattatcctgatgtacaaagagacaatgaataacatccagaacaacgatgacggagagtga

SEQ ID NO: 9378 - RNA, 1041 nt, synthetic construct
  source 1..1041: mol_type = other RNA
atggacaacaattataagtacgaagattggaaagagatcattgaatcgtctaatctgccgaacgaagttaaagtggaccggatggatcttgtcaggaatctctataagaacaatgtacccgttatcgtggacctgaaacacctgagcaacctactgggaattaagtacactgtcttggcgtccatgatttttagtacgagttctttttaccgagagttcaaaatccctaaaaagtccggcggtttacgtacaatagttacgccatataaaagcctcttgactgtgcagaaatggatcgtcaaaaacattttgtcccaattcaagatccacgatgacgcttatgcctatgtcaaaaatcgaaatatcgccctgaacgccaaacagcatattgggaacccagaaatgttaaaaattgacctcaaggacttctttcacaccattaaaataccccgcgtcagggagctgttcaacaggctgggttattccaaggaagtcgctggctacctgtcaaatctgtgttgccttaatgaggcacttcctcagggcgcaggctcctctcctatcatatctaacattatcctcagaaccttagataacagactgtcaaatatcgcctctaagtcagagattgtgtattcaagatacgctgatgacctcgtgttcagcgggagcaagattccactcgatttcgaggtagttctgacccagaagataaatgactttggattcaagctcaatctgaagaaaaccaagttctacaagaagggggatcgcaaacttgtgactggagtggtagtgaatagtgatggcattcggctgcccaaaagtaaacgcaagcagatcaagaaggaggtgtactatctgaagaaatacgggatccaggaccaagtgtttagacataacgacgtgttttacattgaccggatcctaggaaagcttagcttttggaagcagatagaacccaagaacgagttcgtgttgacaagcatcatcgagatcaggaatatgtacgataaaaccatgaagaacaacaaggattga

SEQ ID NO: 9379 - RNA, 1158 nt, synthetic construct
  source 1..1158: mol_type = other RNA
atgattaaggcccctaaaagcttttataggaccttcaaaatcccaaaaaagagaggcggcaccaggacaattgtgaccccgcacaattccctaaaagagatccagcgatggatactggacaatattctgagtcaattcatgattcacgaggctgcctttgcttacgaggttaagaaaaatgtggccatgaatgccagcattcatttagggcaggatgaaatgctcaaaatcgatctcaaggacttttttcccagtatcaagtctcccagaatccgggaactgttcacaagggtgggatattcaaaggaggttagttacttcctcaacgccctgtgctcacttgacggatgtttgccccaaggggcagtcaccagccctaagatcagcaacatcatcctctattaccttgataagaacctgtctaccctgtgccacaataacgaggtgaagtatagccgctacgctgatgacttggtgttctccgcgaacgagctccccattaatcttaaatcaatagtcagctcttccatcatcgagaacggttttgagatcaactacgctaaactgacagaatactcctctgagcagaggaaactcgtgactgggattgtgataaaagagaaaggactgacgctgccaagatcgaagaaactgtcaatcagaaacgacgtgtttttcctcctgaaatatggcatcgaagatcagatccagaaatacaacgacattttttatctggatcgggtacaaggccgcttatcgtactggaagcagatagagccaaacaataagttcgtactggattctattgacaagttgaagtcccttcataaggattacctaaaccaggcactggacaagttgaattttctcaagattcagaagacgaatcctctcaacaattacaaggaatacattcaccaggtcgctttcgttgcctctggtttgaaaatacagatccagatcgaagatctgcgccagagcatgaattacttaggctatcgtactaaaaagggagcaaagtatctaaaaggacgaggctttcatcggcttatagggctgacattcaagtggctggagaagcaaaataagaacgaagaagccgacaaggtcgcgttgactttcattaacgcagacggtagttattcctataaaaaatga

SEQ ID NO: 9380 - RNA, 1047 nt, synthetic construct
  source 1..1047: mol_type = other RNA
atgaaaaacaactactccattgaggattgggagaaacatattctcgagaacaccgaggcaaatgggttagagcgagtgtactacctggaaactgtgaaaatcgcctatcagaataatgtgcctgtaatcctggacgtcaaccatctcgccaaactgttaggacttaaggtgggcatcgtgaccagcatgatatatggaccccatagcttctaccggacgttcgatattccaaagaagaagggtggcgtacgtaccatagtggcaccgtacacctcactgctgtattgtcaacgttggataagcgatgaaatcctgtccagatttttcgtgcacgacgcagcttatgcctataggcccaatagaaacattgttatgaatgcggagaaacacgtgggccagaagtacatgcttaagcttgatttggttgacttctttggaaatatcactgaaagtcgcgtcaggagtctgtttcaggagaatggctatgacaaggggatgtctttttttctcgctgggctgtgttgcctggatggagtgttgcctcaaggggctgcgacttctccttccatcagcaatatcgtactgaacgaactcgatcacaagttcgattatctgtgcgacaagtatggagtggtctatacccgctacgctgacgacttggtcttctccagtgactctcccctggaccacatcgtggatcacataggggacattattaaaggtgagggcttcacagtaaacatcgaaaagtcgaaaatttacacagccggtgccaataagttagttacaggcttggcagttcaggaagaccgggtgcggctgccaaaacggaaacgcagaaagatcaggcaggaagtgtactttgttaagaagaacggtatcatgaaggaggtcgaaagatcttcagatttgtttgccctagagcgagtcctgggcaaactttacttctggaagcaggtcgagcccaacaacgaatacgtgctcggggagattctggaactaaagaaaatgcgaaaagagctcctcaggagccttacatcatcctga

SEQ ID NO: 9381 - RNA, 1050 nt, synthetic construct
  source 1..1050: mol_type = other RNA
atgattaaatggagtgagaagttggcatccaatactagtaaacccaccgagttaacagaggcattgatcaagtactccaaaaagttggaaaaacagggttttcctgtgatttttgatcttgcccatctcgcgctgatactcggcatcgagaagttgacccttgcctctatcgtaaattcatcctctaagttctaccggagttttaaaatccctaagcgtcggcacaatacatttcgagagattaattccccctaccctgtgctaaagaagatccaagactggattaaagttgaaatcctggagaaaatcgaaatgtctcaccactgctatagctatcggaaaaatgtttccatcatagacaatgccagcgtccatctcggtaacgaagtgctgtataaactggacctggtggacttttttgacaacattaaagaggacagaatcctcagtatattcctgaactgtggctattcatataaagtcagctatttccttacctcactgtgtcttctgacgacaaagctaccacagggagcttcaacctctccgataatttcgaacataatcgctaagaggctggataagagactgtccgccctttgcagcaaatacaaaattaactatagccgctactctgatgatattactatctccggcaaattcgtaccaccattcctgcgactgatcattaagaacataatcgctgatgaggattttatcgtgaaccagaataaagagatcctcatcaatggactcaacaagaagaagatagtgaccgggatctcaattacaaacaacgttctgaagattccacgcgaaagcaagagaatcatcaaacaggaagtgttcaagttcctgaagtacgactttatgattaatcccaatgaacaggagttcgatccttacttcactgagaggctcatcggaaagctgaattactggattaatgtggaaaaggggaacgagaaccccattttcttattgcgcagtgtcattgagaaaaacaagttattcatgagcaggattatccaagaagactttaactcttga

SEQ ID NO: 9382 - RNA, 945 nt, synthetic construct
  source 1..945: mol_type = other RNA
atgaacgagatttatcccaacattaagtcaattagggacctgagcatagccacagaaatcccaattaagaagatcgcgggaatgatctttagttccgagaaccactatagaattttcagcctccctaaacgcaattcagacggggtgagggtgatccattctccctatcccaatttatataaagtccagcgattcatcctggagcagattctcagaaacgtcgatggcaacaattattgctacagttacaaatcaggcgtgtccataaaggacaacgcaatgaggcatataggaaccaaagtgttctacaaaatagatctcgagaactttttcgagaacatcggttttaaaaaggtgattcgtgtctttaggaattgtggctacagcgatggtgtgtcttatatgctcacaaagctgtgcttgtgcaataacgggatcccccaaggagctcctacatccccattgttgagcaatattgtaaccagtaagcttgacaagcggctgagcggattatcgaccaaggaaaatttaacttactctcggtacgccgatgatctatttttctccggggaatacatctcaactaaatgtcgggaactgatcaaaacgattgtggaacaggagggcctaatcgtcaataacaaaaaggagctgttggtgatcggctaccacaagaaaaaaatcgttaccggtctgtccgtcactgagaagaatatttctctgacacgcaattacaagagagagctgcgacttaacgtgtataaatacctgaagtacaaccacaaggttaatccttataacgttgacttcgatcctctttacaaggagaaactcctggggcagctgtatttttggaaattcatcgaagaggacaatgaaatcccgaatattcttatcgaaaaggtacgcaacaaggaaattatatatccagacctggagctctga

SEQ ID NO: 9383 - RNA, 1053 nt, synthetic construct
  source 1..1053: mol_type = other RNA
atgaagctgagttcaggatcagattggagaaaatactttgaggaaatcgggctggagagcgctcgtagcgcggaactgtgtagatatgctgccaccctggccgattcatctctccccgtgattttttccttcgagcatttggctgcgctcctggggcggactagacatcacctcgcgtccattatcttcgcctcagaacaccactacaggtcctttgatctaatcaaaaggagaggaggtactcggttaatagaggccccctacccttcacttttggagtgccagagatggatcctgaagaacattctgctgaagattcctacctcgaataatgtacattcttacctacacggcaaaaacataaaaacaaacgcactcgtacacgtcggggagaacagcatcctgaagatggacttacgaaatttctttcatagcatagagatgacccgcgtgcttaaactgttcgaaagtttggggtatgctccggagatagcctatttcctggccaaactgtgcgtgttgagggaccgacttccacaaggcgcagcaacttcccctatgctatctaatatcatcgcaagtacactcgactctaggctgaactctcttgctaagtcgcagaatctgaagtattctaggtacgccgatgacttagttttctccggcaacgatatttctccggcctttgtgggcgaaattcgcagcatttgtgaaggtgagggattctatgttaatgaggaaaagacgaagctcaaaacagggtccagccgtaagatcatcacgggcttgatcgtcggtgagaagaaggtcagcctgccacgaacatacaagcgcgaggtgcgccagcaggtgtattacattatcaagatgggccccctcgaatacctcaaaagaaatcgcctttcccctaccgcacttagtagtctggctggacggctggccttctggaacagcatcgaaccagacaacccatttgttcgggaatccttgcccattctgatgcggctcatgagcggagagcaaaatgagactcggaggataaaaaacacctga

SEQ ID NO: 9384 - RNA, 1041 nt, synthetic construct
  source 1..1041: mol_type = other RNA
atgaagccctccgaaagcatcagcaagtggcatgatctccttaaggctgcgcctctgaacgaggatttgaaggacgctttgagcctctacatcagaagcatcatcaagagcgggtttccagttatcctaaatgtagaacacctgtcacatctagtgaggatagagtatatctttcttaagcgtatgatgaactcaagtgagtctttttactacgagttcgaaatccccaaacgaaggggagggaaacgtgtgattgaaaagccttatcccacactcatccttgtccagaaatggatcctccggcatatcctgcaaaaaaaggccgtacacaggtccgcctttggctttgtcaagggtaagagcatgattgataatgctaagtgtcacatcaacgggaagagcctgctgacaatcgatttaaaagacttcttccctaacattaagcttcctagagttatttccctctttcagagaattggatacccgtatcacatttcatacattctggcatccctgtgcgtcaagaatggccgcttaccgcagggagcacccaccagtccatacatatctaatctcgtgacccataaactggacagtcggttagacaagctgtgcgacaaattcgacatttgctatactcgctatgccgatgacatggctttctcgggcggcacaataaacctgactttcgtgaacttggtccggtctataattgccgatgaggggttcatcgtgaatgagggaaaagtgaaactcatccacggtttcgacaaacggaaaattattaccggcgtttccatatcctctaagaaaacaacgataccaaaatcaaccaagcgaaagtggaagctggaattgttttatctcattaagaacggcctggatgcccaaatgaaagtcctaaggatcaatgacccactgtaccttgaccgctgtattggtaagctgaatttctggctgcaggtggaacccgataacaaatttgccagagcatctttggatactgtgaccgagatgaagaaactgcgcagtatcgagtga

SEQ ID NO: 9385 - RNA, 1032 nt, synthetic construct
  source 1..1032: mol_type = other RNA
atgaatcgggattattggatcgaatatatcaacctgaacatccaggacgaggagaagagacttatttactacgaactgctaaataggctcatagaaaacagcctgccaatcctcttaaagtttgagaacttcgaatttctgttcaagatcaagaaggaaatcttggcactcatttataaggacagtaggaagttttaccgcaccttcacaatccccaagaggaacggatcgcttcgtttcatacaaagccccctcccactactgcagtacattcagagatacattctcgacgagatcctgtctaaaataattacgcataacaacgcattcggcttcgtaaagcataaatcaatagttgacaacgtgaagcctcacttgaattcccacaccttactaaaactggacattgacaacttcttcccctctatcaagataaaacgtgttatcagcatctttcagagattaggttacagtaatcggatttccttcctgctggctaaattttgctgttacgatgactcacttccacagggtgctcctactagcccttatctcagcaatatcatcgcaaaacggctggactctaggttgtataatttggcgaaagagcaccatctgaaatattctcgatacgccgatgatatgacattttcgggcaatcacatctccaagaatttcatcgattttgcttacaagatcctcattgacgaagggttcacaccaaactacactaagagtaaacttattgtgggccgcggacggaagattattactgggctgtccatatccaacaaaaagattaccattcctcgcaacaaaaagcgcgagttgagatccaaagcctattcagtgctgtcaagcgatgccaagtacaaaatcaattacgccgctatcgacgatcccatctttgtcgagcgactgattgggcagttttctttctggaattttgtggagccggataacctgtatgccgtcaatacccttaagctgctcaaagaatatagtagccaactggataatttgatagagtga

SEQ ID NO: 9386 - RNA, 1044 nt, synthetic construct
  source 1..1044: mol_type = other RNA
atgagaatcctgaatacaatcgaatcatgggaagcctacttcgaggacgtttgtcttcgcgaggatattgccgccgcccacctgaagattatctcagcccagttgaaaagcggtgtgccagtcatatttgatgtcgagcatctgagcctcctactgggagtctcttccacgtatctggcgtcggccgtatccgtgccccggtatcactacagagactttgcaattcctaagaagagaggaggcgtacggaccatttccgcccctagagcggcgttaaaaggcgtgcagcgctggattctggacaatatactcaactgcttccttcctcataaatgtgcattcgggttcagagctaagaagagcattctcaatcacgcccgtacccattgtactgctgggagaatattgaagttggatgtagccgagttttttccctctatcaaactggatcgggttatcggcctgtttaagagctttgggtacacccccggcgtggcttttactctcgcctctctgtgctgcctagaccgccagttgccgcaaggtgcaccaacatcgcccgccatcagtaatctggtttgccggaggcttgacaaccgactgcacgccttcgcatccaagaacaggttcaggtacagtcgatacgctgatgatattgcgctctcaggacgcgacctgaactccagtgtgattcagatcataagaggcatcctcgcagaagaagggttcgctctgagggacgataaaacccgtatctatggcgtgcactcaaaacggatcttaacaggtcttagcgcttccctcgacggcgtgaagctgccaagggaggatcgccgccaactgaggtctgtgtgccatcagattcggaagttcggatttctgagctacttggctaacaataaaatcagggacccaatgtttctcgcccgattaataggacggttctctttctggtgttatatcgagcctgagaacgctttcgctagcgaagccctagcacacctgaggggggtcgagagacagtttcttgcagcaaggagttga

SEQ ID NO: 9387 - RNA, 1017 nt, synthetic construct
  source 1..1017: mol_type = other RNA
atgagagcactcacctctctagattcctggattgactatttcaaggatgttggactgtctgacgatgtggtcgagaagcacgcccggtatgtgggggagctgcttgccaggagcttgcccgtgatattcgatgtccagcacctgtgcctcctgctgggtgtaagcgagcgcttcgccgctgtggtactcaacgcttcacaaagttcttatagggagtttaagatcccgaaaagaagcggcggcagccggacaatcatcgcacctcggcgtgcccttaaagactgtcagaggtggattctggacaacattttagcacgtgtaggtgtgcacgccgctgctaaaggattcgttcagcgtagatccacaaagtcgcactgtagacctcacctcggcagggagtctctcttgaagttggactttcaggatttctttccctccataaagaagcgacgcgtcatcgcactgtttagatctatggggtactcagatagtgtgagcctgtacttagccgccttctgctgctttggtgaggtactaccacagggcggagtcacctcgcctgccatttctaatttaatatgtcggagactcgatgcaagactgtccgctctggcctcaagtaaacggtggcgctacagccgctatgctgacgacctggtcctgtccggcaggaatctgaattacgcagtggtgggcattgtggccaaaatcgctaaggaggaagggttccgacttaatgacggtaagactcggctatatcggggggaagcacgacccatcgtgaccggactggtgcttggagaatccgccctggcggtgccacgaacatttaaaagggaggtggtcaaacaagctcattacgtccttacttacggcgttctgagccatagtgccaagaccaaatccaggaacccatacctcgttcccacgttgctcgggaagctcaactattggatccatattgaacctgaaaaccagagagcggttaggctgcgcgaccgcttgtcagcgctttga

SEQ ID NO: 9388 - RNA, 1059 nt, synthetic construct
  source 1..1059: mol_type = other RNA
atgaatgcttatgaaggcatgccagccagtatacctggactgcgcgtctggaggaagtattttgaagatcgagggctttcatctgaggtcgtggagctgtacatgggatatattgcgcctctataccgccgcaggctgcctgtgatctttgagtgggaacatttagggaagctgctgggaagaacgccacactacctggcaacagcgatcgcatcacccgctgctttttatcggacattccgtattccgaagaaatgcggcgggttcagggaaattcaggctccacacagatccctgctcgactgccagcggtggattgttgagaacatactcaagagggtacccgcccacgagtgtgcaatcggatatgtccaagggaagagcattatcgattacgtcaccccccacctccagtccgccgatatcttcgtaaccgatatttccgactttttccccagcatcaaaatccagagagtgatcggcctttttcaagggtttggctactccaattctgtttcgtacgccctggccagtatctgttgtttgggtggtgccctaccacaaggcgctcccacttctccttatctttctaacttgatctgcaagcatatggacaaaagattgtccggctacgcccgcaagcagaacatgatttatacccggtatgccgacgacatatgttttagcagccaggccatacggagcgtgaacaaaaatacaattcggcgtataatcttcgagtccgggttcagtgttaacaatctgaaaactcgaacttacatcggtaactcaacatcaaaaattgtggccggcatcaatttgagtggaggcaaaagaaccctccccaaagatttcacgaggccgttactgaccgaagtgtactacatcgaaaagttcggatatattagccaccgcaagaaaaagaagataaaggaccctctgcatcttatgcggctcctcgggagagcagcttactggaggtgggtggatccaggttctgagaaggcacagtactgctatggactgctggctggcatcttacgagagattgcgatttga

SEQ ID NO: 9389 - RNA, 1053 nt, synthetic construct
  source 1..1053: mol_type = other RNA
atgtatgattttgtgccagctccccttcctagcctgcataaatggcggaagttttttatctcaaggggagtgcctgaacctcgtatccaggagctactcatttacattaagccgctcgtgaagaaccgagttccagtaattttcaatctagaacacctcgggagattgctcggccgaaaaaccgggtatctcgccaaaatcataaatagcaacgagcatttctacaggagtttccaaattccaaagaaaaatggagcccacaggatcattaatgctccctacccttcacttctggaatgtcagagatggataaacgataatatcttgagcatcgtgaagatacacgattgcgccaaagggtacctgaagaacactagtattatcgaccatgttgagccccacctgggaaacaacgtcgtgctccttttagacctgaaagacttcttcccaaatatcacaatcaatcggattatacccgtcttcagaaatctcggttactctcagcaggtcagcctggcattgagcaaaatatgtaccctcaatgacatccttcctcagggagctgcttccagtcccagcctgtccaacatcatttgcaaccgtctggacaagaggatagcatgttatagtgagaaaaacgacatcaactacacacggtatgccgatgatttatgcttttcttctaaacacatcgagccccacaagattaagatgatcctgaagatcatcaatagcgaaggctttctgattaactcctccaagtatagactgctgggcccgcagtcttcccagaaaataatcaccgggattaatatctcaaacggcgcaatgaagatctctaatacgtataaacgcgagctatccctggccatgtactgcattaaaaagtttggtattcgctctcatcttcaaaagttaaagattcgggatacctactatttggactcgttgtatggcaagattaattactggctgaacatcgaatcgacaaacaaaaaggcgaaattctacaagatgttcgtgcgctcactgatgcaaacttacgagccatga

SEQ ID NO: 9390 - RNA, 1059 nt, synthetic construct
  source 1..1059: mol_type = other RNA
atgaaacgttcgcttacacaggtctgggagagttacttcgaggagattggcctggacactgagctgagcgcaaaatacattccctacatcgctcgatgcgcagacgctaagatacctcctatctttgagcaggaccatctggcacaactcttgggtcttgagctccccatgatgttatctatggttttcggcaccaaaagcttctaccggtcctttagcattcctaagcggagcggaggacggcgggaaattgtggctccttatccgagcctgctggaagcccagagatggattgcggaaaatatactggactcagtcaaggtgtcagtttgtgctaccggtttcaggagaggcaaatccattctcgataatgcccgactgcattgtgagcgagatcagattctcaagatcgacatcaaagacttctttccgtcgattagcttccagaggatcatgagggtgttcaccagcataggctacccaaacgaggtcgcctatcttctgtccaagatctgcaccctcggggatagtttgccacagggcgccgcaacgtctcctacactttctaatatagtctgccgcaggatggacgttagattttataaggtctgcaaaaggcacagactgcggtacacccgctatgccgatgatatcgccgtatccgggaagtctataccatctgggattgcccgtttattctttgagatcatcgaagatgaagggtttgaggtgaaccagcaaaaggtgcgatttctcggaaaggctgatcgcaaaatcatcacgggattggacatcacatccggggtgcccagagtaccacggaagttcagacgcgagctaaagaaggatgtgtattttgtatggagtgccggtttgtcaactcacgtgtcccgcagaaaaatcttcaacccccagtacattgaccacctaatgggaaggattgaattctggcgtcaagtcgaacccgaatgtgtgcagctggcgactgtgcagcgcagggttaacgagatcgtgagtcagcaaaaatcctattcaggcacatctaagtttcagctgtga

SEQ ID NO: 9391 - RNA, 1038 nt, synthetic construct
  source 1..1038: mol_type = other RNA
atgaacgacaacctactgtacaagtggcaccagtatttcgaggacatcgggctgagatcggacctggtacgcagctacacaccctacatccggagatgtatttccaacggcgtaccacccatatttgagagcagtcacttagctgttttggtcgggaggaaccctgctgacctgtcagcaatgggatttggagccaagtcttattaccgcagcttcaaaatcagaaaaagatccggcggacttcgggagatccaggcaccctacccctccttattagaagtgcaaaggtggatcgttggcgaagttctaagttcagtcaggcttccggtttgcagtactggataccgggagggggtgagcattctggataatgctctggtgcattgcggccgcaaggaggttctgaaaatcgacctgaaggacttctttccatcaattggattttctcgtgtggtgaaggtgttcattgactttggctatccatctaacgtggcctttttgctcgcgaatctctgtacccttgatagaaaacttccgcaaggcgccgcttcctctcccctgctttcgaacattatctgccgcgacctcgatcagcgcattatgaagatttgtaaatcccgtaggttgagatacacaaggtacgcggatgatatcgtcatcagtggcaaggccatacctaaaggcatacggcgactctttttcgaagtcattgccagcgagggtttccaggtgaatgagaagaaagtccgatttctgtgcgagggtgataagaaaatcgtgacggggctggatatcaccagcgggaagcctcggccaactcggcaattccgcagagatctgaaacgagacgtgtatttcgtctggtctagcgggctgtcctcacacgtggcacggaggaggattttcttccctaattatatagagcagttggaaggtagagcccgtttttgggaacatatcgaacctgacaatgtacagatgaagaagaccatggagcgagtcgtggaactcaggaagctctatggacgccagcggtga

SEQ ID NO: 9392 - RNA, 1032 nt, synthetic construct
  source 1..1032: mol_type = other RNA
atgaatcagaattcgatccagcaatggagctcatatctggaagacataggtatctatcccgatcttagggagcagtacatcgagtacgtaaaaaaatgcgtgaggtttggagtccctcctatatttgaacggacacaccttagtatgctgactggacgccacctcggggacctgatgtccatgattttcgccaccgagaagttctaccgcgagtttaagctgagaaaacggtctggcggttatcgacggatactcgccccctacccctccctgctggaagtccagcaatggattaaggacaacattctgtccaagtacgagttgcagaactgtgtcaccggatttcgtgacggatattcaatcgttgataatgcacgaatgcactgcgggagagacattctaatcaagattgacattagagacttcttcccgtcaattaacttcaaccaaatcatgggagtgtttcataaagccggctacgcgaataacgtttgcttttatctctcccgtttgacgactcttgacaatcagttacctcagggggcagccacttctccatctttatccaatatagtttgtcggaacatggataagcggttcctgctgttgagcaaaaaccacagacttcgctatacacgctacgccgatgacatcagcatttctggtaagcatatttctgatgggatgatcagactgttcttcgagatagtggaatcagaaggctttcgaattaataccgacaaattcaggatcctgaatgctaacgacaaaaagatcgtgacaggcctcgatatttccagtggccgaccacgggtaaccagagagttcaggagggatctccagcgggatatctattttgtctggagccaaggcctggctgctcatattgcacgtaggcgcatctttttcccaaattacgtggatcacctcacagggcgcgtgaacttttggaggagcgtggagcccgaaagcgctcagttgaaaaaggtgatcaacagactaaagatcatcaggagtcagtacatgatatga

SEQ ID NO: 9393 - RNA, 1047 nt, synthetic construct
  source 1..1047: mol_type = other RNA
atggcaactattccttatcagcgcgaacatctgtcacgctggaaagcctatctctcagacataggggttcgcgacgacctcaaggctatttacctttttcacgtgaaaaagagcctggagaagggggtgccacctatctttgaacacgagcagctagctctgttgttggggattgatgtcgcccatctcatgaggatgctgtttggtcaaaaatccttctacagagaatttagtctcaaaaaaaggtctggtggatacaggactatcagagcccccctgccaacattactggagtgccagagatggattaacagcaatatcttatctgctgtgcaactggcgcagcctgcaatgggttttagggaaagacattctatagtcgataacgcccgcattcactgtggccgggaggagctctacaaaattgacctcaaggacttcttcccgagtatcggctttcggagagtgatgggggccttcgtgtcccttaactatccaaaacatgtggcgttctttctgtccacaatctgtacagtcgatgatgaactgccccagggcgccgctacaagtcccactttgtcgaatattatctgtaacaggctggacatgagattgcgagcaatatgccgcaaacgaaagctccgttatacgaggtacgccgacgacatcaccatctctggaaacaagatcaccgatgagcttaagtggatcgttcacaagattgtagaagatgaaggattcgtgataaatcgagagaagatccggcacgtgttcgcaggagagaaaaagattgtaaccggcttagacattaccagcggcgtcgtcagaatcccccggcagtacaggcgcgaggtaatgaaggatgtgtatttcgtttggtcctcaggcctgagcaaccacatggccaagaatcgtgctttcgagccgaattatatcgctcagctggcagggcggctgcagttttggaaacatgtggagccagaaaatcctcagatgctgaagtgccttaagcggttcaaatccgttatgctaagctaccaaaagtga

SEQ ID NO: 9394 - RNA, 1035 nt, synthetic construct
  source 1..1035: mol_type = other RNA
atgtctaaatccagtgttgagaaatgggaggcctacttttccgatctgggcattaaccaggattacattcgggaatacatcgactatgcaggacctatgcttagggctggcgtgcccccaatatttgaggatgtacacttatcactgctaatcggtagggatctgggcaccttgtacgccatggttttcgggacaggaaaattttatcggagcttcaccattagaaagcgccgtggcggtaagagactgattcagtccccatacccctccatgctggagtgtcaaaaatggatatccgagcacatccttcagaaatctcaagtgtcgaggtgtgccacaggcttcagacggaatcaaagtatcttgcggaatgcatctctgcactgcaaacgggacgtcctcctgaagctagacatcaaggatttttttcccagtatctcagtgaatcgcgtgatagacatctttaacagctttggcttccctccaaatatttctttcctgctcggaaggctgtgcactctcaacgggagattaccccagggggcagcgacttctcctatcgtgtcaaacattatttgcaagcagatggacgaccgcctctatagcctctgcttgagcaagaaccttagatatacccgttatgctgatgacattgccatctcgggagtgcagatcgaggtgggaacaaactacttaatacgagagatcatcaacgcggaagggttcctgatcaacgaagaaaaaacacgcatttgtggacctagggacaaaaagattgtcacgggcctggacatcaccgccggtaaaccaagactcactcgatcctaccgcagagaacttcagcgggatgtctatttcgtttggagcgcagggctggccagccatttgtctaagcgcaagatattcaatcccaattacatggaacatctgcagggtaagatcgctttctgggagtcaattgagccggaaagtgctcagatgaagaagtgtaaggatcgagtaagcaagattaggaggctcatgaataaaatgtga

SEQ ID NO: 9395 - RNA, 957 nt, synthetic construct
  source 1..957: mol_type = other RNA
atggcgtatgtggagccccttgtgagaaatagggtgcctgtgatctttggattcaagtccctctccgatcttctgggaatcgaggagagcaccctgagctccattattaacagcagctcttcattttacaggagtttcaagatcccgaagagatcgggcggacgacggcagattgatgctccataccccagcctcctgcattgccaacgttggatcgcacagaccattctaccctcttgtaaggtgtcatctgtagcacacgcttatctgcctgagaggagtatcctcacgaacgcaagagttcactgcggcgcacagttcctcctcaagatggactttaaagacttctttccatctatctccgagagaaggcttgtcggcctgttttctagcttagggtattcaactctggtatcggtctatctggcgaagatctgtacattgaaaggcgccacccctcaagggtcacctgcatccccaatgttgtcaaatgttgtggcccggcgcttcgatctgagattggtgggttatgctcggagtcgaggcctgaagtatactcggtacgccgacgacatagccatcagcggagaaatggatgccgacgaagtgcagagtttcgttacaacttgtgctgtatccgagggattccgcattaatcataagaaaacacgctacgtcgagagtggtcagaaaatggtcgtgacaggcctggatataagcaccgggacgccacggccgaccagaaaatttaggcgcgaggtggaaaaggacgtcttttacatatggcggtatggtgtggccgggcatgttaacgctgaaaaaatttacgatccctcttacattcttcgcctgaaagggaagctggatttctgggcccagatcgaacccgaccacccacgactcgtccgttgccgagaaaggttcttgtccgctgcccccgactacttacctctatga

SEQ ID NO: 9396 - RNA, 1152 nt, synthetic construct
  source 1..1152: mol_type = other RNA
atgaatgatgtggatgagaaagtgtccccgccgccaatgagcattgatctggagcaatgggccgcattttttcttgataaagcaaaaggcaaccagcagctcatctcggggtatttgcattttcttaagcactgtaagcagaaggacatccctccaatttttgaggataatcacctatcccagctgctgggaatcaacatccgggacctcgccttctatctgtctggtgcccagggtcgttaccgaagctttcacatacctaaaagaaaggggggtgtgcggttgatcaatacccccactcctctgctgctccatattcaacagtggattctctcaaagattctgtacaaactccctgtgagcgaattcgctcatggcggggtgcccggaaggtccatcttctccaatgccaaagcccacctcggcgccagatgcgtgctcagaattgatctgaagggattctttgacacagtccctctggcgcttgggatctctatcttcagagctgctggttacagtcctaacgtcagccgttcactggctctcctgtgcttcgagaatggctgtcttccccagggagcagccacgagtagcaccctggccaacctggcagccaacagcttagacaagaggctctcagcattggctaaaaagtatggactgtcttatacacggtacgtagacgacctgacattcagtggcaggtccatcggcccaagattcgccatagcagtcaaaagtattgtggaacaatgccgctttgtggtgaacccccgcaagacccagcttatgagagggtctagcccaaaattcgtaacaggcttagccgttggaggccagaccttgagggtcccacgcgcttttcgacggaatgtgaagaaccaggcattccaactggtgaagaggggcgttgctggacaccttttggctactggggataatgatcctctaattctcgaacgcgttgctgggaaactggccttctggttgcaggcggaaccagaatcaaagaccgcgcggcaactatgtgcggcattagccgagtaccgaaagactgttgacactgatgtctctttaccgcagcccaggcgcatagtacccatcaactaccccgacgagctgttttccgacatagacctgtttacgacctga

SEQ ID NO: 9397 - RNA, 1140 nt, synthetic construct
  source 1..1140: mol_type = other RNA
atgaattatgttaaccttaaagtcagtcccccaattatgccgatcagcgtcgaagactggcgggccttcttctctctgtcagtcaaacgcgattctaaactggtggaagggtatataaggttcattgaactctgcgaaaacaagggccttccacccatcttcgaggagcgtcacctggctcatctgattggaatcccatactccaacatggcctattttttttctgtggcatccggacgctaccggacatttaccatcccaaagaggcgaggcggcagaagggaaataaatgtgcctacgcccctgctgttggctatccagcaatggattctccataacatcctatacaagctgccaatgtctgagtttgctcatggtggcgtaccaggccggagcatcctctccaatgcccgtgctcaccttggggccaaagccgtcctgagagtggaccttaaacagtttttcgattcagtggaatttccgattggaatccccattttcgaagccgcaggctatagtcccaagatgtccaagagcctcgcgttactgtgctttgagaatgggcgactccctcaaggggctgccacctctagcacactggccaacctggcggccatcagcctggatattcgcttgtccaaactcgccaataagttcgagttgacttacaccagatacgtggacgacttgaccttctcaggtcggtcgattggccccgggttcatctcagctgttgagggagtggtggaacagtgtcggttcgtggttaacgccgaaaagacccagctggcaagaggaaagtcccccaaattcgtaacgggtctggcagtaggtggagatcgactccggatacctcgcgcatttcggagggaggtgaggaatcaggcttttcagatcactagacgtggggtccagaatcacctcgaggccatcgaaagtagtgaccctttgatcattgagaaggttcttggccaattagcgttttggctacaggtggagccagagagcgcaatggctcgcaagctgttcgcaaacctgtcgttataccgaaggactgtcagcacagacactctgctacctcctcccagaaggataatacagatcggcacaatgcctattgatgagagacgcaaagagtga

SEQ ID NO: 9398 - RNA, 1104 nt, synthetic construct
  source 1..1104: mol_type = other RNA
atgagcgacaccgccgaacagtggcgagcattcttccaggagcacgtcaagcaggacacggccctggtgagagggtatctcgctttcattgaccagtgcattgtacggaatctgcctatcatcttcgaagagaggcatctgagccggctgatcggcgtcgactaccgggatatggccttttatttcacttcatctggggggcgatataggcaattcagaatacccaagaggctcgggggtactagggaaatcaacgtgccatcacccctcctgctagccattcaacagtggatacttcgaaacgtgctgtacaaactgccgatcacagatgccgctcacggaggtgtacccggacgttccattatcacgaacgccggtggacatttgggggctaggtcagtgctaaagatggatttacgaggcttctttgataccatattgctccctagaggtgtggctatttttgagtctgctggctacagtcctcatttgtctcgtagcctggctctgctctgttttgagggcgggagactccctcaaggagccgcaactagccccgcgcttgcaaatcttgcagcggtcgctctcgacgggagacttgaagccctggcacagaaatttggtttaatatactccaggtacgttgacgatttgacatttagcgggcattcaattggcgtgagattttccgcgatcgttcaggatattgttgaggacactggctttgtagttaattccgataaaacccggctgatgcgcggacagtcgccgaagttcgtgacaggactggctgtcggaggaggccgcttaagggtgcccagagcattcaagcgcgacgtgcggaaccgcgcattccagctggccaaacgtggcgtggagaggcaccttgaagccaccgagtcttccgacccactggtcctggagcaggtgaccggccaactggccttctggctacaggtcgagccagaaagcaagactgcccggcagctgtttgatgccttgaccgaatatcgcagaggcatgacaacaagtgtgaaactccctgacccacgccgggtcgctagtatcgacgattcccactggcgggttatccgcgatcactga

SEQ ID NO: 9399 - RNA, 1119 nt, synthetic construct
  source 1..1119: mol_type = other RNA
atggacatggtagttgaggactggagtagcttttttagtaaggaaattggaaagggaagcaatctacgcggtagatcgcgaattctggtggacggctatatggcatttatcaaacactgcgccgatctcggggtgccacctatattcgagaatacacacctccgcttactgcttggcctggacgcggcccattttggggccttgcttaccgagcatccagggcggtatcgtaaattcaccatcccgaaaagaagcggtggcgaaagagtgatttcatctccaaacccggccttactccacgttcagaagtggatcttgcggcaaattctggacaacgccgaagtctctgatttcgcacacggcggaattgagggccgaagcatagttactaacgctagggagcacctgggggctgaagccctgttaaagctcgatatcgccgacttttacggctctgttgggttcggattcgggatctcgaccttccagaggttcggataccccagaaacgtggctctttctttgacacagttttgtttcgatggcggatctttgcctcagggtgcagcaacatccgcttcccttgcaaatctgtcatgtagactgctcgatcgtcgctgccatggcctggccaagaagtacaacctgacctatagtcggtactttgacgacatctcattttctgggtccttcataaatgaaagactggtggaaatcgtctccgaaatcgcaatggagagcggttttgaactgaacaagcgcaaaactcggcttctcctgggaaagagtactaagtatgtgaccggcatctccgtgggcggtgacaggctacgactgcccaaaaaaacaaggcgcgctattcgtaatagcgcctacctgttaacgaagactggggacgtgcaaggattcgccgagagcgcgaaagatcctctgatcattgaaaccgtcctgggccaggtagcgttttggcggcatgtcgaacctgaggacgatgtcgctgaggagctcttccaggcccttgtagagctcaggcgggagacggatgtgcccgtggaactccctgctccatggaggccctcccccataccagagttggatctagagaaagtgtcagattga

SEQ ID NO: 9400 - RNA, 1104 nt, synthetic construct
  source 1..1104: mol_type = other RNA
atgtcagaatctagcagtgaaatcgccctaaagtggttgaccctgtgggatgagaagattcgacacaggaagtggttattcgactcttattcccggtatgtaggcaatctcgtcaggaatgggtttcccccagtgttcgagatgagacactttgcagcacttgtgggactggaggagacaacaatagcttggatgctagaaaaaaacgcgggattttaccgcaccctccagattccaaaaagactggggggtgtgcgagagatttcggctccgagccctaccttactgcatgtacagcggtggatcctccgaaatatcctggacaaagtgaaaccgcatgactgctgttatggatacataccccagaagtcagctattgagaatgccaagcaacacctgggcagcaaaacagtgttgaagatggatctggccaacttctttcctagtattgaactgcgtcgaggaatcgcgatcttccgcgccatcggatacaccggccgggtttcttactgcctggcactcctgtgcttcaaagatggcaaacttccacaggggggcgctgcatccccatctatttctaacatagtcggcaaacgcatggacctgaggctcagtactcttgccagcagaaataatctgcgctacactaggtacgccgatgatatgacgttctccggggatgaaatcagctggaagtttgtggctgccgtggagctgatcgcccgtgaagagggcttctgtgttaaccgggagaagacccgtttgatcagggagggaagagcaaaggtcatcactggtgtttcaattagcagtggggaggctcggctacctagacgcacagtgagagatattaagaacgaagcgtacaacatacttcggaacggcctcgagcagcacgctgagaggacccataattttgaccccatcgccattgaaaggctgctcggtagaatcaacttctggttgcaagtcgaacctacgaaccagactgcattgaattataggtatcggctgctcgagtatcagaagtttctggacgcccacggcctgggtttgcccgaagacagatccgaccgctcccttatattagggggaccctcatga

SEQ ID NO: 9401 - RNA, 1086 nt, synthetic construct
  source 1..1086: mol_type = other RNA
atgaccgatagcattcgaacaatcgcatcaaactttcaggtggacgttcgtcagtggcagagtttcttcgaggaaaatggatccagaaggaaaagactgatcgccggctaccttcacttcatcgaagagatggcgtcccggggccttccacccatcttcgagggcagccatctcggaaaactgctaggaactacccctgttgaatttggccggctgacgagtgcacccgaacaccactacagatcttttaccataccaaagcggtcaggggacgaaaggactatcctcgctcccacccccctgcttctgcattgccagaggtgggtcgacgcttttatcctccgtaagttcccgacacactccgcagcccatgggtacgtggtaggccggtctaatatcacgaacgctcgagtgcatataggcaatgcccagattctctgtttggacattgcgaattttttcgagagtgtcggggtcaaaaagataaccgagattttctatgaagctggttatccacctaatgtggccttcctgctggccaggttatgctcctatatgggccaccttcctcagggaggggcctcttccccacaactaagcaacattgtgatgcgtgatttcgacgctaccatgcaaacttttgcagagaagagggggctcaggtttagccgatacgttgacgacattgcattatcaggtgatcgagtgagtgatcaggatatacaagctgtggaggaggcactggaagagacaggtttaacactgaacccccataaaatcagattccagcgcggacgcaagaaaatcgtgactgggattagcattggcagcggacgcatgttgctccctagagagctgcgcagacggtttcgcaaccaagcttttctggccctgaaaaacctggccgatgcggtggatgccgaccctattgcccttgagcgccacttgggtcggttcgcctattggaaatctgtcgaaccggataataagagggtacagatggtcttcgacagattgaatgagttgaagaacatcctggttaagcgggacacatcgctgtcagacaaggatggctttctctcttga

SEQ ID NO: 9402 - RNA, 1038 nt, synthetic construct
  source 1..1038: mol_type = other RNA
atgattgactccattaggaccatagcttccaattttcggatagacgtgaatgattggcgcagctttttcgagattcacggagggaggcagaagcgcttgatagcaggttatctggccttcgtggaagagatggccacacacggcctcccgcccattttcgaggggcgacatcttaggaaactactcggagccacacaggctgaatttggatcgatgacgtctaatcctgagagtcattaccggagctttacaatccctaagagaaatgggggtgagcggaccatccttaccccaactcccctgctgctatactgccagagatggatcgatctttttatcctgcggaagatccccgtgcatgatgccgcacacggctacatcgccggacgttcaaatataagcaacgcgaaaatccatctgggctccgcccaactgttgtctgtcgacatcagcaactttttcgagaacgtgaacgctggcaaggttgcatacgtgttccagtccgctggatatcctccggccgtcgtcttcttgctgaccagactttgcacctataagggccacttgccacagggggctgccagttcaccccagttgtccaacctcgtgatgagagggtttgatgagactctgcagtcatacgcaaacgtccgcggcttaaggtatagcaggtacgtcgacgacattgtgctttctgggaggcacatcggcccaaacgacgttaacgctgtggaggaagcactgaagcaggtaggcctcgctctaaacccaaagaaaattcacttccaacgaggacgcaaaaagatcgttacaggtatctctatcggaagtggtcgactgctgctccccagagagctccggaggcgttaccgcaatgagactttcctcacactgaaaaacattaccgcggccactgaaagagatcctattgcgctcgaaagacatctggggcagctggcatattggacgaatattgaacctggcaatgaacgggccttacacctgttaaaacaagtacgctcagtgagcacttgttga

SEQ ID NO: 9403 - RNA, 1086 nt, synthetic construct
  source 1..1086: mol_type = other RNA
atgaccgactctattaggagtgccgctagcagctatgagctggatattgaactgtggagttccttctatagcaaacgcgtagaaagaaacaagcagttggtggcaggatatctcaagttcatcgctgagatggcagacagaggcataccaccaatttttgaaggccatcacctggccaaactactgggcctttccctggcagagctgagtcgcttcaccgcaaaccccgagaagcagtacagaactttcgaaattcctaagaggagtgggggagcccgtgagataagcacaccctctcctgaattattggagtgccagaggtggatcgattggtatatactgaggcgcctgccagtccatgattgcgcccatggatacgtgacagggagaagcaaccgatccaatgccgtgacccacataggctcccgccaggtgctccacctcgatattagggacttctttgggtccataaagtttcggcgggtgatctctatctttcttaaatccggatacccgcgtaatgtcgcttttctgctagcacgcttgtgcacacaaggtggctgtgttccccaagggggtgcttcttctccccagttgtcgaacgtggtcatgtacgatctggacttggaaatcgccgagttttgtaaaagcaatggcctgatctactcacggtacgtggacgatatcgccatctcaggggacctcatccggacaactcacattgcggagatctcaaggattctcctggaaagcgggttcttactgaacgagaagaagacttctcttcagcggggtcgaaaaaaaatcgttacgggagttagtatcggctccggcaatccgaaggtacccagacagatgaggcgtcatttcaagaaccaggccttcattgcgctcaaaaatttagagcacggtgagcaaattgatgaaatgtcagaccctattcactttgagagatgtctgggacagctatcctattggtcgatgatcgaaccagagaacgaaaaggtcgccaaactgattgacgaaatcaagaatcgactttcagacctcgaggctagacttcggcctagccgcgctacccgatga

SEQ ID NO: 9404 - RNA, 1047 nt, synthetic construct
  source 1..1047: mol_type = other RNA
atgagtaaatcatcagaagaatggcgccatttctttgaagaaaggggcgtgaaggataaaaaagcgctcttggggtatttgcagtacattgaggaaattgaggcaaaaggtctgcccccgatttttgagatgcaacatctctctgagctgatcggagtgaataagtcctacatcgccgctgttactaaggacagttctgctttttatagagactttgaggttaagaaacgatccggaggcgttagggttatctctgcccctcatcccacactgctgctctgtcagcgatggatcaacggtgagatactgcagcacgtgcctatacacgactcagcatttgggttcgcccagggccgttccgtggtggataacgccaagatgcacatcagtggcaatcaccttctgggaatggacatcaaggattttttccccagcattcacatagatactgtgagggatacctttctaggtcttggctaccctccgaacgtgtcggctatcatggcaagattgtgctgtaaagacgggcggctcccacagggagcacctacatcaccagccatcagtaacctggtgtgccggaacatggacaaagagatctcagatctggtcaagcctcggagtctcatctatacacgctatgccgacgacatcagcgtctctggcgaagatttgggctccgatgtgctggggaagattgagttcattcttaagtccttcgggttcctggtcaacgagggaaagacgcgcattagcaagggcgggcacaagaaaatagtgaccggaatatccattgggaccggaaggccaaagttacccaggaaagaggtaagatccatcaaggcggacgcccatgccttgttaagctacggtctattatcttacattgagcggagcgaaaagccagatccactggtcgtagaaagactgatgggccgcgtggctttctggcttcaagtcgaacccgagaattctaccgctgtaaaactgaaaagcaatctccaggacctcagcaatcagatggaccgtggccggttcagactgtga

SEQ ID NO: 9405 - RNA, 1056 nt, synthetic construct
  source 1..1056: mol_type = other RNA
atgactgactttaattatgacgaatggcagtcgttctaccatgagagagttaagggggagcacgggctccaacttgtgagagggtacctcgctcatgcggccgctttgtccgccagaaacctacctcctatttttgagttcagccacttagcagccctgttgggagtcgacaaagtgacactggccaccatctgccactctccccataattactaccggactttcgcaattccaaagagaacaggcggccgccgggaaatatcagtccctcggccaatcctgatgaaactccagcgatggattttggctaacatcgtggagttggttaatgtgcatgacgctgcccacggcttcctgaagaatcggtccatcgtaactaatgcacgccagcacctgggctgtaacgagctgctgaaaatcgatattctgaacttcttcccatctatctctagcggcaaggtgcgaagtctgtttgccgagctcggctattccggttcagttgcaagcgctctcacccgaatatgcacaaaaaatgacgggcttccgcaaggagctcccaccagtccggctatatcaaacttagccgcaaaagcttttgatgtccgcatcgctgaccactgtgccgaagaggggctgacgtatacacgctacgccgacgatatcgccatttccggtgagaggatcgcccctcatgtgcggggaaaaatcattcagatcctcgccgataccgaactcaagattcaccccgtcaagagccgtctattcgggcccaaagataggaagattatcgccggcataagtattagctcaggaaagctgatgccacctaaggactttgtgaggtctgttcgtaaagatgtataccatgtgacgaccaagggtctgttagcacacatggcggcaattgaaaacttcgaccccatatatctggagaggcttcttggcaggatcgcattctggaagcacgtcactaaaaacagcgatcagtccctgagagcggaatttgcgttgaagcagtatatggtggtgagtggacttgccggagaatttcagtga

SEQ ID NO: 9406 - RNA, 1140 nt, synthetic construct
  source 1..1140: mol_type = other RNA
atgaataacgtgaaggattgggaagagttcctcaggacacacctgagtcacgaacagcagcagctggagggagctatcggctacgtaaagcatttaatctcccaaagcctgcccccgatattcggtgaaaagcatttctccatcctcactggcgtgtcagagatctttcttaggaagctagccgataacagtgcccactattatcgcactttctcgatacctaagcggaaaggcgggtttcggaatatctcagtcccctcgcctaccctgttgcacgttcagagatggattgtcgcgaacatccttagaaagatacccgttcatgaggctgtgcacgggtacgtggcaagccgaagcgtaattaccaatgctaaggtccatagggaacaggagtctatactccggattgacatcaaagactttttccccacaatagagtcacagcaggtgcaggcactgttcgcagctattggataccggcccgagttatctgtcctgatgagtgacctgtgctgtcgcaataacgtgctacctcaaggggccgcaacctccccagctattagcaactgggcatttgcgccgttggatcgcaaactcaaggagttgtcccagaaatattcataccaatataccagatacgccgacgacatctttataagcggtaagcatatccacgatagaattgaatctgaggttgcccagatcctcctggaacaaaaattccgcattaatcgagccaaaacgcgatttatgggacctaacaggccaaagattcttgccggcgtgtctatcgcctccggccgtttgtgtctgccacgggagaaaaagagggaaatcaagcagaacgcctactatatcattaaatacggacttttcgagcactgcaattggaaagcaagtcgcgatccccttatcctggagaagctgttggggaaaattaacttctggctgatggtggaaccaaaaaacccaacagccttagaactccagcaaaaactgcgtgccatttccctcgaatttgataatagcctgtgggagaagttcgagcctaagagggcgcgggacatccaggacatttttaagcctactcccgctgctaactttgaattcccaagctctatgagaaattctaagtcctga

SEQ ID NO: 9407 - RNA, 1062 nt, synthetic construct
  source 1..1062: mol_type = other RNA
atgaagcagtcgaagtataaatccgtgttgtgcggcgacctagtgcccgtccagccctactcgcaatttcttcaggaaaaaaccttccggtggccccttaaatatgcagccaaaagaggtttgatcgcctatgcagagagactggagtcccaggggctgccagtaatcctcgacattcagcatctcgcttggcattcaggactcgaagctaaattcatcgccagcgtggccctggataatagaagatactactccacacgcacaataccaaagcgccgaggaggggaacgatccttattcgtgcctcggccttttttagccggactacaaaggtggattctcgacgagattttatcaaagtttgggctgcaccaaagcgctttcggcttcgttaaaggcagaaggacgctcgataacgctcgacttcacgcagccagtaaatgtatcctgaaggtcgacattagggatttttttgggagtatcaagtatgcctccgtcagtgacatctttctgggcgctggatactctcctaaggtttcttactacctcagcaggatatgtactttggatgatgtaattccacagggggcccctacctccccctctatctcaaacatagccatgaggcaagtggacattcagattgcggaattctgtgctcagaataggctactgttcagtagatatgctgatgacatctgcctctctggcgactccatcccggaaagcgccttccctttcctgtcagattgcctgagcaagtttggccttgaaatcgcagaggagaagactgtgctggcgttcgaggggcagaagaagatcatcacaggcatcagcatctcatctggcgagctgcgcctgccaaaggtttatcgtcgggaacttcggaaaaccattcactacatttgccgctttggtctgaagagtcataagaacaaagcgggaatatctgaccccatctaccgctatcgtctgctgggacaggtggagtactggctgtccattgaaccgaataacagcatagcattgttgggtcgggagattctcaaagagagccggtga

SEQ ID NO: 9408 - RNA, 1062 nt, synthetic construct
  source 1..1062: mol_type = other RNA
atgatcggtactatcatcctatgcgggaaccccgtgccggtccaactctactctgaatttttgcgagagagaacattcagatggcccctgaaaagcgcagccaagagaggattagtcgtctatgccgaacgactggagaataaaaatcttccggtgatcctcgatatgcagcatttgtcttggcacaccgggattaagtcacagtttatcgcgaatgttgtgttggatggggccaggtattaccgctcaaaggttattcctaagcgtagaggcggcgagcggatcttatttgtgccccgtcccttcctggcaggactgcagaggtggattctagacgaggccctcagcaagctgaagcctcactgctccgctttcgggttcataaaaggccgcggcatcgtcgagaacgctaaagtgcacgttaacagcaaatgcatcgtgaaagtggacataaaggacttctttggatccgtgagctatgtcaccgtatacgatatcttccttcaggctgggtatagtcctaagatcagctacttcctgtctaacatctgtaccctgaacgatgctcttccacaaggcgcacccaccagcccagctctgtccaatatggctatgttccaagccgacacacagattgccgaattctgctctcagaatgcactgttgtttactaggtatgcagatgacatatgtcttagtggtgatctgattccagagagcgcatttccatttctcagtgactgtctggccaagtttggctacgaagtggctgaagacaaaacggtgctcgcgtttgctggacaaaagaaaatcgttacaggaatctccatttcctctggaaaattaaagcttcctaaagagcagaggcgcaagttgagacaggccatacattatatctccaagcatggcattaactcgcacctggccaatctcgcaattctggacccaatttaccgctaccggctcgccggtcagatagatttctggctgtcaatcgagcctgacaacgaagtagcgaagctggggaggcggattattcggtcaactattagtgccggctga

SEQ ID NO: 9409 - RNA, 945 nt, synthetic construct
  source 1..945: mol_type = other RNA
atggagctcaagttctcttttccccctccagccatccaaactctcgctgacctcgccgatgtactgaatgtcgagaggtggtgtctcggaaaagcaattaattccagcaggtcattttaccgcgttttccagttgccgaaacgctccggtggctaccggtctatatctgcacccgtgccatccctgctgagcgtgcagaagatcatttacaagtccatactcagtagcgtcgtatgttctgacagagcccacgggttcctgtcgggaaggagcgtgagaagccacgccgaggttcatcttaatgggcgagatttcctacttaccgacatcgaaaacttttccgatagcattaagattgaggacgtggttagcatcttcagcaagattgggtatgtgcatgagatcgctagtgctctggccttattatgcaccctggacggatctctgcctcagggatcgcctacatcacccgtcctgtccaatatatattccattaggctggacaatcggctgtcaaacatttgcagtgatttgaacatctcctatagtcggtatgcagatgacatggtgtttagtggggacaaaatgagcctcggctttctgcgcctcgcgcagtctattataaactcagagggtcttaacctaaatagtaagaagaccatgtttgccaaatctccctccaggctgataattacaggcatctctatttcaaacagaactttgaagttgcctaaagaaacgaaacgagctttaagattcaaagcgcactttattgcacgcaacggcatcctgtcagaactggaacgtcaagagacagccgatccgttttacatcgatcgtatcatcggccagctttgcttctggtcattcatcgagccagaaaatcggttccccaaaatttacaagaacgtgatcaagaacatcatcaacaataatccaagctga

SEQ ID NO: 9410 - RNA, 966 nt, synthetic construct
  source 1..966: mol_type = other RNA
atggtaggtcgaatcgaactgccattcagaacaatacgcgggcttgcgcggcaagccgaagttaggcactctgtgctcagggctgtgctgtcaaagatcgaaagcaactatcgccttgtccgcattcctaaggccactcccggggagtacagatcgctctcaatcccaaaacccactctaaagcagattcagcgtacaatatacgactccgcattgaaaggaatcgcgatctcctccagcgctcatgcctatgcacctggccgctctattgtgtcgcacgcgcggattcacgccggaagcacagacttcatacagatcgacataaaagagttcttcccgagtgtgagcccagctagggttagagtactgttcgatgagttggggtttggcagcgacgtcgcccaagcactgacagctctctgtacgtttcagggcggtcttcctcagggcgctcccacttcccctagtatttctaatgcaatcttgaaacacctcgatgaggatttggacgcctacgccgtcagtagaagctgcagatattcccgttacgctgacgatctcgttatctcaggtagctctctcgacgtcgccgactttgaagccaccatagcactggtggcaaaacatggattccgcatcaatgatagaaagtctaggctgatgatgaacccatctaaggtaatcattaccgggatcagtatttccagtggggtccttaaggtgcccaaatctttcaagaggcagctgcggcagatgtcacaccggctgttagtctcccctcagctgaccattagcgaggatggacatgtggacccttttctgtttgatcgggtgatcggccgactgaccttttggcgaatggttgagccagaagccgtgtttccccggcgccaaattgagctattagtgtcaagatatccctccggcgttgtgtcaagcaggccagagaggctgccgttcgtgtga

SEQ ID NO: 9411 - RNA, 936 nt, synthetic construct
  source 1..936: mol_type = other RNA
atgttcgaggagaacttggccatcggatccctgacacagctgagcctggccagtggaattccttccagtgtgatatcttccctggtattcgaacgagaggggagatatagaaagcactttattgctaagagagacgggggcgctcggaccatctctgtgccacttcctgccctattacaggttcagaagaccataaataaagagatcttgagtaccgtggatattcatgacgcggccgttgggttccgcaagcaccacagcatcatcgatcatgtcaaaccgcatctcggtaacaagaagtttgcaaagttcgacattaaagactgttttggcagtatagcctttaacgcagttttttcgatttacctgcggatcacaaatgaccccgccttagccaattccctcagcgagttgagcacagatgagggtaagctcccccagggcgcggctacttcaccatctttgtgcaacatctcattaaaattcctcgacgaacgcatcttcggactttgtcaacggcttggactgacttatacccggtacgctgatgatctgcttattagcggcactaagctcgacctctatatatatcgcacgctgaaatcgtacattgaagattgcggcttcctgacaaacgagaaatcccgcctgatggaagatcctcagaggctgatcatctgcggtatttctattagcgagtcagacctcaaattgccaaaacaaaagaagagggatattcgtcaggctgcccactttctggtgaatcgtcctatcgtgagcgaatccatttctgacgaactgtttgacccattccacgtcgacagggtcctagggagactgcagttctggcgattcgtggaacccgaggcagaatttcccatcaagtacattccgatcatcaaagagaggatcgcatcacagatagatacccaatga

SEQ ID NO: 9412 - RNA, 1044 nt, synthetic construct
  source 1..1044: mol_type = other RNA
atgaccggtgaggatctgcgagagtggagagaactgtacaatagccggatttcagggaatcgagggagagctctcgctgatggctatataaaatatattgagagccttcaggccttgggaatcccacccatcttcgagtttagccacctcgcagacctggtagggattgagtatgaaacccttgccaaagtggcctcaagaccccaggacttctacagaactttcgccattccgaaacgttcaggaggtatccgcaagatcgatacccctaggccaatccttatgcagatccagcggtggctgctggaccagatagtgtctaaatctcgagtctccgaacaagctcatggttttgtagtgggccgcagcataatcactaacgcaagaacacacttgggctgccgtgagctgctgaagatggatcttaaggatttcttcccatccgtcaccgcctctactgttcactatatctttaaggatatgggttacccccctaacgtgtgtcgcgcactgtcccggctagtgaccctcggagcctgtctgcctcaaggagctccaacgagcccggcgctgtccaatatagcatgcgtggaattggatagcaacctgaataatctcgccctcaagtacgacctgacgtacacacgctacgcggacgacttaacttttagcggatcatcaattcctagtgatatgacttctctggtggcaaacctcacctctaaagctgggttttccacaaatgacaagaagaccatcttgtctcccgcggggcacaggaaaatcgtgacaggcattagtattagctccggcgagctgaagcttccccggacctatattcgcaacctgaggcagaggattcacctgctaatcaatcatggcatcctccatcccaacaacgactcgacagcctgggacccattagttctcgacaggctattaggcatggtcagtttctgggtcagtgtctgccctgagtccgaagccgccaaacgggcttacagtgaattgaagaacttcatgatgaagtttcagacagtttga

SEQ ID NO: 9413 - RNA, 972 nt, synthetic construct
  source 1..972: mol_type = other RNA
atgaaatccgacatctggaagtattgcaacaaatcacatacgcgggagttcctgctgtcattgggcctgaccggcaagctcaatctgcctgaggagaaacagctgagcctactctacgggctctccaatcatgccgaagaacattaccaaaaagtacagattccaaaacggaatggaacttggcgtacactgtatgtcccggatagcctgcttaagtacatccagaagcagattctccacaagattctcatgcagttccccgtgtcttcctgcgcttctgcatacaagaagggttgtgcgctgaaagagaatgccgctccgcactctggaaagccaatcgtgttgaaaatggacatctgggacttttttgggaacatcaccttcataagcgtgtatcaacacgcattccctggtgagctgtttcccccctccgttcgaacactccttacgcacctgtgttgttacaaggactttttaccacaaggtgcccccacttcgccttacattagtaaccttgtcttagccccttttgatcattatatggaaaactggtgcaaaggcagaaatattacttacaccaggtattgcgacgatctcaccttctctgggaattttgaaccagagatgttaattcctaaggtaagctccttcctgctgaggatgggcttcgaagttaaccctaaaaagacaaaggtgtgtaggcagggccagcagcagatcatcactgggcttatagtcaacgaaaaagcccaggtgccaaaggcttaccgaagaagcttgagacaggagatttactacattgagaagttcggactgagtgagcacctggcacatatccattcagatctgacacccgagcgctatttggaaaagcttaaaggacgcatccggtatatcttgcagatcaacccccaagataaagtgtttcaagaagctttcacccacctaaataagatacacataagtcactga

SEQ ID NO: 9414 - RNA, 972 nt, synthetic construct
  source 1..972: mol_type = other RNA
atgagttctgacatttggaagtactgtgacaagaaccactcgagagagttcttactgagcttaaatctcaccggcaacctgaacctgacaaaagagaagcagctgagcctcctttacgggcttagcaaccacactgaagagcactaccagaaaatccagatccccaaaaggaatggtgcttggcggaccctgtacgtccctgacagtctgctgaagtacgttcagaagcaaattcttcataaggtcctaacacaactgccggtttcatattgtgcctccgcatacaagaaaggatgctctctcaaggagaatgctgctcctcacacaggcaagtcaattgtcttgaaattggacatactggacttcttcggcaatattacgtatatctctgtgtatcaacacgcgttccccggagagctgtttccacccccagtgcggacactcctggcacatctgtgctgttatcgggattttctcccacagggtgcaccaacttccccgtacataagtaatcttgtgctgttccctttcgatcgatatatggagaggtggtgtaaaaaccagaatattacgtatactcggtactgcgatgatctaaccttttcaggatcctttgaacccgaagccgtgatccgcaaagtttccagcttcttgctgcgtatggggtttgaaatcaatcccaagaagatgaagatctgccctcaaggccagcgccaaataataaccggcatcgtagtgaacgaaaaaacccaggtgcccaaaacctaccgcaggaacctcagacaggagatttactacatcgagaaattcgggctcagcgagcatctggcccatattcacctggacttaactcctgaaaagtatctagaacacttgaaggggaaattgaggtatgtacttcagatcaatccacaggatcgagaatttcaggaggccctcgccagactgaacagaatttgcatctctcattga

SEQ ID NO: 9415 - RNA, 984 nt, synthetic construct
  source 1..984: mol_type = other RNA
atgaattcagatctatggaagtattgcactggaagccagtgccgagacttcttactgtccctgaacctaaccggcaatatgaaattgagcgacgaaaaaaagctggcgttgctctatggactcgctaatcacacacaagaccactacaaaagagttgaaatacccaagaagaccggcggattccggacactgtatgtgccagacagcgtgctcaaatacgtgcagcggcagattctgtccaatgtcctgagtcagtttgccgtatccccttgtgcaacagcatatcagaaagggcactctctcatctgctccgccaaacctcatctgcagaagcccatgcttctgaaactggacatctcggacttctttgggtctatcacgtatatcagtgtttaccaacacgccttccccggcgagatttttccaccctcagtccgcaccctgcttactcatctgtgctgttttcaggatatgttaccgcaaggagctcctacaagcccttacatcagcaatctcgtcctggctccttttgacaaatatatggaaaagtggtgtagggatcgggcaatcacttataccaggtactgtgatgatatgacgtttagtggctccttcagcccagggcaagtgactgccaaagtgcgtgggtttttaggtaggctcggcttccagcttaacccggaaaagaccagagtcattcatcagggtcagaggcagattgtgacaggcattgttgtgaatgagaaagcccagaccgctaaggcctaccgacgcagacttcgccaagagatctactacatcgaaaagttcggaatatacgagcacttgaagaacatacattctagtcagaccccagaaaactatctgaagtctctcgaggggaaaattagatactgcctgcaaataaacccccaggatgtacagcttttgaacccatgggagaagttcaagaagatcaagactgagggtatttcagagtcatga

SEQ ID NO: 9416 - RNA, 975 nt, synthetic construct
  source 1..975: mol_type = other RNA
atggccccaagcctgtggaaatactatacaaaggaacagacacaggactttctcttaagccttcatttgaccgagaatcttacacacacccctacagccgagatggctctcctgtacgcgctcgccaaccatgcggatgagcactacgaaaaaatctcgattcccaaacggaatggcaccaaacgaattctgcatgctccagattccgtcctgaagtatgtgcagactcagattctaagacaggtactcagagagttcccagtgtccggatatgcttgtgcatatcagaagggtatctcacttaggtctaatgcatttcctcaccaggcacagaaactggtgttgaaacttgacatacaggacttcttcgattccataagttatatttccgtgtaccaacacgggttcccttgtgagcggattccggattctgttcgtacgctgctggcccacctgtgctgctataaagaccgtctgccccaaggagcacctaccagcccctacctgtctaacctcgtcatgaagcccttcgatgagtacatgggcaactggtgtagagtgagggagatcgcttacactaggtattgtgacgatatgacgtttagcggagattttcacccgaaggaggtgctgaaaaaggccgaaggcttcttgaatagactaggctttgaactgaatcataagaaaactaggatctgcagtcagaagaaccggcaggagatcaccggcatagtcgccaatgaaaagctgcaggttccaaagaattatcgccggcgcctccgccaagagtgctactacatcaggaaatttgggcttgagaaccatttaagtcacattgagtatactggtgacaagcagaagtacttgcagcgcctcttagggaagatccaatacgtactgcaaattaaccccgaagacggagaattctgcgaatggaagcgatggatcaccaactcatttttcatccacgactga

SEQ ID NO: 9417 - RNA, 975 nt, synthetic construct
  source 1..975: mol_type = other RNA
atgaattctagtctctgcaactactgcacggagaaccagattcaggactttctcctgagtttgcacctcaccggaaccctgacccactccccaaaagccgagttggcgctactttatgggctggctaaccacgctgaggaacactacgagagagtgctgttaccaaaaaaggacggaagcaagcggatattgcacgtgcccgacagcgtgctaaagcatgtgcaaaaacaaatcctgcgccaggtgttaatggagattccggtttcaagctattcttgcgcttatcagaagggctcatctctctctcagaatgccgccccccataaaggacagaagctcctgctgaagctggatattcatgatttcttcgggtcaatctcgtacatttcagtatatcagcacggattcccgtgcgaacgaatccccgaccctgtcaggaccctgttagcccatctgtgttgttacaaggatatgctgccccagggtgcaccagcctccccatacctcagcaacctggttatgaagccttttgatgaatatatgggtaattggtgtagggaacgggagatagcatatacacgttactgtgatgacctaacattctccggtgacttcaatcccaaggaagtttacagaaaggcaaaagggtttctcaatcggcttggctttgaagtgaactccaggaaaactcacatcattagtcagaaaaaccgccaagaagtgactggcatcacagtcaacgaaaaactgcaggtacctaagaattaccgacgccaactcaggcaagagtgctattatatccagaagtttgggctggagaatcatttgaaacaaactggctgtcaggacagctccgctaaataccttcagagacttcttggcaagatcgagtacgtcttgcaggtgaatcctgaggatatggagttccaggagctgaagaaaagaatgaaagtctaccggaagaacgacgaatga

SEQ ID NO: 9418 - RNA, 969 nt, synthetic construct
  source 1..969: mol_type = other RNA
atggagaattctttgtggaagtataacactcataacgattctctagatttcctgcgttcactgcacctgacagacggactaaacctggcctcagacaatcagctcgcattcctctacgctctttcaaatcacgctcagaaccactacagccaagtatttattcccaaaaagaacggaaagaagcggaaattgctgatccccgactatctgttaaagcaagtgcagaccaacatcctgaaacacattttggttcaatttcccgtctcgccatacgcaacggcctacaaaagcggatgtagcactgtgttcaatgcctttccgcacctgaatcagaaactcctcctcaaattggacattcacgatttctttgggagcattacctatatcgacgtgtatcagaaagtgtttaagagtgaactctttccaccatccgtccgcacattactgacacatctatgctgctatcacgacgcccttccccagggtgctccttcttccccttatatttccaatctcatcctgaagcctttcgataactacatagggaactggtgtaagaagcagcagatcacgtacaccaggtattgcgatgatatgactttttcaggcgatttcaatcctgtcctggtgaagaaaaaggttcagagctttctgatgaggttaggcttctctttgaatccggagaaaacccacgtatgtagtcaaaagaaccgccaagaagtcaccggccttgtggtgaatcagaagctccagacttccaaagagtaccggcgaagaattagacaggagtgctactatataaagaaattcgggctgaaggaccatcttgcgcatatcggctacaagaagggtgaaacacattatctccagagcctgaactccaaaatcaattacatactttacgtgaacccaagcgacagtgaattcctgcttctgaaaaaggagctgtcttcctttttccaggtttga

SEQ ID NO: 9419 - RNA, 972 nt, synthetic construct
  source 1..972: mol_type = other RNA
atgcagaatggactatggaaatactgcagctctgcccaggagactgagtacctgctgtcactggacttggcaggagccctgaccgcgtctcgcgagaaacaggcagctcttctgtatgctttgagcaaccacgcagaggaacactacagacgcgtcagaatacccaaaaagcacggcgggttcaggaccctcgatgtgcccgatagacttctcaagtccgtacagcaacgaattcttacacaggtgcttgaacatctcccagtgccagaatgtgccagggcatacagaaaaggcgtctccctgctggaaaatgcggagccacacgccggccaacgatgcgttttgaagctggacatccgcgacttctttggttccattacatacctgtcggtgtattctctggccttccctggtgagttctttcctcctgctgtgcgtactctgctcacccatctctgctgtctccatgattcattgcctcaaggggctcccacctctccctatatctccaacctagttatggccccctttgatagatatatctcgggctggtgcgaggctagggggatcacttacactcggtattgtgacgatctcacgtttagcggggacttcaacccgaacgaggtgaagagcgcagccgagggctttctgttacggctgggctttgaattaaacccagataagacgaggttcttctcaagttctcgtcgccaggaagtaacagggatcgtcgttaatgataggccgcacttaagcaagtcctacagaaggaagctgcgacaggagtggtacttcctgaaaaagtatggaaccgagaatcacctgcagcatatgggatcccccctaacacctgagaagtatcttcagtcactgaaaggtcggattttgtacgtgctcagcatagacccaagtgaccgggaatttgccgacatgctccgcgaattgagcgctgaacggagtagtatttga

SEQ ID NO: 9420 - RNA, 993 nt, synthetic construct
  source 1..993: mol_type = other RNA
atgcattatgatatctggaaatattgtaccaaggatcaatggattcagtacctcttgagcatgaatcttactggtaatttgcgcctgtctgatgagaagaaattagctttgctgtacgagcttagtaatcacgctgaggaacattataccaccattcgcattcccaaacacagtgggggcctgcgcgtaattcggcagcctgacagcctgctgaagtatatccaacggcaaatcctcttcaggattctcgtgcaaatacccgtgtcagactgcgcattcgcctataggaaggggttttcagccgcagacaatgctcgaccacacgcaggcaaagataccgtcctcaaactcgatattcacgacttttacgagaacataactttcatggccgtgtaccagcacgcttttcccgaaactttgttcccgccacctatcagaacgctgcttacccatctgtgttgctacgattcaatcttaccacagggagcgcctacatccccttgtatctctaatctggtcatgcggccatttgacgagacaatgaaacagtggtgcggagaacagggcatcacgtacacgaggtactgtgacgacatgaccttttctgggcacttccccgggaacactgcccaggaagtcatagacaagaccagaggatttcttctgcggttgggcttcgagcttaatcagaagaagactagactgataagaagaggttgcaggcaagaggtgactggctataccgttaacgatcgggtgaggacttcgaaggactatcgccgaaagttaaggcaggagtggtactacattcgtaaatttggactggaagagcacctgaaaacactcctaggtaccagccatgtaacagatgcccagaagaacagctacctgcagtccttcacaggccgaatcgcgcatgttctccgcacagacccgcagaacacagtgttcctagccatccagaaggaagttaaactgatgcgtaactcctga

SEQ ID NO: 9421 - RNA, 1011 nt, synthetic construct
  source 1..1011: mol_type = other RNA
atgagtcaggagctctggaaatattgtaccaaggaacagtgccgggattttcttctgtcattgcggctgacaggctctctgtgccacaccgatgagaaaagggtagccctcttgtatggcctgagcaatcatgtcgatgaacattatcatatccggaaattgcctaagcgcggtgggggatgccggacaatatgtgagcccgatcccctgctgaagtacgtgcaaaagcagatcctctgtagggtactatctcagttttcaccagctccgtgtgcttgcgcatatcgaaaaggtatgtccctgagggacaacgccctgcctcacacggggaaggagaaggtgttgaaactggacatccgggattttttcggcaacattacatactcttccatctatcaacacgtgtttccaggaactatatttcccccttccgtccgcacactcttaaccagcctgtgttgttacgacagcgtgcttccacaaggggctcccacctcaccgtgcattagtaatctggttatgaaaccctttgaccagtacatggagaactggtgcgccaaaagatccatctcctataccagatattgcgacgacttgacattcagcggcagcttcgatcatgtgcaggtgataaggaaggtgagatctttcctgaagcgtatggggttcgaactcaatactgggaaaacgaggattataactcgcggcagccgtcaggaagttactggactgaccgtcaacgactcgcctggagttccaagaccatacaagcgagcccttcgacaagaatggcactacatcaagaaatacggaatttcttcccacctcgaaagaaccagcggtatcagtagtattacattagaggcaaagaagcactacctaattcagttagcgggcaaggccggctacatccttcagatcgatcctcaaaacctcttcttccaggagatgcgccaggagatccttcagctgattcaggagactggttggcaggacgcatcacagaattga

SEQ ID NO: 9422 - RNA, 1065 nt, synthetic construct
  source 1..1065: mol_type = other RNA
atgggagctgtactgatcaatcatgacacccagatagaggagaagcagagtgaggaaactactgatagtccagccggacacggcctgtggaagtattgcacacccgcccaatgcagggatttcatcctctccctcaacctgaccggaagtatgaggctcagctccgaaaagcagttagccttgctttacgggctctctaatcacaccgaggaccactacgcaaagaaaaagattcccaaacgcaacggcggcttcaggacactgtatgcccctgaccctctgctcaaatacgtgcagagacagattctgcggaaggttcttgtgcagttcccggtgagcggttgtgcttgcgcctaccgatcaggggcttctactcgggataatgccctgcctcatgtagggaaggaaaagattcttaagctagatatccacgattttttcggaagcattagctacatctcagtctgccagcacgcgttccccggcactatattccccccacaagtgcagacacttttggctagcctgtgttgctatgattccatgctcccacaaggcgcgccgacatccccctatatctccaatctggtgatgaagccatttgaccgctatatggaggaatggtgtcgtcagagagacatttcttacactcggtactgtgacgatatgaccttttcgggttcattcgacgctcgaaaagtgaccgcaaaagttcgggcgttcctgttgaggctggggtttgagctgaacgaaaagaaaaccagaatcataactcagtctggcaggcaagaagtcacaggtctagtcgtgaatgaccatatccaagttagcaaagcttatcgccgccgcttgagacaggagtggtactatattcggaagtacggcctcaaaggacatcttgcacgaattaactattcaaacacagaggaggcctacttagcctcttttagtgggaaagtcaaccacatcctgcagtgctgtcctgaggacgcatactttcaggaaatcaagttagccctgcagtcccgtaccgacaccagaacggatgcagccacgtatcattga

SEQ ID NO: 9423 - RNA, 987 nt, synthetic construct
  source 1..987: mol_type = other RNA
atgtccggtgacctgtggaaatactcgactaaagagcactgggtgcgcttcctactgtcccttggccttaccgagccactgcaactctctgaatctggtgctttaccgcttctatacgagttaagcaaccatccggaagcccattacacgctgcaccggatccccaaacgcagcggaggcgttcggttgctccacgaaccagataccctcctgaagaccgtccagcggcagattttgaagaatgtgctcaaaccccagagcgttagtgattgtgcaagagcctatcgggatggggtgtccctgaaggacaacgccagtgcgcatactgggaaagctttgattcttaagctcgacattcacgactttttcggctccatatcatacctcaatgtgtttcagcacgccttcccaggcaccttatttcccccagcagtaagaacaatgctcacagcactatgttgctgtgatgacgcacttccccaaggggcgccaacatctccctatatctccaatctggtgatgaaaccttttgacaactacaccgatatatggtgcaggcagcgcggcatcagctatacacgttattgcgatgacttgactttctccggagactttgaccctagggaggtgcagtgcaagaccgaaatgttcctgctgagactgggtttcgagctcaatagaaagaagactaaagtcattcgatctagttcacgacaagaggtaacagggctgactgttaatgagaaggtcagcgtgcctaaggaatataggaggaaactccgtcaggagtggcattatatcgagaagtttggattggaagaacacctgaaacgaacggccggacctgatacagcctcacccgagttgaccaagaagtaccttctgtctctgtcagggaggatcggccatgtgctgcaggctgatcctgaaagtgcttacttccgcgagatggccagcaacgtcaagaccctgctgcagaacggatga

SEQ ID NO: 9424 - RNA, 1002 nt, synthetic construct
  source 1..1002: mol_type = other RNA
atgcaggcagtctgtaggggagagcaagatatctggaagtattgtactaaagaacagtggaaggagatgatctgctccttcggcctgctgggcgatcccgagataccgcaagagattcaaatggcggttttgtacagatttagtcgtcatagtagttgctactatagggagaagaagatccctaagcggtttggcggtgtgcggtgtctgatgattcccgactctggactgaaagccgtccagcgccgaattctgaagcacatcctgtctgaaaggcccgtctctagctgcgcttgcgcatatagaaagggcgtggggattagagataacgcagccgcacacgttggacaggaatcggtgctgaaactggacattgaggactttttcggctctatcaccagctcagccgtgtacgggcttgcattccccggtactttgttcccaccacctatgcgcggactgctaacagctttgtgctgctgtaaggggcgtttaccccaagggagtcctgccagcccggccatatcaaaccttgtgatgaagccattcgacgactccatggacctctggtgtagacagcggggcattagatactcacgctattgtgatgatatgacattctccggtagctttgagccaggggaagttatcaggaaagtgcaatcataccttagcgagctggggatgcgactaaatagacgcaaaacaggcgtatatgcgaaaaactgccggcaggaggtgacgggcatcaccgtaaatcagaaagctcagcttagcaaggattacaggcgaaaactccgccaggaatgctattactgtagaaaatatggcatcgaatcccacatggagcggttaggggccggaggacaggaagccgaagagcaggtcctggctcggttgctcggtaagatagaatacctcctgtccgtggaccctgctaatagggagtttcaggcccagcgcgagtactttaggaagctcatgaagaccctccatacctga

SEQ ID NO: 9425 - RNA, 1014 nt, synthetic construct
  source 1..1014: mol_type = other RNA
atgggagagacaggattgtggaaccactgttcaagcaggcaatgtgtggaaatgattctgtccatgaagttgctcggttacgcaagccttacagaagaacaggagctttcggtcttgtacgaactgtccaatcatgccagcagacattatcgtgaagctgtcatccctaaacgtaccgggggagttaggcacttaatggttccagatagtactctgaaagccgtgcagcgtaggatactgcggaacgtgctgtccggcctggagctatctgaacaggcttatgcttataggaaaggagtaggcatacgagaaaatgccgctgttcatactggccaggagaagattctgaagcttgacatccacgacttctttggtagtatcacctccagctcagtctacgggctggcattccccgggacggtctttcccccacaagtgcggggcctgctgacatcactctgttgtctccgagggcggttgccacaaggaagccctgcaagcccggccatctctaatctggtgatgcgccccttcgatgagcacatgggactctggtgccgggaaaggaatattagatactctcgatattgcgatgacatgaccttttccggtagcttcgacgcaggcaaggtgatccggaaggtgagtggcttcttaagtgagcgcggcatgcgcttgaattggaaaaaaaccggggtttacgggaagaactgccgacaggaggtaacaggcctgaccgtcaacgagaaggtgcagctccccaaagagcttaggcgccagcttagaatggagtgctactattgcagaaggttcggcactgaatcgcatatggagagactcggactcgccgagtctgagtccgaggagcactttctcatgagactactgggcagactggaatatgccctgtcagtgtctcctggtgccaaggaatttgagcaggaacgcgaatactttagagagcagttaaaagcgctacgggagcggcgcgcgcaaaagaaccagaaggggtga

SEQ ID NO: 9426 - RNA, 1053 nt, synthetic construct
  source 1..1053: mol_type = other RNA
atgagtgggaatctctggaagtactgcacaaccgaccagtggcaagattatctcttatctctgcatctcggcggctcgaacctgcctctcaaaaaggaaatggccgtcctgtaccatttttcaaactgccaagaagaacactatcggaaaggtcgaatcccaaaaaagtctggggggtacaggactctgtggatcccggacggtcaactggcgggcatacagcgcagacttctaggccgtgtccttgaaaccatggaggttagtgagtatgcggcagcctataggaaagggatgggattagccgatggagcccgccctcacgtgggcaaaccggttgtagtgaagatggacgtaaaggatttcttcggctcaattggatatttgaccgtgtacagaaaggcttttcccccatggctgttccctgacccagtgagagggcttttcgccagcttgtgttgttttcgtgagacactaccccagggggctcctaccagcccatacatcagcaacttagtaatgcgggattttgactgcagcctgggctcatggtgtcgggaacgcggaattgcctatacgagatactgtgatgacctgactttttccggggactttgatcctggccaggttatccggaaggcaaccgcattcctcgaggctatggacttttccgtgaatagggagaagacacgagtgttcactagaggtgcacgtcaggaagtgacgggactggtggtgaatgagaaactccaggtgcccggcaagacaagaaggcgcctgcgccaggagtggcactattgcaggatgtacggggtcgaggagcacctgaaacaaacaggacttgaggagtccccagagcattacctggaaagactggcaggacgcattcagtacgtcttgtctgttgaccccggtaactccgtgttcggtcggatgaaagaagaagtcgctcgggagttggctgtccgaagggccactggcgccagtgaatccttcaggcccggaagcgagtctgatggcaagatacgaaccaagaatcggcagaaaatggattga

SEQ ID NO: 9427 - RNA, 987 nt, synthetic construct
  source 1..987: mol_type = other RNA
atggacgaacggacaaacatttggaagtactgctcgcgcgagcagtccatggaattcctgttgagtctgagactgacagaagatttccgaggcgcccaagatcacaggttggctcagctatacgaaattagcaatcatccacagcgccattaccggaaagcagttataccaaagaaaactggaggcaaccgtgtcctctggatccccgataccgagctcgccattatccaacgtcgcattctgagaaacgtgctggaggagcgccccgtgagctcttatgcagccgcttatagaaggggccaagggcttaaagatcacgcggagtgtcacaggaaccagaaactgttagtgaaagtggacattcacgacttctttggttccatctcatggatgcaggtttaccagaaggctttcccctggtatctctttccaccgagtgtacgcaatctgttgaccaatctatgctgctttagggaagcactgccacagggagctccgacctcacctgccatctctaatcttgttatggcgtcatttgatgagagcatgggaggatggtgcgaggagagacaaatcagttatacacgctactgtgacgatatgactttctccggggaatttgaccccggcatggtcatacggaaagtgtccgcctatctcgaacaaatgggtatggtcctgaacaggaaaaaaacccgagtctacacccggggttctagacaggaggtgactggcctcacggtaaatgaacgggttcaggtccctagattctatcgaaagaagcttcggcaggagtggtactactgtaagaagtacggggtgaaggagcatatcaaggctctgagccttgaagcagaacctgccgcctatttagccggcctgatggggaaggtgcagtacgtgctccagattgaccctgaaaacagggagtttttgcagtatcgtaaggagatccaggaggagataacaaaaaactacgagaattga

SEQ ID NO: 9428 - RNA, 1020 nt, synthetic construct
  source 1..1020: mol_type = other RNA
atgtccggcgaactgtggaaatactgtggaaaggaacaggagaaagcttttatcctgtctttaaatcttctgcccgcctctatgagagaacgtatgtcaggcgaggcgcagttagccctactttacgttatgtccaaccatgtcgaacagcactaccgcgaaaccagaataccgaagaagggtgggggctcacgcagacttctcgtgccagacggaatgctcaaaggcgtgcagaggaacatccttcatcactgtctggacggtcgatctgtttcacgtcacgcctgtgcctataggagggggctgtcgccggtcgataatgcagccccccatgccgggggagaaagggataagattctcctgaaactggatatacgaaacttcttcgattccatcctgttcccaggcgtgtatggagctgcttttcctgagagtctgtttccccctgccgcggctggattgttgacccacctctgctgctgccacgacagactccctcagggtgcgcccacgagtcctgcaatcagcaatctcgtcatgaagccattcgatgactacattggaaaatggtgtgaagaaagaaaggtgatttatacccgttactgcgatgatctggcatttagtggtcggttcgacgcaaaggaggtttacaggaaagtaagaggctttctcgcagcaatgggcttcgaattgaatgaagggaaaacagtgatcgccgggagaggtcgcaagcagactgtgacaggccttgtcgtgaacgagaggccccggacatctgcccaataccggcgaaagattcgccaagagatgtattactgccggaagttcggggtggaggagcatctacggatggccggattgctgaatggacgcgaagacgctggggagactagcgagaaagctgacgctttcctgcagtccctgagcggcaggatcggctatgtattacagatggagccagagaaccgcgagtttctggagtatcaagagatttgtcggaagatgatggacagccactga

SEQ ID NO: 9429 - RNA, 1029 nt, synthetic construct
  source 1..1029: mol_type = other RNA
atgagttcgaaattgtggaaatactgcggaacccaacaggagaaggagtttctcctgtcattgaacctgctgccttctgggattagagagcgcatgtccggcgaagcccagcttgcattgctctatagcctcagtaatcacacgcaaaggcattaccgtgagacacgcattccaaagaaaggcggcggctctagacgactcctcgttcctgacggactgctgaagggtgttcagcgaaacatcctgcaccactgtcttgatggacgatccatcagcgcccacgcttgtgcttatcggaggggtagatctcccatcgataatgccgccccccatgcaggtggcgaaaaagggaggctgctgttaaagctggacatccgtaatttcttcgactccatcctattcccacgcgtgtacggggcggcatttccggagtccctatttccacctgcggccgctggcctgctgactcatttatgttgctgctacgacagactgccccagggcgctcccacaagtcctgctataagcaacctagtcatgaggccgttcgatgactacatcggtaagtggtgtgaggccagacagattacttatacacgctactgcgacgatctcgccttctcaggcgtgtttgatgccggggaggtatacaggaaggttcgtggaatgctcgaggctatgggattcgcacttaactcacgcaaaaccgtcgtggccaatcagggaatgagacagaccgtgacaggcctggtcgtgaacgaacgggtccgaacttctgcccaatataggcggaagatacggcaggaaatttactattgctgcaggtatggggtgcgcgagcacttaaaggcagtggggagcttgtcaggcaaagaaaccgagggagaggctgccactaaggaacaggcattcctgcagtccctttttggacggattgcgtacgtactgcaaaccgaaccagaaaatcaggaatttctcgaatatcgggatggttgtagaagcatgttgcttgagaaagagcgggggtga

SEQ ID NO: 9430 - RNA, 1050 nt, synthetic construct
  source 1..1050: mol_type = other RNA
atgagtagtcaactctggaaatactgcggtacgcagcaggaaaaagagttcatcctgtcattaaacctgctacccgcgggaatgcgggaacgaatgagcggggaagcccagctgtcactgctgtacgccctgtcaaatcataccgagagacactatcgcagagcaagaatccctaagaagtccggaggttctagaagattgcttgtgcctgatgggcttctgaagagcgtccagaggaacatcttaaggcactgtctggatggccgatctgtgagcgcccatacatgtgcctaccgaaggggattaagcccgatagacaatgctgccccccatgcaggcggcgaaaaagataagattctcctgaagctcgacatccgggactttttcgattccatcttgtttccacgcgtttacggtgccgcgttccctgaaagtctgttcccaccagccgccgcaggactgctgacacacctatgctgttgctatgatagattgccccaaggtgcacccacctcccctgcgatttcgaacctggtaatgaagccgtttgacgagtatatcggcaaatggtgtgaggcccgtcagatttcctacacccgctattgcgacgatctcgccttcagcggggtgtttgacgtcggcgaggtgtacaggaaggttaggggcatgctcgaggctatgggcttcgaactgaaccggaaaaaaactgtggttgctcgccagggaatgcgccagtctgtcacaggcttggtggtgaatgaccgggtcagaacagatgctgcttacagaaggcgcataaggcaggaaatgtactattgcaccaagtttggggtccgggagcaccttaaagtggctgggaagcccgacgggatggaaactgaggctgagagggaagcagaaactgccgcagaggagtacgctttccttcagtctctccgtggccggattggatatgtacttcaaatggagccagagaaccgagaatttttggaatatctggaggagtggaaacgtctctgggaggaactagagaatcgcgagcggaagtga

SEQ ID NO: 9431 - RNA, 1038 nt, synthetic construct
  source 1..1038: mol_type = other RNA
atgagctctaatatttggcatgcttgcacagacagacaggtgcgggagtttattctgagcctgaatctactgcccgacggctcacgggaggaactttcgggcgaaaagcaattagcactgttgtacgcgctgagcaaccaccccgagagacactatcgtaaggtcaggatccctaaacgctctggggggagcagacgactgctagtcccagatgggttacttaagggcgtacagaggaatatcctccaccattgtctggatgggaggagtgtctccgaacacgcgtgtgcctaccgacgcggagtgtcaccaatggcaggtgctgcccctcatgctggaggtggcaaagacaaggtcctgctgcggctcgacatccgggacttctttgacagtatcctgttccccagagtgtatggggctgccttccctgagtccctttacccgccagccgctgcagggcttctgacacacctctgttgcttctatgatagactcccgcagggtgctcccacatccccagcaatctcaaacctggtaatgaagccttttgatgattacatgggcaaatggtgcagggaacgcgagataacttatactcgctattgtgatgatctagccttttccggcgcgttcgacgttggcgaagtgtaccggaaagtcaggggactcttagaggctatgggatttgaactgaacagtggcaaaacagccgtgttgaagcagggtatgcggcaaaccgtgaccggacttgttgtgaacgagcgcgttaggaccagcgcccagtacagaagacgactcaggcaagagatctattactgtcggaggtacggggtgcgagaacatctcaaggcagttggcagactgaccggagccgagacggaggcagacgtgtctgccctggagactgcttacctttgctccttgttgggccgtatagggtacgtgctccagaccgagcccgagaatgcccagttcttggaatatcgcgaaatttgccgttctctgattgagggtgccgacgccgcagaatggggatga

SEQ ID NO: 9432 - RNA, 1086 nt, synthetic construct
  source 1..1086: mol_type = other RNA
atgtccggtagactttggaagtacctgaccccccagcaggaacgggagttcatcctgagtttgaatctgttgcctgctagctgtagaaagcgcatgtcgggagaggcccagctcgccttgctgtacgccatcagtaatcacgtagaaagacattaccggaaagttcgcatacccaaaaaagatggcaagtcacggagattacttgttcctgacggactactaaaaggggtccagcggaatattcttcgtcactgcctcgacggccgttccgtgtctgagtacgcatgcgcctataggagaggattaagcgccgcggataacgctgccccacatgctggaggcgggaaggataaactgttactgaagctggatatccgggacttctttgattccattctgttctggcaggtgtatggggctgcctttcctgggtccctctttccaccggctgcagcgggactgctgacacacctgtgttgttgtggcgaccgccttcctcagggtgccccaacaagccccgccatatctaacctggttatgaagccctttgacgaattcatgggcgcatggtgtcgccagcgccaaattgtgtataccaggtattgcgatgacctcacgttctctggcgcattcgaccccaaggcggtctatcataaagctcgccacctcctggaagccatggggtttgcactgaacgccgaaaagacagcattgcgaaataggggtatgaggcagagcgtgaccggcctggtggtcaacgaacgagtgaggactggcgtaccgtaccggaggcggattcgccaggagatgtactactgtaggaaatatggagtgggcgagcaccttcaagctgtggggagattgaccgggactgagacacaagaggaggcagccgaagcggagcgagcctttctctgcgcccttctgggcaagatcggttatgtcctcctactcgaaccagagaaccgagaattcctggagtaccgggaaatctgcaggggaatgcaagcagaacaggagaaggcttcatgcccacctgcttgcggtgagagagagcagaaacgtagaggagggaaagagaagtga

SEQ ID NO: 9433 - RNA, 987 nt, synthetic construct
  source 1..987: mol_type = other RNA
atgggaaatacccagctctggaagtattgcacgacacgacagtgtcaggatttcattctgtcgcttagactcattccaggtggagagaaaatgtcccgcgaaaaacagctggcctgtctgtacaccttgtcaaatcagggtattaagaattatcggcgggtgacaatcgctaagaagggcggtggcagcaggcaattactggtgccttgcggcctacttaaagcagtgcagcgcaacatactgcatcacgtcctcgacgagaggcccgtttccccctgtgcgttagcatacagaaaggggacggacattcgggctaacgcctcagcccacctcggcaagaataaggtgcttaaactcgacatttcccattttttcgatagcatcctttttccgagggtgtacggagcggcttttcctgacactctttttccgcccgccgctgcaatgctgttaaccagcttgtgctgttgtaaagagaggctgccacaaggatctccagcatcacctgccatctccaatctggttatgaggccatttgacgaatacatggaggggtggtgcagggagcgggagatcacctacacacgctactgcgatgatatgacctttagtggaagtttcgatgctcccgcgctgatcactaaagtgcgttcttacctagaagctatgggcttctctttgaacgaaaagaaaactaaactcctgactgagggggtccggcagagtgtcacaggcatagtcgttaacgagaaactgcaggtaagcagagactacagaaagaagttgagacaagaggtatattattgtcgtaagtatggaatagaggcccacctggcccgaattgaagccgccgaggggatccgctgggataaggaacgttatatcgggtctgtgttgggtcgcctgagattcgtgctccaaatcaaccctcaggacgaagaattcgcacgatattgccgggactggaaggagcagtacctgggctga

SEQ ID NO: 9434 - RNA, 984 nt, synthetic construct
  source 1..984: mol_type = other RNA
atggggaattcgccactctggaaatattgtacccgggagcaatgtcaagacttcatactcagcttgagactcatccccggcggagaaaaaatgtcacgagaaaaacagctgagctgtctgtacacgttgtctaaccgtggcagtcgtaattatcgcagggtcaccatcgacaaaaaggatggaggttcccgaaccctattggtgccatgtgggctcttaaagggcgtgcagcggaatattcttcatcacgtgctggatgagaggccagtctccccttgcgccagggcatatcgcaagggaacagatattcggggtaacgccagctgtcacctgggtaaacgattggtgcttaagctggacatctctcattttttcgatagcattctgttccctagagtgtattcagccgcgtttccggaaacactcttcccaccggctgctgccatgctgctgacgagcctttgctgctgcaatgagagactgcctcagggctctcctgcttcccccgcaatctcaaacctagtgatgcggccctttgacatctacatggacgggtggtgtcgggaaagaggaatcgcatacacccgctattgcgacgatatgacattttcaggagattttgatgccgcagctctctgtagtaaagtcagatcctacctggaagccatgggtttcacccttaacgaaaagaagactaaattgctgacaggggacgttcgccagtccgtaactggcattgtggtcaatgataaactgcaggttagtcgtgagtacaggaagaagttaaggcaggaagtctattactgcaagaagtacggcatcgacgcgcatctcgagagagtggaagctgacactgggatacgctgggagaaagagctgtatatttgctctgttcagggccggttacacttcgtgcttcaagtaaacccccaggatgacgagttcgccggctactgcagggagtggaaggagctgtttatgtga

SEQ ID NO: 9435 - RNA, 987 nt, synthetic construct
  source 1..987: mol_type = other RNA
atgagtaattcccagctttggaaatattgcactaaagagcagtgtcaggacttcattttgtctctcgacctcgtcccacactccgctgggatgtcccgcgagaagcaactggcctgcctttatatgctgagtaatagaggcgcagaaaactaccacaaggaaattctaaccaagaaagatggcgggacccgcacattgatggttccctgtagcctgctcaaggccgtccaacggaacattctccatcatgtgctggagcagaggcctgtgtcagactgcgcaagggcctaccggaaaggcacagacattttggcgaatgccggtcctcacactggcagaaagcaagttcttaaactggatatctctcacttcttcgattctatcctctttccgagggtcatatctgctgcttttcccgacaccctttttccaccggccgctgcagccctgctagcgaatctgtgctgttgtcgcgagaggctgccacagggtagccctgcaagtcccgcaatctcaaacctggtcatgaggcccttcgacgagagcatgcgaagatggtgcgaggctcgtcagatcgtatacacacggtactgtgatgacatgaccttttcgggagacttcgatcctgccgccgtgtatcacaaggtgaagtcctacctggaagccatggggttcagcttaaacgaaaaaaaaacgaaactgctgaaggatggggtacgccagagcgtgacaggaattgtggtcaacgaaaagccacaggtttcacgagactacagaaagaaactgaggcaggagatctactactgcatgaagtatggagtaaccggtcatttagagagattacgagagaagactggcaacgctgtggaggaacagcgttatatctgctccgttttgggaagaatccaatttgtgctccaggtgaatcccgaggatcgggagtttgcggaatattgtcgcatatggaaagaacggttcgtgaagtga

SEQ ID NO: 9436 - RNA, 1089 nt, synthetic construct
  source 1..1089: mol_type = other RNA
atggacataggggaaagtggtggccagggaagtgcctggacggtttcaagaaaagacctgtggcgctattgtactgatgcccattgccaggagatgattttgtccttccgactgctgggcgagaatggctggccaagggaaaaggttatggcctgcctgtacgccttaagcaaccactctgaacgacactatgagagaatctcaattccaaaaaaagacgggagcaggcgtatcctgctggcccctgaccctttgctcaagcatgtgcagaagaacctgctccggcatgtcctcgaggggctgtctatagctggatgcgccactgcgtatcatcgccaagctgggatcatttgtaatgcgagtggacatgtggggaagcccctcgtcatgaagcttgacatcagagattttttcggctctatcaccttccctatggtgctctgtcacgcttttccggtaaagtactttccccctcccgtcggcgtgttgcttaccagcttatgctgttgtggagagtatttaccacagggtgctcccacctcgcctgcagtgagcaatctggtaatgaaaccatttgacgagtacatggccggctggtgtcgggagcgcaagatttcctacagcagatactgcgatgatatggctttttcaggagacttcgatgcttgggaggttcgccagaaagcagagaatttccttcgggccatgggtttcgagctgaaccgtaagaaaacaaaggttctgccacaaaatatgaggcaaacagtgaccggcctagtggtgaacgaacgggtccagacatccgcccaatacagacgcaaacttagacaggaattgtactattgccgaaaatttggggtggaaggccacttgagacagtctggtgaagcaaagcacttcctccttccggacggaagtctagataagcagcggtatttgcaggcactggcaggcaaggtgcggcacgtcctcctgacaaggcccgaagatgcgtggttcctggaggccaaggggtggctcctgactgagaggaaacgtcaggagggacgccagtccaggagggaaatgggcaccgaaaacggtatctga

SEQ ID NO: 9437 - RNA, 1062 nt, synthetic construct
  source 1..1062: mol_type = other RNA
atgaaggaaaccgcaatctcctcatcaaaagacttgtggcactactgtaccgaggaccatgtgcgcacaatgctgctgtccttcagactgctaggcgacaacgattggccagaggagaagatactggcctgcctctactcactcagcaatcatactcaggaccactacaagagaatccagattcagaagaagagtggcggaaccaggacgctgttggccccagatcccctattgaagtacgtccagcgaaatctgttacatcatgtgctcgacggacttagtttggcagattgtgccaccgcctataggaaaaatagggatgacttatacaagcggggagggcaagaggacagggatggcagcgcctacaaggaatgcttcggtattgtgcccaacgctcggatccacgtaggaaaacctctcgtgatgaagctcgacattgttgacttctttgggaatatcacatttcccatggtgctccaccaagttttccctgcccgtatgtttcctccagctgtcgggaacctgcttaccagtctttgttgctgcggagagtacttgccccaaggcgctccgacttctcctgcagtctctaatcgcgtgatgaaacccttcgatgagttcatggaagcttggtgccgcgagaggggcatatcctatagcagatatagcgatgatctgaccttctctggggatttttcgcctaaagaagtcagaggaaaggtgaagggttttctgggcgcgtatggctttgaacttaaccgcaagaaaactcggattctgtctcttgggacacggcagaaagtaactggtttagtggttaacgaaaaagctcagacgtccaaagaataccgacgtaaactgcgacaggagatctattattgtaggcggtttggtgttaaggagcacctgcaattccagaacaagggggaaccggcatgtgaggcggaccaggagcggtatctctaccgcctgctgggcaaagtcaattacgtgagaatgacaagaccagaagacaaatggttcctggaggcccgtcagtggctaaagggcatgctctga

SEQ ID NO: 9438 - RNA, 969 nt, synthetic construct
  source 1..969: mol_type = other RNA
atgcttctgagctttcatctgttaggagaaaatgactggtcggaggacaagattttagcctgcctctacgccctgggtaaccacggcgagaagcactataagaagatcagaatccctaagaagagcggaggctttagaattctgcttgcaccggaccccctcttgaaatacgtccagaagaacattctgcatcacgtattagagggcttctccgtttctgaccaggccacagcctacagaaagaaggggaatccagcgaatgccgtctgcggctgtgtggagaatgcatcccttcataggggcaagcctttgattatgaaactcgatgtcgagaacttcttcggcaacatcacgttccccatggtgctacactccgcatttcccatacagtacttccctcccgaggttgggaaacttctcgctgagctgtgttgctacctagaatatcttccccagggggctccaactagtccagcgatcagcaacctggtgatgaaaccattcgatgaatacatggccgagtggtgtcggaaccgcggaatcgtgtattcacggtattgcgatgatctcactttttctggtgacttcgatccggaggaagtgctcaagaaaagcgaggggtttctgaaagccatgggcttcgagctgaatcgtaagaaaaccagggtgctgtcaaaagctagtagacagaccgtcaccggcttggtggtaaacgaaaaggtccagccttcacgagaatacaggcggaaactgcgacaagagatccattattgtcgcaaatacggagttgaggaacacctgaggagacggggaacacagggaatgctgtttgcaggtaaagaagacgacagggggaagtatttgtattctctcctggggaaaataaattacgtgcggctaacccgccctgatgacacatggtttttggaggctgaaaagtgggtgcgcgaacaactgtccgaacgttga

SEQ ID NO: 9439 - RNA, 1008 nt, synthetic construct
  source 1..1008: mol_type = other RNA
atggcgcgcactgatctgtggaagtactgttcggccgagcagtgcagggagatgatgatttcttttagattgataggcgcgggagactggcctcctgagaagattatggggtgtctgtacgctctttccaaccacgccgaaaaacattatcagagggtgaacatcccaaagagatccggcggctttcgcacgcttctggttcccgatcctttgctgaagaatgtccagcgtaatcttctccatcatgtcctagatggcttcaccgtgagcgatagcgcagccgcttaccggaaaggcgcttccgtagcggccaacgcaggcaagcaccaaggacggaaaatcgtgatgaagatggacattgaagacttttttggatcaatcaccttccccatggtcctacaccatgctttcccgactgcctatttcccccctgcagtgggggttatgctggcatcactgtgctgttgtcacgaccgattacctcagggcgccccaacatccccggccatttcaaacttggttatgaagccctttgatgaatacatggaggcatggtgtggggagcgcgagatcgtgtacagccgctactgcgacgatatgacctttagtggcgtgttcgatggaagcgaagtgaaaggcaaggtgtatggattcctccgtagtatgggtttcgaaccaaatctcaggaagactaggatactgacaagaggtaccagacaagtggtgaccgggttagtagtcaacgagcgggtacgcgttcccgccccatataggaggcggctgcgacaagagatctactattgcatgaagtatggggccaaagaacacctgactagaacaggtcgacaggcctatcttaatgatggtgacgggggcacacggagatacctcgagtctctgctgggaaaaacggcttacgtcctgctcgcttctggtgacggagacgcttggttccgggaagcacaggtgaaattgcgtgagatgctcgggcaggacatgtgcttatga

SEQ ID NO: 9440 - RNA, 999 nt, synthetic construct
  source 1..999: mol_type = other RNA
atggcccaggccgacctgtggaaatactgttcaactgaacactgccgtgagatgctcctgtccttcagactgttaggtacacgcgactggccccctgaaaagataatgggatgcctttatgctctgtctaatcacgcgcagcgccactacagaaaggtccgcatacctaaaaggtccggcggctacaggactttgctggtgcccgactctctgctcaaagaagtccagaggaacttgctgcatcatgtgctcgacggatttgcggtgtctgctagcgccgcagcatacagaaagggcgccagcgctgccgcaaatgcagggatccatcaggggcggaagattgtgatgaaaatggacatcgaggacttcttcggaagtattacattccccatggtattgcaccacgcattcccggccgcttactttcctccacccgtaggcgccatgttagccgccctgtgttgttgccacgataggctacctcaaggcgcaccggctagcccagcagtttccaatttggtcatgaagcccttcgatgagtacatggaggcctggtgtggagaaagagatatcgcttatagtcgatactgcgacgatatgaccttttccggggtgtttgataccgccgaggtgaagggaaaggtgtatggctttctgcggagcatgggatttgaacctaaccagcgaaaaacgaggatcctgacccgaggaactcgccagacagtgaccgggcttgtcgttaacgaccgggtccaggtaccagcgccatacaggcgcagactccggcaagagatctattattgcttaaagtacggtgctgaagagcatctgcggcggacaggccgtgatgcctatctgaaggaaggcgacgcgggggttaaaaggtatctggagtcgctacttggcaaaaccgcttacgttcttctcgccggtgggggggatgcttggttcagagaggcacaagtgcgcctcaagtcaatggtgagacagggtatttga

SEQ ID NO: 9441 - RNA, 981 nt, synthetic construct
  source 1..981: mol_type = other RNA
atgggcgatggcgaaatctggaagtattgcgggaaagagcaagcggtcgagatgattctgagcttacagctgttaccctcgtcaggttggcagagggaacgaattctcgcctgtctgtacgccctttccaatcaccctgaggagcactatcaccccgtgtggatccctaaacgtcgtggagggtaccggcgcctcgatgtgcctgaccctctactgaaacaggtacagcggaacattctccatcacgtgctggaaggcttttcagtgagccctgcagcagcggcctatcgaaagaaccgctgcgcagccgatggtgcagcggtacatattgggaagccccttgtcctcaagctggacatccatgacttcttcggcagtataaccttccccatggtgctggggtatggattccccgccgcctacttcccagaagaggttagggtcctgcttgctagcctgtgctgttgcagacagcgcttgccacaaggagccccaacgtctccggctctgagcaacctggtgatgaagcactttgatgaagccatggctgcctggtgtgggcctcaaaatatagcctacacaagatactgtgatgacatgactttttccggcgatttgaatccaggtgctgtcatcggaagggtcaggggttttctggaaacaatgggcatggaactgaatcattctaaaaccgctgtgtgttcccaattttctcggcagacagttaccggaatcactgtgaaccaggtgtgccaactccccagggaggaccggagaaaactccgacaggaggtatacctttgcttgcgctacggcaccggagagtccagaccagcagacagtgttagaaggctcgaacagatcctaggcaaagtgtcatatcttttacaggttcggccggacgaccgctggttcttggaacagcgggaggctctgaaggagatgttgaagaaggagagagggcaggtgtatgagagttga

SEQ ID NO: 9442 - RNA, 981 nt, synthetic construct
  source 1..981: mol_type = other RNA
atggggaaaggggatgtgtggaaatattgcgagaagaatcagatcaccgagatgatactgtcactggagctgctgccttctagccgatgggagcgggaccaaatcctgagctgtctgtacgcgttgtcgaaccatccagaggagcattaccaccctgtttggatccccaaaagatccggaggcttccggcggttagatgtacctgatcccctgctcaagcaggtgcagaggaacatccttcggcacgtcctcgaaggatttagtgtgagccccgcagccgtggcatatcagaaaaacagatgtgccgccgatggcgctgttattcatagaggaaaacctctagtcctgaagctcgacatcaacgactttttcggatccatcactttcccattcgtcctggggtacgggttcccggctgcatattttccggaagaggtcagggttttgttggcctctttgtgctgttgtcgccagcgtctcccacaaggcgctccaagctcacctgctctctccaatctagtcatgcgaagctttgacgacatcatggtgtcctggtgcgctgcgcaaggcattgtgtacacgcgctactgcgacgatatgaccttcagtggtgactttaatcccgcccttgtgataggccgcgtgcgtggtttattggagcctatgggcatggaactgaatagaaagaagacagaggtttgctcacaggccgacaggcaggtagtcacaggtattactgtgaaccaggtgtgtcaactgccaagggaggacagacgtaagctgcgacaggaggtgtatctttgcctccgacacggcgccgaaggaattgaacccgccgcatctgttcgccggcttgagaggattctggggaaggtaagttacctgcttcaggtgcgccccgacgatcgctggtttttagaacggagggatatgctgaaggatatgctcagaaaggaaagaaaaagggtctatgaatcttga

SEQ ID NO: 9443 - RNA, 972 nt, synthetic construct
  source 1..972: mol_type = other RNA
atgccagaacacttgggtctatggaagtactgcgataaagaacagtgcaaggacatgctgctctccttccgcttggtcgggtccgactcatggactgatgggaaaataattgcttgcttatacgctcttagcaatcatgctaaagagcactaccacaaaacggagctgcccaagaagcgcgggggaagacggatcctgatggtgcccgaccctctcctgaagcaagtccagagaaacttactgcatcacgtcctggagggcttctctgtgtcacctgccgcctgtgcttatagaaagggtgcaagtccacttgcaaacgcatcgttgcataccggcaagcggctggtcctcaaactcgatattcgggacttcttcggcagcataacatttcccatggtactacatcacgtgttccctagcacctattttccgcctgccgtgggaaccctgttagcctctctatgttgttatagggaccgacttcctcagggagcgcccacaagcccagccgtttcaaacctggtgatgaaaccgtttgatgatcatatgttggagtggtgtcgttccaggcgaattacatactcccggtattccgacgacatgacattcagtggagatttcgacccaggtgaggtgatcaggaaaaccgagagctttctcagggccatgggcatggaacttaaccgcgagaagactcgcgtctgtgccgctgggggtaggcagtctgtgaccggaatcgtagttaatgaaaagcccggcctcccccgtgattatagacgggctctgcgccaggagctgcactactgcatgatctacggggtggaagagaagtcagcagcctgcttgcgatctctgctgggcaagactgtttaccttctgagtgtgaatccagaagaccaatggtttcagggggcggaagcatttctgagagaggaactcaaaaaaatcgaggagaagggcgaagagaagtga

SEQ ID NO: 9444 - RNA, 954 nt, synthetic construct
  source 1..954: mol_type = other RNA
atgaacaatatggatatatggaagtacgcctcggccgagcagtataaagacatgctgctcagcttcgccttgctgagtggcccagattggccacctaagaggattatggcttgcttatacgccctgtctaaccacccagaagcccattatcatgccctgagtgtacccaagaagtcagggggagtcaggcggttactcgcacctgatcccctgatgaaacaggtccagcggaatctacttcatcacgttctggaaggctttagtcccagcgaagcagcaatggcctaccgacgaggcgtgtcagcgaaagaccacgcagctagacattgcggccagcgggtggtgctgacgttggatatacaggatttcttcgattctatcacttttccccaagttcttgccagatgcttccccatcatttacttccccagacctgtgggagtgttgcttgcctctctctgttgtgcatatgaacgtctgcctcagggagctccgacctcccctgcagtgagcaacctggtaatgaagccattcgacgagcacatgctagcgtggtgcggcgagcgtgacatcacatactctcgctactgtgacgatatgaccttttcaggagactttgacttcagggaggtcaaggggaaagcggaaggttttctggaggctatgggtatggccctcaaccgcaaaaagactagggtgagctttagagggggacggcaggctgtcacaggcttagttgtgaatgaaagaccgggtgtcccacgtgagtacaagaggagattgcgccaagaaatttaccagtatcggaagtttgggctcccaggcaccgagacagactccgaaaaatatagggctcgactgctcgggaaaatccgctatgtgctgtccgttcaccccgaggacgcctggttcgctcaggctgagcaagagcttaagcgccggaatccttcctga

SEQ ID NO: 9445 - RNA, 987 nt, synthetic construct
  source 1..987: mol_type = other RNA
atgtaccataccgatctctggaagtattgtacaaaggagtactgccgggacatgctgctctcattccgcctcctgggaaatacctcttggcccgaccaaaaagttatggcctgcttgtacgccttttcaaatcacaccgagaggcactatcgcacggtgagaatccccaagcgagatggaagacagcgctccctaatggtgcccgattacatgcttatgcgtatccagcggaatattctacaccatatcctggatggctacgccgttagctcgtctgcgactgcctaccataagggcgcaggggtggtaagcaatgctagggtacacacgggaaaacatgtcgtcgtgaaactggatatcaaagacttctttggctcaatttctttcccaatgatccttaagtccgtgtttcctgttcggtattttcatcctgctgtcgggactatgctgaccgcattgtgctgctgtaacgacttcttaccccagggggcaccaacatcccctgccgttagtaatttagtgatgaagcactttgacgaatcaatcaataaatggtgtgaaaacaaggggattagctatacccgatactgtgacgatatgactttcagtggtgatttcaacccaggcctcgtcattcggaaagtgagtggatttctcaactctatgggtttcgagctgaacgagacaaaaacaaggatactgtacaggaatgggagacaggctgtcactggcatagtagtgaacgaaaaactgcaagtgagccttgactatcgtcggaagttaaggcaggagatcttttattgccaaaaatacggagtcaactcccacctcaagagaattggtaacgcggctggcatcccggaaaatcagtacctgttgagcctgttgggccgcatacagtatattctgctggtgaaccctgaggaccaatggttccaggaggccgaacagaagctcctggcagtgcttggtagaaagtccgagtga

SEQ ID NO: 9446 - RNA, 987 nt, synthetic construct
  source 1..987: mol_type = other RNA
atgtatcaaaccgatctttggaagtattgcacgccagactattgtcgcgacatgttgctttccttcaggctgttgggcaatacaaggtggcccgaccaaaaagtgatggcctgtctgtacgctttttccaaccatgctgagcgccactatggaatcgtactcatacccaagaagaacgggaagagcagaaagctgctggtgcctgactacatgctgatgaagatccagaggaatattctgcatcacatactcgatgggtactccgtttcaggctgtgccactgcataccataagggagccggtgtggtgtctaatgcagcagttcatagagggaagaacgtcgtcgtcaaattggatatcaaagacttctttgggagcatctccttccctatggtcctgagcagtgccttccctgttcagtattttcccacaagtgtggggaccatgctaacagccctctgctgctgtaacgatttcctaccacagggagcgccgacaagtcccgccgtatctaatttagtgatgaaacactttgacgagagcatcaacaagtggtgcgagggaaaaggcataagctatacccgttactgcgacgatatgactttttcgggcgattttaatcctggtctggtgatccgaaaagtgtcaggattcctgaacgcaatgggcttcgagttaaatgaaactaagaccaggattctctaccgaaatggccggcaagctgtgaccggcattgttgttaacgagaagctgcaggtgtcccgggattaccgtagaaaactgcggcaggagatcttctactgtctcaaatatggagtgaagtcacacattgaaaaattggggaatgacgcgcgcatttctgaagaccagtacgtcctgtctctgttaggtaaaattcggtacatcctccttgtgaacccagaagatcactggtttcaggaggccgaagagaaggtcctcgctgtacttggcagaaaggctggttga

SEQ ID NO: 9447 - RNA, 999 nt, synthetic construct
  source 1..999: mol_type = other RNA
atgtacggtaccgagctatggaagtacagcaccccagaacactgccgcgagatgcttctgagtttcaagctgctaggagaagattggcccgaccagaaagcaatcggttgtctttacgccatttcaaatcataccgagaggcactaccacacggtgctcattcccaagtccgatgggacaaaacgaaagctcttggtccctgatgacttgcttaagatgatccagagaaacattaccaagcacgtcctgagcgagtttgaagtttcctcttgcgctgccgcgtacaggaaagggacatctgtgctcactaatgcctctgtgcatacaggcaaaaagttggtcctgaagctcgatatcgaggatttctttgggtctatcacctttccaatggtgttgaatggcgccttctcaggaaggtacttccctccttccgtgggaacgatgctgacagccctgtgctgttatcgcgattatttaccacaaggcgctcctagcagtcccgctatcagcaacctggtgatgaaaccgtttgatgactatatgaaggtctggtgtgagaagcggaacatcagctatactcggtactgcgacgacatgacattctctggggacttccaacccggcccagtgataaggaaagtctcaggttttctcaacgacatgggattcagcctgaatcagggtaaaactcgtattatttcctggggacggagacagactgtgactggcatcgtggtaaacaggaagccgaaggtttcccccgaataccgtagaaaactgcgccaggaggttttctattgcctgaagtatggcgcaaaaagtcatatcatggtaaccgggagagaagagccagacgaagagcgcgagcggagatatctgcgaagtctgttaggcaagatacagtacctcctttttatcaatcctgatgacatttggtttgccaaggcaaaaggaaaaatacagtcgattctcgaaacctcatacgcttgtctgttatga

SEQ ID NO: 9448 - RNA, 981 nt, synthetic construct
  source 1..981: mol_type = other RNA
atgtaccagacggaactctggaaatactccactaaaaagcattgtcaggacatgctactgagcttccagcttctcggcgaggactggcctgaccaaaaagtgattgcttgcttatacggcgtgagtaatcatactgagcggcactatcatactgccatgatccccaagagcgatggaacaaaaagacaactgctggtgcctgatgacctgcttaaaatgatacagcggaacatcgccaggaacgtgctgtccggattcgagttgtctagctgcgcaagcgcttactgtaaggggaccagtgttttgaagaatgcctctatacacaccggtaaacgccttgtcctgaagctcgacatcgaggacttctttggaagtatcacatttcccatggtgctgaatggcgcatttagctccaaatatttcccacctaccgttggtacgttactgactgccctttgctgctatcacgactatctacctcagggggcaccatcgtctcccgtaatctccaacctggtcatgaagccgttcgatgattacatgaaagtctggtgtgaggaaaaaaatatctcatatacccggtactgcgatgacatgaccttctcaggggatttccagccaggtcacgtgattaataaggtgagcggatttttagacgccatgggctttgcgctgaaccgcgagaagacaaagatcctctcttctggccgacgtcagacagtgaccggcattgtcgtgaatgagcgcccacatgtttcacccgattatcggagaaggctgcgacaggaagtatactactgtctcaagtacggggtcaagtcccacattacaatgactggcagggaggaacccaaaccggaaatcgagagacactatctcttcagtctcttgggaaagattaactacctgctgtttattaaccctcaggatttgtggtttaagcaagctgaagggaagataaggtcaattctggaccattga

SEQ ID NO: 9449 - RNA, 1011 nt, synthetic construct
  source 1..1011: mol_type = other RNA
atgcatgaacccgatctgtggaaatattgcactgctgagcactgcagagagatgctgctgtcatttcggctattagaaggtgaggagtggaccgacgacaaagtgataagttgtctatacgccgtcagcaaccacactgagaaacattacaataggcttcggatccccaaaaaaggaggcggtgtccgccaaatccaggccccagatctcctcttaaagaccatccagcggaacatccttcatcacattctggaaggcctggagcttagtccgtgcgcggcagcttatcaccgcggagcaagcattcgagataatgccgctagacacaccgggaaaaatgtggtgctcaagctcgatatcaaagattttttcgggacgatcaccttcagcatggttcagcagagagcctttaacagtagatacttccccgttccagtgggcacactgttgacatcattgtgttgcctcagggatacacttcctcaagggtcgcctgccagcgcagccatatctaatctggtgatgaagccttttgacgaatacatggacggatggtgtcgcgagagggacattgtatactctcgctattgtgacgatatgactttctccggcgattttgccgccgcggaagttataggaaaagtgaagggttttctggacgccatggggttcgagctgaaccggtccaagacgaaggtcttgaccagacacactaggcaaacagtgactggcatcgtcgtcaacgaccgcgtgagcgttccagcggcttaccgacgtgctctgcgacaggacatttattactgcaggaagttcggcgtccgtgagcatattaggtcacggtccgataaaaagtacttggagctcggggaggcaggagaagtgaagtatttaatgtccctgctgggcaagattggattcgtgctctctgtaacccctggcgacgtgtggttcatggaagcagaagaggctgtaaagacactgctgaaggaatatcaggggcaggcatcttga

SEQ ID NO: 9450 - RNA, 1014 nt, synthetic construct
  source 1..1014: mol_type = other RNA
atgcatgaacctgatctctggaaatactgcactgccgaacactgtcgtgaaatgctgctctctttccacctcttagagggcgaagagtggaccgacgaaaaggtgatttcctgtctttatgccgtgtccaatcacacagagaagcactacagcagactgcggatcccaaaaaaaggcggaggcgttcggcaaattcaggcccccgaccctttgctcaaggccattcagagaaacatcctgcatcacatcctggatggcttggagttatctagttgcgccgctgcttacaggcgtggtgcgagcatatgggagaacgcggcctgccataccggcaagatggttgtgctaaagctagatatcaaggattttttcgggtccatcacctttcccgtagttcaccgatccgctttcaattcaaggtatttccctgcttccgtggggacactgctgacgtctctttgttgtctgaatgattgtctgcctcagggatctccggctagcgcggctattagcaacctggttatgaaaccatttgacgagtatatggatgggtggtgcagggagcgctcaatcacctatagtagatactgcgacgacatgacttttagcggcgactttagcgccgcagaagtgatacgaaaagtcaagggattcctcggtgcaatggggttcgaactgaaccggagtaagactaagatcttaacacggcgcaccagacagttggtgacaggaattgtagtgaatgataaagtgtcagtgcccgcatcgtatagaaaagaggtccggcaagacgtgtactactgcatgaaatttggggtccaggcacatctcgagcgcaggggagaagagaagtatctgaagatggggcccgctggagaggtcaggtacttgactagtcttctgggcaaaataggcttcatcctttctgccgccccaggtgacatttggttcacggaggccaaggaggccgtcaagtcactgctccgcgaagcagcagaaccagtaccggagtga

SEQ ID NO: 9451 - RNA, 1002 nt, synthetic construct
  source 1..1002: mol_type = other RNA
atgggagaacctggactatggaaatactgcaccgctggccactgtagagagatgatacttagcctgagactcctggaaggcgaggaatggacagagcggagggtcctgtcctgcctctacgccatttcgaaccacacggagaaacactataacaagcagaagctgatcaagaaaggaggcggcgtccggcatattctggcaccagatcccgtgctcaagacaatccagcgaaatatactccatcatgtcttagaagggttggaagtttccccatgcgccatggcctacagaaagggggccagcgtccgtctcaatgccgcttgccacatggataagcaggttgtgcttaaactcgatatcaaagacttctttggctccatcacctatcccatggtgcatcggggagcattcaatagtaggtatttccctgtcccagttggtactctgctgacctcactttgttgttgccaagaccggcttcctcaaggctcacctgcttctgcggccatttctaatctggtgatgaagccctttgacacttacatggagggctggtgtcgcgatcgggggatcgtttacacccgttactgtgacgatatgacattcagtggcgattttcgcgtgtccgctgtgtacgggaaagtgaatgggtttttaggagccatggggttcgagttgaaccaatctaaaaccaaggtgctgactaggcacgtgaggcagacggtcactggaatggtagttaacgacaaggtacaggtacccctgccatacaggcgcgcactgcgacaggaggtgtattattgtctcaaatatggcgtgaaggaacatcttcgccaccgcggtgaaaccgcatatctagccatgggggaagagggcgagctgcgatacttacagagcttgtgcggtagaatcggttttgtcctgagcgcggacccggaggacaagtggttcagagaggctgcagacctggtgaccggaaacattaagacatacttgaaatga

SEQ ID NO: 9452 - RNA, 996 nt, synthetic construct
  source 1..996: mol_type = other RNA
atgtatgacaccgacctgtggaagcactgtacgccccgccactgcagggaaatgattctctccttttctctgctggaaggggaggagtggactgatgagaggatcataagctgtctctatgccgtgagcaatcatacagaacagcactacacgtgcctcaagattcccaagaagggtggcggagtacgacgggtcatggctcctgacccactgctcaaaacaatccagcgcaacatcctgcatcatattttagaggggtacgaaatcccatgttgcgcaaccgcctaccacaagggtgcaagtatccgcggcaatgccatggtacatctgggccacgaggtagtcctgaaactggatattaaagacttcttcggttcgatcacctttcctatggtgggacaacgagcattcggacgtcagtacttcccggagcctgttggggtgctgctgacatccttgtgctgctataacgatcgcctcccacaaggaagccctgcttcagcggccgtctcaaatttagtgatgaggcccttcgatcggtacatggccgcgtggtgcggccaaagggaagtgatatacagccggtattgtgatgacatgaccttttctggcgatttcgacgtttccgaggtgatgaataaggctaatggattcttgggcgccatgggctttgagttgaaccgttctaagactaaggtgctaactcgacaggaaagacagaccgtcacagggatcgtggttaacgagaaactgcaggtgccatctagttacagaagggaactaaggagagatgttcactattgtttgaagtatggagtccaggagcatctgaaacgccggaacgagcggacctaccttgacatgggcaaggatggggaaactagatatctgatgtccctttcagggaaaattagatttgtgcttagtgtcaacccccaggacaggtggtttagagaggctgacgacagagtgaaacggcttctccgctacatgtga

SEQ ID NO: 9453 - RNA, 1002 nt, synthetic construct
  source 1..1002: mol_type = other RNA
atggacaaccaacggctgtggcagcatcgcagcaaggaggaggacaaggaagcaatactgtccctgaatttactagagagggccaacgtcccaaaggagaagactctcaagtgcatctatgctgtgagtaaccatattgaagagcactaccgagaggtttttattccgaaaaagaaagggggcagacggaaactgttggtccccgattacctccttcacactatgcagaaaaatatcctgagaatcattctcagcgaagagaaggtatctaaatacgctaaagcttattgcccagggagacggatccgggataacgccttcgctcatgtcggtgccgaaactatcctggagcttgacataaaggacttcttcgagaacataacatacatcatggtataccaatgcgtcttttcaggagaatattatcctcccgccgtgcggacccttttaacacaactgtgctgttaccgcgattacctgcctcaaggcgcgccaacatcacccatgatttccaatctggtgatgttcagctttgatcagtacatgggcaagtggtgcgaagagcgtgagatctgttacacccgctattgcgatgacatgacgttttccgggaagttcgacgtgcgagaagtcaaacagaaagtacgatcttatctgcaggtgctgggtttcgagctcaatctcaagaaaaccaaagtgcttaagcagtacaacaggcagtcggtgacgggtatcgttgttaacgagaaggcacaagtgagtaaaacatataggagggacgtgcgtcaggccgtgtattactgtgggaaatacggcgttcaggaacacttgcagagaaccggagcacagatgtggttgcagaaaggagaagagcgctatctacaacacctcatgggcaaggtgaattatattttacaggtgaatcccgaagattgtacctttcaggaagtcaggaagaatttgctgagaattcagcgccagtgtaagggcggaaagccttga

SEQ ID NO: 9454 - RNA, 960 nt, synthetic construct
  source 1..960: mol_type = other RNA
atgtggaaatactgtacagacgaggaagctatccgaagctttcacctaaccgatggactgaggtgcaaggagggtaaggagatccagacactgtttgctgtatccaaccacgttgaagagcattatcacatcgcctacatcccaaagaaaaaggggggccggcgcaagttactggtgcctgatgtgattcttgggcgaattcagaaaaacattctccgcaatatcctggccgaaaggaaggtgtcttcttacgccaaagcctatgtcaaaggtgtggggattgtcgagaacgccttgcctcatagtcacgctgagatcatcctgaagcttgacattgaggactttttcgagaatatcacttatctgatggtgtaccagaaagcattccccgagaaatacttcccccccgctattagaacaatgctgactcatttctgttgttacaatgactatctcccacagggagcgagcacctctccgataatctccaatctcgttatgtattccttcgatgaatacatgggcaaatggtgcgaagaacggaagatttcgtacacgaggtatagtgatgatttaactttttccggcaatttcgacgtgaaggaagtaaaacacaaagcacggagcttccttgagaagatgggcttttcactcaatgagaagaagacaagagtcttgaagccttatcaacggcaaaccgtcaccggtatcgtggtgaacgaaaaaccaaacataagcaaaaactacaagcgtcaactgagacaggagatttactattgcgaaaagtacggagttgccgagcatctgagacagaagggcatatgcgacaaggaagagattacctatttgaaagaactgctaggaaaagttaactacgtgctgcagataaactcagataatatggaatttcgcgaggcaagggagaaaatcaataagatgctccttaaggtcaaggggtga

SEQ ID NO: 9455 - RNA, 1017 nt, synthetic construct
  source 1..1017: mol_type = other RNA
atggctggcaacgatctgtggaaatactgcgaggctaaggaggctgaagacgtcttgaggtccttccatctcttggaagggactggcgtgagcgatgagaaatacctggcttgcttatacgccgtgtcaaatcacacggaggagcactatcacactgccgttattcaaaagaaaaacgggggaatgagaaaactgtccgtccctgatacgttactgaggaccatacaacgcaatattgttaagaacgtactttgcgagcggtccgtaagtcaatatgccaccgcctaccgaaaaaaagcctcggtgatggaaaatgcgcgcccacatgtgggcgcagagatggtgatgaagctggacattaaggatttcttcgactgtatcactttccagatggtctaccagtacgcatttcctgcaatctactaccctcccagtatccggatgctactcacatctctctgttgtaggaacgattgccttccccaaggggctcccagctctccagcaatttcaaatctggccatgagaagctttgacgagtatatgggagcatggtgcggtgaacgccagatgcaatacacccgatattgtgacgacctgaccttcagcggtacatttgaccagaaggaagtgaaacagaaggtgcgtaattttctacacgtgcttggtttcgaattgaaccgaaagaaaaccagggtccaggaccagtcccatcgccagaccgttacagggctggtggtgaacgagaagatgcaggtcagcagagaatatcggaatcagttgcgtgccgaaatctattattgccagaagtatggcgtgacaagtcatctcaacaaaatgggcaacccggcctggatgcgggaggatgagccagatggaaagaggtacctccagtacctgctgggaaaaataaattatgttcttgcggtaaacccccacgacggccacttttgtaagaagcgggaggagctgtctctcatggtcagagaaatctcaacaagatctaatactctgtga

SEQ ID NO: 9456 - RNA, 1020 nt, synthetic construct
  source 1..1020: mol_type = other RNA
atggccgagagggacatttggcgctattgcacagccgagcaggttgaagaggtcctccgaagctttcgcctgttgcaggggactaaagtcaggggcgacagatacatggcgtgtttgtacgctgtgagcaatcatatcgagaaacactatcatatcgccgtgatacccaaaaagaacggaggtaccagaaaattatccgttcccgacattctgctgcggacaatccagcggaacattgtgaaatacgtcctaccggagcgctttgtatcccagttcgctacagcatacaggttaaacgcctctgtcctgatgaacgcatgtccacacgttggcactgagcaggtgttgaagctggacatccgcgatttcttccactcaataactttccaaatggtgtaccagtcagcttttcccgccgtttattatcccccggcaatccgtatgctcctaacctctctgtgctgttttatggactgtctcccacagggtgcgcctagtagccctgctatttctaatctggttatgaagccctttgatgagtatatgggctcttggtgcgaggaacggcagatccagtatacgcggtattgcgacgatatgaccttcagcggaaatttcgatgtgaagaagctgaagctgaaggtgaagaactacctttacaaaatgggtttcgagcttaacgaacagaagacaaaggtccaacgtcagtaccaacgccagattgtgaccggaatagtggtaaatgaaaagccacaggtctgtcgggagtaccgaagacagttgagggccgagatctattattgcggcaagtacggggtggaaagccatctccaacgaatggggatatccggaggaggcagtgaatcgcctcaggacccagaaagatatgcacaacaccttctgggcaaaattaattacgtgcttagtgtggatcctggggacaaatactttctcgagaagagggatgaaatcctgctcctggtaaaagaattcagaggggattccatcatttcaaaatga

SEQ ID NO: 9457 - RNA, 990 nt, synthetic construct
  source 1..990: mol_type = other RNA
atgtcatctggccagctgtggaagtactgcacatcagaccaggtgaaagaagtgttgttatccctgcacctgctcgacggggtgcctatcaaagaagaaaaaagacttgcctgcttgtacgcagtcagcaatcacacagaaaagcactatcattctgccgcgatcccgaaaaaaaacggccaagtccggcgtttatttgtgcccgatcctctgttgatgcgaatccaaaagaacattctcagacatgtgctggctgaggaggcagtatccgagtatgccacagcttatagggctggctctgccgtgatagagaacgtcagaccgcatgttggaaagaagaagattctcaaactggatatccagcgcttctttgaccacatcactttccccctagtgtaccagtatgcgttccctgcagtccagttccctccagctatcaggcggctgctgaccgagctctgctgttacaaggactaccttccacaaggggctcccactagccccgccattagcaatctagttatgaagcctttcgatgaatttataggcgcatggtgcgccaagcggaaaattacctacaccagatattgtgatgaccttacgttttcgggggagtttgacgaaaaagaggtcaaatgcaaggtacggagttatttggaggccatgggattcgatctcaatcgcaagaaaactcgacttgcccgccagtgtagtcgccagaccgtgaccggaatagtggttaacgaaaaaccacaagtaaatcgggagtatcgtaggcagctgagggccgaactgtactattgtagaaaatacggcgtcaagtcccacctcgaaaggatttacggtcagaagcgacagatcgaggatgaggactgtaagacatacctccgccagcagttaggtaaggtgaattacgtgctgcaagtgaacccagctgacccctatttctttcaggaagttgcaaggctgaagaaggagctgaaagagtga

SEQ ID NO: 9458 - RNA, 1092 nt, synthetic construct
  source 1..1092: mol_type = other RNA
atgatcatgggcggaaaggacctctggaagtactgtacagccgaacaagtgagaataacactccggtctttgcacttactcgatggcgtacatatggaagaggaaaagtattttagctgcttatacgccgtgtcaaatcacccagagctgcattatcggcaggcctctgtcccgaaaaagggcggtggcgttcggaatctgctggtcccggaccacctgttgtgcaggatccagaagaacatcctgaggcatgtgctcgcagatttcccaatttccgattatgctatggcgtataagacaggcaccgccatcgtcgaaaacgctaaacctcacgccgggatgaaagaaattctcaagctggatattcggaacttctttgactccatcacttactttcaggtgtaccgtaacgcattccccgccgtgtactatccccctcctatccggaccatgctggcgagcctatgttgctgtagggacagcctgccccaaggagctcctacctctccagccgtttctaatcttgtaatgaagcccttcgacgaatatcttggggcctggtgcgaggagaggggaattagatacacccgttactgtgatgatctgactttttcaggaaaatttgaccggcgcgaggtgcaaaacaaagttaggggctttctggctgcttacgggttcgagcttaatgaaaagaaaacaaggttgcagaaagcccatcagcgccagactgtgaccgggatcgtggtcaatgaaaagcctcaggtgagtcgagaatacagacgcaagttacgagcagaagtgtactattgcagcaagttcggcgtggagtcccacctgcagagatacgggggtgaaggaccccaaaaagaatccgttccacgcgaggcaggtgaggcctgtgtacgttatctccagaagttgcagggcaagattaactatgtcctgcaggttaacccagaggaccccgagttctgcagagcgaaggagctagtcaaggagatgcttgaagctcgagggtgtagtgcagagacggagaaaaaatcaagtgagcgcggagagaatgacgatagaaagtcgaaaaaagtgatatga

SEQ ID NO: 9459 - RNA, 1056 nt, synthetic construct
  source 1..1056: mol_type = other RNA
atgaagggaaaggatctctggaagtattgtacatcggaacaggtgcacgcggtactgcggtccctgcacctgctggatggtgtccgggtagaagaggaaaagtacttctcttgcttgtacgccgtttcaaatcatccagagagacactatcaccctgccagtgtgccgaaaagggggggaggcacccgcaagcttctggttcctgaccatctgctctgccgaatccagaaaaatatactgcgccatgtcctcgccgacttcccagtgagcgactacgccgccgcctacaaacctggaacggcggtgaccgaaaacgcaaaacctcacgtgggtgctaaagagattctgaagctggacattcgtaacttcttcgattctatcacttatttgcaggtgtacaggaacgcttttcccgctgtctactaccccccccccatacgtaccatgcttgcaaatttatgctgttgcagagatagccttccccaaggtgctccaacatccccagcaatctcaaatctggtgatgaggcccttcgatgaatatatgggagcttggtgtagagaaagaggcattcggtacacacgatattgcgacgacatgacttttagcggcgaatttgatcggcgagaggtcaagaacaaggctcgggggttcctggccgcatatgggtttgagctcaacgagacaaagaccagactccagaaagcccaccagcgtcaaacggtaactgggattgtggtgaacgagaagcctcaggtcagtagggaatatcgcagaaaattgcgggccgaagtgtactactgcgggaaatttggcgttgaaagccatctccagcgctgtaggggcgaggaaggcaccaaagagatctcccgcgagatggagggagcgtgtgtcaggtatcttcgacaactattaggcaagatcaattacgtgttacaggttaatccagaggacgccgagttttgtcgcgctaaggagctagccagagagatgctggcagcaaggtcttgcccggctgacttccctgatgcaaaggagttgcagaagaacaaatga

SEQ ID NO: 9460 - RNA, 1014 nt, synthetic construct
  source 1..1014: mol_type = other RNA
atgggaggcaaagatctgtggaaatattgcacccaggaacaggtacgggctgccctacgtagcctgagactgttggatggagtacatatccgcgaggaaaactacttctcttgtttgtatgccgtgtcaaatcatccggagcagcactatcacccagcttccgtgcctaagaagggtggcggggtacgcagacttctcgttccagatccgctgttatgcaggatccaaaagaatattttacgccacgtgttggcggagtttccaatttccgaatatgcggccgcttacaaaccaggcacctccatagttgagaacgcagaaccccatgtcggtgctaaggaactcctcaaactggacattcgacactttttcgactcgataactttcttccaggtgtacggccaggcatttccttctacgtgctatccccccgccatcaggacaatgctggcaaatctgtgttgctgtagggatagtcttccccaaggtgctccaactagccccgccgtctcaaatctagttatgaagccctttgacgagtacatgggaaactggtgtcaggagcgaggcatcggctatacaaggtactgcgatgacatgacattcagcggggagttcgaccggagagaagtgcagaataaggtccgaggattcctcgcggcatacgggtttgagctcaatgagcagaagacaagagtgcagaaagcccatcagcggcagactgttaccggcatcgtggtcaacgagaaacctcaagtgagccgcgcctaccgccgtaaattgcgggcagagattcactattgtagtaagtacggagtcgagtctcatctgcaaagaaggcgggaagggcaggcacctgagaaggagaggctgatggaagccgattgtgtccacttcctgcaacagctgctggggaaaatcaactacgtgctccaggtgaaccctgaagacaccgagttttgcagagccaaggagattgtgaaggaaatgcttgccgaacgggcttccctttga

SEQ ID NO: 9461 - RNA, 1023 nt, synthetic construct
  source 1..1023: mol_type = other RNA
atgactacttacctctcaagatgtgcaagcagagaatatgacctgtggaaatactgcaccaaagagcagattcacgagatgctcttaagcttccggttgttggagggagcccctgtccgggaggagaagaaattagcttgcctctacgccgtaagtaatcatgtgcgccaacattatcacaccgctcagatcgttaagcagagtggaggggtccgtcgactgctgatccccgacgcattgctagggaccatccagcgtaacctactccaccacgtgcttgatgggttttctgtgagcgcctacgccacagcttacaaaaagaaggcgactgtcctggataacgccagagcccacgttggccgggagaggatcatgaagctggatatcgagaactttttttccagcattacctaccccttgatttatcaatccgtgttcccggccatatacttcccccctgccgtccgacgcatgctgacagaattctgctgttatgaggaatatctcccacagggcgcacctacgtctcccgctatctcgaaccttgtaatgaaatccttcgacaattacatgggcgcttggtgtgaagagcgagaaataaactacacgagatactccgacgatatgacattctctggtctgtttgatgagaagaagctgaaacggaaagttcggaattatctgctggcaatgggttttgaactcaatgagaagaaaaccaggttactgggacgtcataccaggcagacagtgactggtatagtggtgaacgagaaacctgatgtcgggcgcgcttatagaaggaaggtgagggcggaagtatactactgtaaaaagtatggagcagtggaacatctccgcaggtgcgagaagaaggagtggatgaatggcggccaaccagacgctgcccgctatctgcagcaccttcttggcaagattcagttcgttctgcaaatctcaccagaagacgcccagtttagagcggcacgggaagacgtgcagtcaatgatgcgcaatatttga

SEQ ID NO: 9462 - RNA, 1014 nt, synthetic construct
  source 1..1014: mol_type = other RNA
atgactacaaccctctcaaattacgataatgacctctggaaatattgcaccaaagaacagatcaaagacatgttgctctctttccgtctcttacaaggagcccccgtgagggaggaaaaagagctggcatgcctgtacgccgtaagcaatcacatcaaaaagcactatcacaccgcccagatacctaaacgcaacggcagtgttaggaggttacttgtccctgacgctctactgaatacaatccagaagaaccttttacaccatgtgttggatggactgtccgtatccgtgtacgcgactgcatacaaaaagaagactacagtgcttgacaacgcattgagtcatgtaggccaggagcaggtcatgaagctggatatcgagaacttcttcgaaaacattacctttcctctggtgtatcaaagcgcgttcccagccatatattttccccccgccgttaggcggattctcgctgagctgtgttgttacgaagactatctgccgcagggggcaccaacatctccaactgtttcaaatctggttatgaaatcgtttgacaactacatgggggcttggtgtgaagaacggggtatccactataccagatattccgacgatatgacctttagcggtgtctttgatgaggtggaactcaagaataaggtcaagaactacctgttgacaatggggtttgtgctgaatgagaagaagacaaaacttttggggaagcatacccgccagaccgtcacgggcattgtggtcaatgagaaggccgacgttggaagagcttacaagcgcgaggtccgggccgaagtgtactactgcaaaaaatacggcgtgatggagcatctgcgacggtgcaacaaaaaggaatggatgactgagggcgagagcgatacggtgcgctatctaagacacctgctgggaaagatccagttcatacttcagatctctcccgaagacgtgcaattcagagaggctcgagaggatattaggcgtctgctcagagatatttga

SEQ ID NO: 9463 - RNA, 999 nt, synthetic construct
  source 1..999: mol_type = other RNA
atgaccgaccagaatctgtggaaatattgtaccagagagcagtcaaatgaaatgttactctccctcggattactggagggcacaggcgttaagcccgaggctgcattagcctgcctctacgctgtgtccaaccataccgggagacactaccgaaccgcccagatccagaaacgcggagggggagttaggcggctcctggttccagacgctctgctgaacaagatacagcggaatcttcttcaccacgtgctagatgggttgcccgtgtctacgtatgccactgcgtaccgtaaaaggatgagtgttgtggataacgcagctccacatgtcggccaggccttgatattgaagttggacattaaggagttcttcgagaacatcacattcctaatggtgtaccagtcagcatttcctgctgtctactttccccctgccgtacggaaactcctggctgagctgtgctgttacgaagattatctgccacaaggcgcgccgacatcccctgcagtatctaacttggtgatgaagccatttgacgaatatatgggaagctggtgtggcgagagagggatctgctacactaggtactgtgacgatctaacgttcagcggcagctttgactggcgggaggtgaagcacaaggtggcaggttaccttcgagtcctgggtttcgaacttaacgagaagaagacaaggattctgaagcctcacgtgcgccaaaccgtgactggtatcgtcgtgaatgaccgactgcaaactgccaggtcttacaggcggcaagttagatcggaagtatattattgcaccaaatatggggtggaagcccatctgcgccatctgggcaataaaggtgaaagttatggggattccagagatgtcatgcactacctgcagcatctgcttggaaaagtccactttattctccaggccagccccgaggacgaagagttccgtcgcgccaaggaggagatcgaacgcctcatgaaagaacaggagtga

SEQ ID NO: 9464 - RNA, 1014 nt, synthetic construct
  source 1..1014: mol_type = other RNA
atgagcggcaatgacttatggaagtattgcactgccgaacaggagaaagagatgctgatctcattccggttactggacgggatccagatgaaagaagagaaataccttgcatgcctgtacgcactgtctaatcacgccgatgaacattatcatgcagccgcggtaaagaagcggggaggcggagtgcgacggttgatggttcctgacgctctattgggcgccgtgcagaggaatatcctgcaccacattctggacggcatcacaccagctaacgcttccaaggcttatcgccgcggcgttacaattgccgataacgcgctgccacatgtgggtgcaaaacagatcgtgaaactcgacatccgggattttttcgaaaacattacgtacctcttagtgtaccaatacgcctttcccgccgtgtatttccctcccgccgtgagaactatgctcaccgctctttgctgttgtcgagaatgtctccctcaaggggctcccacgagcccagctgttagtaatctcgtcatgaagagttttgatcagtacatggagtcatggtgctgtcgcaggggtataagatacacccgttactgcgatgacatgaccttctcgggatccttcgatgcaaaggagcttaagaataaggtcaaaagctacctgcaggtcatgggttttcaactgaatgagaagaagactagagtgttgaaacgccattgtcggcagacagtcactgggatagttgtgaacgaaaagcctcaggtatcccgagattatcgtaggaacctcagatccgagatatactattgcctgcggtatggggccaaagagcacctgagcaggcttggcaactcaaagtggatgaccgaagaggggccggacaccgagaggtacttgcgtcacctgctgggaaagattaatcacgtactccaggtcaaccccgaagacgagtattttctatgggccagagagaaagtgagggaaatctcttctcgcgcaacaaaagacgagattagatga

SEQ ID NO: 9465 - RNA, 1194 nt, synthetic construct
  source 1..1194: mol_type = other RNA
atggccgggcaggacttctggaagtactgcactactgaagagatcgggcgcacactccgaacctttgacctgcttaagggcatggatgtccccgaagaagcttatctgccttgtctctacacagtgagcaatcagattgagactcattaccacccagtggtgatccccaaaaagagtgggggcagacgaaaactccttgtccccgacgccctactgaggactatccagagaaatctgcttcatcacgtgctagaggagttccagatatctgaattcgcctgcgcatataagaagggaacctcaatagtcgataacgcccgaccgcatgtcggcgcaaaactggtgcttaagctcgacatccaggactttttcgatcaaataacatggattctcgtctaccagaatgccttccctggaacccacttccctcccgctattcgtaagatgctgacagagttctgttgcgtgagggatagattgccacaaggcgcccctacgtcccccactgtgtcgaatctggtgatgaggccatttgatgtccacatgggggaatggtgccgggagagggagatccggtataccagatattgtgacgacttgacattttcaggtgcctttgcccccgaggaggtaatccggaaagtgcgcggttttctgcaggtttatggcttcgaattaaaccggaaaaaaacgagagttttgggccggggaaacgcacaatctgtgacagggattgttgtgaacgaaaaagctcaggtgtctcgcgcataccgaaggaagttacggcaggaggtatatctgttcgaccgttatggtatcaaaactgaggaaggcccaaagaacgatgaaaaggagcgtatgcgcctgctgggtaaaatgaggtacgtcttgagcgttaatccagaggacgtttggttcgggaacatgtacaagaaatggaaggtgggcgctgatagtagaaagaggaccgaggaaatgcagagcatttccgaagagggcggagtcgcaatgaaggccagagtgaacgagggatgtatctcctgcggagcgtgtgtagccacctgtccggaggtgtttcgctttgatgaaaatgatctggcagtagcgtacgccgatgtcaccgacgaaaccgaggctcaagctaaagaggcgcgcgatggatgccctgttgacgtgattgacctcgaagcttga

SEQ ID NO: 9466 - RNA, 1002 nt, synthetic construct
  source 1..1002: mol_type = other RNA
atgtcagacctgtggaagtattgcacagccgagcaatgcagagagttcctcctctcactggagctcgtcggagattctggatggcccgacgataaaaaactcgcttgtctgtacgcggttagtaaccatgttgaaaaacactatcacacagccgtgataaaaaagcgctcaggcaacgaaagaaggctgctcgtacctgatcctttgctgaaggggattcagcaaaaaatcctgcataatgtgcttgaggactacgctgtcagtcggtacgctactgcctatcacaagggagcaaaactgaaggataatgcggccccacacgtgggaaaggaaaagattttgaagctcgacatcgagaactttttcgaaaatatcctgttcaagcaggtgttacagagctccttcccaaagaagtactttccacccgccgttggaacgatgcttgcatacttgtgttgctattacgactatttacctcagggcgcccccacctcccctgcaataagtaatcttgtgatgaaaccgttcgatgaaagcatgggagcctggtgtgaggagcggggtatttcgtacagccgctactgcgatgacctgacttttagcggcgactttgacgctgagatggtgaagagaaaagctggtgcctttctaggcgagatggggttccagttaaaccgcaaaaaaacacgtgtgatctcccgtggccaacagcagaacgtcaccggggtggtagtcaattgtaagccacaggtgtctaaagagtatcggagaaagctcagacaggagatttatttctgtcgcaagtacgggatccggggccatctggaacgaattggcgataggaaatatctggaccttggcgaagcagggatcgaacgatacaggctgaggctaatcggtaaggttaattacgtcctgcaagtaaaccaggatgacagggattttatagggtgcttgggtgacctgacctccggggtgaagggcttctctaagaaaccctga

SEQ ID NO: 9467 - RNA, 972 nt, synthetic construct
  source 1..972: mol_type = other RNA
atgtcggatctgtggaaatattgcacagaggagcaatgccgccagtttttactctcattggagttagtgggcaaagatggttggacagacgacaagaaactggcttgcctctacgctgtgtctaaccacgttgaagaacactaccatactgccgtcattaagaagaaaaatggcaaagaacgtctgctgttggttcctgaccccctactgaaaggaattcagcgacagatcctccacaatgtactggaggaacgcccaatatccaagtatgcgatggcgtaccacaagggtgccagcctcaaggataacgctgccccacatgtcggaaaagagaagatactgaagcttgacatggaaaactttttccagaacatcttgttttcacaggtcctgcagtccgcattccctggcaagtacttcccaccttctgtcggcaccctgctgacttatttatgttgttactacgactacctgccgcaaggtgctcctaccagtccagcaatcagtaaccttgtgatgaagcccttcgatgaatctatgggcaaatggtgcgaagagcgcgggattgcatactccaggtattgtgacgatatgacgttcagcggtgacttcgatgcagacatggtgaagaggaaagccggggccttcctgaatcacatggggttttgcctgaatcataagaagaccaggatcatcaccagaaatcgacagcagaacgtgacaggggtggtcgtaaactgtaaaccccaagtgagcaaagagtatcggcggaaactaaaacaggagatttactactgtaagaagtatggcattctcggacatcttgaaagaataggagacaagaagtacttggagcttggggacgccggaatcgagaaatatagactcaggctgatcgggaagatgaattatgtgtttcaagttaatcccgaggataaggagttccggggctatctcaaagattttgtgtga

SEQ ID NO: 9468 - RNA, 987 nt, synthetic construct
  source 1..987: mol_type = other RNA
atggagaacaccggtctgtggaaatattgtacaccagaacagagccgcgaatttcttctgtctcttcggctgctcggaagaaccgaccgtgaagatggagaacaattagcctgcttatatgccgtgagtaaccatattgagaagcactaccaccccgctgagataaggaaacgggacggctcaattaggagactgctggtccctgatcccctcctgaaaaaaattcagcgcaacatcctgcataacatactcgaccagatgcccgtttctccatatgccactgcctaccacaagggtgcaggcatcaggcttaatgctagacctcactcaggtgcgaagttgctgcttaagcttgatattaaggacttcttcgagaatatcctattctcgcaagtataccagcaggccttcccaaccatatacttcccgccatccgtgggaactatcctaacctacctctgctgttacagagattatttgcctcagggagcccctaccagcgccgctattagcaatctggtaatgaagccctttgacacttatatgggcgcatggtgtggggagaaggggatcaggtactccaggtactgtgacgatatgtccttctctggggaattcgacgcggatacagtcatccgcaaagcaggcgggtttctcaaagctatgggttttgagctgaacacgaagaagacaaaggcagtgtcctgccatcagcgacaggaggtgactgggatagtggttaaccagaaaccccagttgagcaaagagtaccggcgacgtttacggcaagaactgcattactgcggcagatttggcctgcgcagtcatctggaagctatccacgatacacgctttctcccgctcggggaggcaggaattcagcggtataggatgtcactgctgggcaagatcaatcacattttgtatgtcaatcctgaggacgcctggttcttgaatgctagacaaatcgtgcggacgctacgatga

SEQ ID NO: 9469 - RNA, 993 nt, synthetic construct
  source 1..993: mol_type = other RNA
atgtcccgcctctggagatattgtaccaaggaacaatgcagagacttactgttgtcattccagctctttggagagacaaattggagcttcgaaaaacaaattgcctgcttgtatactgtctccaatcatatcgaggcgcactaccacagtatcatcatacccaaaaaagacggttcaaaaaggcagcttgatattcccgattacatcctcaaaaagatccagaagaacatcttgcatcatataatcgaaaagttctctgtccctgaatgtgccaccgcttaccaaaaaggcaaagggatcctgaataacgttacaccccacattggcaaaaagactgtcctgaagctggacatcaaagactttttccactccattattttcccaatggtgtacgcccgggcttttcccgaggagtattttcctccttctattagaactctactgacgtatctctgctgttaccgagatcgcttaccgcaaggcgcaccaagtagcgcagccataagcaatctagtgcttaagccatttgatacctatatggaactctggtgcaaggaccgcaatatccaatatacacggtattgtgacgatatgacattttctggcaacttccacaaaaaggaggtgatgaagaaagtgcagcacttcctccatctgtctggttttagcttaaactacaagaagaccaaagagctttcgagcaataggcgacagcaggtaaccgggatcgtggttaacagcaagccgcaggtgagtaaagagtaccgtcggagggttagtcaggagatttattattgccagaagttcggagtactctcacacctgaagtacatagacgacaaagagcatctgcctctggggcagattggagtcagaaaatacgtgtcctccctgcagggcaaggtgcagtacattttgtacatcaacccagaagacaagcttttcaggaagctgctggatgaatctattgctaagatctgggattcactgtga

SEQ ID NO: 9470 - RNA, 999 nt, synthetic construct
  source 1..999: mol_type = other RNA
atgggggaccagaacctctggaaatactgcacaagagaacattgtaggaagctcctgaccgagtttcagcttttcggcgaaatgaattggtcaaaagagcggcagatcgcatgtctctacgccctttccaatcatatcagtgatcactaccatactgcagtcattcccaaacaagatggcacctgtcgtaagctttgtattccggacacactgctaaaactcgtacagcggaacatcctgcatcacatattggatgggttgaccgtgtcgagctacgccacagcctaccgcaagggagttactatcctgaacaacgtgtcctgccacaccggacaggagaaaattttaaagttggacatccacgactttttcggctccattcctttcattctggtgtatcagtctgtttttcacagtgacagattccccccatctgtggggaccttactcactcatctctgttgttataatgggtgcctgcctcaaggtgcacccgcctctgctgcgattagcaatctagtcatgaaaccattcgatgagtacatgggtaattggtgcggagagcgtaaaataacgtatacccggtactgcgacgatatgacattttccggaagctttgaggcctacaaggtgaagaacaaagtaaggagtttcctgaaagtcatcggcttcgagctgaacgaaaagaagacgaagctgctgctcgctggacaacgacaagccgttactggcatagtggtcaacgaaaagcctcaggtgtctaaggaatatagaaagaagttgagacaggaggtttattactgcctgaagttcggtgctgctagccacttagaacacatgaatcacgatgagtcaggctcaaaagaaggggcggagaggtatctgcagcagctgctgggcaagatcaattttgtgttgcaggtgaacccagaggacgaatattttcgcgccgcacgcgaacggcttaggaaaaatcagaacgagcgagtcaaccgctga

SEQ ID NO: 9471 - RNA, 987 nt, synthetic construct
  source 1..987: mol_type = other RNA
atgggtgatcaccgcctgtggaaatattgcaccgccgaacactgtaggcagctgatcatggagattctgttgtttggggagatcaattggcccgaggagcggcagattgcatgtctctacgcgctctctaaccacattccaagccactacagaacggctaagatcccgaagagggacgggacatgtagaaggttgtgcatcccagacacacttctcaagatggttcaacggaacatattgcaccatatactcgaccctatcccggtgagctcgtgtgctaccgcctatagaaaaggtgtttccttaatctcaaacgtgtcaggccatgtaggccaggagaaaatactgaagctggacatccatgacttcttcggaaacatcccatttattctggtgtatcagcgtgtctttcacagttatcgtttccctcctgccgtcggcacattactgacgcacctatgctgttatgaagggtgtctaccccagggcgcgccaactagtgccgcaattagcaatattgtgatgatgccctttgacgagtatatgggggaatggtgcgcaaaacggggtataacctacactaggtactgcgatgatatgaccttctctggttccttcgaggcttacaaagtgaagaataaggtcagagggttccttcaggtcatcggcctggagctcaacgaaaagaagaccaaacttctgctcgccggacagcgccaggctgttactggcatcgtggtgaattgcaaacctcaagtgtctggagaataccgccgaaagctgcggcaagaaatttattactgctgcaagtttggagccgcatcccatcttcagcatgtccaagatcagaagtacggaaccgatgccacagagaatattcgatacttacagaagctcctgggcaaaatcaactttgtgttgcaggttaatcccgaggataaatacttcaagactgctcgcgaaagcctgaaaaacctggtaacatga

SEQ ID NO: 9472 - RNA, 987 nt, synthetic construct
  source 1..987: mol_type = other RNA
atgggtaacaccgacatctggaagtactgcaccggcgaacagtgtcgagacatgctcctggaactgaggcttcttggaaatgttgactggagccgggagaaacagttagcttgcctctactcattgtccaaccatgccgaaaaccactaccatctgaaggagattaccggcaagggcggccggcaaagaacactgcaggtaccagatgccttcttgaaaaaggttcagaaaaatctgctaaggaacgtgttggacggcttgcctgttagttcttatgccacggcatatcggaaagggaagagcatcctgtgtaatgccgtgccccacaccggaaagggcaagatattaaagctagacatgagagacttcttcgggaatattacattctttcaggtgagacaaagtgtattcggaggactgctgttccctggcagcgtgggtacactcctgactcatctctgctgttaccgagactatctgccacagggtgcacccaccagtggagctgtctccaatctggtgctgaaatcgtttgatgaatccatgggaaactggtgccggattcgcgagattacatacacgcgttattgcgatgacatgaccttttctgggtcatttgactctagagaggtcaagaataaggtggagtcttatcttcgcatccttgggttcgagttaaaccccaagaagactaaagtcctcgattcaggtactaggcagatggtgacagggatcgtggtcaacgagaaacctcaggccgatcgcgattatcgcaggcggttgcgtcaagagtgtcactactgtcttaaatacggacccgatcctggccgagtgagcagcaataaatccaaagaggcatacctcgctgggctggtcggcaaagtgaattacgttctccagataaacccggaagatatgtattttaaggaaatcaagaggcagctgactcaactgcagagagaagcgggggagtttccaatgcagtga

SEQ ID NO: 9473 - RNA, 1002 nt, synthetic construct
  source 1..1002: mol_type = other RNA
atgagcggagaagaaatgtggaagtactgcactggggagcaatgtcgggacctcctgaggagcttggacttgctccggggaaccggggtgaagcaggaacaagagattgcatgcttatactccctcgctaatcatgccgaagctcactataggagggccagaatccctaagaaaaacgggggggtcaggaaactccagatccccgatggcatgatgaagaaggtgcagcgaaacctgttacaccacgtcctggacgggctcgaacccagtccctatgcgacagcctaccgaaaaggcgctggcttgaaagagaatgcagccccccataccggtaaaaagcagatcctgaaactggacctggagaatttcttcgagaatattaccttctcacttatcctggagaatgtgtttccgtcgcgcttattcccaccagccgttggcgtgctactcacaaacctctgttgctaccgcgactatttgcctcagggggcaccagtgtcagcagcggtgagcaaccttgtgatgaggccattcgacgattatatgggttcttggtgtggagagcaaggcatagcctatacaaggtattgtgacgatatgacgttttctggcgactttgatgccagaaaggtcaagaataaggcccagaattttctgaaggtaatgggtttctccctgaacgcaggaaagactcgcctatacggtcagggacaccgtcaaagcgttactggagtggtagttaactgccaccctcaggcggctcgtacctaccggaaaaagctgcgccaggatctgtactattgtgagaagtacggggttgcaggtcatcttaaacggcaaggccgggacttgggccaggaagatgcagctggcgcctcctttagataccttcagatgcttgctggcagagctgcctttgtcctgcaggtcaaccctgaggatagttggtgcagagaggccaaaggacgaattgctcgcctgcagtctgaactgtgggtgtga

SEQ ID NO: 9474 - RNA, 987 nt, synthetic construct
  source 1..987: mol_type = other RNA
atgatttggaggtattgcactgcggagcagtgtcgtgaacttctgtactcctaccgcttattcggtgagcggaaatggtcaatggaagagcaggagagatgtctttacactttgtccaatcatgccgagcagtactatcggaatgtgtggatcccaaagaagaacggaaaaaagcgaaaacttatgataccggatcctatactcgcggaagttcaaaggaacatcctaacacagattctagctgacatgccagtgtccgaatatgctaaggcttaccggaagggactgggactgcgcgaaatggtgcaggagcatcaaggtcagaatacagttatgtgtctcgatatccgcgacttcttcggtaatatcaccttttttatggtctaccagcaggtattcagtagtctcaggttcccccctgccattggcactctcctcaccaacctttgctgttttaaagacacattaccacaaggagcaccaaccagccccgctatctctaatctggtcctcaaacctttcgatgagtacatgggccaatggtgccgtaaaagaggaattgtctatacacgctattgcgatgatatggtgttctcgggggagctggaccccaagacggtgaagaataaagtgcgggggtttctgagagttatcggcttttctctgaacgaggagaaatctagcgtgagacgacagagccagcggcagaccgtaaccgggattgtcgtgaatgaaaagatccaagcagccagagagtatcgaaggagagtccaccaggaagtgtactactgcaggaagtttggggtggacgatcacctggccaagattggcaaagacaagaaagagcccatggacaggcagcgctacttactgtccctgttgggcaagctgaactatatactgcaaatgaaccctcaggatgggcaggccaaaagcgacttggcagccctgaaggaaattatcgtttcattgggcgaaaagaactga

SEQ ID NO: 9475 - RNA, 960 nt, synthetic construct
  source 1..960: mol_type = other RNA
atggatgctacccgcatcacactcctggcgctggacctgtttggaagtcctggctggtccgctgataaggagatccaacgactctacgctctaagcaaccacgccgggcggcattatcggcggattatcctgtcaaaacggcacgggggccagagactcgttttggcccctgactatcttcttaagaccgtgcagcgaaatatactcaagaacgtgttatctcagttccccttatccccgtttgccaccgcctacaggccagggtgccccattgtgtccaatgcccagccccactgccagcagcctcaaattctaaagcttgacattgagaacttctttgattctatcagctggttgcaggtatggagagttttccgccaagtacaactgcccaggaacgtggtgactatgctgacttggatctgctgttacaatgacgctctcccacagggtgccccaacaagtccggcaatcagcaacctggtcatgcgttgtttcgatgaacgcataggcgagtggtgtcaggcaagaggcatcacatacacacgctattgtgatgatatgactttttcaggacatttcaacgcaaggcaggttaagaataaagtctgcggtttgctcgcggagctgggcctgagtctgtatcagcggaagagctgcctgattgccgcttgcaaacgacaacaggtgaccggtatagttgtcaatcacaaaccccagctcgctagggaagcacgtcgcgcactgaggcaggaagtgcatttatgtcagaaatacggcgtgatttcgcatctgtcccacagaggggagcttgacccatcaggggacctgcacgcacaggccacggcttatctgtacgccttgcagggaagaatcaattggttgcttcaaattaaccctgaagacgaggcctttcagcaagccagggaatctgtgaagagaatgctagtcgcgggatga

SEQ ID NO: 9476 - RNA, 960 nt, synthetic construct
  source 1..960: mol_type = other RNA
atggatgccacccgtgtctgtctcctggcactagacttgttcagcagccccgggtggtctgctaatgaagagattaggcgcctctacgcattatccaactcaacatcaaagcactaccgtaccatcgtgctgagcaagagagacggaggggagaggcagatcctcgcacccgattatttactcaaaactgtccaacgcaatatcctcagaaatgtgctttcgcattttcccgttagcccattcgcgactgcttaccgacctggctctactgtggtgcataacgctaggccgcacctttcccagcctcaaatactgaaactggacattgaaggtttcttcgaaaatatttctggcctgctggtctggcgggtgtttcggcaaacaaccctgcctaacgccgtcgtgacaatgcttacgcacctgtgctgttaccgtgacgctttgccacagggtgccgcgaccagtccagccatcagtaatctggtgatgcggcgatttgatgagcgaatggggcgctggtgccaggaaagacacattgtctatacgagatactgcgatgatatgacatttagcggcgagttctccgccaggcaagtgagaaataaggcagctgcactcctcgccgagctaggactgcggctgaacaaacgaaagaccgccctcattccagcttacaaacagcagactgttacagggatcgtggttaacgaaaagctgcatatatccagggagcagcggcggcttttacgccaggaggtacactattgtctgaagttcggcgtagccgcccatctgagtcactctggaaagtccactgagtcagctctgtgctatttgcagcgcctacagggtaaaatcgcatggttgcttcaagtgaaccccgacgaccgcgcgtttagaagggccttgagagatgttcagcagatgatccggcagatagccctgcctggcaccaggtga

SEQ ID NO: 9477 - RNA, 1071 nt, synthetic construct
  source 1..1071: mol_type = other RNA
atgcggcgagctaatgcactcagcaccttcagcagattgagagatcgcttgtatagaatagtggccgccgatgccttctttaagcaccagtgggacaaagagcccacgctggatgcaacccgtgcctgcctgctagccctggaattaattggccgctcagactggtcagctgaccgagaaattcgctgcctttacgccctgtcaaatcggagcgaacgccactatcgcaaaatcgtgctgactaaaagagatggcggcagtcgagtcctacatgcacctgggttcctcttaaaaaccgtccagaggaatgtggtgaagaacgtgctgagccattttccagtatccccatttgctacagcttatcgacctggttcctctactctctgtaacgccagtccacatgttgggaggaagcagatcctgaagctcgacattgagaagttctttgacaacattcgcttcacccaggtatacagactgttcaacaaaaccgaacttcccgctggagcggtcaccctccttacacacctgtgctgctacagagatgcactgcctcaaggggctccaacaagccccgcgttaagtaatctcatcatggcacggtttgatgatctcctgggaatatggtgtaaggagagagacattgcctacacacggtattgtgatgacatgacattcagtggcgatttcgacgctcaccaggtcactaataaggttcgtggactgctgaacgacatgggtttcaccctaaactctaggaagtcacggcggatcgctaggggttctcaacaaacagtgacgggcatagtggtgaaccatagaccgcagttgccctcggaatttaggagggcacttcgccaggaggtttacttttgtcagaagttcgggatcgcttcccaccttgagaggatcggaagctctgagactcctctgaggtaccttcaatccctgttggggaaaatcgcctacctcctgcagattaatccggatgacgcggagtttcagcgtgccaaggcagccatcggccagctgctcaaagccgagacttctttgtcctatcgggccgactga

SEQ ID NO: 9478 - RNA, 972 nt, synthetic construct
  source 1..972: mol_type = other RNA
atggacgccgcacgagcttgtctcatcgctctggaactcacgggcaaaactgcctgcccagccgataaggagatccagtgcctttatgccctatctaatcgatctgatcgccattaccgcaagatagtcctgaccaagcggtccggtgggttgcgcaccctgtatgcacccgacatcctgctcaagtccgtgcaacgcaacatcctgcgtaacgtcctgtcactgtttccattgagtccatttgccacagcttacagggagaagtgcagcaccctggataatgcgagcccacatgttgcccaaagtaacgtgttgaagctggacattgaaaacttcttcgacagtatcacattcttccacgtccatagattatttaagaaaaccgagttacctgctgccgtggtaaccctactgacacacctttgttgtcaccgcgatgtgttacctcagggcgcccccacaagcccgactatttccaatctggtgatgaaacgtttcgacgacgtgatcggcctgtggtgtcaggagagagatattgtgtacaccaggtattgcgacgacatgacgttcagcggggacttcgatgctaggcaggtaaaaaataaagtgcggggcttgctgtacgatatgggatttacactaaatgccagaaaatctagactcatcactgcaaatcagcggcagaccgtgactgggatagtcgtcaaccagaagccccagctgacacgggacattcggcggaagctgagacaggaagtttatttttgccagcgttttggagttgcgagccacctcgttcaaactggtgattttaacccccaggagtcccctagggagcagagacttaggtacctccagtcactccaaggaaaaattgcctacctcttgcaaataaatcctgatgacgcagaattccagaacgctcgatctgctgtgaggcagcttcttaaggaagagtcagcgtcggcatga

SEQ ID NO: 9479 - RNA, 945 nt, synthetic construct
  source 1..945: mol_type = other RNA
atgaatgccgcccagctatcactcgtaagcctggaacttacggggcacccgtactggtccccccataagcagctccggtgtctgtatgcgttaagtaatcattcagaacggcactataggactctctcccttccaaaacgtagcggcgggatgcggaacatccaggttccagatcccctcctgcgccaagtgcaaaggcacatacttcgccacgtgctgagtctgctcccgctgagccccttcgctacagcctggaggcccgagtactctctgcgacataacgtcctgcctcaccttggaaaaaaacaggtgctaaaattggacatcgagaactttttccctgggattatattccctcaagtgcagcagctcgcatttgctaagacctgcctgccatatgcagccaccaccctgctgtcacacctgtgttgctatcgcgacagattacctcagggcgcgcccacatctcccatgttaaccaacttggtcatgaggccctttgatgattacattggagattggtgccagcagcaggaaattgcttacacacgatacggggacgacatgacattttccggcgattttgatgcacggagagttcagaataaggtcgccggcttcctaggcgagatgggtatggttctgaatgagggtaagacccgcgtgatgaggaggggtcagcagcagatagtgacgggaatcattgtgaacgaatctactcctagagctccacgggaaatgcgtagagcattgcgccaagccctgtactattatggcaagtacggggcctcggctgtaccagagggattcgacgagcagcagtggctccagagcctgcatggaaaaattactttcatcttgcagatccaccctgaggacgccgccttgcaacatgcacgaggcatcctccaaagacagcttaaggctatcagatcccaaccatga

SEQ ID NO: 9480 - RNA, 936 nt, synthetic construct
  source 1..936: mol_type = other RNA
atgaacgctgctcagctgtcactaatcagcctggagctcactggccatcctcactggagcccagctaagcagctccgatgtctatatgccctcagcaatcattccgatcgtcattaccgggagttgcagctgcccaaaaggtctgggggcattcgcacaatccatgtgcccgcaccactcctgaagtcggtacaacgtaacatcttgagacacgtgctttccctcctgcccttgagtgactacgcgactgcttggcgcccagggtataccttacttaataatgttttgcctcacgttcgccagaagcaggtgctcaaaatggatatcgacaacttctttcagcggattatttttcctcaggtgtggcagcaagccttcgccaagactagattgcctcaggctacaattacgctgctgtcccacctgtgctgctatagggaccggctaccacaaggagccccgacatctcccacgatcgccaaccttgtcttaagggattttgacaactatataggacgatggtgtgcagagcaggaaatagcctacaccagatacggcgatgatatgacctttagtggtgacttcgatgccaggcgagtccgcaataaggtgaaaggctttctggcagagcttgggtttgaactcaaccacgacaagaccagactgatgtcccaagggcagagacaaatcgtaaccggaatagttgtgaatggtccatacccgcaggcacctgccacacttaggcgtgagctgcgccaaaccttatactattacgaaaaattcggctggtcacccgcgcacagcgaaatgactgagcggcactggctgcagacaatgcagggaaagattgagttcatcctgcagattaggcccaacgactctgaattcctgcatgcaagacacaatgtccggcgctggctgaaacggtgcgcttga

SEQ ID NO: 9481 - RNA, 1038 nt, synthetic construct
  source 1..1038: mol_type = other RNA
atgtctcgcgacatctggaagtacatcacggtggaacagtgtaatgaatttctactcagctttcagctgttgggcgagactactctgagtaacaaggagcagattacctgtctatatagccttagtaacacactggaaaagcactacgaacaatatactctggtcaagagcaatggcgggacgagaaaaatcaccaaacctgacgagagactcaaacttgttcagaagaatatccttgccaatattctgagtcagcggagcgtatccatttatgccaccgcttatcagaagggggttggcctcataatgaacgcccagccgcacacggaaaaacagcagattctgaagcttgacatagaggatttcttcgactccatttctttttcccaggtgtacgcttacggtttccctcgttcatatttcccaaaggctacagcaggcttattgaccaatctctgttgctataaccactgtctgccacagggtgccccaacttcccccatgatctccaatctggtgctgagatccttcgacgatagtatcggacaatggtgcgtagagaaggggatctcttacaccaggttttgcgatgatatgaccttctcaggaacctttgacgccaccacagtgaaaaataaagtgcaagcattcctggtcgagctgggattctcgttgaacaaaaaaaagacacgggtgatatctaagcacgagcaacagacagtgactgggatcgtcgttaacgaaaagagccaggcccccaggacttaccggaagcagctaaggcaggagatttactattgcatgaagtttggcgttagctcacatattgcgcgaaaaaccgcggtcgctccccatctgatagagcagcgcacaatcgagaactaccttttatctttgctcagcaaaaccaatttcattttgcaaatcaaccctctcgatgaagaatttctgcaagcaaggacccagctgaaggtgttactcactgagcccgtgtcatatacacatctggatgtgtacaaacgccaggtctaccgatga

SEQ ID NO: 9482 - RNA, 1002 nt, synthetic construct
  source 1..1002: mol_type = other RNA
atgtctcaccgcgatttgtggaagtattgcacccccgctaaaaacagagaatttttgctgtcactacagttactgggccagaccgagctgagcgatgcccagcaaatcagctgcctttattctttgtccaaccacctggaagcccactatagaacctacttcctcataaaaaggaatggctccaagcgcaaaatttcagcccccgacttattgctgaagaaggttcagaaaaacattctcaccgtctgcctgaccaataggacctgctcaccctacgccactgcctacaggaaaggggtacagctgcttgagaacgctactccacacttaggacaaaagcagcttctcaaactggatattgaggacttcttcggctcaatcactgttcccatgattgctagaagcgcctttcctcgcacatacttcccatcttcggtcgcagggcttctgactcagctttgcgcatacgatgattgtctgcctcaaggagcgccgacgtcccctctgatctccaacctcgtgatgaaaccattcgacgacagtatcggtcaatggtgtgcccagcgacagataacatacacacgattttgtgatgaccttacatttagtggtgacttcgcccccaaggaggtgaagaaaaaggtgcagaattttctcttcgagctcgggtttactctaaacaagataaagacgaaacagttgagcgcaagccagcgtcagagtgtgactggaatcgtcgtgaataccaaggcgcaggttcctcggtcctatcggaagaaactgagacaggagatctattactgtctcaagttcggcgtgaggagtcatctaattcatcaacatacgaccagccagccagtactggaacaagaggaagaccagcggtacttgcaacaactgatcggcaagacaaatttcattctccaggtgaatccgtctgaccaggaatttctgcaggctaaaaaagcactgaaggagctcctgcaggctaactatacatga

SEQ ID NO: 9483 - RNA, 1011 nt, synthetic construct
  source 1..1011: mol_type = other RNA
atgccgtactttttaggagggattcgccccatgaacaaaagtatttggaagtatatcaccaccgaccaatgtaacgactttctcctcagttttaatctgcttgcacctacgaacctttcacccgaaaagcagctggcatgcttgtacgcagtcagcaacagcatcgagtctcactacaccacaacatatctgaagaaaaagaccgggggacaccgggtgattcacgagcccagtccactgttgaagaaaatccagaagaacatcctggtgcatgtactggaaccgcaggcctgcagcgtgtatgccactgcgtaccagaaggaaaagagcctcctggataatgctgctccacatattggaaagaaacaggtgtacaaactggacatcgacgattttttcgactctatctctttcactatggtgttccagagggcctttccccgtgagtattttccacctcaggcagccgggattctgacacagttgtgttgcttcaacgattgtttaccccaaggcgccccaaccagccctatgatatccaatctggtgctgaagccattcgatgattacataggtcagtggtgcagggaacggaatatcgcttacactagatattgcgatgacatgaccttttcaggggagttcaatgttaagaagcttcaccacaaagttagggcctttcttgaggctctcgacttctcccttaatcagaagaagactaaattactggccacgggtaagcaacagattgtcacaggaatcaccgtcaatgagaaaatgcaagtgcccaaaaaatacagacgagaggttcgccagtcagcttactactgtctcaactatggcacagcgtcccatctaaaaagaatgaacgaaggcaatggcgaactggatcctgagacttatctcaactccttgctgggcaagatcaatttcattttgtcagtaaaccctagcgacaaagagttcagtctactgaaggaagagatatccaaactactctcgcattcttga

SEQ ID NO: 9484 - RNA, 984 nt, synthetic construct
  source 1..984: mol_type = other RNA
atgcaaaaccaggatgtttttggttacgctaccaatgctcaaatcaacgacttcttgtattcccttcagctcttcggcgcaagcgattggtctaaggagaagcagatcggggctctgtatgcaatttccaatcacattgaggatcattgcacacttttccaggtacccaaacgaaatggatcagagcggaccatttgcgccccgtcacctctgctcaaaacagtgcaaaagcgtatcctgtttgctgtcctgagtgagcgccccgtgagcgaatttgccacagcttacaaaacgggggtgtccatactcgacaacgccgccgggcatgttggccagaaatatgttctgaagctggacatcgagaactttttcgggtcgatcttatttcaggacgtgatgaattttgcattccctcgcgccctgtttccaaagagagtgagtgccctattcgcgtcactctgttgttatcacgattgccttccccaaggagcccccactagtgcctgtatcagcaatattgtgctgaagcctttcgacgattacattggtagagtcgcaaaggaaatgggagccgtgtacaccaggtactccgatgatatgacctttagcggcgacttcgacacaaagaaaatgtactacaaggccaagctgttcttggaggctatgaattttaccgtgaatgaagcgaaaactcagatacttaccaaaaaatctcagcaaaaggtcactggcctggtagtcaacgagaaggtgcaggttccaaagaactacaggaaaactgtcagacaggaagcgtattttgccactaaatatggattaacgtctcacttggcctataggcagaacgtgcaggcagcagaagtaacacagaacgcagctttccggtacaagctcagcctgctgggcaaaatcaactacattttgctcgctaacccagaagaccaggagttcaagaagtggcagaatgagataaaatctctatga

SEQ ID NO: 9485 - RNA, 984 nt, synthetic construct
  source 1..984: mol_type = other RNA
atgaatcatcaggaagtttttggatacgcaactgacgcacagctgtccgaattcctgtattcactcagactactgggcccttctgcttggcccaaagagaaacaactcgcaactctttacgctatatccaatcatctggagaaccactataaaaccttcaccgtccagaaaaggaacggacagatgcggaatatttatgctccgtcgccactactgaagggggtgcagcgaagaatactcgtaagtctccttaacgaaaggcaagtcagccccttcgcaactgcctacaagaatgagggtagcatcttttttaacgccgctaagcatgccagacagaagtacattctcaagttggacattgaagacttttttggaagtattctgttccctgatgtcatgaattatgcctttcctaaagcgatcttccccaaacgcatctctgggctgttgacaagtttatgctgctatcacgatgcattgcctcagggggcgccaacatctgcggccatctccaacattgtgatgaaacccttcgatgattatatgggcaagttggcctccgaaatgggcattaattactcaagatactccgacgatatgaccttttcaggtgacttcgacacggcttacatgtacaggaaggcaaagatgtttctgaacgacatgaacttctctgtgaaccacgccaagacaaaggttcttacacgcaagatgcagcaaaaagtcaccgggctgattgtaaacgagaaggtccaggtgagcaaagcctataggaagaaggttcgccaggaggcttactatgtgagccgattcggactccggaaccacctggcctttatccaacagctgaatgaggtggagatcagcaaagaagctgtgaagcggtaccagctggtgctcttaggcaagatcaatcacatcctttgtgccaacccaaatgataaagagttcctgaattggcgtgagaagataaaaggcttatga

SEQ ID NO: 9486 - RNA, 1002 nt, synthetic construct
  source 1..1002: mol_type = other RNA
atgaactcccacttctggaaaaactgctccgcccaggaggagagggctttcctgttagacttgaaccttctacggcagtacggagacgcctggagtgataaggagaaaatcgcattattgtacactgtaagtcggactatcaatcagcattatttgaccgtgaaaattcctaagcgaaccggaggccttcggacactgcatgccccagatccgttattgaagatgatccagaagaatatccttagcctgctagagacacgtaccctctctgctttcgccaccgcctataggaagggggggtcaatattagcgaatgccacccctcacgttggtaagaaacaactgcttcagctggacctgctggatttttttgactctctgagcttcccgatggttatggccgcagcatttccaaagacggtcttccccgataacacacgcatgctgctaactaatctctgctgcctgaacgacgcactcccccaaggtgctccaacgtccgcactcatttcaaatctgatcatgaggcctttcgatgattatattggcgagtggtgtaaagaaagacagatagcttattcgcgctattctgacgacctcacctttagcacaaatgaaggcgacctgaccttggttaaaaggaaggtggagcatttcctcgaagccatgcagctcaacctgcaccccgctaagacaaaatacactgatcaaagtatgagacagtgtgtgactggcgtcgtggtgaaccaacaccctcaggtcccccgcagatacagatccatgctccgacaggagatttactatcttgagaaatttggactgacagggcacttggcttgtctgaaggaaaaaggagaagtagccgccgaccttagcgaaaagcagtacctgcgtaaactgatcggcaaggtgcagtttgtgtgtgcgatttgcccagagtcagcggggttccaagatgcttactggcggctccagaagctggcaatctcttttgaggaatga

SEQ ID NO: 9487 - RNA, 1002 nt, synthetic construct
  source 1..1002: mol_type = other RNA
atgaggtacactaacctgtggaagtactgcgatatccaacaatgtcaggattttcttctgtctttggaactttttgacgaaagcagactcacacgccaggagcggcttaaatgcctgtacgcagtcagcagacacgcagaaaagcactacagaaagacattccgcaaaaaggccgatggcagtctacggccactgcttgagccggactatctcctgaaacagatacagaggaacttactctgtaacgtgttggaacgagttcccgtctcagagtacgccaccgcttatcgaaagggtgtgagcgtccgtgataacgcagctgcgcatgtagcaagccctcagatcttgaaactggatattgagaacttcttcggctccatcacggactccatggtgttcacaaaggcttttcctcgggaatattttccctatccagcagcctctctgctaaccgccatttgctgctacgaaggctacttaccccaaggcgctcccaccagtgccgccatatccaatctgattatgaaagacttcgacagatacatcggaaattggtgccgtgagaagggagttaattatacccgctattgtgatgacctgaccttctcaggcgattttgactgggtggaggtgaaaaacaaggtgagggcctttctcaatgccatggggttcgagatgaataaaaagaaaacgaagttgctcactgccggtcagcggcagatcgtaacaggggtcgtggtgaacgaaaagctgcagactccacgcgcttacagaagggagctgcggcaaatttacttctatatgaagaagtacgggatgcgctcgcaccttcacaataaactcggaagggaggcagctaacgaggaaatggcttcttatttagaacatgttctgggacgagtgaatttcgtcctccagatcaaacctgaggacgggtgttttaaagaaatgaaagcctggattctggagaagaagaaggaggaagcgcatgagtgtctgtga

SEQ ID NO: 9488 - RNA, 975 nt, synthetic construct
  source 1..975: mol_type = other RNA
atggacttatggcggtattgcaccgccgagaaatggcaggagttccttgtctcactcgacctgctcggttcggctccggctgacagggaagcctatttcagatgcctgtatgcactgtcaaaccatcccgaggcgcactatcgcacgctgtctgttccaaagcggggcggaggccgaagaacccttcgtgagccggatgccttgctgaagaaggtgcagaagaacattctgcgccatatcctggcgggggctccagtcagtgaatacgcctgtgcctataggaagggaatgggcgtgaggcagaatgcagccattcacctaggacaacccatgatccttaaactggacatccacgactttttcggcagcataacattcccaatggttatgtggagcgccttccctggcacattgttcccacctgccgctgctaccatgctgactagtctctgctgctttagagatgtcctaccccagggggctcctacatctgcagcgatttccaatctggtcatggagccttttgatagacacatgggtgcttggtgtgcagccagggggatacggtacagtcggtactgtgatgatatgactttttccggtgttttcgacgctggggaagtggaagccaaagtgcgcgcctttttggaagtgatgggcttctccttgaacaagaagaagaccaaactgatgactgctggtcggagacaaacggtaaccggactggtggtaaacgagaaattacaagtgccccgggaataccagcgagcactccgccaggagctctatttttgtgagacatacggggtgcgaagccatttagaaaggaaaaatggaagagccccctctgaggaggaggccgcacgttacctggaaagccttgcaggcaaagccgcttacgtcgcgtcagtggcacctgaatccgagaatgccaggcgcatgcaggagaagatcaagaaactcatcaaaaagtga

SEQ ID NO: 9489 - RNA, 999 nt, synthetic construct
  source 1..999: mol_type = other RNA
atgcccgacaccgatgtgtggaaatattgcactacagcccagattaaacaatttctcgtgagcctgcgcctacttgggaatactgattggtcagacgagaagtatatcgcatctctctacgcggtgtctcgaaacattaacaatcattaccagcagactacactcctgaagagagacggaacacagagacaccttttggtgccagacaaactcctgaagaagattcagaaaaacattctgcggaaccttctgcaggacgttcccctcagtgcccatgcaaccgcatataggcaggggacggacatagtggccaatgcccaagctcacctgggccagagacagatcctaaaactggatatcgtggactttttcgggtctatcacattcatgatggtctgccggtcagtctttccaagtctgtacttccccccctccgtgggcaccctgctaacaaatctttgttgttacaatgacgcactgcctcaaggcgctcctactagcccagccatctcgaacattgttatgaccccgttcgacaactacataggcaaatggtgtcaggaaagaaagattgtttacacgcggtattgtgatgatatgaccttcagcggtgattttgaggctaagcaactcaagaataaggtgagggccttcctgcaggaaatggggttctccttaaaccaacataagaccaagttattcacttgccacaccaggcagctggtcactggaatagtcgtgaacgagaaactgcaggtgtccagggaatatcgaaagcagttacgtcaagaactctatttttgccagaaatttggagtactgtcacacctcacacagatcaataacggtctgatcgcgaaacaagaggatgtcgagtcctacctgcaaagtttgttgggcaaggctaattttattgtacaggttaaccctcaggatgcctacttccttcaggcccagagcttgatcaagcagttgatccgcacccaccgcgctgagtga

SEQ ID NO: 9490 - RNA, 999 nt, synthetic construct
  source 1..999: mol_type = other RNA
atgcccgatatgcctctgtggaaatactgtactacagcccactatctggagtttttgattagcctgcagttgtttggggatacagactggtgtgccgaaaagcagatatcctgcttgtatacgatatccaatgatgtaaacgcccactaccagaggacaaccatccttaaaagagacggcacacctcgccacttgctggcgccagatcccctgctgaagaagatccagaagaatatccttagaaacattctggcacctgtccccgtttcaccatacgcgactgcttaccataaaggcgcagacgtggtggccaatgcggcagctcatctgggtcaaaaactgcttctcaagctggacatcgaggactttttcggtagcataatcttcccaatggttcggaggagtgccttccctgatatctatttcccccccgccgtgtctacccttctcacacatctgtgctgttacaacgacgctcttccgcaaggagcaccaacctcaccgactatctccaatttagtcatgaaaccattcgacagccacattggtgaatggtgcagtgctcggggcattatctacacgcgatattgtgacgatatgaccttttcaggcgattttgacgccaaagcagtgaagaacaaggtgggccacttcttacaagccctaggattcagcctcaataaggagaagaccaagctgctaacccgccacactcgacagtctgtgactgggattgtcgttaaccagaaactccagctcagtagggattatcgtagacaactccggcaggagatttatttttgccagaagttcggggtagtgtcgcatctgaaacggatgaactaccctctggagtctggagatgtggaacgctacctccaggccttacaaggcaaagtcaatttcctgttgcaggtgaatcccggggacgacgtctttagacaggctatgtccggaattaagcagatgatcaaggctaacaggaactctcagtattga

SEQ ID NO: 9491 - RNA, 1005 nt, synthetic construct
  source 1..1005: mol_type = other RNA
atgcccgacaacgatctgtggaagtactgcactgccgagcactgtaaagaactgcttctcagcttccggctgtttggaaacactgcttggacaggtgagaagcaaatcgcgtgtctctatgccttgagcaggcacatcgggaaacactacgcccgagccgtaattcctaaaagggatggctccgcccgccatctattagtgccagacccccttctgaaacaagtacagaagaatatactccatcacgtcttggctgagatgcctgtctcgccgcatgctacggcctaccaccccaaggcaaatgtattcgccaacgccaccccacatctgcgtcagccacaggtgctgcggctggacatcgaagatttcttcggtaccattacattcccaatggtgtacagtcaggcatttccctatgtctactttccccctagcgtgcgcacattattgacacacctgtgctgctaccgggactatctgcctcagggcgctccaacttccgccgatatctctaacctcgtgttaaagcctttcgatgaccatatggggcggtggtgttctgaaaggggcatcacatacacccgatattgtgacgacatggtcttttctggggatcttgacgcaagagcggttaaaaacaaggtccagaattttctgcaggctatgggattcagccttaacctcaaaaaaacgcgcctctccaccagacatcagcaacaggtcgttaccgggctagttgtgaatgagaaggtgcaggcccctgtgcaatatagaaaggctctcagaaaggagatttacttctgccagaagtatggagtgcagtcacacctgactcagactgcagaccagacctacctgccccatggccacaacggcgttatgaggtatctggcatcactgttgggaaaagtgaattttgtgcttcaggccaatccgcaggatgcttactttcaacaggcaaagagtgcgatacaacacatgcgtgcacagctgaaattggcttga

SEQ ID NO: 9492 - RNA, 966 nt, synthetic construct
  source 1..966: mol_type = other RNA
atggatttctctcagtcacaaatcgaggaggtgcttgctctacctctgctgaccgacaagactcccgaaaagaggcttaagaccctctatgccctgtccaatcatgccgaggaacactaccatcccgttaccgccgcaaagcgcaatggcggtaggcgcaaaatccttgtcccggacgctttactgaagcaagtgcaaaggcagattctccacaatattctggagaaacaaccaatcagccgatatgccaaggcttaccatccaggggccgcaattcgggaaaacgcggccgtacaccttcaccaacccggcatactgaagctcgacatagaaaacttctttccgagcatcctgtttccagatgtcctgtccagttgtttctcctcgcagcggttttctgtccccatgggcaccttactgacgaatttatgttgctatcaggggtatctacctcagggggccccaactagtcctgcaatttccaatttggttctctaccacttcgacgtgtggatcgggcagtggtgcggtcagcagcatatccggtacactagatactgcgacgacttgacattttcaggagattttgatgcagccttggtgcagggtagagtcgagggatacctgcagacgatgggcttcatgttgaaccagaaaaaaaccagatggatgacagcgcaccagcagcagatggtgacaggcgtggtagtgaacgaaaaaatgcaggtgtctcgcgcgtatcgaaggaatctccggcaggagatttactactgtagaaaatatggagttcagagccaagcagcctatgctgctggcaaagacgccgctgagataggccccggagatgggaagcgttacctgcaaagcctcctgggaaagattaacttcgtcctgcagatcaaccctgatgacgcagaatttcagcgtgctgaggaagaggtgaaatcatggctcacagccaagtga

SEQ ID NO: 9493 - RNA, 1032 nt, synthetic construct
  source 1..1032: mol_type = other RNA
atgtatatagatcataacgaggtcatcttccagccttttgatgtggaatacgtggttgaacggggtctggagcgggccatggaagaggcatttgccttccaccagaattgtcgcctcccgttcctgatggacgtcagccaactggcaggttttttgtctttaaccaaaaaggagacgtttcggttcgtgttcgcctgtgattcaatgtaccgtaccttttccttgccaaaaagaaccggaggtacacgccagattgatgctcccatgcccgagctatcttgggctcagtatcggatcacccgggagatcctaaataagctgcctattagtcagtacgcgactgcttatcataaaggagcgagactgactcagaacgcctcaccgcacacgggcagacgctatcttctcaagattgacctttccgactttttccacaatatccgcatgactgacgtgcattcgcgagttttcaccccctactatcctaaacaaattgggtacttcctgtctctcatctgctgcaaggatgggactctcgctcaaggggcccctagctctccagccatcagcaatatcgttatgagatgctttgacgagcccttcggccagtggtgtaaaaaacgaggcctgagctacacaaggtactgcgacgatattaccataagtggcgatgtgcccctctatagggcctatgaaaaagcatcactgtggttgaacaacatgggctttacagtgaatgaaaagaagacaaggtttataaccgacgccagcaggcagacagtgacagggttgactgtcaacgaaaaggtgagtgtgccatccgactacaaaagaaagcttcgccaggagctgtactatgtagagaagttcggaattagatcagctgcggatcacatgcgtctgcctgacgccctgaagtactgtcagtccctgatgggccgaatcaattacgtacttagtgtcgagccagccaacgaatccttcctcagggcaaaggacgctttaagcggacaatttgcattctgcgtctga

SEQ ID NO: 9494 - RNA, 1032 nt, synthetic construct
  source 1..1032: mol_type = other RNA
atgtacattgagaataatgaggtcatctttcggagctttgacgtgaactatgtggcaaaacatggcctggaacaggccatggatgaggcgttcgccttccacgaaaagtgccgcctcccgtttctgatggatattgcccagctcgctgggttcctgagcctgactcaaagagaaacctataggttcgtttcaaagtgttcccgcatgtatcggtctttcgatctgcctaagagaactggtggcactagaaggatcgacgctcccctacccgagctgagttgggcccagtacagaattgacaggacaatcctgcgcaagatccctattagccgatacgctaccgcctaccacaagggtgccagattaacacgaaatgctctcccccataccggaaaaaaatacctactgaagattgacctgtcagatttcttccacagcatccgaatctccgacgtccatggtcgggtcttcgccccatactacccgaagcaaatcggctattttcttagtcttatttgctgcaaggatgggtctttggcccagggagcgccaacctctccagcaatatcgaacatcgtgatgcggtgtttcgacgaacctttcggccactggtgtgagaaaagaggcctctcatacacacgctattgcgatgatatcgcaataagtggcgacgtacccctttacagggcctacgagaaagcaagtttatggctcaacaacatgggatttaccgtcaacgaaaaaaagacgcgttttataaccaacgcttccaggcgtacagtgacggggttaactgtgaatgaaaaggtcagcgttccctcagactataaacgcaagttgaggcaggaactctattatgtaaacaagttcgggattttgagcgcagccgcctaccttaaactgccagacgctctgaagtactgtcagtccctgatgggacgggttaattatgtgctgtctgtggagcctgagaatgagtcctttataaaagcaaaagaggcgttgtctgggcagtttgctttttgcgtgtga

SEQ ID NO: 9495 - RNA, 1038 nt, synthetic construct
  source 1..1038: mol_type = other RNA
atgtatatagacaaagacgaagtcatcttcgagttcttcgacgtggagtatgttacgaaacatggcctggaacaggctatggatgcagcagtagcctttcaccagaagtgtagattgccctttctaatggacatttcacaactggcagcgtttctcagcctggacagacgcgaactgtttgggctggtcaaaaggtgcgatacgatgtacagaagcttcctgctgcctaagaggaccggtggttaccgacagattgacgctcccgcctacgagctgacagcgtaccagtaccgtattttgcaccggatccttggacgcatcccaatttccagatatgccactgcatatcacagaggagccgcactcaccaagaacgccagcccccataccgggaaacgctacctcctgaagatcgacattaaggacttctttcactctgttaggttatctgatgtacacgccagagtgttcgccccttattatccgaagcagattggctacctgctgtccctcctttgctgcaaagacggccggcttgctcaaggtgcgccaacatctccagctatctccaatatcgtgatgcggtgttttgatgagcctttcggcgaatggtgtgagaagcgagggttgtcgtatacccgatattgcgacgatatcactatctcaggcgatgtgcccctctaccgggcacttgagaaggctagtctatggctgaataacatggggtttaccgtgaacgagaaaaagacacgctttataaccaatgccagtaggcagacagtgactggattgactgtgaatgaaaaggtgaacgtcccaagcgactacaaacgccgtttacggcaggagctctactacgccgccaagttcggggtcagttcagccgctgattataaaggcctgacagatgctgaacaatactatcagtctttgatgggatggctgaatcatgttctcagcgtcgagcctgagaacgaatccttccttaaggcgaaacaggccttacgggaaaggtacgctgcagataggcgtatatga

SEQ ID NO: 9496 - RNA, 1050 nt, synthetic construct
  source 1..1050: mol_type = other RNA
atgatcgtgaagaacgactccgttacatttgaaccatgtgacatgccatttacccggaaattcggatgtgatgaggccgccaaaatggtgctggactttaaggcctttcatcctaaactgcctttcctgtacgacactcaccagctcgctgactttctgaagactggccgcaaaaccctcttcgacttaacgaatcatcctgaggcctgctattctacagtgagtgtgccaaagaaatccggcgggacaaggacgcttaatgttcctaacgatagacttaaagctattcagcggaagattttgtatgagattctcgcgtacctgcccgtgagcaaacacgccgccgcatatcacaagggagcaaggcttactgacaacgctgccgctcatatacaccatcgttacctcctgaaactagacctctctgatttctttggctccattaggttcgactctgttttttgctcagcattcaatgctcactattttccccgacaaatcggagtcatgctgactagcctttgctgtttcgacgatgtgctaccacaaggcgcgccgacatcacccgccttatctaacttggtgatgaagcggttcgataattccttcggagcgtggtgcagtgcccgcggttttagttacactagatactgcgatgacatcgctgtctcggggaactgtcctgtttaccccgcttacaagaaggcccgcctgcttctggagaacagcggcttcgaaatcaatgatgccaagaccagatttgtcaccgacgccggacgccaaaccgtaaccggtctgacagtcaatgagaaactgagcgtccccagcgattataagaggaaactgcgtcaggagttgtactatgcaaaaaagttcgggctggaaaacgtgatccagaagcagaatctgacagattacatctccggtggcaaggctgatgctgccagatatgcaatgcacctgttagggaagttgcattttgtgttgtcagtagaaccggataatgcatacttccggaacgcacgacagttcctcataacccagctctga

SEQ ID NO: 9497 - RNA, 1035 nt, synthetic construct
  source 1..1035: mol_type = other RNA
atgttggtgagtgacaacgaggtcatgttctttgagtctgatatgaggtttgtgaagagattcggcctggaggcggccactgacatggtgcttgactattctgcgataaataagacaccgttcatttacgacttcttccagctgagctcgttcctcaggatcctcccatccgatttgaggaaactgctggatgatatccctgggagctaccgctcactgcaaattcctaaaaaatcaggaggatatcgcgagctgaaccaaccactcgggagactcccggacatacaggagcgaatctacaccggtatcctgaaacgacttaagtccagcccttacgccaccgcctaccatcaaggagcccacctgtcagataatgctgcaccacacattggcaagcggtttctcttaaagttggacatcaccgatttttttggtagcatacgcttcgacatggtactaagttcagttttcaataccagcctgtacccccggcacataggagcaatgttgacgtctttatgctgcctcgaagacgtactgcctcagggcacatgtaccagtccaactctgtctaatctggtgatgaagaggttcgacgacatctttggggcttggtgtaaacgtcatggctttgattatacacggtattccgacgacattactgtctccggtaacacatctctttatcccgcctattgcgcagccaaaagcatgctgcacaagatggggtttgaactcaacgaacgtaagactcatttcattacggatagctttcgccagaccgtgacaggactaaccgtgaacgaaaaagttaatgtcacagccgcttacaagagaaaactgaggcaggagctttactacaccgatagattcggcatcgagagtgccgcacagtacctgcatcagcccgatgctaagaagtattatcagcaactaatgggcagattgaactttgttttatccatcgagcccgatcacacttacttcattaaggcaaaggaaaaactttccgagcagcgggctgaaatcatttga

SEQ ID NO: 9498 - RNA, 996 nt, synthetic construct
  source 1..996: mol_type = other RNA
atgcgcatcactgaaggcaccgtccggttcgacggatgtgaccgccattttgcagagaagtttggtgcacaccaggccgccgaaatggtgctggattttgccagtactaatacacatcccttcctttacgatacctaccagcttgcggcacacctcgggttacgcagaaaggccctgttcgaactcgtgaggcgaccaggacgccattatagaacactgcggatccccaagaggtcaggcggaagccgtaccctaagcgtgcctgacgaccggttgaaaaccgtgcagcggacggtactgcacacgattttgtgccactttccggcatccgcttatgctacagcttaccagcctggcgccacactcaggcagaatgcagcccctcattgtgggaagaagtacctactgaagctggacctggaggacttttttgggtctatcaggttcgatcaggtgtatggcgccgtgtttcacaccagaagattcccaaaacagattggcgcaatgctgactgctctgtgttgtaaagatgatgctctcccccagggagctccgacatctccacagttaagtaacctggtcctgaaatggttcgacgatactatgggggcctggtgccaacgcagaggtatcgcctacacgcgttattgcgacgacataacattctcagccgatagacctttgtacgacgcctatagaaaagctgttggcttactcgagcatcaagggttctccattaacgaagaaaagactcggttcgttactgcggcgggccgccaaaccgttaccggattgaccgtcaacgagaaggtgggggtgcccgctgattttaagagggcactgaggcagcaggtatactacgccctgaagtttggcgccgagccccctgagtatcggcgacttctcggtaaagtccaattcgtccttcagacagctccagagcacccatggttctgcgatgcgcgagaagagctcataaggcgtctgaaaggatga

SEQ ID NO: 9499 - RNA, 1065 nt, synthetic construct
  source 1..1065: mol_type = other RNA
atgcacttcgagggggaaaaaatcgttttctccgccgcagacatcgagcgggctaagcgtaccggcattgaaaatatgctcctcagggctgaccaatactgctccgccttctctatcccatatatctgtgatttgtttgagctgtctacggaactcgggcttcccgctgaggatctggcccgaattggttcaagagcttctatgaagtaccgctgttattacattaagaccggctcaggcaagttcaggaagatcgaggagccggacttcgagctgagaatagtgcagaatcggattctgaaccatattctccgatactatcggatctcggagcacgcggcagcgtatcacaaaggcgccagcgtcaagaacaatgccatgccacatgtcggtaaaaggtacttgctgaaaatggacctctcagacttttttggtcatatcacagattcaatgctgatggataccgtgtttagcgaacagcacttcccctaccctgtggggcgcaccttaactgatatctgcacccgtaacggatctgtgcctcaaggggcctgcacttcccctgcaatatctaacattgtcatgaaaggctttgacgatcgaatgggccgttggtgcagttatcggggaattagttacacacgatatagtgacgaccttacttttagttccgatgaacctttataccccgcctacagaaaggctcgccgcatgctggaagaaatgggattcgggattaacgacgacaagacacactttataacaagcgccggaaggcagcaggtaacgggactggtggtgaatgacaagctgggaatcccagcggattacagacggcggctcaggcaggagatctattacgtattgaaattcggggctagggatgcatttagcagaagcgatgattgtcgcaatgagcccggcatgaccctacggagatatctgcttaggctgatcggcaaaactgaatatgttcttcagatccgcaacgacgacaggttcttcagagaggccaagataaaattggccgaagagattgctaagctaagctccgcagaggaatga

SEQ ID NO: 9500 - RNA, 1059 nt, synthetic construct
  source 1..1059: mol_type = other RNA
atgtatacccagaacgggcgcatcacatttgagaagagcgatctgaagttcctacagaaacatggactgtccaaggcagtggtaatttatgaggaacactgtgcccactctaacctccccttcgttactgatcatcatcaattggcaggattgctagggtgctacactaacgtactgttccagacccttagaacagtggatgagttgtattacgacgcagccatcccaaaagctaccggcggctacaggaccttacaggtccctactcaccctcttaggtacatgcagacagttatcctccacagcattctggacaaactgccagtgtcaccttatgccacggcataccacaagggagccagaatcactgataatgctaagccccatcagcacaagaaatacctgctgaaaatggacctccaggacttcttcagcagcataacatttgaacaggtcctctccggcgtttttcacaagggacggtttcctacccatgtcggcgtatccttgacggcactctgctgtaaaaacggcgtgttaccgcagggtgcccctacatcaccagccctttcaaacctggtcatgagtcatttcgatggtgttatgggggaatggtgctgtagacaagggttttcgtatacacgttattgcgacgacatcaccgtgagtggcaatcgacccctgtatgctgcctaccaaaaggccaaaggacttttggaaaatatggggttcgaactgaatgagaaaaagaccagattcgtgactgcagctcaccggcagacggtcaccggactgactgtgaatcaggggattggcgtgacagctgattataagcgcaacctgcggcaagctgtgtattacaccgtgaaatttggcgccgcggatcacataaggcagcgcaacctcactcggtttatggttaatggcgtgccacagaccgagcgatacctcgcccatttagagggtcaaattcgttacgtcctgtccgtggagcccgacaatagggctatggtcaagctgcttgcggacctgtctgcgtctccgccctacatgggttga

SEQ ID NO: 9501 - RNA, 1014 nt, synthetic construct
  source 1..1014: mol_type = other RNA
atgattattaacaagaagtacgagtctatcgtctttgatgaaagtgacatgaatttcgtgtctaagttcggcattcaggaagccactgatatggtgttcgactacctgtcgactaacaaaacaccgtttatatacgacgtttttcagttagcagactatctgcaaatcaaactacccaagctgttcaggttggtcaataaggccgatgaactttattccaacgtcgtgatcaagaaacggaataagagcgatagaattctgtcagtacccgactattatctcggtagcgttcagaagaggatcaaccgcaaaattctcagtaaaatcgacataagcaagtatgcgaccgcttattataagggctctaatctgctgaaaaatgtggagaatcattgtgggaagaagaacatcctgaagatggacattacagactttttctctagcataacctttggcatggtgctgtcaagttgttttaacacctctagatttcctcggaatatcggttacatgttaactaccctttgttgtaaagacgactgcctgcctcaaggaacgtccacgagcccagcaatttcaaacatcgtcatgaagaatttcgatgacattctgggcaattggtgcgagaagcgcggaatctcctacacaaggtattgcgatgatctcaccttctcctccgatgaggatttgtaccctgtgtacgtcaaggccaagtccatgctgaacgatatggggtttcaggtgaacgagaaaaagacacacttcatcaaaaactccaaccgacaagaagttactggaattgttgtgaatgaccatccacagctctctaaagactatagacggaaattgcgtcaggagctttacttcgtattcaagtacgggataaaagatgcccttgagcacatcaacaagaaagaagtgtcgaacaaagagatttacagctacgcttgccagctatcaagtaaaatcagctacgtactctttatcaatcccaatgataaggaattcgtgtga

SEQ ID NO: 9502 - RNA, 1062 nt, synthetic construct
  source 1..1062: mol_type = other RNA
atgaaggtggtgaacgagacagtggagttctttgaatgcgacatgaacatggtgagtaaaattggattgatggaggcagttgagatggttctcgacttttcctcaaccaataccgtgcctttcatttatgatacgtaccagctgtctgatatgtttgctattgggcggaaaaatctgttctccctgatccgaaattgcgaccagaactacaagcagattaacatcaagaagtccaatggtgatattagggttctatattctcccaggactcgactgaaagcaatccagaacatcatcctgaaggagatcctgtacaaaataccagtctcaaaatacgcgacggcctatcataagggtgcgaagcttatcgataacgccaagcctcactgtgggaaaaaatacctccttaagatggatctgaggcattttttcgactctattactttcacccaagtgtatagctccgtgtttaacacatgtaggtaccccaaacagattggcacaatccttactaccctctgctgtcaccaggatgtcttgccacagggagcccctacctcacccgcactgtctaacatagtcatgaagagctttgacgactacttcggcaaatggtgcgaaaagagaaactttagctacactcgctattgtgatgatatcactgtaagcggagattccagtgtgtacccggcctatctcaaggctgaggccctgctggaaaatatggggttcgagatcaatcagaacaagacccacttcataacaaatacaaacagacaggaagtaaccggacttgtcgtgaatgaacgcgctcgggttagtagcgactatagacggaaattacgccaagagatacactatgtcacaaagtatggcatcctggacgctttaaaacatctcaaagactctggctatgagagcgtatactcatactatagttcgctaatgggccgtattaactacgtgctgcaaattgaaccagaaaatcagcaaatgttgaatctcaaggccgacctggaaaagtccttggagaagtacgagtggcagaccatgttacagtga

SEQ ID NO: 9503 - RNA, 1062 nt, synthetic construct
  source 1..1062: mol_type = other RNA
atgcttataaaaggacagtctgtgacctttcacgccgatgatatgcattttgtgaagaagttcggtatcatggaagcaactaacatggtcctcgattttgcttcgacttcaaacttgccatttgtatatgacacttaccaactggcatctctgctccagttgcgtagatcctccatgtttaaaattgtgcgaaagtgtaactcctattatagggacgtggagcttaagaaaaataatggcaaagtccggtacatctcagcccctcttgacattctaaagtggacacagaagtgcatactgacaaacattcttgagaagtaccccgtcagcaagtttgccacagcataccggaagggactgaaactcgttgacaacgctaaggtgcacacttctaagaaatatatcctgaagatggacctgaaggacttcttcccaagcatcggcttcgaacaagtatattcctgtgtgttcaataccaggcacttcccgaaacagattggagttatactcacgagcttttgctgcagaaatggggttttgccacaaggcgcgcctaccagtcccgctattagtaacattgtgatgcggaatttcgatgatattttcggagcatggtgtgagaagcagggttttagttacactcgatattgtgacgacatcaccgtgtcaggtaacaaaagcctatatgtggcctttgtgaaggccaaggcaatgttggagaagatgggctacgaaatcaataccaaaaaaacgcacttcctgacaaatgcctcctgccagacagtcaccgggctgaccgtgaacgagagagctaggatccctagcgattaccgcagaaatctgcgtcaggaaatctattatgcccagaaattcggggttaaagatgcggtcatgcgggccaatcgcgaagagtacatagtagatggcaaggtggacgaacataggtacatctctcatctcgaagggaaagtccaatacattctgcagatcgagcccgagaacgagtacttcaaaaaggctttaaaaacagttcagaacctgcgccccttaggcaacttttga

SEQ ID NO: 9504 - RNA, 1101 nt, synthetic construct
  source 1..1101: mol_type = other RNA
atgatcattagaaatggcacaatcgagtttgggcacggggatatgcattttgtggagaaagtgggcctttctgaggcggtggagatggtcctcgatttcaaaagtcagaataagataccctttgtatacgacacctatcagctagcggacctgctgatgatcagaagaaaggacttgttcagcctgagcaagaatgccgacagtttttacacctatgccactattaagaaacgtgatggatcgaagaggatcttatgtgtacctgacgcatatttgaaatctgtgcagcggacgattctttccacaattctctccaaacttccggtttccgagtacgctacggcttataggaagggctgcaagctgcagtctaatgcccagccccattgtggtaaaaagtacctgctgaagatggacatctgcaacttcttcgacaatatcacctttatgaaggtctactctagtgtcttcaacactcgccattttccaaagcaagtgggagtgatgctgactcaactctgctgtcggaatgatgtcctaccccagggtgctcctacaagcccagccatttccaaccttgttatgaaaagtttcgacgacacttttggagcatggtgtcttcgacacaacctgagctatacccggtattgcgatgatatcaccgttagcggcgatatacctctgcacaatgtttatctgaaggcctctgaaatgttgcacaagatggggtttgaaatcaacaagcgaaaaactcacttcgtaaagtacacagaccggcagtcagtcacagggttaaccgtgaatgaatgcattagggtcgactcaaaatataagaagcaactcaggcaggatatctactacactctcaaattcgatgtggtgtccgcaatgaaacgctcactgtccttcgaatttgacgaaaacgaggacattgatagcgctgtgataaaatacttaaacagcctgatcggcaagacagcctatgtgctgcagatagaaccagacaacgagtacttcaaaaagctgctgaagaaattgaccgacctcctcgatgagacgaagttggatattagacgctcaaaatactttaccttctactga

SEQ ID NO: 9505 - RNA, 1098 nt, synthetic construct
  source 1..1098: mol_type = other RNA
atgtatattgaagataacatcgtcaagttcgagtattgcgatatgtcttttctgaagaaattcggagtggatgtcgctgcggatatgtaccttgacttcaagagtgttaacaagatccccttcatttacgatacttatcagctggccgacttctttggcattagacggacaaacctctttaaagtgacgaagaatatcgacaaattctactacacaactaccattaagaagcgcagcggcggggtgcgcaagttgaatgtgcccgacgacacgctgaagtttatgcagaggtgtatactcaaaagaatcctgagtgagtttaaggtgtctaaatacgctacagcgtataagaagggggccacactcaaagataacgctagagtgcactcagcaaagaaatacatcctgaagttggacctgaaggatttcttcgacagtatcaccttcatgcaagtctatgacgccgcattttcgacccggtactttccaaagcaaataggggtcatgttgactaccctatgcacaaggcaggacgtcctaccccagggaacacctacatctccagttctgagcaaccttgtaatgaaaaatttcgacgattctttcggcgcctggtgcgaagagcggggtttctcctatactcgttactgtgatgatataactgtctccagcgataatgagctgaaaggagtgtactcaaaatgtaagttcatgctgaccaaaatgggctttgagattaacgagaaaaagactcggtttttaaccaatggctcaagacagaccgtgaccgggttaacggttaatagcagcgtaaaagtaccgtccccttataaaaaagagctgaggcaggctgtgtattacaccctcaagtttactgctgccgatgccctcaaacgagacaagaactttgaacgtaaaaccgaccttcctattgacgaagaagcattgcgataccttaactgcttaatcggtaaggttgcatatgttctccagattgaagaggacaacgtgtattttaagtccgccctgatcaaactggtgaatcgcaaggacgagctggagttcaatatcaagagggaaaacaattacaacttctga

SEQ ID NO: 9506 - RNA, 981 nt, synthetic construct
  source 1..981: mol_type = other RNA
atgattgaagacttttatagcgtgaattccaacaaactcccctttctaacggatcagcgccaactggctagtatgttaggcatcgagttgcggactctctacagtatccttaagtctatcaacgcaaattacacgacacataagtttgtgcaaaaaaatgggaaagtccggaccattaatgagccatccaccaagctgaagtcaatacagcgcttaatttacttccggatcctccagcatctgccagtttccaaatatgccaaggcttatcgtcccaggatcacgattaaacagaatgctctgccccacataggaaaaaagtatctcctgaagatggacatcaaagacttcttcccttctattactttcacacgagtctatggcgctgcctttaacaccaagttctttcccaagtatatcggcactctgctcacaacactgtgctgtaaggacgactgtctaccgcagggggcccctacctcacctgcacttagcaacctggttatgaaaaacttcgatgagtacctgggtaagtggtgcgaggaaaagggtattgcctacactaggtactgcgacgatctgaccttcagtagcgatatgccactctacggtgtgtaccttaaagcgaaatatatgctggaaaatatgggattcgacgtaaacgagaagaagaccaagttcatatcttccaaaaacaggcaaaccgtgacagggttaaccgtaaacaagaagctgaacatctcttcggtgtacaagcgagaacttagacaggaggtgtactatgtcttgaaatttggcgcaaagacagccattctcagagggggacacgaagattatataattggcggagaaactttgaaagtggactacctttaccacttgctgggcaaagtcaattatgttctgagcatcgagagagataataagtggtttcaggagagcaaagggtatttgactgatatgatcatcaagtactcatga

SEQ ID NO: 9507 - RNA, 1083 nt, synthetic construct
  source 1..1083: mol_type = other RNA
atgttgaataagaaggagatgcagaagatgaagataaccaaagggcacattagcttcgagcaatccgacatgcacttcgtagagaagtttggcatcagcgaggccttccggatggttggtgactatgtgagcgagagaaagactcctttcgtgtacgatacgtaccagctggcctatctgctaggcattggcagaaaagatctcttttccctggtcaaaacagttgataaccattaccgcccggtcaacatcctgaaaaagaacggtaacattaggacactgattatcccctccagtaaactgaagaggattcaaagtgttattgcagggcgcatcctgagctgttactccgtgtcagaatatgcttacgcttaccttaagagaaagacaatctacgacaatgcctccgtgcattgcggaaaaaagtacctcctgaagatggatatcacagattttttctcctcgatatgtttcgataggatctattctgcggtcttcaacaccaaatatttcccacggcaaattggggtcatgctcaccgctctcgtctgcaatgatgacgtgttaccccagggcgccccaactagcccagcaatctctaatatcgtgatggcatccttcgaccggcttatcggaacatggtgcaaagagcgtggggtgtcttataccagatattgtgacgacctaaccttttcaggaaacgtacctttatacggagtctttaagaagagcaagagtttgttggaagaaatgggctttgaagtaaacgaaaagaaaacccgcttcattacttcttcagacaggcagacggttactggtctgaccgtgaatgaaaaggtgtctgtcccttcagactacaaacggaaactccgacaggaggtgtattatgtgctgaaacacggcatagttaacactgtgctttttacagagaataaggagttcatctctgatgggcaggtagacgaggaaaaatactacctttcgatactgggacgagtgagttacgtgttgcagatcgagcccgacaataggttttttagcgaggcccgtaagcgcattatggaagatagatataaaacctga

SEQ ID NO: 9508 - RNA, 1050 nt, synthetic construct
  source 1..1050: mol_type = other RNA
atgcagatttttatcgacgacgtcacattcgatgcctgggacctgcactttgtggaggaatttggggtgttccgcgccacagagatggtgctggacttcttcgaacacaataggcaccctttcctgtatgatacctaccagctggctcacttcttacaagtggagcagaaacagctcttgacaatccttggacgatgtgatacgctgtatagaaaggtgaagctgcccaagaagaatggaggcgtcagaattatcagtgctccgctcagagatttgaagcagatgcaaaagatcatcctggaacacttcttgaagaaactccctgtgtccgagcacgccaccgcatataaggaaggtggaactataaggaaaaacgcgagcgtccattgcggcaaaaaatatcttctcaagctcgatattgaggatttttttgactgcatctcagccgaacgcgtatataaaagtgcctttcatacccagtactttccccagaagattggaaaaatcctgacacggctttgtaccaaaaacggctacttgccccaaggggcgcctacatctccaatgctgtccaacctggtgatgcggccctttgacatggtcatgggtaactggtgcaaaaaacacaacataggctacacccgctattgtgacgacataacgttctctgccgacgtgccattgtacgtggcttacgtaaaggccaagagcttactggaaaaaatggatttctgtctaaacgaggagaagactaagtttatcagatcaagcaataggcaggtagtgaccgggttaacagttaatgagtgcattcatgtgactgcagactataagcggaaactgcgtcaggaaattcattttgttctcaagttcggcctgaaagatgcacttctccataccactccaaatccattcgttactgaacaagctgtccataccgagcggtacttccagtccctaatggggcgaattcacttcgttctgcagatagagcctgagaacaggtactttcttgaagcagagcagaagctgaagggtatcaatcactga

SEQ ID NO: 9509 - RNA, 1245 nt, synthetic construct
  source 1..1245: mol_type = other RNA
atgccaaagtcagatactctcaggcggatagccaatcatttcatgatcctggattcccctcccctcaatcaaacaatcctgtactgcaaagggctcatttttggtcgcaccttacacatgaaaatagagggcagctgtgtcacattcgagccctgcgacgccgcttttgtgaaaaaattcggtcctctagaggctgccaacatggtgttggactaccacagcgtccatccaaatatgccgttcctgtacgatgccgaacagctggctggcttcttcgacatcagttgcggggagctgaatcacatcgtaaaccatattcagaaggaatacaagaaggcatttcttccaaaaaaagatgggacctatcgcagcctttatattccctctatcagactgcagttttgtctgggacctatcaaagacaagatcctctctcagctgcccgtgtcaaagttcgctactgcgtaccagaagggatcctctacgagaaaaaatgcagaacctcacatcggcaagaagaacctgttgaaactcgatatcaccgactttttcgggagtatctccttcgagcaggtgttatgcgctgcatttaatactcggtatgttagtaagcaggtgggctttctccttacctcattatgttgcaagaacgatgccctcccacaaggtagccctacatctcccgcacttagtaatattgttatgaggcgatttgacgatcaaattggacggtggtgcaaccaaaggcagattacctacacacggtactgtgatgacatgaccttttcgtctgaccgcccattgtatggcgtgtatcagaaggttaaaaaaatccttttcgagatgggcttcgagctgaacgaggcaaagacacactttatcagcaacgccgacagacaaacagtcactggcctggtggtgaacgaaaagctttcaattcccagctcctacaagcggaatctccgacaggaaatatattatactctgaagttcgggattgaggactccatcgtccatggaaaccgtctcaacttcctggaggatggccagcctattcgctgtccaacgtacatgacccacctaattggatccgtacagtacgtcctacagatagagccggaaaataggtggtttctgaacgccaaacagaagctgctggattatgcgcgtgcctattttagagctgaagggttgggagaagaatactacttgcatagaagccgactgagggagaaagacgagtga

SEQ ID NO: 9510 - RNA, 1002 nt, synthetic construct
  source 1..1002: mol_type = other RNA
atgccttgccggcgttacatcagggggaaggctccgccagacaacactcctaccaataagagaattacccctctgtttagcgttcgactgagattttatagggtgatcctctattgcaaaggactgtactccttccgcttgaagtattattctgcagctgtgattttcatgaacatcatagacagcaacgttgtgttcggcagcggagacgcggaatttgtgaagaagtttggtctatttgaggccgcccaaatggtgctcgattataaaagccgaaacaacctgccattcatatacgatacctatcagctggcagactttctgggcataaagcgcaaggagctcttctttatttcgaagaacaccgacaaatactacaacgcattcgagataaaaaagaaaaacgggaagccaaggcggctgtacgctcctgctagtaagctgaaggcctgccaagcagccattaaccgcctgattcttaaaaatctcccagtgtcagagtatgccgcggcctaccagaaaggctctcagatttcaaaaaatgccgcgccccacatcggcaagcgttaccttctgaaacttgatatcacggatttcttcgggtctatcagatttgaacaggtctacagtgccgcattcaatactcggtatttccccaaacagaccggtgtcatcttaacagagctgtgttgtttaaatgacgcattggtacagggtgctcccacaagtcccgccctctcaaacattgtaatgtacaatttcgacaactccatcggactatggtgcaaaaaaagaggaattgcctatactcgctactgtgatgatatgacgtttagctccgatcggccgttgtatggcgtctaccaaaaggtcaagaagatgttgtttgaaatgggctttgaactgaatgaggctaaaacacatttcatctcaaatgctgacaggcagactgtgacagggcttgttgtgaatgaaaagctctctatcccctcctcctactga

SEQ ID NO: 9511 - RNA, 1080 nt, synthetic construct
  source 1..1080: mol_type = other RNA
atgctcatcaaaaagaatcgcatcattttcgaacagtctgacatggcctttgtcgagaaatttggagtgctagatgcagccgaaatggtgatgaattataaaactgtctgcaccttgcccttcgtatatgacgcagaccagttagccgaattcctgaaaataggtcgcaaagacttttttgatctaatcaagaactgcgatacttgttaccggccaattagcctgaaaaagaagtcaggcacatacagacagatttacgctccaaacgatattctcaagagaatccagaaaaccattctcgacaagatactgagtaagctgcctatctcgcagtacgcgaaggcatacagaatgggcgggactcttatagacaatgccgcagcccacattggaaagcgatacgtgcttaagctggacatcaccgatttcttcggtagcatttcctttgaacaagtgtattctgctgcttttcatacgaagtatttccctaaacagattggggtactgcttacaatgctctgttgccgcaaagaagttttgccccaaggcgctcccacatcccctgctctgagcaatattgtcatgtgtcacttcgataactatatcgggtcatggtgcgaggcaagagccatagcctatacacgttattgtgacgatatgacctttagctctgaccggcccctgtttggagtgtaccagaaagtcaagaccatcctgggcgaaatggggttcgagttgaacgagaaaaaaacccattttatcctcaacaccagtaggcagtcagtgacgggaatcactgtgaacgagaagctgtccgtgccaatccattacaagaggaagctgcggcaagagatatattacacactcaagttcggactcgtggaacaaatcgttcgattaggtaaaactgagttcttcatggatgcgaggccgaacgttcagaaatactacaatcacctgttggggcagattggctttgtcctgcaaatcgagcctgaaaataactggtttcagaatgccatgatcaagcttaagagttcctctttcttacagggcgagatggagctgtggaggcggtga

SEQ ID NO: 9512 - RNA, 1065 nt, synthetic construct
  source 1..1065: mol_type = other RNA
atgaaaattgagaaagacaccgtgacatttgaagcgccagatgccgactttgtcaccaagtttgggattcaggcagccgccgacatggtgttggacttccactgctttcatccacaattacccttcctctacgatgctcggcagcttgctgcgtttctctctacatccaggcagaagcttctttattatgttcgccatactgcagctgcctatcaccccgtcacaatccccaaacgcaatggggacgtaaggatactctctgttccggacgacactttgcgacggtggcagcggaagatttgtagagagctgttggcgtatttgcctgtggcccctcaggctacagcctaccgtaagggcggggctattagtggcaatgcagccccacatgtgggcaagcgctacctgttaaaacttgacataagcgacttcttcgggagcatctgtttcgaacaagtccattcggccgcattccacacccgctacttttccagacaggtgggcttcctgttgacatccctgtgttgcaaagatggcgccctaccccaaggagcccctacatcacctgcacttagcaacttagtaatgaggaactttgatacctccatggcccggtggtgccagaggagaggtatcgtgtacactagatattgtgatgacctcaccttttcagctgatcgaccactgttcgctgtttattcaaaggcaaaaaacatgctggcagaaatgggattcgatctaaacgaggcaaaaactcactttatcacgaatgctggtcgtcagagcgtgaccgggctgactgtgaacgagaaggtcagtgtgcccgcgggttacaagcgctctctacgccaggaagtttactataccctgcggttcggcctcgccgatagcattctccggggaggacacgctaccctcctgacagacgatctgccggatacggagagataccgtcagcagctgctgggaaggatccaatacgtgctgcagatcgagccagaaaatcgatggttcagggaggccaagcaaaagctgctgagttgcgatgacagacctaaagtctga

SEQ ID NO: 9513 - RNA, 1068 nt, synthetic construct
  source 1..1068: mol_type = other RNA
atgatagtcaaggaaaacaccgttattttcgaggcctgcgatatggcattcgtgaaaaaatttggaatcgctcaggcaaccgaaatggtgctcgattataaatccgtgaatccactgccttttttgtacgacacataccaggcagctaaattcctaggcgtcggccgattaacactgtttcagtacgcaaaaaatccggaacaggggtacaagcttataacgcttaaaaagcggagtggcgacaaacggcgaatatacgctcctgacatcgtacttaagcacctgcaaaccggtattctgaggaagatcctcatttatttcccggtgagtccctacgcgactgcctactctaagaattgcactctgcgcaataatgcggccccccatgtaggaaagaagtacctgctgaagctggacatcaccgatttctttgggtccattagattcgaccaagtgtattctgctgcctttaacactcggtattttccaaagcagatcggggtgattcttacctcactgtgttgccgcgaagaagctctccctcagggggcaccaacctcacccgctctgtccaacctcgtcatgcgaaatttcgataactcactcggcaggtggtgtcagaagcgcgggatcgcctatactagatattgtgatgacatgacgtttagctcggataaaccactgtaccccgtctacgagaaggttaaaagtatgctgtatgatatgggcttcacattgaacgagaagaaaaccaggttcgtgacaagcgccggcaggcagtctgtcacaggactaaccgttaacgagaaagtggccgttagcagcgactataagagaaaactgcggcaggaaatttattacgctctgaaattcggtttggaggattccattcggtttgccaagagaacagagtttatgcgcgacggtgtgttagacgccgagagatacgcgcaacacctcatcggaaaggcaaattatgtgttgcaaatcgagcctgagaaccgttggttcagggaagccttagagcgtctccagtggactcttaagtgcttggaaatgcagggatga

SEQ ID NO: 9514 - RNA, 1029 nt, synthetic construct
  source 1..1029: mol_type = other RNA
atgcatatacagaacggtgccgtgacctttgagccacacgacatgtggttcgttaaacgggtaggttttgaggccgcatgcgagatggtgcttgactatgcaagtcagaacaagctgccattcctgtatgacacccaccaactcgctcactttctgcatattcccaggcggtacttgttcaggtggttccgagatatgagcagctgctacacccccatcgccttaactaagagatcaggaggcgttcggcacctgcatgtgccagtggaccccttaatgtgcgctcagcggaggattctgcaggatatagtgtctaggcttcccgtgtccccttatgcaaccgcatacgtcaagggaaagcgcttgactgataatgcggccccgcactgtgggcatagatatctgctgaaactcgatatcacagacttcttctccagcatccgttttgatcaggtgtactcggctgctttcaataccactcgcttccccaagctgattggggttatgctcacagctctttgttgttatgaagatgtgttaccgcaaggcgcacctacctcacctgccttgtctaatgtggtcatgagacggtttgacgatcgaatcggcgaatggtgcaagaaaagaggtatcgcttacactcgttactgtgacgacatgacattctcctcagataaacctctctttgccgtctaccaaaaagtgcgggggatgttggctgaaatgggactcagcctgaatgaaaagaagacacgatttgtgactcacgcctcccgccagagtgtcaccgggttgacggtaaacgagcgcgtggccgtcagttctgactacaaacgcgacctccgccagcaggtccattacgcccttaaatttggctatgcggatgccctggcgaagagaggcgacacgacatttgagaacggcgaccactacgcccaccatctaattggacgtgttagatatgtactgcagatcgagccacacaacacatggttcagggatgcactgcctaggctactgtggaagtga

SEQ ID NO: 9515 - RNA, 1185 nt, synthetic construct
  source 1..1185: mol_type = other RNA
atgattctgagatttgcttctgcgtgtattagagctatctgcactgccactgttcgtaggtttctggtgttcgagaaaggaggagtgtgtgttcggaagatcggagataccctgatcttcacatctagcgatatgccattcgtgaagcgcttcgggatcgaggaggccactaaaatggtgggggatttctacgccgaacatgacctgcccttcttatttgacacataccagctgtcctcggagcttggcctaaggaggaagactttattttcactaacgcgaaacccagaaaaactgtactaccccgtgaccctcagcaaaaagaacggggggactcggaaattgcatgtgcctttcaccgtcttgagaggtatccagcgccatattctgaacgccattctgaacaaactgcctgtgtccagttatgccaccgcatatcggcgcaagcaccagccattgcataacgccgctccccactgcggtaagcgatatctgctcaagatggacatccgtgacttttttggatcaatacgctttgatcaggtgtacagagcggccttccatacaagacactttcctgtgcagatcggcgcaatgcttaccagtctctgctgttatcaggagaggctgccccaaggtgcacctacatcccccgcactttccaatttagttatgaagcactttgatgagcagatgggagaatggtgtcagaaacagggaatcgcatatacaaggtatagcgacgacctgacattctcagccgacgtcccgctctatcacgtctacaaaaaggctaaggccttcttggagcacatgggcttcgagctgaacgacaagaagacccacttcataactaatgcttctcaacagagtgtaaccggcttggtagttaatggggatacaccaacggtgagccgtaaaacccggagagcactgcgccaggaactatactacgtgcaaaaatacggcctcggggacgcgataatgcgaggtaatcgaacggcctttattaaggatggccggccgctcgtctaccgctatctgaaccacctcgagggaagggtcggctacatgcttcatgtaatgggcgaagatgacgaactcaagaatgctctgcagatgctccacagacggaggcaaaatctgcttattgacgctggcgtcgtgttgtgcgatgatgactga

SEQ ID NO: 9516 - RNA, 1053 nt, synthetic construct
  source 1..1053: mol_type = other RNA
atgtacatccgcgagaatggcacaatttatttccacgaatgggatcggccctttgtggccaaattcggcgagcatacagctactcagatggtgctggcatttcaggcggagcaccgcgggcttccatttctgtacgatacccatcagcttgctgccttcttacagatgaaccggaagcggttgttcgacctcgttaagcaagtggacgagcactatgaccaggtgaaaatcgttcagaaaaatggcaagatgcgggtgttgcacgtgccagatggagcactgaaagcagtgcagagacagatacaacgtaacatcttgatgcattttctgccgtccccacacgccaccgcgtatattcgaagaagaaccttagtggacaacgcagcacctcacgtcgggaagaagtatctcctgaagcttgacatcacagactttttcgggtccattcagttcgcccaggtttaccggagtgccttctgcagcccttattttcccaagcaagtcggcgtgctactaacccggctctgctgttggcagggtgccttacctcaaggtgccccaaccagccccgctctgtcgaatctcgtcatgaagtcattcgatgtatacctgggagactggtgtcagaaacatgctatagcctatacgcgatactgcgatgacatgacgttttcagctgatcgcccgctgtacatggtgtaccagaaagtccagatcatgctcgaacacatgggcttcagcctgcatgaggataagacttgttttgtgactagggccagtcgtcaatgcgtaaccggccttactgtcaatgagacagtgtccgtctctagggtttacaagagacgcctccgacaagaattgtactacgctcagaaatttggactggccgactctctcaggcacactcagcgcggggggttcttcaccggtgatacacctgacgttgaaagatataggaaccatctgctgggacaggtaggatttgtgctgcaagtcgagcccgaaaacagatggttccagcacgcaaggaatgctctgaaaacaatgaggtga

SEQ ID NO: 9517 - RNA, 1086 nt, synthetic construct
  source 1..1086: mol_type = other RNA
atgattgtgaaaaatggtgctgtcgaattctccgatgtggatatgcggtttgtggaaaaattcggcatctttaaagccactgagatggttctggactttcataatctgaacaagacccccttcatctacgacacacatcagctcgcctccttcctgggatacggcagaagactgatgttcctggtaaccaaagatccggaatcacactatttccccactgaaatcccaaagcgcgacggaacagcccgcaagttgcttattccagacaccctcataatgtctatgcagcggcacatcctggacggaatcctaaaacatctcaaacccagcagatatgccactgcatacgcgcctaagaccaacattaagcagaatgcccagcctcacatcggtaagaaatatatccttaagaccgatatctccgatttcttcggcagtatccgatttgaacaagtttatagcgctgcatttaacacgcgtctgtttccaaagcagattggggtcatgctgaccgaattatgctgctataacgggtatctccctcagggagctcccacatcacccgcactctcaaacttagtcatgaagaacttcgacaacaatataggctactggtgtgagaaacacggcatttcctacacaaggtactgtgatgacatgactttcagcagcgataaaccactgtacaatgtgctgcagaagctgacgaaaatgttagatgaaatgggcttcgagcttaatgcgaaaaagaccaaatttgttacctcgagctctaggcaaagtgtgactggattgactgtgaatgagaggctctctgtcagccgcgactataagcggaacttgcgacaagagctgtactacgggtttaggtttgggttcgagggtgccgtgagtcgtacaaagcacccggagtttttcgatgacaataaccactttatgcatgagtcctattataactcactgctagggagagtacgctacattctttctatagaacccaacaatacagagtttagtgaggctctcgaccggctgaagcagtacgacatgtatcagtacagaaagttgcctaggattgtgtactga

SEQ ID NO: 9518 - RNA, 1068 nt, synthetic construct
  source 1..1068: mol_type = other RNA
atgaaaatcgtcaaaaaccacatcatgttcggagcagaggacacgaacttcattaaaaagtttggccttagtgaagccctggaaatggtggaaaattttcgcacattgaacaatttaccctttatctatgactccctgcaacttgctggctttctggacattcctctgggagtcatgttcagaatggtgaggaaggggtgcgattcgttgtaccacagccatacaatcaaaaagaaaaatggtggggaacgacagctatattcaccttactgcgtactgaaacgctgccagagtataatccttcggaatatcttgatgaagctgcccgtcagcaagtatgctactgcttacaaacccaaagtgagcatagtggacaatgccaatccccacattggcaagaagtatctcttaaagatggacatcaccgacttctttgattctatcagctttgaacaagtatacagtgcagcctttaataccagatacttcccaaaacacattggtgtgatcctgacaaatctgtgttgtaggtccgactctctgccacagggagccccaacttccccggcaatatccaacatagtcatgaagaacttcgacaacaacattggcaattggtgtgaggaacgtggaataagttataccaggtactgcgatgatttgacattctcatctgataaacctctctatcatctctacgtgaaagtcaagaagatgctttacaacatgaatttcgaagtgaacgagaacaaaacgaggttcgtgacctcagcctctcgacagtccgttaccgggattaccgtaaatcagaagctcactgtgtctcgggagtacaaaagagagctacggcagaagatctattacgttctgaagtttggcgtgaagtcaagcctcgtctacgagacaaatgggtttctcggggatgacgttaatgcaattgctactcatatgctgaacgtgctgatcggaaagattaactatctgctcagcgttgagaaaggcgagggtaacaactatttcaagaaggcgaagggcattttgatcttaatgcgcgatgagctggagtga

SEQ ID NO: 9519 - RNA, 1050 nt, synthetic construct
  source 1..1050: mol_type = other RNA
atgaaaataaaaggcaacaccgtttttttcgactcttccgacaagagcttcattaagaagtttggcttctctgccgccgcagacatggttatggattttagatcgcagaataagctgccattcatttatgatctccttcagttatcaggctttttgtctgtcgacttcaaggatacagtcaggttcttgaagaagggctgtgacaatgattatcgtacgcttactatcaagaagaggaatggaaacgatcggatcctaaacgtacctagccccaccctgaaacgctgccagaggattatctacaatgagatcctgaaaaaccttcctgtgtctaagtatgcgaaagcttataagaaaggagtccatctccaggataatgcaagcccccacgtcgggaaaaagtacatcctgaagatcgacataaccgacttctttggcagtatcacttttagggaggtgtacagcgctgcatttaatacaagatactttcctcgacacgtggggtacgtactgaccgtgctgtgttgcaaagatgaagctcttccgcagggagccccaacatcccctgccttatccaacctggttatgaaaggtttcgacgagaacataggcaaatggtgcgaggcccggggaatcagttataccagatattgcgacgatatgactttttcctctgacgagccactgtaccacgtctataaaaaggtgacctccttgctcgaagaggctgattttagcgtgaatcaaagcaaaaccaagttcattactaacgcaagtcggcagtcagtaaccgggctgactgtgaatcagaaggtgagtgttaaccgcgaatataagcggacactgcgtcaagaactgcattacctgtttctctacggtgcggagaattgtctcattaaaacggataacaagcaatacttcacaaatggtaaacccgacaagaaccgatacttgtcatcactggaggggcgcattgtgttcgtgctatccgtggaaaaagacaacccctacttcaagacagccctcgaaaagttaagagccctctattga

SEQ ID NO: 9520 - RNA, 1065 nt, synthetic construct
  source 1..1065: mol_type = other RNA
atgtttatcaacgggcagagtattaagtttcagaactctgacatggccttcgttaaaaagtttggcctgattgccgccacggaaatgatcctggactacaagaaaaagaactcagtcccctttatatacgatacctttcagctgagccagttcctggacatctcaaataaacaagtgtatagggccgtaaggaattgcgacaaaacatactcctacgtgaccattaagaagaagaatgggaatgatcggatgctgctggttccagggaaacagctcaaacgaatccagaggataattctccggagaattcttaacaagattccggtcagcgagtatgctactgcctacaagaagggggccaccttatactccaacgcatccccccacaccaataagaagtacctgctgaagttggatatcacggatttcttcaattcaatagacttcctgacagtgtaccggtttgtgttcatcaagtattaccctaagcagatttcgtatatgctaaccaagctatgctgtaagaatggattccttccacaaggtgctcctacaagtcctgcgctcagcaatctggtgttgaaatcttttgacgactatatcggtgaatggtgtaaaaaacgcggagtaacatacaccaggtattgcgatgatatgactttttctggagacagaccccttctcgatgtgtataagaaagtcaagaatgtcctggacaagaacggctttgacctgaacgagaataagacagttttcgtgtcaagtggtaaccgacaatccgtgactggattaaccgtcaacgaaaaagtgaacgtaagcaaagactataagcgcaaactcagacaggaaatctattatgcgttgaaattcggcttcgaggatgccatcatcaagagcgacaataaaaacttcattactgtggagaacggcgtcgagatagctgattccatgaagtaccaagactctcttatcggccgcgtgaattacgtgctccagattgaaccagataacgcttggtttcgtactaaagcaaaagagttggcagagaaagcagttttcgattga

SEQ ID NO: 9521 - RNA, 1062 nt, synthetic construct
  source 1..1062: mol_type = other RNA
atgtatattaaggatggtaccgtcaggtttgatgcatgtgacaaaaacttcgtgaagaagtttggtctaatcgaagcagctaatatggtactggacttttccagtacgcacaacatcccatttgtttatgatgtgtggcagctgtccgtgtacctcggtgaaaatcctaaatgcctctggccaatcgtcaagcatgtggatgatatgtataaggtctgctttgtgcccaaaaggaatggggggacaagacaactgtgttcccctaatagcagattgaaggccatacagcataacgtcctgaagaagttcctgaacaatatgcctgtcagcaaatacgccactgcttacatcaaggggaagactctctctgacaatgccaagctgcacacaaacaaaaagtatgttctgaagatggacatcagtgacttctttggctccattcacttcgataagatctacaattcagctttcaacaccacccttttccccaagcagatcggctacatgttaacttcactgtgttgccggaaggatgtgttaccgcaaggcgcaccaacctcgccagccttgagcaacattgtaatgaaaaggttcgacgactacataggcgattggtgtaaggggagaggcatctcatatacccggtattgcgacgatatgaccttcagctccaataaacctctgtataatatgtacgtgaaggtgaaaaaggtgcttgaggacatggggttcgagctgaacgataagaaaacacatttcatcactagcaactctcgacagagcgttacaggcctaactgtgaatcgcaaagtttctgtatctaaagattacaagcgagcactgcgtcaggaggtttattttgccctcaaattcggactcgctgaaagtattatgcacggagacaaaacggactttgtgaaaaataatgctcccgacaccgccgcgtactatcacaaccttcttggacgggtgtcatacgtcctccagattgagcccaacaacaactacttttgcgaggcgattcgcgaattgcgcacaggaaaaattttggcccagatatga

SEQ ID NO: 9522 - RNA, 1074 nt, synthetic construct
  source 1..1074: mol_type = other RNA
atgaaggaaaactcattcaccatatccttcgaacaacatgatatgccgttcctcaagaaatacgggctgttcaaggctatgaggaaggtccgaaaccacaataaaaagtacaaggtgcccttcatcgatgatacctatcagttggcccacgcactttctatcacccgtaagcagctctttgacctaagccgtaatgctaataagcattacaagcagatcctccttaagaagagaaaaggcggggttcgggtaattaacgctcctgatcccgagctgaaagacattcagagaagaatactacgccgaatcttatacaagagtgagatcagcaaatatgccactgcttacgcacctgataggaaattgaaggacaacgcgacgccacatgtgaatcacaaatacctgctgaaaatggatattaccgatttttttggcagcattacgtttctggaggtgataagctctgcattcaacagtaaaatctacccaactcagatcggtgctatgctgacagccttatgctgcaaagacgaggtactgcctcagggagcccccacatccccaatgctttccaacattgtcatgaaaaactttgacaatgccatcggcggctggtgtgagaagagagacattacctatacacgctattgtgacgacctcacattttctgcggacatacctctgtacaacgtgtatcagaaggttgaagatatgttgattcagcgcggattcgaagtgaatgagagtaaaaccaagttcatcactaattccgggcggcagacagtgaccggactcactgttaacgaaaaagtctcaattccaagagactataagaggcagttgcggcaggagatctattatgccctgaagtttggtctttctgagtcaattgtctacgggaacaaaactgaattcatggactcgaggggccccaattgctggcggtattaccaacacctgaagggaaagctcaaccacgtctttcaagtggaacccaataacatgtggttccgcgatgccgatgagaaactgtgggtggcatacatccaaccgaatatgaggtacccttattga

SEQ ID NO: 9523 - RNA, 1059 nt, synthetic construct
  source 1..1059: mol_type = other RNA
atgaaactcaacaaaatctccgtgtctttcgaacaccaggatttacacttcctgaagaaatatggcttttttaaggccgcctctatggctaaaaagcattacaagaaatacgacgtcccctttataacggacatataccaactgagtcacttgttccatgactttaacaaaaacgtgtttaagctgtccaagaatgcaaacaagcactacaagaaaaagattctgcggaagtcaaatggcggaatacgaatcttgcatgcaccagatgaaactcttaaattttatcagaggaggatcttagagaagatactgtacaagatccctatctcgaagtatgccacagcctatgtgccggggaaaaaactgcaggacaatgcctccccccacattaaacacaagtatctcctgaagatggacatcacggattttttcggttcaatcacttatatgcaggtgatttccactgcattcaattctaacatgtacccagtccagattggcgcgattcttaccagcctctgttgtaaagatgacgtgcttcctcaaggcgctcctaccagccccatgcttagtaacatcgtgatgaaaaatttcgatgacatcctcgggcattggtgcgaaaagcgtaatattacctatactcgctattgcgatgacctgaccttttcagcgaacatcccactataccacgtatacaacaaagtttctgaaatgctagagaagagagggtttgaggtaaatgaggctaaaacaaaattcatcagcaacactagttgtcagaaggtcacaggactgacagtcaacgagaaggtggctattcccaaggaatacaagcgccaattacggcaggaagtttactacgcactgaaattcggcctcaaggatagcattattaaagggaagaaaaaggagtacatcgagttcggagttcctgacattcatagatattacgatcatctgaatggtaagctcacctatgtgttgcagatcgaaccacagaatgagtggttcgagaacgcccacaagaagttgaaaaatctgtataccctgtgcacatga

SEQ ID NO: 9524 - RNA, 1077 nt, synthetic construct
  source 1..1077: mol_type = other RNA
atgaagctcaataaattcactgtatccttcgaacaacaggatatgcattttctgaaaaaacacggctttttcaaggcctccagtatggtgaaaaaacattataagcagcacaataccccgtttatatatgatacataccagctggcaaacgagcttcgcatttttcacaaggatgtttttgaactctctaagaatatccgaaagcactataagttgattatgctgcgcaaaaagaacgggggcctgagatacatttatagtcccgacgctaatctcaagcatgcacaactgcagatactgaagaacatcctcaacaacataaagatctctccttatgccacggcctacgtgaaaggcaaaaaccttaaggacaatgctaaaccacatactaaccacaaatacctactcaaaatggacattacggatttttttggtagcatcacctatttgcaggttctgtcgaccgccttcaataggaaaaggtttcctacccaaattggagcaatgttgtcatccctgtgttgcctgaatgacgtgcttccacagggagcgcccacatctcctgcgcttagtaacatcgtgatgaagaatttcgatgacattataggagcctggtgtaagaagcgtaatattacatacaccagatactgcgatgacttaactttcagcgccaacagcccactgtacaacgcttacatcaaagtcaagaacatgctggaggaacgggggttcgagttgaatgaagagaaaacaaagttcatcactaacagttctagccagagagtgaccgggttaactgtcaacgagaaagtctcaatccctaaggaatacaagaggcagctccggcaagaagtgtactatgcaatcaagtacggcctggctgacagcattgtaaaggggaataagagcgagtacatcaattatggtaagcccaacattcattcctacttttcccacctggagggcaagatcttctatgttctacagatcgaacccgacaatacctggttcgtgaaagccgctgagaaattaaacgatcggttctgctatgagataaaatcaacacagtgtacatga

SEQ ID NO: 9525 - RNA, 1059 nt, synthetic construct
  source 1..1059: mol_type = other RNA
atgagatttcacaatggtattctgtctttcgatgcttccgaccgatactttctggaaaaacacggattgcacaacacaataaaggccgctggaaagcattatgattcttacgagacaccctttatccgcgatacctaccagctagcgcaccaagccggcaccttccggaagactctgttcgagctctgcaagaataccagcaaacactataagaccatcaccctgaaaaaaaagtcagggggagtgcgatacatccacgcaccagatggcacactgaagtgcgcacagcagtacattctgcggaatattgtgaacaagatcgccgttagtccttacgcaacggcatatgtcaaggggaaaaggctgcatgacaacgccgctcctcatacaaaccacaggttcctgctgaagatggacatcacggatttttttggcagcattacttttctcgaagtgatttcaagcgcgttccctgccaagatgtatccagtacagataggggcaatgttgacaagtctttgttgccttaatgacgtgctgccacagggcgctccgacttctccgatgctctccaatattgtcatgaggtcgtttgatgacttcatcggctcttggtgccaaaaacgtggcgttacatatactcgctactgtgatgacctgacattctcaagcgacgcccccttatacggggtctatctcaaagttaaagaaacgttggagaaccgcggattcaccgtaaacgagcataagactaagttcatcaccaacgcttcctcacagagagtgactggtctaaccgtgaacgaaaaggtgtccatcccaaaggagtataaacagcagctgagacaggaagtgtactatgccgtcaagtttgggttagctaatagtatcctgttcggcaataaaaccgatttcgtgaagaacggtgtccccgaccctgtttcctattacgagcacttgttaggaaaacttcagtatgtgcttcaaatagagccccataatcaatggtttggtaaggccattaaagacctctgtgaccggtactacctcagcaaatga

SEQ ID NO: 9526 - RNA, 1053 nt, synthetic construct
  source 1..1053: mol_type = other RNA
atgaagaaagcttcaaacatcattcgcaacatacaagttttcgtcaagaaactcattggcatcttcgctaatagtcactcctccaaaaagcagaaatcaaacaaggggatttccaaggagctgcagtctctggccgatactctggggactacaaccggtgaactgttcgccctgtctaaaaaggcggattcatgttacaaggagatccggatcccaaagcggagtaatgggtttagaattatccatagtccaaatggaaagctcaagaaagtgcagaaaaaaatcttgcagagcataatcagcaaggccgagacatcgccatatgccatggcgtacaaaaaaggcaagaacctgaaggacaatgccgaccctcacatcaaccacctgtatttactcaaaatggacatcagcgatttcttcagctctatcaccttccatcaagtccttagttctgcctttcccagcacactcttccctacacaatgcggcgttattttaaccagcctatgtaccaaagatggcgtgcttcctcagggagctccgacgagtcctgctctttccaatctcgtgatgaaatcctttgacgagcatattggcttctggtgcaatgaacgcggtattgtgtacaccaggtattgtgacgatctgacattttctgcagattaccccttggtggtcctgtcttataagattgaggatatgctaaaccgatggggttttcaggtcaacaagaagaagaccaagtacatcttcttttcgtcccgtcagactgttactgggttgtgcgtgaataaaaaagtaagcattccaagcgactataaaaagactctgaggcaggacgtatactacgccctgaaattcggactcgaggattcaatgatacacggaaaaaagaacgacttctttgagaacggcaagtgggacacggcaagatataagtgccacttaatcggaaaggtgaattacatactgcagatagaaccggaaaataagtggtttcaagcagcaaaggaaaacctttccaaatcatttgacccccccttgaactcctga

SEQ ID NO: 9527 - RNA, 1068 nt, synthetic construct
  source 1..1068: mol_type = other RNA
atgatggtgaaacggttcatcacacgcttcgaaaaacaggacatgcatttcgtcgccaagcacggatttttcagggctgctcggatggtgcgcgctcacaagaaaaagcataatgccccattcatcgccgatacctatcaactcgcgcacgaattgggcgtaagacggagggaattgtttggccttacaaggcaccctgagtaccattatcggatactgactcttcgtaaacgcaatggtgggttaagggtcctgcacgctcctctctatcagatgaagcaggtacagcaacatatcctgaagcgcattctgccgcacctgcccgtcagtccctacgctactgcctacgtgcaggggaaggccctagccgataatgcagctccacacgtgggccacaagtacctgcttaaaatggacataacagactttttcggttccattacctatctccaggtgctgtctactgctttcccatccacattctaccccccccagattggagcgatgctgacggatctctgttgctacaaggaagccctcccacaaggggcccctacctcaccaacgttgtctaatatcgttatgtgtcgattcgacaacgcaattggaggttggtgcaaaaaacgcgggattgcctataccagatattgcgatgatcttaccttcagcgccgatacacctctgtaccatgtctatgagaaggtgaaagacaaactggagggcatggggtttgctgtcaacgagcggaaaacccattttgtgactgcagcctcgagacaaaccgtgactggcttaacagtaaatgaaaaggtggcaatcccggcagactataagcgtcagctaaggcaggaggtttactacgcgatccggtttggcctcgcagacagcatcaatcagggaggaaagccctttagaaccattggcaataaccctgatgttaggagatattacaaccacctgaacggtaagctgaactacgttttgcaggtggagccccataaccgatggtttgcctgtgcaaaggaggacttaagacgacagtttgaagacgagatatgccgttggtga

SEQ ID NO: 9528 - RNA, 1086 nt, synthetic construct
  source 1..1086: mol_type = other RNA
atgatcataaacgattggtccgtaaggttcgaaaatgcggatgcacacttcgtggaaaagtatggcttcttccatgcttgtcataaagtgcggcaacatgtggagaaatatgatacaccatttgtgcaggacactcaccagctcgccgcaacattggcccttcgtcataggcaatttttcagattacttagagaagcagacgctcaatacgaacgggttgaaattcccaagaaaaacggcggggttagagtgctgtatgcccccaatccactgcttaagagggtccagtttttgattttgaggctgtttctggatggaatgcccatctccaggttcgcaacagcctactgcaagggtaaatcgctgagggataacgcatctccacatactggccacacatatctgctgaagatggacattactgacttctttgatagtataaccttccctcagatcgtaggcactgccttcccgaaggacatgtatccctctcacatccgagcgatgctgactgccctgtgttgcagaaacgagcagcttcctcaaggggctcccaccagtccggctatctcaaatctggtgatgcgccgctttgacgacgttcttggagagtggtgcgagaagcacgatatagcttacacccggtactgtgatgatttaaccttttccgctaataaaccactctttgccgtgcaccagaaagctaccgctatgctcgagggaatgggtttcaccgtgaacgaggccaagacgcgattcgtcaagaataccagccgtcaggccgtcaccggcttaactgtcaacgagaaagtgtcaatctctgcagagtacaaacgagccctgcggcaggagctccactatgccatcaaatttgggattcgcgacagcctggtaaaggggctcaagacagcgtttctaacaaatggacagcctgacaccgaacggtactaccgccacctgagaggcaagattaactatgtcctcagcgtggaacctcagaatacgtggttcgccgacgcattgaaacgcctagaagttgtctatcattgggaggtgtacgagtacgtgagatacggtaagcggtga

SEQ ID NO: 9529 - RNA, 1044 nt, synthetic construct
  source 1..1044: mol_type = other RNA
atgatcgttaggaaagatggggttgtcttaaaaaaggaggacgacaattatatcaagaagttcgggttgatgaaagctgccgaaattgcaattgaatacaaacagacccacaaaacccctttcattcacgacctgtttcaactggccgcttttataggccccggcaagagatcattctttaagctgctgaaaaatgtgaacaacgagtactcttttttcgagatcaaaaagaagaacggtgggtttcgaaaaatatacgctccttcccctgagctatgcagggctcaacgtgttatactgaggggcatcctgagctgctatgacgtgtccccctacgcaagcgcatatattgagggcaaagggttgatcagcaatgcccagccgcacacaaacaagaaatacatccttaagatggacattactgatttcttcggttctatttcattcgagcaggtgatttctacggtattcaacaagaactactttccctccgcggtgggctatgccctcactaccctctgctgttataaaggctatctggttcaaggagcccctacctcccccatgatcagcaatctggtgctgaaacatttcgacgatgtgatgggagtgtggtgtgagaagcgcggaatctcttatagtcggtactgtgatgacataactttttccgcaaatgaaccattgttttgcgcctacagcaaagccaaggccttccttagtgagatgggattcgaaattaacaagaagaagacccgatttgtatcacatacatctcagcagaatgtgacagggcttgtcgtcaatgaaaaggtgtcagtgccaaaagagtataagagagatctccggcagaagatctactactttctaaagttcgataagaaggacacagctttcaaacagagcggtcgggaatattacagttacatcaactatcttctcggacgcgcgaactacgtcttatcgattgagccaaacgataaatttctgaaggagtccatcctggtcctcagagaaaaaagtgacgtagaatattggaatgagtga

SEQ ID NO: 9530 - RNA, 987 nt, synthetic construct
  source 1..987: mol_type = other RNA
atgttctaccgaaaataccactcttgtatatttaagggctacattatgaacgacttttcactgaccgaaattttcaatatgcgcgaaaaagagatctactacgtctcaaatcacatcagcaagcactacaagagggtggagatacctaaaaagacaaaaggggtacggatcctgtacattcccagcaaaaagttgatctacatgcagagaattatcctgaatgctttcctttctgagtacaagatttccgagtgtgcaaccgcctaccacaagggatcgactttagtcagtaatgccctgccacatcgcaacaaaaaatacgtgctgaagctggacatcgaggacttctttggatcaatcacttatgggcgagtgtacaagatgttcttcaaacattttccagtcaagtacgccaaactttttaccgaactctgttgctataacgataaattggttcagggtgctcccacatccccggccatcagtaacatcattatgctagatttcgataacagagtggaaagctactgcaaggaaaataacatttcctacacaaggtattgcgacgacattacgctctctgcggatttttcccttgataggacttatcatcgtattaaaaaggagctgcaaaaggctggcttcgaattaaacaaacgcaagacccattttgtgaaaaacacccaccagcaaaaaatcactggtgttgtagtgaatgaaaagatccaggtgcccatcgagtacagaaagaagctgcggcaggaactatattatctctataagttcggagccaataacgttatcctcaagaacaactatacagactatataagcaacgggaacaccctcgacgtgaagtatatcaatagtctgctgggccggatcaattatgtcttgcaaattgatcctgacaataatgagtttgcaaaggagaaagagaaactgtgctcttatgtccagcagataaagattcagaaaatattctga

SEQ ID NO: 9531 - RNA, 915 nt, synthetic construct
  source 1..915: mol_type = other RNA
atgctggaatctacttttaatatgagcaaacgcgaactgtactacgtcagcaataacataggcaagcactacaagaagatcatcatcaagaaaaagtccggagagaacagaacgttgtatgccccggacaaaaagttgaagtacattcaccggataattctcaaagaattcctgtccgattataaaatctctgcctgcgccaccgcttatcataaaggcgcacaacttgttgataacgcactcccccacatcaataagaagtacctcttgaaacttgacattaaggatttcttcccctcgataatgtttggtcgggtctacaagctcttttattccaaatttccagaagagtatgcaaaactgttcgccgaactttgctgttacgatgactgcttagttcaaggggcgcctacctcaccagccgtaagtaatatcgtcatgttaaacttcgacaatgaactcgaggcttggtgtaagagcaatttcatcagttatacaaggtactgtgacgatattactttgagctcagatgagcccctggtgtccgcttatcattatgtgaagaaactgctgaacaagaatggattcgaggtgaataagaagaaaacaaggttcatcaaacacactcatgggcagtatgtgaccgggattgtggtgaacgaacacctgcaggtaacacgagagtaccggagaaagctgcgtcaggacctatactacctttacaaatttggtgccagagacgtgatcctgaaaaataagctggatgactacatcttaggcaagaccacactgaacgctaagtatatgcagtctctcatgggaaggattaactttgtgctgcaggttgaccctgataacaaggagtttaaagaggagaaaaccaagctaatcaactatatgaacatccgcatttga

SEQ ID NO: 9532 - RNA, 969 nt, synthetic construct
  source 1..969: mol_type = other RNA
atgtggaagtacatgaaccaggagatgtgcaatcagtttctgctctcattacatctcattgatggcgatttgtcagatcaggagaaaatcaagctgctttacaccatttccaacacaattgagaaccaatacgagatcatcaagatcaagaagaactcagggaaactgcgtactatttactgcccccaccccctgcttaagtctatacagaggaaaattctccaccagattctgaatcacaaatctatatccagttacgccaaagcatatcatccgcatattggcctaaaagaaaatgcactcccccacgttcaccagaaaagaatcttaaagctggacatccaggatttcttcaatcacatccagttcataaacgtgtacgaaagttgttttagcctggcgtattttcctaagccaattggaatgctgctgacccaattgtgcacatatcacgatgacctgcctcaaggtgctcctacctccgcttatataagtaatctcgtgatgaaggacttcgacgaggagatcggggactggtgtagccagcgcaatatatcctatacacggtattctgacgatatgacgttttccggagatttgatcccagccgacgtgatcagaaaggtgaaacagtacctcaaccccctcggattaaagcttaattaccagaagatccacgtcattaaccattctcagcaacagaacgtcactggtatcgtggtaaatgagaagatccaagtcccacgactatataggaggaaaatccggcagaccatgcattatatcgaagcctacgggttgcaaagccatctggagaaaattggctatcaaaagagccctgaacgctacctgaaccacatatacggccaggtgctgtatattctgcagattaacgcccaggacaaagaatttcagatctacaaggacaaacttaaggaatacgagaattcgtatactttcagcgtttga

SEQ ID NO: 9533 - RNA, 948 nt, synthetic construct
  source 1..948: mol_type = other RNA
atgtggaaatacatggatcagaaccagagccaagaatttctactctcactccacttgctccacaaccagctgagcgataaggagaaagtgaagatgctgtattccatttctaacagtatcgaagagaattacaacatcatcaagatcaagaagaggaatggcagccttcgcacgatttaccagccccatactaatctgaagttaatccagcgacagattctgaaaactatcctgaataaccgcagtgtgtctacatacgccaaagcttaccacaagaatattggcctgaaagacaacgcttatccccatgtacaccagaaaagaatcttgaaactggacattaaagacttctttgagcatatccagtttatcgatgtttacaacgcctgtttctcgctagcctattttccgcagtccattggtcaccttttaacccagctgtgcacctatcatggctaccttcctcagggggcaccaacatctgcctatatcagtaacctggttatgaaggaatttgacgagcagattggcgaatggtgtgagaataagcacatctgctacaccagatactccgacgacatgacattctccggagatttcaatcccagagaggtgatacagcgggtcaggaaggctctgtatcctttggggttagagattaataaccagaaaattcacgtgatcggcaatggacagcaacaaaacgtaaccgggctggttgtgaatcaaaaagtccagacttcaagccggtatcgtaaaaaggtgaggcaagcgatatactacatgaagaagtatggattggaatcccatctttctgcaatacaatatcagcagagcccacaaaactatctgcaccatctctacggtcaggtccagtacatactgcagattaaccctctcgatcaagaattccagtcatatcaggagtacctcaaaaagatcaagtga

SEQ ID NO: 9534 - RNA, 954 nt, synthetic construct
  source 1..954: mol_type = other RNA
atgattatacacactaaagaggattgcaacaatttcctgctttccctgaatctgatcaataagaacatatccgatagcgagaaactacggctcctgtataccttgactaatcctatcgaaaagaactacaagatctacaagattaggaagaagaatggtcagttccggcagatttacattcctaacaacctcttgaaaagtatccaacgcaaaatcttgaagaatatcctcaacaacaagaagatttccatatacgccaaagcctacaaaaaaggcgtgtgcttaaaagataacgcgtacccacacctgaataagaagattatactgaagctggatatcatcaacttctttgacaacattgagtactatgacatttacagaacctgcttttcaaaagaatactttcctccatctgttggtcatctgctgactaatctctgtacatatgagtcgagacttccacagggggcacccacaagcgcttacataagtaatctggtgcttaaggagtttgatgaggaaatcggacattggtgtgacgaacacaatatatcatacacccgctattccgacgacatgaccttttctggcgatttcaatccccaagagatcattaaaaaagtgcgacactacttgaactacctgaacctaaagctgaataacaagaaaatcaaggtgatcagtaactctaaacagcagcgtgtaacaggcctcgttgtcaataaaaaaatccaagtccccaagaagtatcggtataaaatcaggcaggaggtgtactatattaagaagtacggactcctctcacacctccagaaaatcaactatgaagacaaaccgctgcattatttaaatagcttacttgggaggcttaattatctgctgtctattaacagcaacatcgagttcattaagtataaggaatacctaacgaagctgagaaagacatatttgtga

SEQ ID NO: 9535 - RNA, 942 nt, synthetic construct
  source 1..942: mol_type = other RNA
atgataaaccacaccaaagaacagtccaaagagtttttgctgagcctcaatctcatcaactcaaaagatgtgctgaaaaagctttactccataagcaataggattgagtccaattacaaggtttacaagattcgtaagcataatggtaagtaccgcacaatctattctcccaacacactgctgaaaagcattcaaagaaatatcctgaagaacatactgaacaacaagaaaatcagtaagtacgctaaagcctatcacaagaatatcagtctgaaagacaatgcaatgcctcatttgaacaaaaaaatcgtgctgaagctagacatcatcgatttctttgagaatatcgaatacccaactatttaccggtattgtttcaatgagatctatttcccaaagtcagtgggccaccttttaactaccctttgcacttatgagtccagactcccccagggagccccgacatcatcgtatattagtaacctggttatgaacgatttcgacaatacgataggcgaatattgcgaacagaataacatcagttacacacgatattctgacgatatgaccttctctggggactttaatccctctaagttaatcactattgtgaggagagagttgtacaagctcggattgaagattaacaacaagaagatccacgtcataaataactcccagcagcaaaatgtaaccggcatcatcgtcaacaaaaaaatacaggtcagctccagctatcggaacaaaatccgccagatcatttactacattaagaagtatgggcttaaggatcatctaaacaggattaactaccaagaaagcccttcaacctatattaatagcctctacggtaaaaccctgtatgtgctctctattgacaaaacgaacaaggagtttatcaattacaaggagtacctgaaagaactgaaaaaggcgatttga

SEQ ID NO: 9536 - RNA, 957 nt, synthetic construct
  source 1..957: mol_type = other RNA
atgtggaaatatatcggcactaaagagtgtaatgattttctcctgagtttgcacttgattgactgtctagaccagagaaagtacatcaaaacgatttacagcatttccaacaatatcgaaaagaactacaagatctacaagatcaagaagtcaaatgggggatacaggactatctatgaaccaaatcccctcctgaagcagatccagaagcggatcctgacctcgattctgaatcataaagctatctctcgatatgccaaagcctaccacaaaggcacccaattaaaggacaatgcatttcctcatgtaaacaagaacatgatgcttaaactggatatcaagaacttctttgagacgatcacttttctggacatttataactcttgcttctcaatcgaatactttccaaaaagtgtgggcatgattttaacatacttgtgcacctatgacaatcacttgacacagggcagtcctacttccccctatataagcaacctcgttatgcaggagttcgacgaggaacttggttcttggtgtgatctgatgggcatatcatatacccgctactcagatgatatgacctttagcggacagttcaacccgcgtaagattatatccaaggttaggaaaatgctgtatagactagggatggagctgaatgactccaaaacacatgtggtctataagagctctagccaaaaagtgacaggtgtagtcgtgaacgaaaagatgcaggtgagcaaacggtatcgcaacaaaatcaggcaggagatttactacattaaaaagttcgggctgaatagtcacctcaagaaatgcaacatagacattaactccataacctacgtcaatattctgtacggaaagattctctacgtgcttcaaatcaacgagacagataaggagttcataaagtataagcagttcatcaaggatcttaaaggaaatatcgggtga

SEQ ID NO: 9537 - RNA, 954 nt, synthetic construct
  source 1..954: mol_type = other RNA
atgtggaaatacattggcacaaaagagtgtaatgattttctgttgagcctgaacctgttcaattgcaaagacgagaatcactacataaaaaccctctattccatcagtaataacattgagaacaactaccgcatatacaagattaaaaagcggaacgggaaatatagaaccatctatgaacccaaccctttgctgaagcatatacagaaacagatcctcataaacatcctcaacaataaaacgatctccgaatatgctaaagcgtatcataagggaatttcactgaaggataacgcgaatcctcatattaacaaggacataattctgaagcttgacatcaaagatttcttcgagaacattagcttcctcaacatttacaatagctgcttccagattgaatattttccaaagtctgttggcatgctgctaacgacactgtgtacttacgatgatcacctcacacagggatctccaacttctgcctacatttccaatttggtaatgaaggactttgacgaggaacttggtagttggtgcaaagagaattccatctcatacacccgatattcggacgacatgacatttagcggctcatttaatcccagtgatatcataaagaaggtgcggaaaatgttatactccctgggactgcagttaaattctgacaagatccacgtggtcaccaaaaatgcctgtcagaccgtgactggtctggtggttaataacaaagtgcaagtcgggattaagtataggaaagagatccgtaaagaggtgtactatattaataagtacggcttgcaaagccacctgaagaagatcaacattaaggacaagaacaaatacctcaattctctttatgggaggatcctgtatgtccttcagatcaacaagaatgataaggaattcatcagttacaagaagatcatcaacaaaatcaagagcgatctatcctga

SEQ ID NO: 9538 - RNA, 954 nt, synthetic construct
  source 1..954: mol_type = other RNA
atgtggaaatacattggaaaagaagagtgtaatgagtttctcctgagcctgaaacttttcaattgcaaggacaagaagaaatatctcaacacgatatactccatttcaaacaacatcgagaacaactacaagatttacaagatcaagaagaagaacggcaagtataggacaatatatgagccaaattcccttctgaaacatattcaacgtcagatactggtgaaaatcctagataataaggccatttctaagtacgcgaaagcttaccacaaaggtattaatctgaaagacaacgcaattcctcatctaaacaaagagctgattctgaaattggatatcaaagacttcttcgaaaacatctctttcatcgatgtgtacaattcctgctttagtatcgaatacttcccgaaaagcgtcggtatgattcttacatatctgtgtacctatgatgattatctcatgcaaggcgctcccaccagcgcctatatcagtaatctcgtaatgaaggagtttgacgaggttctcggactgtggtgcgaggaaaataatatctcctacacccggtattcagacgatatgacttttagcggggaattcaatccccgcgaggtgatcgtcaaagttcgaaagatgttgtataagttagggttagaactgaacaacaagaagatccatatcattcacaaaagttcgaatcagaatgtcactgggatcgtggtgaatgaaaaagtacaggtgtcagccaaatatagaaaggagatcaggcaggaaatatactatatacggaaatttggcctggaatctcacttgaaaaagagaaacattgacatagagaaggagaagtacatcaacattttgtacggaaagattctctacgttcttcagatcaataataaggacaacgagtttaacaagtacaaaaagttcatgaacgacttcaagaacaagttttga

SEQ ID NO: 9539 - RNA, 957 nt, synthetic construct
  source 1..957: mol_type = other RNA
atgtggaagtatattggcctcaaggagtgcaacgaatttttactgagcctgaacctgtttgactgcaaagatgaaaagaagtacatcagaactctctatagtatttccaacaacgtcgagaacaactacaagaagtacaagattaagaagtcaaacggaaaataccggacaatttacgagccatctcttttattaaagcacatccagcgtcagatattgaataatatcctgaacgataggatgattagctcctacgccaaggcgtatagaagaggaagctcgcttaaggataatgccattgtgcaccagaacaaaaagatagtcctcaaacttgacatttcaagcttcttcgacaatattagcttcatcgatgtgtacaacagctgtttctccattgaattttttcccaaaagtgtcggaatgttgctgacatctctttgcatctacaatgattacctgccgcaaggcgctcctacctctgcattcattagtaatttggtgatgcgaagctttgacgaagagataggttcatggtgttccctgaaaaatatctcatacacccgctattcagacgatatgacgtttagtggtgatttcgattgtaaggaggtgatcaataaggtgaggaaaatgctgtctatcaaagggctggagctcaacaaggacaaaatccatgtaatcaagaacagttcctgtcaaaaagttactgggatcgtggttaataataaggtccaggtatgcagcaactataggaaatctatccggcaggagatctactatataaagaaatatggcctagagtcccataagaagtatcgaaacatactgtcctccaatcggaaatacctgaattctttgtatgggaaagtttcgtatgtgctccagattaatcgcgacgacaaagaattcatcgactacaagaactatctgctcaaactcctaaaagacaatctgtga

SEQ ID NO: 9540 - RNA, 951 nt, synthetic construct
  source 1..951: mol_type = other RNA
atgtgggattatatcggggtgaaggaatgcaacgattacctcctctcgctgcacttgtttgactgtgaggacgaacgcaaatacatacggactctgtacgccatcgccaacaatattaggaatcactaccgcaaatttcagatccgaaaacataacggcaagatgagaacaatctacgaaccttccgggattctgaagcacattcagaagagaatactgggggaggtgctggaggacctgaaggtatctccctacgcaaccgcttatacacgtggcaaatctctgttagataatgcctgccctcatgtaggttgcaagatgattctcaagcttgacatcaagaacttcttcgaaaacatttggttccttgacatctataacagttgtttccccatcgagttgtttccgaaatccataggaatgttgtttacctatctttgcacttacgacgatcatctggtgcaaggcgcacctacaagcgcctacattagcaatttagttatgagggactttgattacgctgtgggtaactggtgtcgtcagcaaggaattgaatatacccgctactcagatgatatgaccttctcaggcgatttcgatcccgcagctgtgatccgaaaggtccggagggagctgtatcgcctagatatggaactgaacgacagtaagacgagagtgatatataggagccacagacaatgcgtcactggcgttgtcgtgaatgaaaagccacaggttagcaaaaaatatcggaaagagatccggaaacagatgtactatatcgagaaatacggtctatccgagcaccttaaaaggacaggaaaggccgagaaggggtatctggaaaccttgaaaggatgtatctgttatgtcctccagattaatccagacgacgctgagtttagacagtacctcaagaaggccaatgagctcctgtacgcggacaagtga

SEQ ID NO: 9541 - RNA, 951 nt, synthetic construct
  source 1..951: mol_type = other RNA
atgtgggactatatcggtgtgaaagagtgcaatgattacctgctttctcttaatctcttcgactgtgatgatagacagaaatacattcgcactttatatgccatagcaaacgatgtccgcaaacattacaccaaataccagataagaaagcacgacggaaaaatgcgcactatttacgaaccctcggggatcctcaagcacatccagaagagaattttgaccgaagtgctggaggacatgcgcgtatctccgtacgccacagcttataccaaaggaaaaagcctgctggataatgctcaaccacatgttggccagaagatgatcctgaagttggacattagacactttttcgagaatatctggtttcttgacatttacaacagctgcttcccaatagagctcttccctaaatccgtgggaatgctgtttacatacctttgcacgtatgatgatcacttggtccagggcgcacccacaagtgcgtttatcagtaatctcgttatgagggagtttgactatgaggttgggaactggtgtaaccagaagaatatttcctacacacgatattcagatgatatgaccttctctggcgactttgatcctagcggggtgatccggaaggtcaggcgcgaactctataagctggacatggagctcaacgattcaaaaactagggtcattcggaggagccatcgtcaatgcgtgaccggtctagtggtgaatgaaaagaggcaggtatcccgggaataccggaaggagatacggaaacagatctatttcatccagagacatggactgtccgaacacctagcccgaattggccgagacgagaaggggtacttagagaggctgaagggctcaatctgttatgtgctgcaaatcaaccccgatgacgctgaattccgtaagtacctggaggacattgacgaattgagttatgccaacaagtga

SEQ ID NO: 9542 - RNA, 969 nt, synthetic construct
  source 1..969: mol_type = other RNA
atgtggaaatatattacgaaagagcaggtgcaggaatttctgctgtccctcaacctgttagacaacaaattgaacgacaaagacaacatcaataagctctatagcatcagtaataacatcgagaacaactacaagatcttcaagatcaagaaaagaaacggcaaattccgaactatatatgaacccaattacacactgaagaatattcagcgcaagattcttaacaacatcctcaacaataagtcaatcagtaaatacgctaaggcatataagaaaggcactagccttaaagataatgccaaagagcacctaaataagaacatcatcctgaaattggacatcaagaattttttcgagtcaatccagttcattgacatttacaactcctgttttccgatcgaatactttcctaaagaaattggcatgctgctcacctttctctgcacatacaataattatctaccacagggggccccaagttcctcttacattagtaacttggtgatgaaagagtttgatgaatacattggtgactattgcgataaaaacaacatcagctataccaggtattctgatgacttaaccttcagcggcaatttcaatcccagcatcatcattaaaaaggtcagaaaggatctgctgaagatgggacttgaaattaatgactccaaaacgcacatcataaaaaaaggtaacaggcagtctgttacagggatagtcgtgaatgagaagcttcagatatcctctgactatcgcaaagaaattcggaagcaaatatactacatcaagaagtacggaatagaaagccatttggagttcaccaataataatatttcggagatcaagtacctgaattcactgtatgggaagataaactacgtactgcaaattaacaaggatgataacgagttcatcgagtataagaagtacattaacaagctgctcaaggagaaacggcctaagaattga

SEQ ID NO: 9543 - RNA, 966 nt, synthetic construct
  source 1..966: mol_type = other RNA
atgtggaagtatattacaaaggagcagaccaaagattttttgttatctctgaacctcatcgatgataaactcagcgataaagaaaagatcaacatcctatactccataagcaacaacattgaaaacaactacaggatcttcaagattaagaaacggaatggtaagttgcggaccatttatgaaccaaatcccacgttaaaaaacatccaaagaagaatcctcaacaatatactcaacaacaagtcgattagcaaatacgctaaagcatacaaaaagggaatttgcctgaaggataatgcggtcgagcatctgaataaggaaactattctgaagctggatatcaaggacttctttgagaacatcaaattctccgacatttatgactcttgttttagtatcgagtactttcccaaagagattggtatgttgcttacccatctgtgtacctacaataatcacctgacccagggatcacctacaagtgcttatatctcaaatcttgtcatgaaggagtttgacgagtatattggcgactattgcgaagataataacatcagctacaccagatattccgatgacctgacattctcaggcaacttcaacccaagtaatgtgattaaaatcgtaaggaaggccctcctgaaactgaatttagagattaacgacgataagacttgcatcataaataaaggcaatcgccaaactgtgactggcataacggttaatgaaaaggcccagatatgtagcacatatcgtaagaacattcgaaaggagatctactacattaaaaagtttgggatagactctcacttgaaattcaccaacaataatatcacacctctgaagtatcttaggtacctatccgggaagatcaactacgtgatacagatcaacaataacgacaaggaattcctgaaatataagatctacatcaacgagcttctccgggaaaaacgcgtggactga

SEQ ID NO: 9544 - RNA, 954 nt, synthetic construct
  source 1..954: mol_type = other RNA
atgtggaaatatttgtctaaggacaaagagaaggaatttctgcttagcctgcatctcataaatggagtgaacgatgaggacattctcaataaaatttacaccatctccaacaacatcgagaagaactacaagatcttcaagataaagaagcggaatgggaaaacaagaactatctatgagcccaaccccaacctgaaaataatccagaaaaacatcctccacaatattctggaagatcgctatattagttactcagccaaggcttacaaaaagggcataagcattaaagacaatgcaaatgagcacgtagataaggacatgatactgaagctggacatcaagaacttcttcaacaatatcacctacattcaggtgtactgtagctgctttaaagaaatctatttccctaagtccatcggcaccctgttgacaaatctttgcacgtataatgattctctgcctcaaggggctccaacctccagctacatctcaaacattataatgctagacttcgacatcaagattggcgaatactgcaaagaaaataacgtcagctatactcggtattgtgatgatatgaccttttctggtaacttctccaaaatggagataattaaccttgtcaagtcagaactgaaaaaactgggattaacgctcaatcatgacaagacaaagttgatcactaagaagaatagacagtatgtgacagggatcgtggttaataaaaaagcgcaagtgtcgattgattataggaaagaaatccgcaagaacatttactacatcaagaaatacggactcaactcccacatgaattatcagaaaatgagtctcccaaaagagaagtatctgaacattctgcttggtaggattaattttgttttggaggtcgacaaagccaacaaggagtttattgagtacaagaagtacatcctaaagttaatcaaggatcgatga

SEQ ID NO: 9545 - RNA, 954 nt, synthetic construct
  source 1..954: mol_type = other RNA
atgtggaagtatactaccaaggaagtgtgcaacgattacttgttaagccttttttcgttcgatctgatctcatccaaccaggagacactcaaactcctttacaagatctccaacaacaaagaaaagtactaccatgtcatcaagatcaagaaaaagtcaggaggttaccgtaccatttatcagccgtcccccacactgaagtatatccagaagactatattggacaaagtgctgaaagagaaaggcatctctaaatatgccaaagcgtactacaacggcgcctctctaaccacaaatgccaagccacatttaaatcagaagatcatcctcaagctagatattaagaacttctttcctagcactaactatctcaccatctacaaggcttgcttcagcaaagagctgtaccctaagagtatcggaactctttttacgtcactctgtacttaccaggattttttgccacaggggtctattacagcaccctatatttccaacttggtgctgaaagacttcgataacgggattggcacgttttgtcaaaagcgcaatataaactatacccgatattgcgacgatatgaccttctctggtaattttgaccctcatcacattattaagtgtgtcgctaataaactgcacaaaatcggctacgaactgaacaagaagaagatccacattataaccaacaataagaggcaagaggtgaccggaattgtagtgaataaaaaactccaggtcccaaaagactatagacacaaaatcaggcaggaactgtattacgttacaaaatactcactgtccagccaccttgagcggaataatattaaggacaaagagacatacctccaaagtctgtatgggaagattctgtatgttctgcagatagaccccagtaataaagagttcataaagtacaaggagctgatcagcttagaactgaataagatgtga

SEQ ID NO: 9546 - RNA, 954 nt, synthetic construct
  source 1..954: mol_type = other RNA
atgtggcagcacctgacgaaaaagcagataaacaacttcatcttaagcctgaatcttattagctttaacaacctgtctaacaaggagaagctcaagttactgtataccatctccaatcatggtgaaaaacactacaaagtcttcaaaatcccgaaaaaaaacggcgggtatcggacaatatacgagccagattacacactaaaaatgatccaggagaatattttgacgaatgtcctcaacgaacgaatcattagttcatatgccaaagcttacaagaagggtctgagtctgctggataatgcactgccccatctaagacaaaaaatcgtgctgaaactggacataaaagattttttcccctcgattgacttccttaaggtgtacaagaaagctttccctagacatatttatcccgaggcagtggcgtcactgcttaccaacctcgtcacctataataataccttgcctcagggagcccctaccagttcatacatttctaatttggttctgaggtccttcgacattaaaataggatccttttgccaatctaagaatattgcctatacacggtactgtgatgacatgacttttagcggagagtttaatccacaggaaatcatcaacctcgtaaaaacagagctgttcaaggagaacttcatactcaacaagaagaagatcaagatcataaagtccaataaggcccagattgttactggcatcgtgtgcaatgaaaagttaagcattccaaggacttataagaagtttattcgccagaacatgtactacatcaataaatacggcctaaataaccacctcaaatacatcaactatctggatagcaaagactatctcaataagctgtatgggcagatcctctttgtgttgcaaattgagaagaacaataaggagttcttgaactacaagaacgaacttatcaaacttaaggaaaactga

SEQ ID NO: 9547 - RNA, 960 nt, synthetic construct
  source 1..960: mol_type = other RNA
atgttcagatatctgtcccttgataagtataacgacctgctgtcttcattcaatctggtgaatactaccgacatcaagaagataaataagatgctctacaacatctcaaacaatatcgacgccaattacgaggagatcattatccacaaaaaaacaggaggcctgagatttctctatgcgccttctaaagaattgaaaagcatccagaaaaggatcctaaaaaatgtgctcgaggagaagaagttaagccgctacagttacgcttatcgaaaaaaagtttcggtccttgataatgctaaaccccacgtaaaaaaggacgttatagtcaagctggatattaaggacttcttcgacaatattaccttttccatggtgtacgactcttgttttaatgaaaccctttacccgaagaagatgggaatgctctttactaatctgtgcgtgtacaataaccgtttaccccaaggggccccaacttctggcttcatatcaaatatcgtactacgcaactttgacgagaaggtgggtagttattgtgagaagcggaaaattagctatactagatattccgacgatctcacgttttccggtaacttcaacgtcaaggatctgataaagtacgtgaacaagctcttgtatgagtacaacttccgattgaacaagaagaaaattaaggtcgtaagcaagaaaacacggcagcaggtgacagggattgttgtgaacgaaaaagtcaatatccgccggaattacaagaggaaaattaggcaggaaatgtactacatcaagaaatacagtctgaaaagccatctgaagaacattgcatacaaatgcgatgaaaaaacctatctgttgaaccttttaggcaggattaactatgtgtacaacatcacaaaggacaccgagttctataactataaaaaggatgtgacgaagctcgttaagaaactggatctgaagtga

SEQ ID NO: 9548 - RNA, 954 nt, synthetic construct
  source 1..954: mol_type = other RNA
atgctcgacaatgtcacaaaggacatggctaacgaattcctactgtcgctgaatcttattgatgagaagttaagcgataaggagaagatcagaaagctgtacacattgagcaacaacattgagaagaactataagaaaacggtgatcctgaagaaggatggaaacaagcgtattatatacgagccaaattataccctgaaaaaagtgcagcgcaatattctcgataacgttttatcagggttcaaagtgtccaaatacgctatggcctacgttaaaggcaaatccgtgaaggataacgccaatatgcatgtcaataagaaactgattctgaaactcgacatcaaggattttttcaacaacatttccttcatggacgtttacaacaaggtatttttagaggagtactttcctaaacaggcgcggactgtgcttacctatctttgcacatataacgaatttctgccccaaggtgcaccgaccagcagctacatcagtaatctgattatgcaggatttcgacgaaaaaattggactgttttgcgaaaagaacaacatcagttatactcggtattctgatgatatgacttttagtggtgacttcaatgtcaagatggtcatctttaaggtgaaagacgagctgaagaagatggggatgcagctcaattatgacaagatacacgtgatctactcaaatatgtcccagcaagtgaccgggattaccgtaaatgaaaaaccccaggtcctcaaagttaaacgaagaaagataaggcaggaagtatactatatcaagaagtatggcctctactctcacttgaaaaggatcaatgtgaaagacgagttcagctacctgaggtctttgctcggcaaaatcaatttcgtgctaatggtgaattcagaagacctggagttttttaagtaccgcgagttcatccttaagatattcaacaacttgtga

SEQ ID NO: 9549 - RNA, 942 nt, synthetic construct
  source 1..942: mol_type = other RNA
atgtggaaatatcttaccaaggagcacaaaaaggaattcatattgagcctgaatttgatcggcggtaagtttagcgatacagagaaactgaacattctctacgctattagcaacaatagcgagaagtattacacgacgaagtatatcaacaagaaagacgggacaaaacgtgagctgttggtaccaaataagactctcaagaacattcagaagaacatcctgaataatgccctgaacgatctagaagtctcgaagtatgcatgtgcctacataaagaacaagtcacttaaggacaatgcttctcctcacatcaatcagaaagttgtgctgaaactggatataaaagacttcttcacctccattacgttcgaggaaatatacaaagtgatacccaacgaattgtttcccacctctatcaaggtgttaatgcttaagttatgtacttactacgactatctacctcagggagcccctacctctccatacctctccaatctcgtgctgaagaacttcgacaattatattggcacttattgcaaagagaggaatattaactacacccggtactgcgacgatctgacttttagtggcgatttcgatgtgaaaaagctcaaaaacaaagtccaggcgtttcttgaggagatcggatataacctgaatgacaaaaagacgaaggtgattaaaaacaacaagcgacaaatcgttacaggcctggtagttaatgaaaaagtcaatatccccatctcctacagaaaaaagattcgccaggaaatgtattacatcaacaaatacgggatcgactcacatctgaaatatatcaacaacaccaacaaggaaaagtacattaacagtctcaagggtaaaatcaactattgcctgaacattaatccgaataataccgagtttcaatcctacctgaagaagctcaataatttattgtga

SEQ ID NO: 9550 - RNA, 948 nt, synthetic construct
  source 1..948: mol_type = other RNA
atgattgataccgacgtgctgattatcagcgaaaccttggacgtccccgtgaacaagctctacatgctctctaacaactacacttcccggaaaaagcacaggagaagcaaatatgagaactaccatatggttgtgatccatcatggaatcgtacacaagaaacgtatgctctcagtgcctaatgccttcttaaagaccgtccagaggagaatacttgaccagtatctctaccagttagaagagagcgaatatagtacggcatactgtaaaggtaagtctctcctggataatgctagccctcacgttggtaaggagtgcgtgctaaaacttgacatttcccattttttcgacagtatagacgatgacatggtttatctcgtgatgaaacggcttggactgtccgtgccggcaaccgctcttctgactcacttgtgcacataccgggccaaactaccacagggcgcaccaacaagtccttatatcgctaatttggccatgaagcagttcgacgagaagctggggagatggtgctcggagaggaatatcgcgtacactcggtattgtgatgatatgactttttccggcagcaaagccgcgattagggagagccggattatttctaaagtgcgctcaatgatgtatcgcatgggctttatgctgaacgacaagaagacagtctttatctcctcatctcagcaacagcgcgtgacaggaatagttgtcaatgaaaaacccgtcctgtctaggacccaaagaagagctatacgacaggaggtgtactactgtcagaagtatggggccgccaagagcatcaagcgtcgcaagctgaatatttccccagataaatacctgcacagtctgttggggcgaatcgccttcgcactgcaaatcgagcccgataactcagaaatgaaaggctacttcgaaacggtaaagaacatgatctga

SEQ ID NO: 9551 - RNA, 948 nt, synthetic construct
  source 1..948: mol_type = other RNA
atgctggacgcagatataattaaaatcagcgaggctttggacgtgcccgtaaacaagctctatatgctctccaataactataaaccacgaaagaaaagaagggggtccacctacgaaaactaccacacagttgtcattcaccacggacggggccataaaaatcgacggctaagcgtgccaaatgcctttctgaaaatggttcagcgtaggattcttgaatgctacctttaccaactggaggtaagcgatcattcgactgcctactgcaagggaaagtctttacttgacaacgcatcaccgcacgtgggaaaggagtgtgtgctcaaactggacatttcacacttctttgactccatagatgacgatatggtctatttagtgatgaagcatctggggctttctgtgcctgccaccgccctcctgacccatctctgtacctataaaacgcgcctaccccagggtgctcctacttctccctacatcgctaatctggtcatgaaacagttcgacgaaaagttgggctgctggtgcaggcggaacaatattacgtacacacggtattgtgatgacatgacattcagcggtaccaagagtgccataagagaatcccgcattatcagcaaggttaggtctaagttgtaccacatgggcttcacattgaacgataaaaagaccgtctttatcagttcatcccagcagcagcgcgtgactgggatcgtggttaacgagaagcctgtcctgtctaggtcacagcgccgagctatcagacaagaggtgtactattgtcagaaatatggagccgtggaaagcatcaatcggaaaggcctggacatccccagtgataagtatctgagaagtctcctgggccagatcgcatttgcgatgcaaattgggccagataatgcggagatgagacgttacttcgacactataaagaacctgatctga

SEQ ID NO: 9552 - RNA, 954 nt, synthetic construct
  source 1..954: mol_type = other RNA
atgatagacgcagatgtgatgaagataagtgagactcttgatgtgccagcaaacaaactctatatgcttagcaacaactacacagctagaaaaaagaggagaggttccaaatatgaaaactaccacaccgtcatcattcaccacgggagggggcataagaatcggaagctgtccgtgcctaacgcctttctgaaaatggttcaacgaggaatcctggaacagtacctgtatcagttggagatctctgagtactcaacggcttattgtaaaggcaaatctcttctggacaatgccagccctcatgttggcaaagaatgtgttctcaaactggacatatcacattttttcgactcaatcgacgatgatgccgtctaccttgtgatgaagcgtctgggcctgtctataccagccacaacactcctgacccacttatgcatctacaaagcacgcctaccccagggagcgccgacaagttcctatattgccaatctggtgatgatgcagttcgatgagaggctcggcagctggtgctccgaaaggaacattacatatactcgctattgcgacgacatgaccttttccgggaataaagctgacatccgaagcgcgaacgtagtcggaaaggtgcgtcgcatgttatacagaatgggcctcactctgaatgataagaagaccgtattcatttcaagttcccagcaacagagggtgaccggagtggtcgttaacgagaaacctaccctcagccggagtcaaaagagatctctgcggcaggaagtgtactactgtcagaagtatggggctgctaagtcgatcaacagacggggtttagacattagccccgataagtacttgcactctctattgggtcgcattgcattcgccctgcagattgagcccgagaatgccgagatcaaggaatactttgagactgtcaagaatttgatcaatacctga

SEQ ID NO: 9553 - RNA, 945 nt, synthetic construct
  source 1..945: mol_type = other RNA
atgtacaacgacattccatatatcgccgagacattacgtgtccctgttggcaaactctacatgctgtccaacaattacaagccaaggaagaagagaaagggcagcatctacgaaaattaccatacagtcgtgattcaccacggaagaggccacaagaaccgcacactgaacgtgcccaacgccttcctcaagctagttcagcgacgactcctggacaactttctatatcagctcaaagtgtccgagtatagtactgcttattgtaaaggcaattcacttcttgacaacgccgcaccccatgtgggaaaggagtgcgtactgaagttagacatcagccacttttttgattctatcgacgacgataaagtgctgtttgtgatgaaaagattgggagtgagcataactgctactgtcttgttcacccacctttgcacgtacaagggtaagttgccgcaaggggcgcccacttcgccctacatagccaatctggtcatgaaacagtttgatgaaaaacttgggcattggtgctctgaatacaatattacatacacacggtactgtgacgatatgaccttctctggatataaggcagatattcacagtgcaaaagtagttggtaaggtcaagaggatgctgtatcatatgggcttcaccttgaacgacaagaagaccgtgttcatcaatagctcccagcagcagcgggtgaccgggatagtggttaacgaaaaacctaccctgagtcgctcccaaaaaaggacgctgcggcaggaggtatattattgtcagaaatacggcgccgctgagtcaatcaatagaaaaggtctggatatctcacctgataagtatctccatagcctcttagggaggatcgcctttgctctgcaaattgagccagacaattctgagatgcgcgaatacttcgagactgtgaagaacctgatttga

SEQ ID NO: 9554 - RNA, 957 nt, synthetic construct
  source 1..957: mol_type = other RNA
atggacagcgacgtcatctctattgctgagaaccttggtactacagccgcaaaactatacatgcttagcaataactactcccctaagaataaacgacacggttcacggtatgctaactatcataaggttacgatccagaagcctggcagccataagagtcgcactctgcatgtcccgaacggattcctgaagatgatccaacggaggattctggacaaatacctgtacacccttgaggtgtcagaattttcgaccgcttacagaaagggtacaaatttactggataacgcactccctcacgtggggaaggagtgcgtgctcaaactggatattagcgacttttttggctccatcgatgacgacgccgtatacatggccatgaaaggcttgggattgtctgtccctgccactgcactgctgacccatctgtgtacatatcacggaatactgccacaaggggctccaactagtccctatattgcgaacttagtgatgagacactttgacggaaagttgggcaagttctgcatctccaggaatattgcgtatacccgctattgcgatgatatgacattctctgggtccagggaggatatactacgtgccaagctgccaggcaaagtgaaggcaatgctcgctgcccggaatttcatcttgaatgactcaaaaaccgtccttgtgtacgcctccaggcagcagcgcgttaccggaatcgtagtcaatgaaaagaccacagtgcccaggagctctcgacgtgaaataagacagcaggtgtattactgtagaaaatttggggcccaggattgtattcgccggaaggggctcgatattacacccgaaaagtacttaagtggtctgctgggccggatcactttcgcactccaaaccgaccccgagaacaaacagatgcaggaacacttcagaactgttcgagagatgatcggcaaactcacgtga

SEQ ID NO: 9555 - RNA, 954 nt, synthetic construct
  source 1..954: mol_type = other RNA
atgacagactctgacgtactgaaaattgccagcgagatagagatcagtgtcaacaagctgtatatgttgtccaacaacaattcacctagacacaagtcgcggaagaagaaacaccggaattatcatactgtcatcatccatcgcggccgggggcacagaaatcgtattctgtccgtcccaaatactctcctgaaactcgtgcagcgcaagatcctagactgtttcctgtatcagctggaaaccagtgagtactcgactgcctattgcaaaggtaaatctctgttggacaacgcctcaccgcacattagaaaggaatgcgttctgaaacttgacattagtcacttttttgactccattacagatgatagcgtctatctggttttcaaacagttcggcttatccgtgcctgctacctccctcttgacacatttgtgtacatacaagggtaagttaccacagggagcgcccacttccccttatatagcaaatctggtcatgaagaacttcgataaaaaacttgggaagtggtgcaaggagagaaatatcacctacactcggtattgcgatgatatgacgttttcaggagataagacctcagtgcgaaaaaacaagataatcgtgaaagtgaaggcaatgctcggcagtatggacatgaagttaaacgacaagaagaccatctttatatccagcagccaacagcaaagggtgacgggaattgtggtgaatgaaaaagctgccatcccacgtgagatgaggaggtctattaggcaggaagtatactactgtaccaaattcgggatctctgatagcctgcagcagcaacgcctcgacatttctcccgataaatacctacatagcctgcttggccgaatcagcttcgcactccagatcgatccctacaattctgagattcaaaagtactttgacacagttaagcagcttatgaacgcttga

SEQ ID NO: 9556 - RNA, 954 nt, synthetic construct
  source 1..954: mol_type = other RNA
atgatcgataaagacgtgctccaaataagcgagacgctgggcgttcccgtcgggaaactgtacatgttaagcaacgactacatcccccgaaaaaagtcccgcaagtccaaatacaacaactatcataccgttgtgattcacagggggagaggacacaagaacagagtcctatcagtcccaaataatttcctgaaaatggtgcagaggcgcttactggagagatacctgtatcgcttagatgtgtctgaatgctccacagcctacagtaagggcaaaagcctcctggacaacgcctctccgcacgtgggcaaagagtgcgttttgaaactcgacatctctcattttttcgattcgatcgatgacgacatggtatacatgattatgaagcagttcggccttagtgatcccgccaccgcactacttacaaatctctgtgttcacaattgtaagctgcctcagggtgctccaacgtcaccttatatagcgaacctggtgatgactcattttgatgaaaagctgggtgcatggtgctccgagcggtctatcgcctacacacgttattgcgatgacatgaccttctccgggacaaaggaggctgtgaaaagcagtcacatcatccgcaaggtaaagcggatgttgtacaggatgggatttgaacttaacgagaagaagaccgtgttcatttcaagttctcagcagcaacgggtgactggcatcgtggtaaatgagcgtccacagttgactagggagatgagaaggtcaattcgacaggaagtctactattgtaccaaatatggagtgaaggaaagcttgcagcaccggggactcgatataagcgaacaaaagtatcttcatagcctgctcgggcagatttcctttgctctgcaaattgaccctcagaatgaggacatgagacggtactttgacaccgtcaaaaacctgatgaatacttga

SEQ ID NO: 9557 - RNA, 954 nt, synthetic construct
  source 1..954: mol_type = other RNA
atgatcgacgcagacgtaatcaaaatttccgagacactcgatgtcccagttgggaagctgtacatgctcagcaatgaccgctttccgagaaagcgtcgacggaaatcaaaatacaccaactaccacaccgttatcatccataggggacggggacacagaaatcgtaaactcagcgtgccaaacagctttctgaagatggtgcagaggcgaatcttagagcactatctctataacctggacgtgtccgcatttagcacagcatattgcagggggaaatccctactcgataatgcttctcctcatatcggtaaggaatacattgtgaaactagacatttcccactttttcgacaacatagatgacgatatggtattcatgataatgcggcaactggggctgaccatgcccgctacgagcatgctgaccaatctgtgtgttcacaatggtcgccttccccagggtgcgcccacttcaccttacattgctaacctggttatgaagcatttcgacgaaaaattgggggtctggggcgccgaaaataacattacatacacgaggtattgcgacgatatcactctttctggcactaaaaaagccatcgagagtagtcaccctgtgggaaaaatcaggcgaatgctttaccgcattgaattcaaccttaatgagaagaagaccgtgttcgcctcatcttcacagcaacaaaaggtgacaggaatcgtggtcaacgagaagccccagatttctagagagatgcgcagagccatcagacaggaagtgtattattgtgctaagttcggcgtgactgagagtctgaagcggaacggcttgaatataagtgcgaaggagtaccatcattctttactgggccggatttcgtttgccctgcaggtcgatccagccaacgatgaaatgcagagctattttaataccgtcaagaacttgatatccaagtga

SEQ ID NO: 9558 - RNA, 963 nt, synthetic construct
  source 1..963: mol_type = other RNA
atgacagatgtggatgtgatgctgataagcgaggtgttgggcgtgcccgtcagaaagctgtacatgctgagctctgaccgtgtgccaaggcagaagagaggcggtagctattccaattaccatcagagtgtaatctacaccggccggactaaaaaaaaacgtgtcctcaccgtacctaacggattcctcaagcttgtgcagcgcagaatcctcgaccgctgtctgtctaagttaccagttagcgaatacgctacggcttaccgcaaaggtacatccgtgcgagacaacgccctgcttcacaccgggaaggaattcatcataaagctcgacatttcgggctttttcgatagtattaacgatgatgctgtgtacatggtgatgaaacagtttagactgtctcccagagcaacatctctcttgacccacctttgcgttcaccgcggagtcttgccccaaggagcccctacatcaccgtacatcgcaaatctggtcatgaagcattttgacgaacatatcggcgcctggtgtgccgaacggaacattacctattcaaggtattgcgacgacatgactttttccgggagtcgggatgaccttctcgggagccgccttgtgggtaaggtgggacggacgctgtatgcaatgggctttactttaaacagggaaaaaaccgtgttcgccggaagctcccaacggcagactgtaacagggctggttgttaatgagaaagctgatttgcctcgagaaaagcgaagggagctgaggcaggaggtctattattgcctgaagtacggcgtcagagagcacctatcacagagagggtcctcagatgccccactgcggtatattaatggactaatggggcgcctcgcgtaccagttacaacagaggcccgaggacgagaaactgcgtgagtggttcgttcaaatcaaaaagctgagggaaagtgagggcgacaagtga

SEQ ID NO: 9559 - RNA, 954 nt, synthetic construct
  source 1..954: mol_type = other RNA
atgacagatgtagatgtaatgcttgtggccgaagtgctgggggtcccagtgcataggttatatatgctcagtagcgaccgaatgccaagaaacaaacgcggagggagctactccaattatcacaagagtgttatctactcagggagatccaagaagaaacgagtcctgacagtgccgaatggatttctgaagaccgttcagagaagaatcctccaccggtgtctctacaaactgcccgtgagcgagtacgccaccgcatactgtaagggcaggggccccgctgataatgctagtcctcacactggcaaggactacattataaagctggacattagcgatttcttcggcagcattaatgacgatgcagtttacatggtgatgaaacaactgaaactcactccccgcgctacgtcactgctgacccatctgtgcgttcacaacggagtgctgcctcagggcgcgcctacaagtccatacctagctaatttagtgatgaagcactttgatggtcgtatcggatcctggtgcgccgaacgcaatatatcgtatacccgatattccgatgacatgactttctctggtcgccggggagacttgctagcttcaggcctcaccgggagagtcaggaacatgctttattctatgggcttcgagttaaacagcaaaaaaaccgtcttcgcggtctgctctcagcggcaaactgtaacaggcgcagttgtcaacgagaaggtgaacgtgcctagcgaattgaggagaaaattgaggcaggaagtgtactattgtacgcggtttggggtggaggatcatttggcacggtgcggatctggtgaggccccaaaggcctatatctccgggctcctgggtcgcctttcatacgccctgcagcttcgtcccgacgacgaatggctgaggtccggctttgagaaaattaaggccatgtctaacgacatctga

SEQ ID NO: 9560 - RNA, 960 nt, synthetic construct
  source 1..960: mol_type = other RNA
atgacagattctgacgtgctggcggtcagtcatgcccttgatgtgcccgtgggaaagttgtacatgttatcaaacgagaggattccacggcaggccaaatctagtagctccaagtataagaactatcacaccgtggtgatcaaaaaagggttgttccgcaagagccgcaagctgagtgtgcccaatgctctgctcaaaatgacacagcggaggattctgcaccagtatctgtatcgtctggaacttagctcgttctcaactgcctaccagccggggcggagcctaaaagacaatgcatctcctcacctgcatcaggaatacttgataaagctcgatattagcaagtttttcgataacatcgatgcagacatggtgtacagcgtcatgcgccagctcggacttagccaagccgcgaccgtcctgctgatgaggctgtgcgttcataattccgttcttccccagggcgcaccaacctccccatacatcgctaacctagtaatgaaaaggtttgatgagcatttgggcgagtggtgtggtcgccggggcattaactatacccgatattgcgacgacatgaccttctcagggcggaaaacggacctactcacatgtgacctggtccgtaaagtaagacgcatgttacacggtatgggattcgagcttaatgaaaggaagtcactgtttttatcctgtgccaaccaacagaaggtgacaggcatcgtggttaatgagaagttgcaagtccccagggaactgcgaagacaactgcgacaggaggtttacttctgcctcaagtttggacctaaggaatctatgaagagaagaggcctcaaaactagtcctgagcaatacctgcactccctgctggggagaatcgcttttgccctccagatagaccctgataatttggagatgcagggttaccactctcagatcaaagaactcactgctcagctctga

SEQ ID NO: 9561 - RNA, 960 nt, synthetic construct
  source 1..960: mol_type = other RNA
atgactgaccgggacgtcacagagctaagcagagccctgggtgtacctgtgggaaagctgtacatgctgtccaacgaacgaatcccgaggaaaccaaaaaggggatccagcaagtataagaactatcataccgttgtgataaagaaggggctcttcagaaagtcccgcaagttaagcgtgcctaacggccttctcaagatgacccaaagacggatcctgcaccagtacttatatcgattggaggcttctcgatactctacggcttatcagcctggcagatctctccgcgacaacgctagtccccacctcggccaggaataccttatcaaactggacatctcaaagttctttgataacattgacgccgacatggtctataatgtgatgcgtcaactgggactctcacgggcagccgccgttctgctaatgcgtctatgtgtccacaatagtgtcctgccacagggggctccaacttctccttacatagcaaatcttgttatgaaaccctttgacgaacacttaggcgattggtgccgcgcccggggaatcaattatacacgctactgcgatgatatgaccttctcaggtaggaaggcagacttgctgacatgccatttggtgggaaaggtgcggaaaatgctgaggcgcatggggttcgagcttaacgacaaaaagaccctgtttctgtcccgaggcagccagcagaaggtgaccggcattgtagtgaatcagaaactcaaagtcccaagagagctcaggagaactctgaggcaggaggtgtactactgtacaaaattcggggccgaagagagcctcaaacgcaggagacttgatatggcccccgaggaatatctgcggagtttgctggggcgtattgcctttgcgttgcagattgatcccgaagattcggagatgcaaggttaccattcccagatcaaagctctggcagcgcaaaagtga

SEQ ID NO: 9562 - RNA, 963 nt, synthetic construct
  source 1..963: mol_type = other RNA
atggccgacgctgacgttataaagatcgctcagagcttgggggtgagcgtgaagtcgctgtatatgttgagcaataacccgatgcgcctcagggagaaacggagaaaacccaggtacgagaattatcgccgagtagtcattcatcggggtagggggcgcaagaatagagtcctctctgtgccaaacgagtttctcagacgggtgcagcgaggtatcctgaagaaatatctgtacaatctcgaaccgtcagagtacgcgacagcttatcttcctggattcagcgtcagagccaacgctctaccacacactgggaaggaattcatcgttaaaaccgacatactgcacttcttcgattcaatcgatgaggaactggtctggcgtacagtgagagagttggggttttctatccccgccaccacgcttctgactgacctctgcgtatacagggatcggttgcctcaaggcgcccccactagtcctcacctggccaatctcgtgatgcggcgcttcgatgaaaagatcggcgcatggtgcaaggaaaggggaattacctacactcgctactgtgacgatatgacgttttccggacagaaggacgctctctgcggcgttggtctgataggcgaggtccgaaaagaattacaccgcattgggttacagcttaacgatgagaaaacagcctttatcccagcatcccagcaacaaagggtgaccggagcagtggtgaacaaaaagacacgtttatctcgggacgcaaggcgagaactgagacaggccgtgtactattgtgagaaatttggcgttaaggaacatctggcacatcgtaacgatccatccgcccccgaggaatatctgcggtccctgctaggcaaaattagcttcgcgcttcagctggatcctaccgacggcgagatgagagagatgtttaggaagattaagaagctgaccgacggaagtaaatga

SEQ ID NO: 9563 - RNA, 978 nt, synthetic construct
  source 1..978: mol_type = other RNA
atgaatgacatcgacaacgatatcataaggatatccgaggagctcgatgtgccactgaagaagctgtatatgctgagcaataacagaattcggtaccacaaacggaaccagaagaaatgctattccaactatcgcaaagtcatcattcacagaggacgaggtcacaaaaatcgggtacttaaagtgcccaatgagtacctgaaactggtgcagaggcgtatcttggaaagatatctttataccctgtctgtgagtgaatacgccaccgcctactgtaagaacagttccctcttgaagaacgccgagcctcatattgggcagcaaagggtactaaaactcgacgtgtctggctttttcgacagcatcgactttgggaaagtgtacggcgtcatgtgtgagctcgggttttcaaagcccgctaccactctcctaactaacatttgtacctacaattccatcttgccccaaggggcaccgacatcacctcagatctcgaacttaatgatgaaacgtttcgacgaacggatcggaaagtggtgcggtgagcgcggaattaactacaccaggtactgcgatgatatgacattctcaggaggcaaagcggtgctgaatgcaaaggaaataacgcagttggtgtctagggcactgtggaaaatgggcttcaagctgaatatgaaaaagacaactctgattggttcaagccagcgccagcaagttacgggaatcgttgttaatgagaaggctcaaatcagcagcaagcagagacgagagatcagacaggaaatctattattgcgaaaagtatggcgtgtctcagtccctctttttcaagggcgctgacataacaccagaaaagtacattaacagtcttttagggcgcattagcttcgccctgcagattgatcctgccgatgtcaagatgcatgagtactttaaggtggttaagaagcttaaaagtgaggtctgtgtcgaaaaatga

SEQ ID NO: 9564 - RNA, 960 nt, synthetic construct
  source 1..960: mol_type = other RNA
atgaatgaacaggaggtgaattacatgtcctcactttttctgggagcatcaacgttggaaaaacgcgacttgattaacctaatgcccaataaaatcgtacggaaatattatatccggcacgatattccaaaacggacaggcggcattagggtcatatacgagccctcccagaccctgaagactgttcagcgacggatcaaccgctggttcctcaaggacgcccccgtgtccgatttcgcctttgcttatgtgaaaggtagatgcattctggacaacgccaagccacatgtgggcaagccaatactcttaaaactggacatacatcacttcttcgataatatccactttgagagtgtctttgacattttcaagtctctcggattttcggaaaactttgcgaggctcgtggccggactcactacggtggacgactatctccctcagggtgctccaacatcccctgcactgtcaaacctttttctgaaagaattcgatgaggagatcggcgaatactgtagcaagaacgacatcgtctacacccgctacagcgacgatctgactttttctatgtacaggttcaatcccgacttagttaagttcgttagagagaaattaggagcactggggttggagctgaaccgaaagaagtctaaaattatttgcgggccgttgcagaagagagtgaccggcgtggtcgtcaataataagccccaagtacctcgcagctacagacacaagattcgtcaagaaatgtattacatcagcaaatatgggcttgatgctagtctgaataccaggaacataaccgacaaagagaagtatgtttcttgtcttctggggcagatcaacttcgtgctgcagatcaataaaaacgatgatgagttcaagaagtacagggaaatcctgatgacacctagtctagataacctccgtagccaacttacaaatctgttgaactga

SEQ ID NO: 9565 - RNA, 933 nt, synthetic construct
  source 1..933: mol_type = other RNA
atgaatagcaacgagaagaaatttttactgagtctcttttccttcgacaagaacctgagcgacaacgagaagatcaaaaagatgtacataatgtcgaacaggatcgaaaagtactaccatcatttcaccataaagaaaagaaacggtaccgagaggaacatcctgtgtccatatactcaactgaaaaaaatccagctgaacatcttgaatgggttgctttatgataagtctgtctctgtgtttgctaaggcatacattaaaaatagctacttggtggacaatactattatacacagggggcacaaatatatcctcaaactggacatacacaacttcttcgagaatattagctatgtggacatctttaacatctataaggaatacggattctccaatgccctatgtagtctgttagcccatttaactacatataatgactacctgccccagggggctcctacctcaccttatcttagcaacctggtactcagaaactttgactataaagtgggcaagtggtgcgagaaacaaaacattaattatacgcgctactctgatgatatgaccttttcgatgaatgagtacaataaagacttgatccgattcattcggattaatctgttcaagcagggccttgagcttaacaacgagaagatttgcctgatccatcactcccaacagcagaaaatcacaggtattgtggttaatgataagatccaggtcgattccaaatatcggaaaaaaatcagacaggaactctattacatcaataaatacggactggatgaacacctggaacgtaataagacaaaggacaagaagaaatacctcaaaattctctacggaaagatactctttgtcctatcagtggataagaacaacaaggaattcatcaagtacaagatgattgttcgcaagattctgaatggctga

SEQ ID NO: 9566 - RNA, 1053 nt, synthetic construct
  source 1..1053: mol_type = other RNA
atgttgtatctcaacagccaaaaggcactgattgaccttctctatgaggactggtgtgaagatatctccaaggaagtgtttacagccttcatttatcgtatcagtaacaacccccagaacttttatcgacgaaatcagatttaccagaagaatgggaaagttcggaatgtggatgtcccatcccagggcttaaaaataatccagaggatcatactgaagcggatcctggagaacatcccagtccataattcagcaagggcctacattaaaggcagctcactcagagacaatgccggcgcccactgtggtcgcaaatgcgtggtcaaactagacatcaaaaggtttttcgaacacatagacgagaagtccgtttacctcatattccggcgccttagttaccctccggatgtttgcagaatgctgactaaactgtgctgtctcaaaggtcgtctgcccacaggcgctcctacctctccctacttaagcaacctgttcatgaaaaagttcgatcgcgagatgagcttgttttgcgagaataaaaacatctcctacacaaggtacagtgacgacattaccttttcatttgattctttcgacaagaccagactaattcgggtgaccagaaacttcttgggactctatgcaaatggactgcctcttaaccagaagaagatcttcgttgtgacgtctaacaaaaaacagaaagtcaccgggcttgtggtgaatgaaaagacttctgtcgacaaggaattacgcaggaacattaggcaggctgtgtattatatcggaaagtttggagtgtccgatcacatcagacatctgcaaagctcagagtacgggggctgggtaatgttcattgcggatgactggcatttccgcatggtaaagttgcgatacctgagaacactgcaagggcggattagcttctgtctgtgtgccgatccagataatactgagatgaagcagtacgctgaatttatcaaggagatcatcaaaaaggagaaggaagagatttgcatactgaagatgtcgtttcaaaatgctaagaaatga

SEQ ID NO: 9567 - RNA, 921 nt, synthetic construct
  source 1..921: mol_type = other RNA
atgatagtttatcaagaacttgcgagtatcgagagggatctagggttttccgccaagaccctgtacgggctgtcaaatcatctggaaaagcactatcataacgtcttgattcccaagagcgatggatctaaacgtaaactcagcgtgcccgaacttattttgaagcgagtgcagcggagtattgctgaccatattctcgtgcagtttccagtgagcaactacgctaaggcctacaaaatcggcggttctgttcaacacaatgcccagccacacgtgggcaaaaagaaaatcctcaaacttgacattgagggcttctttgatcacatcctctactctcaggtcaaagagaaggttttctgcaaggagaaatttgcagaacccatacgcatcctcttgacaatgctatgctattacaaggagtcattgcctcaaggcgccccgacttcgcctgctattacgaacattattatgtacgacttcgaccagactgtcggtgcattctgtaatgagagagggatcagctatactagatactgcgacgatatgacattctccggagatttcgacgaaggcgaagtgatagccttcgtaaagggggagctgtatcgactggggcttttcctgaagaataggaaaacggtggtcgtccctgcatcaaaacgccagaccgtgacaggcatagtagtgaacgagaaaatcaacctgaccaaggagtataagaaaaagatccgccaggaaatgtactacatccagaaatttggcatcgatgagcacttaacccggctgggagttagtgacaagagaggttacctcctgtccctgatgggaaggatctcttttgtgttacagaccgtaccaaacgactgtgaatttgctaagtatcggaagatgctgacacagggatccttccaaaatgcctga

SEQ ID NO: 9568 - RNA, 912 nt, synthetic construct
  source 1..912: mol_type = other RNA
atgatcgtctacaaagagttggctagtattgaacaggatttagggttcagcgcacgaaccctgtacggcctctccaaccatctagaaaagcactatcacaatgtcttcattccaaagagcgacgggtctaaaaggaagttgtcagttcctgacctaattctgaagcgggttcagaagtctatagccgataatatcctggtgcagtttcccgtgtccaggtacgcgaaagcttataaagttgggagcagcgtgcagagaaatgctcaacctcatattggaaaaaagaaactcctgaagctcgacatcgagggattttttgatcacattctgtatagtcaggtgaaagacattgtgttctgtgaagagaagttcgccgagccgattaggatactgctcactatgttatgctattacaaggaatcccttccccaaggggcacctacctccccagccatcacaaatattatcatgttcgacttcgatgaaactgtaggcgctttttgtaacaagaagaacatcgcatatacccgttactgcgatgatatgacgttctcgggagattttgacgaaggtgaggtcattacattcgtgaagaaggagcttttcaaactcggcctgtttctgaagaatagaaagacagtggtactgcccgcctcaaaacggcagactgtcaccggaatcgtggtgaatgagaaactgaacatcaccaaggagtataaacgcaacatccgccaggagatgtactacatacagaaatttggcatggacgaacatcttaataaattaggcatctcagacaagcgaggttacttgctcagtctgaagggtcgcatctctttcgtccttcaaacaataccaaacaatcgggagtttgttgaatatagaaaagtgttgaacgccaacctgctgtga

SEQ ID NO: 9569 - RNA, 1134 nt, synthetic construct
  source 1..1134: mol_type = other RNA
atggctagccgccacctctttacacatgcacagctgatccggtgtacttctcccacaaaggattttctacgcaaacttctgctgaatggcctagtgcccctgagtcggaatgcccaccgatccgccgctaggctcagaaagctgcaccttgccgacttgagactgcgcgtgtctccatgcaagttagtgttgttctacgacccttcgggcaaggaatccgatatgatcgtctataaggagttggccagcatagagcaggacctaggttttcctgcccggacgctgtatggtctgtccaaccatttagagaaacattaccataacgtgttcatccctaagtctgatgggagcaaaaggaagctttcagtacccgacttgattctgaagagggtgcagaaatccatagcagatcacattctttcacaataccccataagcagatacgcaaaggcttataaggtgggaagcaacgtccagagaaatgcgcagccacacgtgggcaaaaagaaaatgctgaagttagacatcgagggctttttcgaccacattctctactctcaagtaaaaaacatcgtcttctacaaggagaaattctcggaacccataagagttctgctgaccatgctgtgctattatcaggaggctctgccacaaggggctccaagtagtccggccattacgaacattatcatgtacgacttcgacgaacggatcggggctttctgcaatgaaaaacacattgcctacacacgctattgtgacgatatgaccttttcaggagagtttgatgagagggaagtgatttcttttgttaaggaagagctctccaagctcggtctgttcctcaaaaatcgtaaaactgcagtgatccctgcctccaagcgtcagaccgttaccggaatcgtcgtcaacgagaaactgaatgtgaccaaggagtacaagaaagcaattcggcaagaaatgtactacatcaagaaatttggggttgatgatcatctcgcccgactcgggattagcgataagcagcactatatccgaagtcttgcgggcaggatcgcctttgtactgcagacaactccgtcagacggcgagttcgcaggatataagaaattccttgctgaatgtagcttgtga

SEQ ID NO: 9570 - RNA, 912 nt, synthetic construct
  source 1..912: mol_type = other RNA
atgatcgtttataaagagctcgctagtatagaacaggacttgggttttagcgctaagactctctatggcctgagcaaccgtttagaaaagcactatcacaccgtctacgtccccaaatcggatggtacaaaacggaaactgtcagtgcctgatctcatcctgaagttggtgcaaaagagtattgcagacaatatactggttcagtatcctatctctagatacgccaaagcctataaggtggggtccaacgttcagaagaacgctcatccccatgtaggcaaaaaaaaactactgaagctggatatcgagggcttttttgaccatattctttactcccaagtcaaggatatcgttttctaccaggagaagtacgcggaaccgattaggattctgctgaccatgctgtgctattatcatgactccttgccccaaggagccccaacatcaccagcaatcacgaatattataatgtacgacttcgacgaaactgtcggagccttttgtgatagcaaaaatattgcttacacgcgctactgcgacgacatgaccttttcaggcgacttttctgagaaggaaatgattggcttcgtaaaaaacgagttgtctaaactggggcttcaccttaaaaagagaaaaacagccgtgataccagcaaccaagtgtcagtgcgtgactgggattgtcgtgaatgagaagatgaatctcacaaaggattacaagaagaaaatccgacaggaaatgtatttcatcaagaagttcggactagatggtcacctcaagaaaatgggagtgagtgacaaagagcagtaccttctgtccttaaaggggcggatcgcctacgtgctgcagaccattcctaacaacgatgagttcactgagtataagaagatcctccacagcatcagggtgtga

SEQ ID NO: 9571 - RNA, 909 nt, synthetic construct
  source 1..909: mol_type = other RNA
atgattatctataaggaactgagtagcatagagaaggtgcttgcctatccagccaaaaccttatatgggttgtctaacaatctcgagaagcattatcacacagtgtttgttcctaagagcgacgggtcgaaacgtaaattatccgtgcctgatctgattctgaaaaacgtgcagcgcagtattgctgatcacattctggcctactaccccattagccggtacgcaaccgcttacaaggtaggcagttctatccagaagaatgcccggccccatgtgaacaagaagaagattctaaaactggatatcgagggctttttcgacaatatactgtattcacgcgttaaggacgtggtcttctacgaagagaaatattcagaaccgataagaatcctcttgactatgctgtgttactaccaagaaagcttgccacagggagctcccacttcccctgccataaccaacatcatcatgtacgactttgatgaaaagatcggggcttactgcacagagaagggtgtttcatatacaaggtattgcgatgatatgactttttccggcgactttgacgaaaaggaggtaatcgccctcgtgacgtctgagcttcagaagctcggtctgttccttaaaaacagaaaaaccgtggtcatcaaaaatacaaaacgacagaccgtgaccggaatcgttgtcaatgagaaaatcaatctggtgaaggagtataagaaaaagattaggcaacagatgtactacattaagaagttcggcattgaatcccacgcggaacatctaggaatcaccgacgtattcggatatttgtctagcctcaaagggcaggtcgcatttgtccttcaaacttgtacgcagaacgcagagttcaaaggctaccaagagttcctgcagaacctgaaatga

SEQ ID NO: 9572 - RNA, 909 nt, synthetic construct
  source 1..909: mol_type = other RNA
atgatagtctataaggagctttgctccattgagaaggacctaggatatcccgcgaaaactctttatgggttatcaaacaggatcgagaagcactaccacactgtatttattccaaagagtgatgggacaaagcggagactatctgtgcccgatctgatcctgaagagcgttcagaggagcatagccgataatatcctggcttactacccgatctcagagtatgccaccgcctataaagtgggctcttctgtgcagcggaatgcaaggccacacgtgaataaaaagaagatactcaagctggacattgagggcttcttcgataacattacttatagtagagtcaaggacatcgtattctacgaggataaattcagcgaacccttgagggtgttacttaccatgttgtgctattatcgagattccctcccacagggagcacctacatcccctgccatcaccaacattatcatgtacgatttcgacgagaagattggcgcctactgctccaaaaacggggtcagttacacacgttactgtgacgacatgacattttctggcgactttaacgagcaggaggttatctcgttggtgaaggaggaactgcgcaagctcggtctgtttctcaaaaatcggaaaaccgctgtgatcgaaagaacgaagcgccagacggtcactggtatagtggtgaacgagaagattaatctcaccaaggaatataaacgaaagattcgccaagaaatccactacatcgaaaaattcggaattgaagggcatgcaaagaaacaggctattaccgatgttgccgaatacctgacaagcctgaaaggcagaatcgcttttgtcctgcaaacttgtcctgacgactcagagtttctgaaatacaaagcgatcgttcatcccctgcattga

SEQ ID NO: 9573 - RNA, 909 nt, synthetic construct
  source 1..909: mol_type = other RNA
atgattgtatatagagagcttaatactctggccacagatctggggtttccactcaaaaccctgtttgcgctgtccaataacatagacaaacactaccataacgctttcattcccaaatcagacggcactaaacggaaactaagtgtgcccgataaaatcctaaaactcgtccagaaaagcatcgccgataacatcctggcttattatcctgtatccaaatatgcatgcgcatatacttacggatcgaatgtgcaaaagaatgcggcaccccatattggcaagaagaagatattaaagctggatattgagggattcttcgacaatatcatatactctcgggtgaaggacattgttttttacaaagagaagttctctgagccagtcagggtcctgctgagcatgctttgttaccaccgagacgccctccctcaaggtgctccaacatctcccgccattaccaatattatcatgtacgacttcgatgagatcatcggctgttattgcaacgaaaagggcatcagttatacccgttattgcgatgatatgaccttcagcggggactttgacgaaaaagaggtgatagtgttggtgaaacaggagctgaagaagctcggtctgtttctgaagaacagaaagacggccgtgatcccgaataccaaaaggcagaccgttactggcattgtcgtgaacgaaaagatcaacttggctaaagaatacaagaagaaaatccgccaggaaatgcattacattacgaagttcggattagatgagcacttgaagaggacaggggagacagacaagaagaaatacctcttgtccataaaggggcgcatcgccttcgttcttcagactacccctaacgacaaagaatttctcgagtacaagtcactgcttacaaaggaaaagtga

SEQ ID NO: 9574 - RNA, 909 nt, synthetic construct
  source 1..909: mol_type = other RNA
atgatagtgtatagggagctcaaatcaattgagcatgatctgggattcagcgctaagacactctatgggcttagcaataatctggacaagcactatcacaacgcctttatacccaagtccgatggtacaaaaagaaaactttcggtcccggatctcatcttaaaaaaggtgcagagaagcattgcagacaacattctagcctactatcccactagtaaatatgcgtgtgcttacgcctacggagccagtgtgcaaaaaaatgccatgcctcacgtgggaaagaagaagatcttaaaactcgacattgaggggttcttcgacaacattatttactctagagttaaggagactgtgtttttcaaagaaaagtttagcgagcctattaggatactgctgtctatgttgtgctactatctggattccttaccacagggtgctcctacaagtccagcgataaccaacatcatcatgtatgacttcgacgaaaagattgggtcttattgcgcagagaaaggcatcgctttcacccgctactgtgatgacatgaccttctcaggggactttaatgaaaaggaaatcatcgagttggtcaagtccgaactgaaaaaattgggcctgtttctcaagaaccgcaagacggccgtggttcccaacaaaaaacgtcagattgttacaggcatcgtagtcaatgagaagatcaacctgaccaaggaatacaaaaagaaaatccggcaggaaatgtactacatcaagaaatttggcctggaggatcatctgcgaaagatcggccaatctgacaagcagcggtatttgctctcacttaagggaaagatcgcatttgtactgcagactattccagataagaatgaattcctggagtacaaagagctactttccaggaaatactga

SEQ ID NO: 9575 - RNA, 906 nt, synthetic construct
  source 1..906: mol_type = other RNA
atgatcgtctacaaagagctgaagacaattgaacatgaactgggcttccctgccaaaacactctacggcctgtccaacaacttggaatcccactatagaaccgtgttcattccaaaacgggacggaaataagcggaagctttctgttccagactctatactgaagatggtgcaaagagccattgcggacaatattttgtcgtattatcctgtatccagctacgctatggcctacagtcccgggtgttccgttcagcgtaatgcatctcatcacatcggcaagaaaaaaatcctgaaactggatatcgagggcttctttgataatattacctacagcagggtcaaagacatcgtctttttcaaggagaagtttagcgagcccattcgcatccttctcaccatgttgtgttattacaaggaaagtctacctcagggggctcccaccagtccagtgatcactaacatcctcatgtatgactttgacgagagggtgggagagtactgcagggagaaacagatttcatacactcgctattgcgatgacatgaccttctcaggcgatttcgacgagaagaaaataatcgcttttgtgaagaacgaacttaaaaagctgggtttatttctgaagaatcgcaagacggcagtggtccccgtgaccaaacgacagacggtgacaggtattgtagtcaatgaaagaatcaacctgactaaggactacaagaaaaaaattcggcaggaaatgtattacatccgaaaattcgggatagatggacaccttaaaaagctagagattacagataagaaggcctatttaaacagcctgaaggggcggatatcattcgttctccaaactatcccgaacgataaggaatttctggagtacaaaaatatcctcaagtgccagtga

SEQ ID NO: 9576 - RNA, 909 nt, synthetic construct
  source 1..909: mol_type = other RNA
atgatcgtttaccatgagttagcatccttacaaaaggatcttggattctcagcaaagaccttgtatgggatttcgaacaatattgctaaacactatcacacagtgctggtcccaaagaaggatggtacgaaacgcaaactctcagtgccagatgtaatgctgaaaagggttcagcgggctatcgccgacaatatcctttctcaatatcctgttagcagatacgccaccgcttacaagccaggagcaagtgtccagaaaaacgctggtaaacacgttgggaagcagaagatcctgaaactggacgtgaaaggcttctttgacaacatattgtactctcaagtgaaggacatcgtcttttacgagaaaaagttttctgagcccattcggatcctgctcagtatgctgtgttactttaatgacagcctcccgcagggagcacccactagtcctgccattgcgaacataattatgtaccagtttgaccagaatgtcggctccttctgcaagcagaacaatgtcacttacaccaggtattgcgatgacatgatcttctccggggactttgatgagagacaaatcgtatccttcgtgacttcagaactgaaaaagctcggcctgtttctaaaagacaagaagacagccgtgattcccaattctaagcgacagatagtgacaggaatcgtggtgaaccaaaaagcgaatgtggccaggcagtataagagcaaaatccgccaggaaatgttcttcataaagaaattcgggatcgatggccatctacagaagacaggcattaacaaccgtcagaaatatcttaacagcctcaagggcagaattgcctttgtactgcagaccttgcctggtgataaggaattcctgaagtacaagaactatctggccaatttgaaatga

SEQ ID NO: 9577 - RNA, 948 nt, synthetic construct
  source 1..948: mol_type = other RNA
atgatcgtttatcatgaggtagcgacagtggctcgcgagttggggattccactcaaaaccctttacggcgtatccaacaatattagcgcacattatcacaaggtcgccctgcccaaaaagaatggcggtacacgtatcctttctgttcccgatcccgtgctgaagaccattcagtgcgccatagcggataccctgcttccactgagtccagtgagccgatacgcgaaagcatataaaccggctgcaagcgtgaaagccaacgcactaccacacgttggcaaaaagaagctcttaaagcttgatatcctccatttctttgattccatcctctactctactgtgaaggagaaggtcttcccagcctcacggtacgccgagcctattcgcatcctgttgaccatgctgtgttatgaacgtgacgccctcccccaaggagccccttcaagtcctgcaataaccaacatcattctcttcgacttcgacgaaaccgtgggagctttctgccacgagaggggcatcgcgtatacgcgctactgtgatgatatgacatttagcggagactttgacgagaaagaggttaccgcatttatagaggctgaactaagaatccgagggttctttttgaaccggtccaaaactgccgtgatcaggcacactagaagacagacagtcacgggaattgtggtcaatgaagctcctgctttaccaagggccaccagacgcgaattaaggcaggctgtgtactactgcaagacttatggggtggccaatcatctggcccggatacagtcatctactagtcccgggaagtatctggagaagttgctgggcaaaatttcgtacgctctgtccgtagacccggatgacgccgacctgcagaaggcacggaagacagtcctcctgctgattggtctggaaaaacacatccccgaccctacacaaccttga

SEQ ID NO: 9578 - RNA, 918 nt, synthetic construct
  source 1..918: mol_type = other RNA
atgatagtctatcgggagctgtcgacactggaaagagatttgggcttctccgcgaaaaccctgtacgctgtttctaactccattgataggcattaccataaggtgactcttcctaagaaaagtggaggcactaggaccctcagtgtgcccgatgagatcctgaagaagatccagagggccatcgccgaaaagctgctcgcttatcacccagtttcacagtatgcgaaagcttacaaacccgccgcaagcgtcaagcgcaacgccatgccacatgtggggaagaagaaactgctcaagctgtacattttgcacttctttgactcagttctctacaacactgtgaaagaccgtgtcttccccgaaacagtcttcagtgagaagctacgcattcttctgagcatgctgtgctactatcgggacgtgttaccacagggtgctcctacgagccccgtgatcaccaatattattctctacgatttcgatgagacaatcggcgacttttgtttgtcacggggcattgcctataccagatattgtgatgacatgactttttccggggactttgacgaaaaagagatcattaaaactgtgcagcaggagctgaatgctcgagggtttcttctgaataggaaaaagaccgcagtggtaccttctagcaagcgtcaagtggtaaccggaatagttgtcaatgagaagcttagcctgagtagatccgcccggcgctcattgagacaagcattgtattattgcaagacatacggtgtaagcgagcacctcgcacactgtggcatccatgatacccctaaacactacctagaatctctgttaggaaaaatagcctacgccctgtctatcgacccggatgactccgaattactgaactgcaaggagacagtgacgcgactccttcaggaatga

SEQ ID NO: 9579 - RNA, 924 nt, synthetic construct
  source 1..924: mol_type = other RNA
atgatcgtgtacactgagctgagatctttggagattgatctcgggattcctatcaaaaccctgtatgccgttagcaacaacattaacgctcactattactctaagagcatccccaagagtgatggtagtcaacgggtgctttctatccctgatgaaccactgaagaagattcagagggcaatctcagagaagctgctagtctacgagccagtgtccatctatgcaaaggcgtacaagcctacatcatccgtgcggaagaacgccgtgtgtcacgtgggcaaagaaaagctcctgaaactcgacatctacaagttctttgacagcattaattacagcctcgttaaggaaaaagtgtttcccagcaataagtactccgaacaaattcggatacttcttagcttactgtgctataaaggagaaccactgcctcagggcgctcccacttcaccagtcatttctaatatcataatgcgtgacttcgatcagactgtaggggagtggtgcaaagagcgcaaaatatcatactctcgatattgtgatgacctgtccttctccggaagttttgatgagacggacgttatcgaattcgtaaccgttaatctgaaatctctaggttgcatcctgaacaagaagaaaacacactgctttaaaggcaaggaaaaaaagaccgtaacaggagtggtcgtgaacgagaaaataaacacacagaagagctatagaaggcagatacgccaggagtttttctactgtcagaagttcggcgtgcaagaacatttgtcaaggattggctcgagtgagaaaccctataattacttgagtagatccttggggcagatcaattacgtcctccagatcaccccggacaataaagagtttctgtcctataaggtccaaattcttgccttactcaaagagcataagtga

SEQ ID NO: 9580 - RNA, 924 nt, synthetic construct
  source 1..924: mol_type = other RNA
atgatcgtgtacaaagagcttcagagcttagagacagatctgggggttactgccaaaaccctgtacgcaacatcgaataatataaatgcccattaccacaacaagtctattcctaaatctgacggatccattcgggtcctgagcattcctgacgaacctctcaagaaaatccagcgagctatttcagaaaaactactagcgtacgaacctgttagtatctatgcaaaagcttacaaaccagctagttcaatcaggaaaaacgccatctgccacgtgggcaaggagaagttgctgaagctggacatctacaacttcttcgattccatcaagtatagcctggtaaaggagaaagtgtttccagcaaagaaatatagtgaacagattagagtcctgctgtctcttttgtgctataagggagaaagcctgccccaaggagcccccacttcaccagtcatctctaacataataatgcgtgactttgatcagacagttggcgagtggtgtgaggaaaggaaaatacggtacactagatactgcgatgacatgagcttctccggtagttttgatgagtctaatgtgatcaagttcgtggaaggggagcttaaatccttaggctttatcctcaatcgacgcaaaacccggtgttttactggggggaacaagaagaccgtgacaggcatcgtggtgaatgagaagattaacaccgagaagagctataggagacaaattcgccaggaggtgttttattgtaagaagttcggtgtccaggagcacttgacccatatgggatcacccgaaaacccgtataattatctgtcccgccttctcggccagattaactacgtactccagataacgcccgataataaagaattcttgaactacaaggtccagattctgaacatcctcaaggacaatcaatga

SEQ ID NO: 9581 - RNA, 936 nt, synthetic construct
  source 1..936: mol_type = other RNA
atggtcgtgtatcgagaactgagcagcatagaagcagatctaggaattccagcaagaaccctgtatcgcttatccaacaatattggcaaacattatagggagaagaaaatacccaagtccgatggaaccgtgcgcctgctttccgtgcccgacgagattctgaaaaaagtgcagaggtcaatcgctgagaagttgttggcgtatgagcctgtttcgctctacgcaaaagcctaccggatcgggggaagtgtaatttcaaatgctgcgcctcacgttggcaaggaaaagattttgaagctggacatctaccacttttttgacagcatcagttattcttccgtgaaggagaaatgctttccggccgaaaaatacgccgagaaaataagaatcctgctggcaatgctttgttatcacggcgagtctctgccacagggtgcccctacgagtccaatcattagcaacattatcctcagggactttgatatcgaagttgggagatggtgcagcgaacggaaaattttttattcacgatactgtgacgacatgactttcagttgtgacggggactttgatggggccgaggtgacagctttcgtcaaacagaagctaggcgtcctcggattcatcctgaatgatcggaagacccggctccttaagaagggtgataagaagaccgtgacagggatcgtcgtgtccgagaagctgaacgcttcaaaggagtaccgcagaactgttagggcagaaatacattactgccagaagttcggcgtggaaggccatttgtctcgtacagccaacgccctggccgaaaatccaagcaaataccttgcttctttaatgggtaaagtaaactacgtcctccaaattactcccgaaaataaagagttcctcgagtataaggagtacctgtctgatatcatcaaggagttcaaatga

SEQ ID NO: 9582 - RNA, 921 nt, synthetic construct
  source 1..921: mol_type = other RNA
atgattgtttacaaagagcttaagagcattgagaaagaacttggcttctcatccaaggcactgtacggactctctaacaatctgggtaagcattatcataaggtcgaggtccccaaaaaatcagggggaactagaaccctctccattcctgatgaagccctcaagaaggtgcagcgcgccatcgtacagtccttgttagaatttgaaaacgtgagtttccacgccaaggcttacaaatataactctagcatcacgaagaatgcatctcctcacgtggggaaagagaagatactcaaactggacatttaccggtttttcgataacatctcatatagtgcagtgaaggagaaagttttcccagcggaaaaatacagtgagcagattcgcatcctgctctcgatgttgtgctattataacgaagctttaccccaaggcgccccaacaagcccgataatcaccaatatactaatgcgggaattcgacaatgtgctgggagaatggtgcaaaaagaggaatgtggactacacacggtattgtgatgatatgacttttagcggcagctttgacgaaaaagagattattgactacgtcatccatctgctatgcggctttggtctgaggttgaatgacaaaaaaaccaaggtgttcaccagcagtcagaaacagatcgttacaggcatcgtggtgaacaagaaaatgaatgtctcaaaggcttacaagcgtgaaattaggaaggaagtgtacttttgtaagaaatttggggtcgagaaccacatagagcacgaggagatacaactgtcccccgagagatatctgaattctctgcttgggcgaattaacttcgttctgcaggtatgtaagaacgataaagagttcaaggagtacaagaagatcatctccaagatcatcaagaacaaatga

SEQ ID NO: 9583 - RNA, 924 nt, synthetic construct
  source 1..924: mol_type = other RNA
atgattgtgtacagagaactaagcaccctcagcagggatctcggaatacctgccaaaaccctgtatgctgtgtctaatgcccaagataaacactaccggcttatcaaaattcccaagaaggacgggactgacagaacgcttagtatacccgatgagattcttaagaaaatccaacgtgctattagcgaacagctgctgtctagagaacccatctctaggtacgctactgcatatcggcccgccagcggtatcttaaagaatgcactgcctcatgtgggcaaagcgaaattgttaaaacttgacatcttgcacttcttcgattcaatcttgtacagtgccgtgaaggagcgcgcatttccagccgacaggtactcagagtcgaacagaattctgctctccatgctgtgttactaccgggacacactaccacaaggggctcctagttcacctgccattacaaacataatcatgagagactttgacgaagctgttggcgcatggtgcgcggagcgaaagatcgcctataccaggtattgtgacgatatgagcttctccggcgatttcgacgaggaggaggtaatcgaatacatagccgcacgcctgaaggaactgggtttcaccctcaaccgtcgaaagactgtagtgaagaccaactcccagcagcagacagtcactggaatcgtcgtgaatcaaaaaccgaacattagcgccaagtacaaacgcgagattcggcaggccgtcttttattgcacgaaatttggggttacagaacatcagaagcagatcggctctagtcagtccccagtcgcttatctccaggctctgttgggaaagattaactatgttctgcaggtgtgcccaaatgatacctcatttgccgcatacaggaagtccgtgctcgcgctgctggagaagaatcgctga

SEQ ID NO: 9584 - RNA, 924 nt, synthetic construct
  source 1..924: mol_type = other RNA
atgataacgtacaaagaacttgctaccgtggagggggaactgggcatacctctgaagacactatacagtgtgtcaaacaatgtaaatgcgcactaccgcagggtgctgatccccaagaaggatggaacctaccgcaatctctctgtgccagacgctcctctgaagcggattcagagagcgattaacgagaagctgctagtctatgagccgatcagccgttacgcaacagcatataggattgcatccgggatccggaataacgcccttccccacattggtatgcctaaggtgctcaaactggatatcaagggatttttcgattccgtaacctatagtctcgtcaaggaacgcgtctttagaaaagagaagtatagcgaacctgtgagagtcctgttgacaattttgtgctactataaagacgtgcttccccagggagccccaacttcccccgttatcactaacatcgtaatgcgagagttcgacgaggtaatcggcgaatggtgtggtaagaaaggaatagcttatacccgttactgcgacgacatgacattctcaggggactttgacgagaaagaagtcaaggctttcgtcgccggggagcttaagaaacaaggcttttttctgaacgcccagaagaccgttgttgcaactgctgccaaacggcagacagttacgggcgttgtggtgaacaaaaaagccaacgtgagctctgaataccgacgcgagatcaggaaagaggtgtttttctgtcaaaaatatggagtggcagagcatattgaaaggctcggcttagatgttgataccaagaactatctccggaagctgttaggcagaatcaattacgtgttgcagatttcgccagatgacggtgtcttccaggggtacaagaatgccgtgactgaaatgctggccaatgagaggtga

SEQ ID NO: 9585 - RNA, 924 nt, synthetic construct
  source 1..924: mol_type = other RNA
atgattgtgtataaagaactgtccagtgtggaagcggacttaggatttcccgccaaaaccctttacggtctaagcaataatctcagtgcacactaccgggaggtgaaacttcctaagagggacggcagctttcgaaccttaaatgtgccggatgagatcttgagccgtgtgcagagagccatagctgacaaactgctctcctacgagccaatttcgacttatgccacagcctatcgaatcgcggggtctgtatgcaaaaacgccgttccacacgtgggcaaggcaaagctcttgaagctggacatcgcacatttcttcgattcagttttgtattcaaccgtgaaggagaacgcattccctaaggagaaatatgctgagaagatcagggtgctgctcgctatgttgtgctattgcggagaggtactgccccaaggcgctccctcctctcctatgatcacaaacattattatgcgagacttcgacgaagccgttggtaagcggtgtcgggccctgggagtctcctatacaagatactgtgatgacatgactttttcaggggatttcgatgaaggagagatcgtgcctttcatcagagacgagcttcgcaagcgggggttctttctaaatgaaaagaagaccgcagtggtccccttttgtcgtcggcaaattgtcacgggcgtagtggtgaacgaaaaactgaacattagtgcggattacaagagaaaaattaggcaggaagtcttctttctccgcaaatttggcgttgctgatcatctgaggcgcactgcctctccattttctgaaaagcagtacctgatgagactgctggggcgcatcaattacgtcctccagataagcccagacgacgccaaattccttgattacaaagaggctgtcatcaggatactgaaggaggccaagtga

SEQ ID NO: 9586 - RNA, 987 nt, synthetic construct
  source 1..987: mol_type = other RNA
atgtgtgggaccacgttccgcccaatagccatacaaatgtactgcctcgcagtcgtttacgtttcgatgattgtgtacactgagctaaagtcagtggagcaggaccttggaatcagtgccaaaacccttttctccgtgagcaactccctgagctctcattataagagggtcaagatccctaagaagaacggctcctttcgcgaattatctgtgccggatgaagttctcaaaaaaatccagagggccatcgtccagaaaattctcgtgtacgaaccaatttcaaagtacgcccaagcttacaagacaggagctagcgtgcagagaaatgcatcgcaccacgtgggcaaaaagaaaatattgaagctggacatcaagcacttctttgactccattctgtactctactgtcaaagacaaatgctttcccgccgagcggttcagtgaacctattagaatcctgctctccatgctgtgctataatcgcgaggctttaccccagggcgcacccagttcacctatcataactaacatcattatgcgtgacttcgatgaaaaagtcggtgatttctgtcgagagcggaatatcatttatacgagatactgtgacgacatgaccttttcaggggactttgatgaaaagccgattattgagtttgtcaaggcggctctcttcgagtacgggtatctgttgaattctaagaaaacaaccgtggttagcagctctgggaggcaaatcgtgacaggagtagtcgttaacgaaaaaatgacagtgcccgccgagtataaggcgaaaattcggcaggaggtgtatttctgcaaaaagttcggcgtagagaaccatctagagcacatccattatagtaaggataccaaggcatacctgcagagcctgttgggtcgagtgagctttgtactgcagactgaaccaggcgatcaagagtttctggaatacaagacctatcttaccgagatcctgtcccagatctga

SEQ ID NO: 9587 - RNA, 921 nt, synthetic construct
  source 1..921: mol_type = other RNA
atgattgtgtacactgagctcaaatcagttgaacgcgacctggggattccattaaagaccctgttctccgtgagcaacaacttgagcgcccattacaggacagttaaaattcccaagaaaaatggctctttcagggagctccacgtcccagatgaggtgctgaagaagatccagagagcaatcgctaagcggattctggcttacgaagcaatcagcacatatgcacaggcgtatcgcttcggagccagcgtccaaaggaacgcatcccatcacgtaggaaaaaagaaaatcctgaagcttgacatcaagcacttctttgactctattatctacagtaccgtgaaggagaagtgttttccctctgaacggttctccgaacgcgtccgggtgttactctcgatgttgtgctattatagagatgctttgccgcaaggagccccttcaagccccgtgattaccaacataataatgcgagactttgatgagagagtgggtgccttctgtaaagagcggaacatatcatattccagatattgcgatgacctgacgttctccggggatttcgatgagaaacctgtcgtggaatttgtaaagacagagctgtttcagcgtgggtacctgctcaaccatcagaaaacgactgttgccagcagttctcagcgccagcttgtgaccggcgtcgtggtcaatgaaaatatgactgtaccctgtgagtacaaggccaaaatcagacaagagatgtacttttgccagaaacatggtattgaagaccacctgcaccacatccagtatacaggcgaggttcgtgcttacgtgagttcacttctaggcagggtgagtttcgttctccagactgaacctgagaataagaccttcatggaatacaaggcgtttctaatcaatgccctgcgaaggttttga

SEQ ID NO: 9588 - RNA, 924 nt, synthetic construct
  source 1..924: mol_type = other RNA
atgattgtctacacagagttgaagtcgatagagaaagatcttggcatacccctgaagacactcttctccgtgtcaaataacctatctagccactacaagaaagtcaaaatcgccaaaaagaatgggggtactagagagctgagagtcccagattacatcctcaaaaaaattcagcgcgcgatatgcgacacctttctggtgtatgaacccatcagtaagtatgctcaggcatacaggttcggcagtagcgttcagaaaaacgccagctaccacattaacatgaaaaagatcctaaagctggacataaagcatttctttgactccatcctttacaccacagtgaaagataagtgctttcctagtgatcggttctccgaacccattaggattctcctttccgtgttatgctactatggcgatgctctgccacaaggtgccccaagctcaccggtaatcaccaacattataatgaaggacttcgacattgaagtggggagtttctgtgagaagcggaacatctcatatactcgatactgcgatgacatgaccttttctggcgattttgacgaaaaggagatcatctcctttgttaaagagaaactgttcagctgtgggtatctcatcaacaacaagaaaaccacagtcgttaaggagggcaaatgtcaactggtgacaggaattgtagtgaataagaggctctcaaccccttctgaatacaaagctaagattcgccaggaaatctatttcggaacgaagtacggatttgagaaccacttgaatcatactggaaatcagacggagctgaagtcctatatcgaatctttgttagggcgtgtgtctttcgccctgcagactgagcctgacaataatgaatttaagaagtacaaggcacagctgatcaaatataagaaaagcattagctga

SEQ ID NO: 9589 - RNA, 924 nt, synthetic construct
  source 1..924: mol_type = other RNA
atgatcgtataccgcgaattgtccagcgttgaatccgatctggggttctcttccagggagctctatgcactatctaattcaatagaccgacagtatcgcgccgtgaaacttccaaagagtgacggcacataccggaccctgtctgtgccctcacagaagctgaaagcggtccaaagggccattacagaaaagatcctggtccatatgcccgtgtcccgatacgcaaccgcctatcgctacggggcttccgttcagagaaacgcaagggtgcacatcggcaaagagaaggtgttaaagctggacatttaccacttttttgacagcatacggtaccaacaacttaaagataaggtctttacggccgacagattctcagagtcaatccgtattctgttgtcgatgctgtgttattacagagatgtactcccgcagggggctcctactagcccagctgttagtaacattatcatgcgtgattttgacgataccgttggagctttctgcgcggagcggggtctagcttatacaagatactgcgatgacatgactttttctggatcgttcgactatgccgagattatcaagttcataaagaacgagcttcacaagaatggcttcatcctcaacggtaaaaaaactaagctggtgagctctgccaatagacagacagtcaccggaatggtggtgaataagaaactcagtacccctagtgattacaggcggggcattcgcagggaggtctatttcattaagaaatatggcgctgccgaacatctgaaacatatcgagagcaatctgagccccaaacagtacctgcagtccttgcttgggaaaattgcgtttgcactcgaagccgcacctttcgacaagcacttagtggaagccaaaaacgccataatcagcgagatcaagaaggaaccatga

SEQ ID NO: 9590 - RNA, 945 nt, synthetic construct
  source 1..945: mol_type = other RNA
atgtactgttcgggagaaaaaatgatcgtgtatagagagctttcctctgtggaggccgatctcgacttctcagcaaaaactctgtactccttaactaacgatattgagaagcattacagacgagtggagattcccaagcatgacggtactttcagggtcctgtacgtgcctgacacgctgctgaagacagtgcagagacggatcgcgaatcgcattctgcttctggaaccaatcagcaggtacgctaccgcttataagcgagggtcttttataaggaaaaatgcttcctgccatgtgggaaaggaaacagtattgaagctcgacataaaacacttcttcgacagtatcctatactcacacgttaaagacaaagtctttaccgagaagcggttcagtgagcccattagggtcctgctgacaatgctgtgttactacaaggatcggttaccgcaaggcgccccaacttctcctgtgatcaccaacatcgttatgcgcgactttgacgagacagtagggaattggtgtaaccaacgcggtatcacgtatacaagatactgcgatgacatgactttctctggctcctttgatgtcaacgaggtcaaaatctttgttaagtccgaattgcggaaaattgggttctttctgaatgagaagaagaccgtcagcgccaagggaacccagcggcagatcgttaccggcattgtcgttaacgagaaacttaacgtgagcagcgaatatcgtaagaaactcagacaggaagtgtactattgccgcaagtacggcgtggaagaacacctaaagaggataggcaatagcgtggatgccaaaaaatatctgcagggactcttggggcgtataagttatgtacttgaagtgcgatgcgatgataagtcattcctcgcagacaaagagtttattgcaggtttgatcaagcagtatgagtga

SEQ ID NO: 9591 - RNA, 930 nt, synthetic construct
  source 1..930: mol_type = other RNA
atgaagatagtttacaaagagctgtcctctatcgaggctgatcttgggtattctgcccatatgttatacgctctctcaaatagtatagccaaacactaccgcagtgtaagtattccgaagcacgacggaactagcagaaccctatccattcctgatgcccccctgaaggcagtgcagcgaagaatagccagcgtcatccttccattgctcccaattagccagtatgcaaccgcctatagatgtcgagggggcattgtcgcaaacgcgagtccccacagagggaaagataagatactcaagctggacatctaccgattcttcgactccatcatgtattccgctgtcaaagaccgcgtgtttacacgggaccggttttccgagccaatccgcgtattgctgagcatcctgtgttactacgacgacagactgccccagggagcacctacatcacctgccatctcaaatattatcatgagggaattcgacgacgccgtgggaaagtggtgctctagacggggtattacctacacgcggtattgcgatgatatgactttctctggcgattttaacgcggctagggtggttgcattcgtgaggcgccgactgaagaagtacggcttcctcctgaatgacaagaaaacccatgttgctagatattttaacaagcaggtcgtgactggtatcgtcgtgaaccgtaagctgaatgtgccttcaagctaccgtaggaaaattaggcaagagatgtacttttgccgcaaacacggcattgaggaacacctaaaattcatccatgaccccacaccgccccaagagtacatcaggcggcttctcgggcgcgtgggctatgttttgagcgtgtcgccagatgatggagaattccgtaaatatcgggattttttacggagggccctggctcaggaatctgaatga

SEQ ID NO: 9592 - RNA, 921 nt, synthetic construct
  source 1..921: mol_type = other RNA
atgatcgtataccgggaactcggctctttggagagcgacctgggcttctcactaaaaactctgtatgcactgtccaataacatcaagaagcactacgtgtcggttgagatacccaagagaaatgggggggtcaggtgcttaagcgtcccggacgagatcctcaagcgcgtgcaacgccgaatcacagaggtgattctaagtggacagagggtttcaaaatacgcaaccgcatatagatacggcgccggtatcctgaaaaacgcctccgagcacgtggggaagccaaaagtgcttaaactggatatcctccatttcttcgacagcatatcctacagtgaagtcaaagagaatgtatttgtgaaggagcgttttagcgaatctgttcgcatccttcttaccatgttgtgctattgcggcgacagattgccacagggagctccttcctcacctgccatcacaaacattgtgatgagggatttcgacgaaaaggtcggagcctggtgtaaagagcaaggaattgcctatactcgctattgtgacgatatgacgttcagtggcgattttgatgaacggtccatcattgcttttgtgaaacaggagctcctgaaaaagcacctggtactgaactacggtaagacgtctgtgacaacccccggcaaaaggcagattgtgaccgggatagttgtcaatcagaagcctaacataagcgccgactatcggagaaagctgaggcaggagatttattactgtaagaagtacggtctggaggagcatgcgaatcgtattggagaagacgatacccaaaaatacctgctgggtttgcttgggagagtctcttacgctctccaggtgcggcccgatgacgttgctctcaaggaagtgaagcggtggttaacacagactatcaacgaacgaggctga

SEQ ID NO: 9593 - RNA, 921 nt, synthetic construct
  source 1..921: mol_type = other RNA
atgattgtgtacaaagagctgaaatctcttgagtccgatttaggattttctctcaagctgctatacgccctgagcaacaacattaagaagcattactcaaccgtcgaaataccaaagcggagtgggggagtcaggaggctgtccgtccctgacgaaattctgaaaggcgtgcaaagaaggatcgccgttgttatcctgtcaggacagagcgtctctaggtatgcctccgcctatcgttacggtgcatcggtggttaagaatgcggcagagcacgtaggccgaaagaaggtgcttaaattggatattctgcacttcttcgattctatctcttatagcgctgtcaaggagaatgcattccctagcgaacgattctcagaaccggttaggatcttgcttaccctgctgtgctattacggagatgtccttccccagggcgcgccaagttcccctgtaatcacaaacattgtgatgcgcgatttcgacgaaacggtaggcgcctggtgcgaagagaaaggcatatcctatacacgctattgcgacgacatgacatttagtggggactttgatgaaaaggctgtgatcgactttgtcaaagaagagttgcgcaaaaaacggctcctgctcaactacaagaagacctcactaactaatagaggggggagacaaactgtgaccggtatcgtggtgaacgagaagcccaatatcactagtgagtaccggcgaaaactgcgccaggaagtgtactattgtcagaaatacggcgtgagcgagcatacaaaacggattggtgaggcagatgctaagaaatacttgagagggctcctgggacgggtgagctatgcccttcagataagacccgacgacgcctggttagttaaggctaagtgtgagctgctcaagctcattaaggagcgtcactga

SEQ ID NO: 9594 - RNA, 921 nt, synthetic construct
  source 1..921: mol_type = other RNA
atgattgtgtatagagagctgtcaagcctttcaaaggacttgggagtgagcaagagcagcctgtacaaactgtcaaattctatcaacaagaactaccacaaggtcgaaatcccaaagaagaacgggggcaccagagtgttgtctgttccctccgagaacctgaaggaagtacagaggaagattacaaaagtgatcctatcgaaggagacagtgagtattcacaccactgcctatcgctatggtgcatccaccgcatataatgctagccaccacgtcaataaggacgttgtactcaaattggacatccttcacttctttgattccatcctatacagcgacgttaaagacaaggtcttccccgctgaaaagtacagtgagcaaattcgtactctgcttgcgatactgtgttaccataaagattctttaccccagggagcaccttcatccccggccataacgaatatcatcatgcgggattttgataatacagtgggcgaatggtgcaggaagaaaaacattgcctacactagatattgcgatgacatgaccttcagtggaaattttgacgccaaagaggtcatcgggtttataaagatccagctgagggagaacggcttcctcctcaacaccgccaaaacacgagtaattcggcgcaacaggagtcaaaccgtcacgggcatcgtggtgaacgagaaaataaatattcctgctgactacaaacggaaacttagacaggagttatactattgtaagaagttcggggtgaattctcatatggctcgcatggatttcgacggaaacgaaatgtcttatattaaccgactgctgggtaagattaattacgttctgtccgtgactccacatgataaacagatgctggattacaaaaagtggctcatcaatgagctcgaatatttttga

SEQ ID NO: 9595 - RNA, 909 nt, synthetic construct
  source 1..909: mol_type = other RNA
atgatcgtgtatagagaactcagctccctggagcaagacttaggtattaacgctaagatattgtacgccgttagcaactctatcaataagcactatagggaaacgtcactgcctaagaagagtggcggattcagataccttagcgtacctgacaaaatcctaaaatctatccagagacagattgctgaagtgctgctgatacacatgccaatttcgaaatacgctaaagcctaccgttttggtagtagcacactccgtaacgccaaacatcatgttggaaaacaggtagtgctgaaacttgatatcctcaggtttttcgattcaattcggtactccacagtgaaggacaaggtcttccccaaggaaatttacgccgagccactcaggattctgctgaccatgttatgttattataaggaaggactccctcagggcgcaccctcttcacctccgatcactaatatcatattgtacgagtttgacgagcagatagggcagtggtgccgcgagagagagatcagttatacacggtattgtgatgacatggcgttttccggcgatttcgaccccgctgaagtgatcaggtttgtgcgggtccaacttaagaagatgggctttttactgaatgaacagaagaccagaattcagcgcctgggacagcaacaaactgtgaccgggatcgtcgttaacaaaaagctctccgcgcccgccgattatcgcaggaagttgcgacaggagctgtactactgccggaagttcgggatccgcgagcatttgcagaagctagggctggagattaacgaacacacctatcgaatgcaactgctgggcaaagtgaattacgtcctccagttctgcccagatgaccaggagcttaaagccgcaaaaaagtggctgcaggcaaaatga

SEQ ID NO: 9596 - RNA, 915 nt, synthetic construct
  source 1..915: mol_type = other RNA
atgatcgtttatcgcgagctgtctagccttgagcaggatcttggtatcagctcaaagactttgtacgccgtttccaataacatatctaagcattaccaccgggccaaactccccaagaagtctgggggttaccgcaatctgtccgtgcctgacgagatcctgaaggccattcaacggcagattagcgaggtgttgctgattcacatgccagtgtcaaggtacgctaaagcctatagatttgggtcctcgacactaaggaacgcaaagcatcacgtgggaaagcaggtggtcttaaagctcgacattctgcactttttcgacagcatacgttacagtaccgtaaaagacatggtgtttcccgaagaaatttacgccgagccactgcgtatcctgctgacgatgctgtgttaccataaggatgaccttcctcagggagcacctagtagccctgctatcacaaacatcatactctacgagtttgacgaggtgattggacagtggtgtagagaaagaggcatcgcgtataccagatactgcgacgatatcaccttcagtggggacttcgatccggctgaggtcataaggttcgttcgcctggaattgaaagaactgggcttcctgctgaacgaacagaaaactcgcattcaaagaccaggacaacagcagtcagttacaggcatcgtcgtaaatgagaaactctctatccccgcagtgtatcgacggaaactcaggcaggaattatattactgcaggaagtttggcatccaggagcatctccaaaaaattggcctagaaactccagaggatacatatcggatgcagctgctcgggaaggtgaattatgtccttcaggtccaccccgatgataaggaaatgttggaggctcgaaagtggttacaacagtccaccaaatga

SEQ ID NO: 9597 - RNA, 915 nt, synthetic construct
  source 1..915: mol_type = other RNA
atgattgtctacagggaactttcgagcttggagcaggatctgggaatcagcgctaagactttatatgcggtcagcaataatctgaacaagcactaccgaaaggcaaagctccctaagaaaaatggggggttccgcaatttatcagtgcctgacgaagctctgaaaactattcagaagaggatagccgaggtgctgctgatccacatgcccattagtaaatatgccaaagcatacaggttcgggggatccacactccggaacgctaagcaccatgtgggtaagcaaatcgtgctcaagctggatatcttgcactttttcgactccatcagatactccacggtaaaggacgtggtttttccggagaaaatttatgctgagcctcttaggatcctgttgaccatgctatgttaccataaagacgcgcttccccaaggcgccccaagttctcctgccattaccaacatcatcctctacgagttcgacgagcagataggcggctggtgtcgaaaccagggtatcgcatatacccgttattgcgatgatatgacttttagcggcgattttgatccctcagctcttatacagtttgttcgcctcgagctaaagaagatgggcttcctgctgaatgaacaaaaaacaagaatccagcggtctgggcaacagcagaccgttacaggcatcgtggtaaacgaaaaactctctattcccgccgactaccgcaggaaactgcggcaagaactctactattgcagaaaattcggaattagagaacatctgcagaagataggtctggacatcccagaggatgcctaccggatgcagctgttaggaaagattaattacgtcttgcagctgtatccagatgaccgtgacatgattgccgcaaagaaccagattatcgccaaatcccgctga

SEQ ID NO: 9598 - RNA, 915 nt, synthetic construct
  source 1..915: mol_type = other RNA
atgatcgtctatcgggaactcagttcactcgaacaggatctgggcatttcatctaagaccctttacgctgtgagcaaccacattaacaagcactaccacaaggcaacactgccgaaaaaatccggcggatttcgaactctgagcgtgcctgacgaagcgctgaaatcgatccagagaagaattgtcgaggtactgttaatctccatgcccgtcagcaggtatgcaatggcatacaggtacggctcatcaaccctgcagaatgctaagcatcatgtggggaagcagctggtgttgaagctggacatctttaggtttttcgacagcattcggtatagtacggtgaaggacaaggtgttcccagaagagatttacgccgaatctttgcgtattcttctcacaatgctttgctatcacaaagacgcactgccacaaggagcgcccagctctccagctataaccaacatcattttgtacgagttcgatgagagagttggccagtggtgccgagatcagggtatcgcctacaccagatacagtgatgacatgacactatccgggtcctttgaccccgctgaagttatccggttcgtacgtctcgagcttaagaaaatggggttcctgctgaatgaacagaagactcgcatccaacggcccgggcagcaacagtccgtcactggaatcgtggtgaatgagaggttatctatccctgccgattatcgcaggaaattacagcagcagctctactattgtaaaaagtttggcgttcagtctcatctaacaaaaataggtctggaggtcagcgaggccacctatcgcatgcagctcttgggaaaaataaattacgtgctgcagctctcccctaacgatcgcgacatgctggaggccagacggtggcttcaacaaagtgccgagtga

SEQ ID NO: 9599 - RNA, 912 nt, synthetic construct
  source 1..912: mol_type = other RNA
atgatcgtgtacagggagttgtcgagcctggaacaggatctcggcttttcagcccgcactctgtatgcagtatcaaacaacttgacaaagcactaccacgagacaaaactccctaagaagtccggcggattcagaaagctcagcgtccccgatcaagttctgaaagcaatgcagaaacgaattacggaagtgctgctcatatacatgccggtaagtaggtacgctatggcctaccggttcggcagttccacgatccagaacgcccggtatcatgtgggaaaacagattgtgcttaaactcgacattctgcacttcttcgattcaatacgctacagcgacgtgaaagacaaagcttttcccacagccatctatgaagaaccacttcggatcctgctgaccatgctatgctaccataaagacgctctgccacagggagccccttcctctcctgccattaccaatataatcctgtacgaattcgacgagcagattgggcaatggtgtagggagcggaatatcacatataccagatactgcgatgatatgacctttagtggggattttgaccctgcggaagttatatgcttggtccgccaagaattaaagaagctcggttttcttcttaacgaacagaagactaggatccagcgtcccggtcagcagcagactgtcaccgggatcgttgtgaatgagaaactgtctattccctctgactatcgtcgcaagctgaggcaagagttatattactgtcgaaagttcggcatgcaggagcatttacagagaacaggatctgagattagcgctgatacttatagaagacaactgatggggaagatcaactatgtgctacagctcaccccagacgatcgggacctgttgcaggcaaaggagtggctgtccaatgagggctga

SEQ ID NO: 9600 - RNA, 921 nt, synthetic construct
  source 1..921: mol_type = other RNA
atgatagtctacagagagctgtcctccttagaacaggatctggggattcgagctcagaccctgtacgccgtgtcaaacaatctggggaaacattataggaacgcaaaactgccaaaaaagagcggaggataccggactctgtctattcctgacgccgtactaaagtctatccagaaacagatcgccgaagttctgctgatacatatgccggttagccgccacgctaaagcttaccgatttggtagctccacagtccggaatgcaaaacctcacgtcggaaagccaatcgtcctcaaacttgacatcctgcactttttcgattcgattcggtatagtaccgtgaaggacaaggtgtttccagccgagatctacgccgagcccctcaggatacttctcactatgctatgttatcatcgcgatgcgctcccccaaggagcccctagtagtcctgcgatcactaacattatcatgtacgaattcgatgagctggtaggccagtggtgccgagagcgcaatatcgcttacacaaggtactgcgacgacctgacattcagcggggatttcgatccctatgaggttattcgctttgttcgtcaggagttaaggaatatggggttcttgttgaacgaacagaagaccagaatccagagatctggccagcagcagtcagtgaccggcatagtcgtgaacgaaaagctctccattcccgcaagctatcggagaagactgcgtcaggaactttattactgccgcaagtttggcgtgtcagaacacctgcggaaaagcggcctggagattctcgagtcaacatataggatgcaattattgggtaaggtgaattacgtgcttcaagtgagtccagacgaccaggacatgttggatgcaaggagatggctccaacaaacgtccaagtcttgttga

SEQ ID NO: 9601 - RNA, 933 nt, synthetic construct
  source 1..933: mol_type = other RNA
atgattgtctatcgtgagctcagctctttagagcgggacttagggatcccagccaaaacactgtacgccgtatccaatagtctttcccggcattaccgcatggtgagtatccctaagaagaccggcggggtacgaaatcttatggtgccagacactgctctcaaaaccatacaacgcagaatcagcgatgtccttttggcgcacatgcccgtttctagctacgccacagcatacagatttggaacatgcacgctccgaaacgctgctgtgcacgtggggaagcccgtggttctcaagctggatatctaccacttctttgactctatcccatactcgctagtgaaagagaaggcattccctgcccatatctatgcagagcagattcggacgcttctgactatgttgtgttatcacaaggatgtcctgcctcaaggagccccgtcaagccctgctattgtcaatataattctcgcgaactttgacgaaaggattggcagatggtgtacccagcggggtattgcatacactaggtattgtgacgatcttaccttctcaggcgacttcgatcccaaagacgttatcgcctttgtggagggccagctgaagtccctcggcctgctgctgaataccaacaaaaccagggttcagaggcagggtcagcaacagctcgttactggggtgatagtcaacgagaaacccggagtgccagccgtataccgcagacagctgcgtcaggagatgcactattgccagaaattcggagtgggggaacatctgaagtttctgggacaaggcatctcagaagaagcttatctaaggcagctgctgggtaaggtgaactacgtcctgcatattgtcccggattgcgaggaattccaacagtatcgcacatgggtgttacagaaattgcagaatatctccttggccaagtga

SEQ ID NO: 9602 - RNA, 930 nt, synthetic construct
  source 1..930: mol_type = other RNA
atgattgtttaccgtgaggcccctaccctagcgcgggatttaggagtaggactccacacactctacgctttaagcaatcgcctgagcgcacattaccatacggtggaactgactaagcctaacggcggcgtgagacggttgaccgttcccgatgaggccctgaaaggcgtccagaggtcaatagcccgcaatctgctggcttgcagggaactctccccctatgcgaccgcctaccgttacggggcaggaaccgttcggaatgctagtgcacatgtggggaaggcacgtctgctgaagatggacatctaccacttctttgactccgtgaactactctgctgtgaaggatgccgtatttccagccgaagtgttctccgagcctctaagaattctattgacgatgctgtgttattaccaggatgccttgccacaaggggcccccacaagtcctgcagtcgcaaacattctcatgagggactttgatgaagacgtgggtggttggtgcgcccggagaggtatcgcttacacacggtattgtgatgacttaacttttagcggagacgcaggtctggctggcgcgtatcggtacgccgaagctcgcctcagggagaaggggttcctggtgaaccgccgaaaaacactctacctcgacgctggcagacgacaatgtgtcactggcctggttgtcaacgagaaagtggacgtgcccgccgagtatcgacgcgctcttcggcaggagttgtattattgcaagaaattcggacttgaagagcaccttagatcagtagggtgggagggggacccaaccgcttatgcgaggaggttgctgggaagattctcttatgcccttcagatcaggccggaagatcgagcactgcttgagggcaaagcctggctggtcgaagagctgaatcgcagagccggcaagtga

SEQ ID NO: 9603 - RNA, 921 nt, synthetic construct
  source 1..921: mol_type = other RNA
atgattgtttaccgcgaggcggcctcacttgcacgcgacttgggggtggagttaaagacactgtatgcgctgtctaacagtctgccagcccactaccgtacagtggagatacccaaggccgacggaggtgtcagacgactgactgtccctgatgaagccttgaaaagggtgcagagggctatcctgaataacctcctggtgcatatgccagtatccccgtacgctaccgcttatcggtatggaggcggcgctgtctgtaatgcagccaggcatgtgggcagaccccaggttttacggctcgacatcaggcacttcttcgatagtgtcaggtattccgcggttaaagacgcagtgttcccgccagaaatattcagcgagccactcagagttttactgaccatgctatgctattacagagatgcattgccccagggtgctcccacgtctcctgccatcgtgaatatcctgctcagagattttgaccggagagtcggtggctggtgcagagagcggggcattgtgtacacccggtattgtgacgacctcacctttagcggcgaggatttgtcaggggtgcgagccgtaacggaagccgaactgcgggatctggggtttttcctcaatgagaggaaaacccggcttcgtagcgcagggcagcgacaaacagtgactggacttgtcgtgaacgaaaaggtcagggtaccccgggaagagcgcagagcaattcgccaagctgtttactgttgccgccgctttggtctagaggaccacctggctcgcacaggggtgggacttactcctgaagcctgcctgaaccgattgctgggccgggtgggatacgtacttcaggcagaccctgattgtgcctgggccctagaggctagacgttggctcctggaggaaaggcgccgaaggatctga

SEQ ID NO: 9604 - RNA, 942 nt, synthetic construct
  source 1..942: mol_type = other RNA
atgatcgtgtacactcacaccgaaactctcgcccaagacttgggcattcccgctgcgaccttattcggtgtatccttccatctggaccgccactacagacgagtgacactcccaaagcgcgatggtggggtccgcacgttatgtgttccagacccgatcctcaagaaaattcagaggaggatcctgcgggtgctgctcttccacagacccgtgagcccttacgccaccgcctacagaccaggggtaggattacgtgccaatgcactgccgcattgcgggcggcagtgtgtccttcagctggacatcagacagtttttcgactccgtccggtatctccaggttaaggaaattgtgttcccaaaagaaatcttctctgagaagctacgggtattgctgagctgcctgtgctatggcagagacggactgcctcaaggcgctcccacgagtcctgccatttcaaacctgctgttgagggactttgatttgcgcgtcggagattggtgtgctgcaaggggcataagatatacacggtactgcgacgaccttactttctcaggcgcttttgatcccaaaccagtcatccgaatggtgagcgatgcactatggcgggagggctttgtgctgaatcctcggaagacccgcttttcccggtctggacaacgccagacagtgaccggtgtggttgtgaacgatcgacctcgactcgatgcggccaggaggcgagcacttagggctgagctgtattactgtagacgctttggggtggccgaccacctgagtcatataggggatcccaggacacctagagcctatttgctctcgctgcttggacgtctggatttcgccctgtctctgggcgctgagccacagctagcagaggggaggcgttgggttctcgaacagcttaaacccagcaaacagaaggaagagattgacggttga

SEQ ID NO: 9605 - RNA, 933 nt, synthetic construct
  source 1..933: mol_type = other RNA
atgattgtgtatactgagacagccaccctcgagagggatctgggcatcccagcaaagaccctgttcgctgtctcgcatgaccttaagcggcactaccggcgggttgagctgtccaaagcagacggaacagtgcgtgtgctcagcgtacctgatgcagtgctgaagaaaatccagaggagtatcaacgcgaacctcctcgcatatatgccaataagtccctacgctacagcctacagaccaggcggaggcgtgagacgcaacgccttaccccactgcggccaggaacagctgttgaaactcgacatccggagatttttcgatagcgtgcgctatacacagcttaaagaaaccgtctttccggccgccgtctacgctgagaagctacgggtgttactctctattttgtgctactcaaaggaggggcttcctcagggtgctcccacctctcctgccattgctaatatactgctgcggcagttcgacgagactgttggtggatggtgcggggccaggggcattgcttacacccgatattgtgacgatcttgccttctcagggaggtttgaccccgctgcagtcatctgtactgtgcaggaggccctgaggagagaggggtttagcctcaatgcacaaaaaaccaggctagcgggacctgggggtcgtcatctggtgactggggccgttgttaatcttcgacctcgagccccagccgaagagagaagagccctgagacaggaactgtactattgtgaaaagttcggcgtacgaggccacctcgtccaaacgggagatccacgtacggctcaggcatatctggcggcgctgctaggcaggttggactacgctctgtccctgtcccctgaaccgcgcttggcccaaggacgcagatgggtgttggatcgcttaagggaggaacgcaccgcacggccctga

SEQ ID NO: 9606 - RNA, 924 nt, synthetic construct
  source 1..924: mol_type = other RNA
atgggcattgtctaccaggaaggaccaagtctggcccgcgatcttgggttgccgttgcgcaccctctacgctgtgtcaaatcgtattcccgctcactaccaccgcgcggaagttcccaagagagacggcggggtgagagtccttcgtgtcccagacccagtgctgaaagacatacagaggcgtatcgcccgtgttctattatcgggaatgcctgtgtccccccatgccacagcatacagatacggagcaggcgtagttgagaacgcccgccgccatgtgggaaggcctgaactgctgaagctcgacatactccacttttttgactctatcaggtacattcaggtgaaggaagccgcctttcctgctgagatctatgcggagcctctcaggacgctgctttccatgctatgttatgaccgcgatgtccttccgcagggagctccaaccagcccctggatcgcgaacctggtactgcggccttttgatgaaaaattaggtgcatggtgtcgggcccggggagtggtttatacacggtactgcgatgacttggccttcagcggcactgcactggatggggtggaggagagggctgaggaaggccttagggcactcgggttccggctaaatagagccaagagggccctgtgccgagatggtcagcaaaaacgggttactggcctcgtcgtgaacgagcgagtggctgtgccagcatgttgcagacgacggctgcggcaggagctgtatttctgcagacgcagaggcgtcgaggaacatctgagggcagtgggcttggctgaggggcgagaacaatgtctcagacgattactggggcaggtagacttctggctgcaagctcagcccgattctcaggaagccgccgagtataggagatggctgttggacgagatgcgcgatggtcggtga

SEQ ID NO: 9607 - RNA, 930 nt, synthetic construct
  source 1..930: mol_type = other RNA
atgaaaatcgtgtacagagaggccagtaccctggcccgagacttgggcattccgctggacatcctttatgctgtcagcaatcgtctggatgctcactaccacaccgcagtacttcctaaacgcgacggtggaacaagaaccctgactgttccagacgggctgctaaagcggattcaaagggctatcctggagacattgcttgtgcacatgcccgttagccgcaacgcaactgcgtaccactacggggcccgggtgacaaagaacgcagcacctcatgctgggaagaggtttctgctgaagctcgatatcgcccgtttcttcgactccataagatatacgtctgtcaaggaagctgccttcccaccagagatttatgcagaacccttgcggattctcctagcgatgctctgttatcatcgggatgctcttccgcaaggagccccaaccagtcctgccatctcaaaccttgtgatgcgccccttcgatgaacaggtggacggttggtgtagggctcgcggcatcgtctacacaagatattgcgatgatatgacctttagcgcgggcaggcctctaggaggtgtgcatggattcgtgcaggacgctctggggggcatgggtctgctgttaaacgagcgaaaaacagcaaggttccacgcaggccagcgacagactgtcactggcttgaccgtaaatgatcgccctaatgttccccccgcttacagaagggccttacgccaggagctgtacttttgccggaaatttggagcggcctcccatctcgctcacatagggctcgacatggatgtccctacgtacttacatcggctgctgggaagagtgtctttttggttgcaggccgaccccggcaatcaagaagccgcagcctataggagatggactctcgcccagctggactcagccctcccatga

SEQ ID NO: 9608 - RNA, 942 nt, synthetic construct
  source 1..942: mol_type = other RNA
atgattgtctatcgagagctgtccaccctggccggcgatttaggcgtgtcgggacggactctgtacgctgtgtcaaacagcctccctaagcactaccgcacagtagagctcccgaaaggggacggggccgtaagaaggctttcaattcccgacagggaattgatggagattcagagacgtatacttaatcgcctgctcgtgtacatgcccgttagtccatacgcagcggcatacagacgcggcgttgatcatgcggctggtgcgcgtcctcacatcggaaggccagtgctccttagacttgacatccgacacttctttgactccatcttgtatagcgatgttaaggagtatgcctttcctgctcatatatacgccgaacccctccgagtgttactgtccatcctctgctactgtggtgatgctctgccgcaaggggccccaacatccccagtggttagtaatcttgtgttaagggatttcgatttggaaacaggcgcttggtgtagcgctcgggggatttcttatactaggtactgcgacgacatggccttctctggcgcctttgaccctgtcgaagtgtctcggcttatcgccggaaaactgcgcgaaaggggcttcttcctaaacgaggagaagacccgcgccatgttcgctggccagagacagaccgtcacggggctggtcgtcaacgaaaggctgaatctgccacgggagtatcggcgagcattgcggcaagaactgtatttttgcaggagatttggagtgagcgcacatctggccagaaccggagcagctcctgaacccgaggcatgtctgcggtcactactcggtagagtaagttacgtgctgcagatctctcccgaaaaccgcgagatgctcggatatcgcgagtggctgctgcaggagctagccttgctgcactccggtgagcgtgacagctga

SEQ ID NO: 9609 - RNA, 930 nt, synthetic construct
  source 1..930: mol_type = other RNA
atgatcgtgtatcgtgagctggagactctgaccagagacttagggattggagcgggcgtcttgtacgccgctggcaaccgaccagaggcacactatcgaaccgtgtcaataaccggtggcaacggcactgtgagaacactttctgtccccgaccctatgctcatggctatacagcggcgcattttattccgcctgttggtacatatgcccgtgtctccgcaggcagctgcttaccgctgtggtgttagcaccttgagcgctgcacggtttcacatcggcaagcccgttctcctgtgcctcgatattaggcactttttcgacaatatccggtacgcagatgtcaaaagatatgctttcccccctgacatctacgcggaaccacttcgcgtgctccttacaaggctgtgttatctgagagacgcactccctcaaggagctcctacatcccccgcgatctctaatctagtcctggccgactttgatcgggctctcactagctggtgtgcccccagggggatcgcctacaccaggtattgtgacgatctggccctgtccggggatttcgatcctgatcaggcctgcgaaatcgctgccgccttgttacgacagcatggctttcttctaaacccagccaagaccaggataaggcgagccggtactaggcagcaggttacaggactgattgtgaacgaacggccaagtgtgccacgtgaatatcggcgggcactgagacaggagctttactactgcagacgtttcggggtagccagtcagatgcagagacgcgggttttgcggaaaagagacgtcctatctgcaatcactcctgggaagagtcaattacctgctacaaattaggccggacgacgtggcagccaagcaggatcgcgactggctcctggccttgctgcatacacaacagacgccttga

SEQ ID NO: 9610 - RNA, 936 nt, synthetic construct
  source 1..936: mol_type = other RNA
atgcccgataggattgtctacaacgagctgagctctatagagctcgatctagggtttaccgcacagcagctctatgctgtatccaatagcttgcatagacaatacaggcaagtaaagcttcctaaggctaacggaggatatcggacactttctatcccttcacctttactcaaggccatccagcgacgcattactacagttctgttggcccaggagccagtcagtccttacgccacagcctatagatatggcgggggtcccttacggaacgccagacagcacgtgggtcggcagatggtagtgaaactggatatacggggatttttcgaccacatcctctattccgacgttaaggacgcggcatttccagcagatcggtatgccgaacctcttagggtgctgctggcaatgctgtgttactacggcgattccttacctcagggtgcccccacatcgccggccatttcaaatatcgtcctgaggagctttgacgatgctgtgggagcttggtgtcgagcccacgggatcgtgtacaccagatattgcgacgacatgaccttctctggcccaccagaggtcaccgaggtgattccgttcgtgcaggcccagttggagcagcgcggcttctacctaaaccgccgaaaaatggtggttgcgcaccgtgggtgcaagcaaacggtcactggcctggtggtgaataggcgcctcaacgttccagctggctacagaaagaaacttaggcaggagctgtattactgccgtaaattcggactggttcaacacctggcgcatattggggacactacaccccccatgacttatgcaagacgcttgctgggcagggtcaattatgtgctggctgtgagtcccgaccgggaagagtttagagaataccgccattacctcacggaatggtgtcagacctacaccgaatga

SEQ ID NO: 9611 - RNA, 939 nt, synthetic construct
  source 1..939: mol_type = other RNA
atgattgtgtaccgcgagctctcgtctctagtaagggacctgggcgtggaagccaagacattgtatgcgctgtccaactcactcgaaaagcactaccatcaagtgaagatccccaaaagggacgggggctatcggcagctcagcgtacctgatgagcaacttaagcgggtccaacgccagatcgacagagtgttgctggctaggatgcccgtctctccatacgcaacagcctatagatgtgggtgcggaattggcaggaatgctctgccgcacttaggacagcccggggtgttaaagcttgatattcgccacttctttgatagtatcccttacacggccgtgaaggagcgcgcttttcctggtactatctacggggagcctctgagagttctcttgaccatgctgtgttattacagggactccctgccccagggtgctccaagtagccctgcgatcaccaacataatcatggccaaattcgacgccagagtgggccagtggtgcgcacagagagagattcggtatacacgctactgcgacgatatgaccttttcaggctcctttgatccccaagaggtggtcgctttcgtgaggcctctgctccgagagatggggtttttcctcaacgagaagaaaactcgattcttaccagccggacgacggcaggtagtcactgggatagttgttaatgaaaaaccaggccttccagccgagtacctgcgacgtttgcgtcaggaagtctatttctgccagaaatacggaaccgcagatcatatggcacgctgtggcattcagggtcccgctagcggctatctgaggagactgcttggccgggttaattacggtcttcagatcctaccaggaaaaaaggaactgctcgaagcccgggcatggctgatgaaggagatggcccgtgaacaggaaggagacagaccgtga

SEQ ID NO: 9612 - RNA, 945 nt, synthetic construct
  source 1..945: mol_type = other RNA
atgatcgtctaccgtgagctttccagcctggttcgcgacttaggtatccccgctaaaaccctgtatggggtatcaaatactgttgagactcactaccacaaggtgcagctgcctaagagggatggcggcgtgcgagagttgagcgtccctgaccccatcttgaaacatattcagagacgaattacacaggtactgttgctgccaatgcccatttcccggtacgcatctgcttatcggtatggggccagtaccttacgcaatgccgctccacacgcaggccaacccggaatcctgaaactagatataaggcatttctttgactcaatcctctatagcacagtgaaggagaaagcctttccaccagaaatctacgcggaacccttgcggatcctgctggcaatgctttgctattaccgcgacacccttcctcaaggtgccccatccagtccagccattacgaacataattatggcccagttcgacgaagatgtgggcgcctggtgtagatctagaagtatacggtataccaggtattgtgatgacatgacattctctggagcttttgatcctcgggaggttaaagccttcgtctcccagaaactcagagaaatggggtttttccttaacgagtccaagtctaagtacctccctgcaggccaaaggcagactgtgacaggcctggtggtgaacgaaaagcccgctgtgccttcagactacctgcgatccctcagacaggagctctacttttgccaaaagttcggagtgagtgatcatatggcccacctgggtattaaggagtcggaggcgcactacttagcacgcctgctcgggagggtcaactacgtgctgcagatcaccccgggaaagaaagaatgggcgcaggcccgtgcttggctccttgttcagctaagcagcctgaatgactctagcccggtcatttcatga

SEQ ID NO: 9613 - RNA, 927 nt, synthetic construct
  source 1..927: mol_type = other RNA
atgatcgtctatcgcgaactaagcagcctcgctagagacttaggcgtggatgcaagactgctctatgctgtgtccaactcccttgataggcattacaggcaagtctgtttgccgaaaaaggacgggggggtgaggaccctctctattcccgatcagctcctgaaaacaattcagcgacgcattacgcaggtgctgctagtgcatatgcctgtctctccttatgcaacagcctaccggtacgggggatcagcttggcggaatgccgcacctcacgtcggacagcccgctttgcttaagctggacatccgccacttcttcgacagcatattgtacgcgactgtcaaggagagagccttccccccagagatctacgctgagcctctgcgtatacttctgacaatgctgtgctattaccggcaaagcttaccccaaggcgccccatcctcaccggcgattaccaatattatcctgtcgggtttcgatcaggaagtgggagcatggtgtgcaggaaaaggcatccgttacaccaggtattgtgacgatatgaccttttcaggactgttttctcccgaggaagtgacaagttttaccgaagccaggctgcagccatttggcctgttccttaacggaagaaagactcgatttatcccagctggccggcgccaggttgttactggcttggtggtaaacgaaaccgtgggcgtacctgcccattacctcagaactctgagacaagagttgtactattgccggaagttcggtgtgagtgggcacatggcccgactaggcgttcccgaacctgaggcccggtacttagctcgcctgctcgggaaagtgaattatgttctgcaggtaacgccaggtaagagggagtttcagcaggctcgtgcctggctgctccaggcacttgcccactgcgaggggtga

SEQ ID NO: 9614 - RNA, 963 nt, synthetic construct
  source 1..963: mol_type = other RNA
atgatcgtgtaccgcgagctgagttctttggttcgcgatctggggatccctgctggcaccctctacgcggtttccaacacattagatcgacattatatccggcgtcagttacctaagtcatcaggaggcgtcagagaactgagcgttccagacccgctgctgaaacatattcagagacagatcctccgcgtacttctggtgcacatgcccgtgtcgccttatgccaccgcgtatagatacgggggatctaccctctgcaacgccgcaccacacgtgggcaagccctgtgtgctgaaactcgacatatgccatttcttcgatagtatactttacagcgcagtcaaagagacagcctttccggccgaagtgtatgccgagaacttgcggattctgttggccatgctgtgctatggatgggacaggctaccacagggtgcccccacctctccttgcattactaatatcctgatgagagacttcgacaatgaagtcggggcctggtgtcgggagcgacaaattgcttacacaagatattgtgatgacatgactttttccggcgatttcgcccgcgatgaagtacttcgctgtgtcgagccaaggctgagggccttgggcttttacttgaacccaggcaagacgaagtggctccccgcagacaggaggcagcttgtgaccggcatcgtggtgaataagaaatgcaacgttcccagcgaggagcgtcgggctcttagacaggagctgcacttctgtcaaaagtttggaatctccgggcacatggcacgggcgggaattgacggtcccgaggaccgatacctcgctcagctgctagggagggtcaattatcagctgcagatcactcctgggcgcagggaactccaggaagcaagagattggctgataaaggctcagcctcaatacggcggaggtcgggagacaagcccagctgaaaaacaaattttatga

SEQ ID NO: 9615 - RNA, 933 nt, synthetic construct
  source 1..933: mol_type = other RNA
atgatcgtttacagagagctcagttccttggtccacgatctggggatttccgcccgcaccctctatgcggtgagcaacggcctggatcagcattatagaagggccgagttacctaaggcagatggcggcgtacgggctctttccgtgcctgaccctttactgaaacacatacagcgcagaattacccaggtcctgcttgtacatatgccaatctcgccctgcgctacagcgtaccgttacgggggttctgttttggtgaatgcagctccacatgttgggcagtcagccgtcctgcgcctggatatacaacgcttcttcgacagtatcagatacacaagcgtgaaggaagcagcctttccagccgatatttacgctgagcccctccgaatcctgctgggcatgctctgttatcatcgggagggattgccccaaggagccccctcatcccctgccatttcaaacattgtgatggccgacttcgacgcccaagtgagcgcctggtgcagggaacggggtttgacatacactcgatactgtgacgacatgacttttagcggagcgcctgtgccatccgaggtcgtgtcttttgttagcgatcggcttaggccactgggcctgttcctcaatagaaggaagacgcgctatctgcccagtgatcgtaggcagctggtcaccggcatcgtggtaaaccaggccctcaacaccccggccgaataccgacggaaattacggcaggagctgcacttttgccaaagatatggggtggctgctcacatggcatggcagggattgacttgttctgaagacgcttatcttgcaagactgctcgggcaggtgaattatgcactacagatctctcccggccgctcagacctagagcaggctcgtgcatggcttagggcgggaggtggtaggacagaaccgcacacctga

SEQ ID NO: 9616 - RNA, 963 nt, synthetic construct
  source 1..963: mol_type = other RNA
atgcacatcttgtatggattcagtagacggaagggcccaaaccacatgattatttaccggagtatcgacacccttgccaaagacctgggtttcagtccgaaaaccctatatgctgtctcataccagactgatcgccattatgaacaggtcagtttcgcctgcggagggaagaccaggctgctgagcgtgcccgacccattgttaaagtccattcagcgtagcatctatcgcaatctgttatgtcatatgcccgtcagcccttgcgcagctgcatacagatttggcacatcgatagctcagcatgcgagacttcatgccggacagaaactcgtatatcaaatggacatacaaaacttcttcgatcacatcttgtatagcacggttaaggacaaagccttcccggaaattatttactccccttctctgaggatcctcctcacgatgctctgttactatcgggatcggcttcctcagggggcaccaacatcacccgttatcgcaaacctggtactgaaagatttcgacgagaaagtgtgcgcctggtgtaggcagcgccacattcgctattcaagatactgtgatgacctgaccttttctgggtcttttgatcccgtgtccttatatgaatttgtgaagggtgctctgtatcaggaggggttctatttgaatcccaaaaagactaggctcctcagccagtcccgaaggcagacagtcacaggcctcgtggtgaatcagcaggtgtccgtcccttcagcctaccgtcggcaagttaagcaagagatctactactgccagaagtacggcataactgcgcacatgtctcgccagaatatcgctgacaccccagagcactacctacgaagcctgcttggaagagtggactttatcctgtactaccatcaggatgcctcttgggccatggatggccgacaatggctgattactcaactgaagaacttttga

SEQ ID NO: 9617 - RNA, 912 nt, synthetic construct
  source 1..912: mol_type = other RNA
atgattatctacaaagaaatcagcagtatcgagcaggaccttgggtacgacatcaagacactctacagcatctcatacagcctccatcggcactacattagtataaagatgcccaaaaaacagggtggatataggattctgtcgatccccgatgctcctctgaagtgtatacagaagcgcatcgccgaggtcctgctgtctcaaataaatatttcaccttacgcaatcgcctataggtacggcggatccacgttaagaaatgctgccccacatataaataaggatatcgtccttaagctcgacatccacgatttctttaataacatcctgtattccactgtgaaagagaaagcgtttccgaaagaaaagtactctgagaacattcgtattctcctgagtgttctttgctattataacgacaccctgcctcagggggcaccaacttcacctgctatctccaacatcattatgtgcgatttcgacaataccatagggtcttggtgtaaaaagcacagcatagcctatactcgatactgcgacgacatgaccttttccggaagcttcgaccccaaggaggtaatcaaatgtgtggaatctgagctgaagaaaatgcggctgttcttgaacaagaaaaagacaattgtggccagaaaatccaataagcagattgtgaccggcatcgtggtgaacgaaaagctaaatattccacggcagtacaaaaaggacattaggcaagctctgtattattgcagaaagtttggcgtcgaaaatcatatggccgatgcaaatatcaacgatacaaacgagcactacattctaaagttattgggtaaggtgaactacgttctgtcagtatgtcccaacgataaagagttcatcaactatcgcgattttttgaaaggcctcatttga

SEQ ID NO: 9618 - RNA, 912 nt, synthetic construct
  source 1..912: mol_type = other RNA
atgatcgtttataaggagatatcctctatcgaacaggatctcgaatacgacatcagaacattgtactccatctcttatagtctccatcgacactaccacagcattaaaatatcaaagcggcagggaggctatagggtcttatccattccggacatgcccctgaagtgtatccaaaaacggatcgccgatgtgttgttgagccagataactatttccccctatgccaaagcttacagatatggagggtctaacattaagaatgcaaccccacatatcaacaaggacattgtgcttaaacttgacataagggacttcttcaacaatattctgtatagcacggttaaagagaaggcctttcctaaagagaagtacagcgagaatattcggatcctgctgtctatgctgtgctattacaacgatgctctgccccaaggcgctcctacctccccatttattagcaacatcatcatgtgcgagtttgacaatgccgtcggaagttggtgcggcaaacatggcgtcgcatatacacgatactgtgatgacatgacctttagcgggaatttcaaccctaatgaggttataaagtacgtgagattcgaactgcgcaagatggggttcttcctgaacaataaaaagacaattgtggcgcacaaatcgaataaacagatcgtcactggtatcatcgtgaataagaagcttaacatcccccgcaaatacaaaaaggacatcaggcaggcaatatactactgtaagaagtttggcgtgtataaccacatggaatccaccaatattaatgatacggtggagagttacattctcaagttaatggggaaggtaaactatgtactctcagtgtgcccaaacgataaggaatttatgggttatcgtaactacctgaaatcactaatttga

SEQ ID NO: 9619 - RNA, 927 nt, synthetic construct
  source 1..927: mol_type = other RNA
atgatcgtttaccgcgagctgtcttcacttgaacgcgacctgggatttcctgctagcacgttatacgctgtctccaacaggctgaaccgacactaccgtaaagtggaactcccaaagggcgatggacctctgcgcaccctgtctgtccccgacaatctcttgaaaacaattcaaagaaggatcgcccaagtcctgctgagcactctgcctgtgagtccgtatgctacagcctatcggcctggtggctcagtggtcaaaaatgctcgaccacacgtagggaaacccgtagttcttaagttggacatctaccatttcttcgacgccgtgtgctatagccgcgtaaagaaagagatctttcctcccgagatttattccgaacagaacaggattttgcttagcatgctgtgctgttaccaggacaagttaccccagggagcccccacctctccagcgatatctaatcggatattgctggagtttgatcaggagatcggctcctggtgtgcaagacaggggatttcgtacacccgatattgtgatgacctcacattcagtggtgattttgctccaggcgacgtgattcgtcttgttagagaaaggctcaaggtgagggggttcctgttgaataaccgtaagatacaggtgctcaggcaggggcagcggcaaagcgtgactggagttgtcgtgaaccaatccctgcaggccccagtttcacttcggcgagagctaagacaacaggtgtattactgccggaaatttggtgtgagtgatcatctggcgcgcacaaagcagaccgtctccgaagaagactacctccggagactgctaggccaggtgaacttcgcactccagatcaatccggcagatcaggagttagccgatgccaggcagtggctactggcagagatccgcagaaagagaacttga

SEQ ID NO: 9620 - RNA, 933 nt, synthetic construct
  source 1..933: mol_type = other RNA
atgaggtcctattctattgtatacaaagacatctacgccctcagtggggatctgggagtgagccccagaattctttactccctgtcaaatcgcatcagcggccactatcataccgtcgcgatccccaagaaaaacggaacctaccggaaactgagcgtgccagatgacatactgaagtatgtacagaggcggattaataaggtgctattgtgctatatgccgtcgtcaggctatgccatggcctacgagtatggaaaatccatcctaaaaaacgctaatccccactccaacaagaaatgcattcttaaactcgacatcgacgattttttcgatacggttaagtacagtcaggtcaaagagaaagccttcccagcagctcactttgctgaaaacctcagagtgcttctgtctcagctctgctataacggcgaagggctgccacaaggtgcagcaacctcacctaaaatagccaatttaatactgcgcgacttcgatgagaggatcggatcttggtgtgcccagagggacattacttacacacggtattgtgacgacatgacgttttccagtgacaaggggttggatggcgtgtacaaatacgtgcgcgatgaattattcaaggagggttttctgctgaacaaagacaagacaaagttcattgatagtcatcaccgacagaaggtcactgggatcatcgtgaataatagccctaaggttcccacagaatataccaagaagatcagacaagagatttactactgccgtaagtttggtatctcagagcacttgagccatactgattccgataagtctctctgtgaatacttggcttctctcctgggccgaattaactatgtccttagcgtgacacctaagaatgaggagatgaaggactacaaggaccaggttaccatatggcagaaaagcctgtga

SEQ ID NO: 9621 - RNA, 918 nt, synthetic construct
  source 1..918: mol_type = other RNA
atgatcgtgtataaatcgctggaatctgtagaggctgacttgggtgtaagcctgaaaactctctatgcagtctccaacaatctgcagagtcattacagaaatgtcgagctgcccaagaaaaacggcgggattagacacctatgcgttcccgatgacgtgctgaagcacattcaaaggaggatcactgaagtgatgctcgtccacatgccgattagcaagtacgctggagcttatcgctacggcgcatctgtcatacataacgcctccgcccatctcgggaagaaaaggatccttaagctggacattagtaagttcttcgacagcgtgctgtattctcaggtgaaagaatatgcctttcccgaaatcattttctcagagaaagtccgcgttctgctttccatcctctgctattacaaagaatcgttaccacagggcgcaccaagcagccctgccatttccaatatcatcatgcgccaatttgacgaaaaggtcggcgcctggtgtgaggagcgtagcatatcctacaccagatattgcgatgatatgaccttctccggagactttgatgcgaatgatgttaagaagcttgtggagcgcgaattgggtaagtatggattttacttgaaccctgtaaaaacgaaaacagtgaccagtgaccaccggcagtcagtgacaggcattatagtgaatgagaagttgtctctgccttcagagtaccggaggaagctgcggcaggagctgtactactgtagacgatatggcgttgatgctcacatggaacgtatcggggtgagtggttctgcaggaagctacctatcacgactcctggggaaagtcaactacgtgctttctgttcggaaggacgatgccgagatgaaagagtacaaagcgtggctcgtggccgagttaaagaagtga

SEQ ID NO: 9622 - RNA, 933 nt, synthetic construct
  source 1..933: mol_type = other RNA
atgatcgtgtaccatgaattgagctcattatgcgcagacctgcggttatctcctaggaccctatacgccgtgagtaatgccatggaaaagcactatcatactgtgcggatcccaaaaaaaagcgggggatttaggaaacttaccgtcccggacgacctgctgaagatgattcaacggcgcattacagaggccctccttctgccactccccgtatctgccgccgcttctgcttactatccaggtcgcggcataaaacgtaacgctctgccccatgtgggcaaacctgtactgctgaagatggatatttatcacttcttcgacagtgttctctacagggatgttcgggattgcgcatttcctgccgagatttattccgagcccctccgggtcctgctaacaacattgtgttatggaatgaatgagttacctcagggcgcaccctcatcgccagcgatctccaaccgcattctatacaggttcgatgaaaaagtcttgaagctctgccgaaagcaggggattcactatactcgatattgtgatgacctttgttttagcggggactttgacgccgaagcgttgaggaaggaggtcaccaagctgctgatagaagagggcttcttcccgaatcgaaagaagactaaagtgcagaaaggagggacaaggcaatgtgtgacgggactggttgtgaatgaaagagcaaacgtgcctgctgagtacagaagaaagatcagacaggaactgtactacataggaagatttggtcttcgctcacacatggagcgcaccaaggctgaaggttccgaattgagctacctgaggaagctgctgggcagaatctcctactgccttgagatcgaccccgagaacgatgagatgaaacgtgatcgcgaaatggttctcgagctcatcggggagcggaccggcagacagtga

SEQ ID NO: 9623 - RNA, 927 nt, synthetic construct
  source 1..927: mol_type = other RNA
atgatcgtctaccgcgagttgtcaagtctttccacggatttagggttctccgccaaggccctctatagtgtctcgaatagcataaccaagcactatcaccctgtgaagatacccaagggcaatggcgaatacaggcagctaacagttcccgacgagtttctcaaagccatccagagacggatcaatgataagctcctatgtttcgagccaattagcccatatgctacagcgtaccgtgtgggagggtctacaaaagctaatgcctgtccacacgtaggacaaaaagttctgctgaaactggacatcagacactttttcgacaatctcatctaccctgtcatcaaggaggctgctttcccaaaggaacgctacagcgaggcgaaccggatattgctgacaattttgtgcacctaccagggctacttgccccagggtgcacccacttcccctaccattagcaacattgtgatgaggcaatttgatgatactgtcgggacatggtgcgaaaaacgaggaattcattactctcgctactgcgacgatatgactttttcaggtgacttcgacccgaagcctgtgaaaagcatggttgcaggcgaactgcgaaagctgggcctttttctcaatactaagaagatggtggtagccggcaaagggcaaaagcagaccgtgaccggtattgtcgtgaacgagaaagcatcagtgccgactggatataagagaaaactgaggcaggagctttacttctgcatgaagtatggcaccgactctcatatgaaccataatgaaatcaacatggagaaagggaactatattttatctctgcttggaagggtgaactatgcctgtagtatcgaaacggacaacgaggaactcaagtcctatcgggattggctgctgctggagtcccaggaaaccaaaagatga

SEQ ID NO: 9624 - RNA, 1005 nt, synthetic construct
  source 1..1005: mol_type = other RNA
atgggcctgcgtattcagagggactcgtgccacattttaacggtgttgctgcatggaaacaggggccgaagagcatgttgcatgatcgtgtattgggagctctcatcattatccaccgacttaggattttcccctaaggcattgtattccgtcagcaacagcatcggccggcattatcggctggtacagatacccaaaggcaatggtgaactgcgccgcctgacagtgccagatagattcctgaaagctatacaggtgcagatttacgagaaattgctgcgcctggaacctgtgagcccccatgctgccgcctatagaccgggaggatctacgcttgtcaatgctaggccccatgtagggcaagccgtgcttctgaaactagacatccggcactttttcgatagcctcatctatccacaggtgaaggacgcagccttccctgtcgagaggtactctgaagcaaatcgtatactcctggcaattctctgcacatataggggaatcctaccccagggggcccctactagtccagctattagtaatatcattctccgaaacttcgatgataccatgggcgaatggtgtggcagacagggggtccgatacacccggtactgcgacgatatgacctttagcggtgactttgacccagctgcggttatcgaaaaaacagccgctgagctgaagaacatggggttgtaccttaatgccggcaagactgttgtggcgagaaaggggcaaaagatgattgtgaccggcatcgtggttaacgaaaaaacctctatcccgcgggactacaagaggaagcttagacaggagctccactactgtactgagtacggtcttgccagtcacctggcgcacactcactcccaaatggaacaacgggattacgtcctgtctttgctggggcgcgtgaattacgccctgtccgtagagcccgctaacgcagagctaggacagtatcgcgtttggctcacagaggccatgaagcagatctcatga

SEQ ID NO: 9625 - RNA, 915 nt, synthetic construct
  source 1..915: mol_type = other RNA
atgattatctataaggagttttcctcactgcttagcgacctgggcttttctggtaagaccctctatagtgtgtcaaaccatattaaccgtcattatcacccagtcaaaattcctaaagccaacggggagttccgagagttgaacgtccctgacaaactactcatgaccatccaacgcgctataaataacaagctcttatgcctggagaatgtttccaggttcgcaatggcttacaaacctggctctagtaccaagatgaatgccgtggcacacgtggctcagccagtggttttaaagctggacattagacacttttttgatcacttgatcttcccgcttatcaaagagaaagcctttccggcagcgaggtactctgaacagaactcgatcctgctcacattcctctgcacatacaaggatgccttgccccagggtgcaccaacatctcccactatcagcaatataatcatgaaggacttcgacaactttgtgggggggtggtgtaacgaaagggggattgcgtacaccaggtactgcgatgacatgaccttcagcggagacttcgatccaaaagctgtgattatcctggtcaaaaaggaactgaaaaaacttggactttacctgaatgataagaaaacagtggtcgtgagaaagggacaacgccagtccgtaactggcatcgtggtaaacgagaagcggtccatacccatcgaatataaaaagagaattcggcaggaaatgcactattgtatgaagtacggagttgccagccatctcgagcgaatcggcatagatgaagcccccaagacgtatactctgaagctgctaggcaagattaattacgtcctgagtgttgagcctaataatagcaacatgcgccagtatcggtcatggttgatggagcagaagttctga

SEQ ID NO: 9626 - RNA, 921 nt, synthetic construct
  source 1..921: mol_type = other RNA
atgatcgtttataaagagctgagctccctaacctccgatctcgggttctcatctaaggctctgtattccgtgtctaatcatataggtcgccactacagagctgtgagcgtacccaagggaaacggcgagtctaggcggttgcatgtgcctgacgccctcctgaaggccattcagcggcggatcaacgaccgcctgttgtcattggaggcagtgtctgcctatgcgacagcttatcgcgccggagggtctaccaaacgtaacgccgcacctcatgttggtaagcccgtgttactgaaaatggatatacgtcacttttacgatagcctgatctacccccttgttaaggaaaaggcttttccgaaagaaaggtatagcgagcagaaccgcgtgttactgagcctgctgtgcatttacaatgacacgttgccacaaggagccccgtcctcgcccaccataagtaacatcattatgagagatttcgacgagagggtggggcaatggtgcgcgcagcaggacatcacatacactcggtactgcgacgatatgactttcagtggcgactttgatcctcacccagtcattcgatttgtcaggaaagagctgcagtcccttggccttttcctgaataatagaaaaaccgtcgtagctcgaaccggccagaaacaggcagtgactggtatcgtggtcaacgaaacaacacatattccatcaggctataaggcagcactgaggcaagagctctactattgtcgcaagttcgggattgccagtcacctcttacactgtggcatcgacgaaagccctgaaagatacgctcagaagctgctaggaagagtctcatacgtgctctccgttgagccacagaatcgacagatgcaagattaccgggcctttctccagagttgtcttcagagcaggtga

SEQ ID NO: 9627 - RNA, 927 nt, synthetic construct
  source 1..927: mol_type = other RNA
atggtctgtaagtcctactctgacttggaacgcctgctgggcattagcgtgaaggcactctattcggtcagtaacgcctcctggaagcactacagaagtgttaaaatcccaaagaatgatcgaggggagttccgcgagcttcacgttcccgatgaattcctcaaaaccgtccagagacggatcgctgaccgcctcctgtcagcctatccagtgtctccttacgccacagcttatcgtcctggcgggagcaccattgtaaatgctcggccccatgtcgggaaaaacgtgctgctgaaactggacatccaccatttctttgacaacatcctctacgcaacggtgaaagagaaggcttttcccgctgaggactattcagagagtattcgcatactcctgacaatcttatgcgtgcataaggacgccttgcctcaaggggccccgacttcacctgttatcagcaacattatcatgagagatttcgattgtaccgtaggaggatggtgcgatgctaggggtatagcgtatacaaggtattgcgatgatatgacttttagcggtgactttgattctcgtgaggtggtttccctggtgagaaccgaactcagaaagatgggacttttcttgaacgagaaaaagacagtccgggcggtgcgaggccagagacaatccgtcactggcttggttgtgaatgagggcctgcgtatacccgcagcataccgcaaaaagcttcgacaggaagtgtactactgtaggaagtttggcgtagccgcacaccttcagaggatgggatctggggaaagggccgaagagtacctaccaaaattactaggtcggattaattatgcctgcagcgtgatgccagacgaccaggaactgcgccaggagcggaggtgggtgatgcaacagctgcacaccctggaacggtga

SEQ ID NO: 9628 - RNA, 933 nt, synthetic construct
  source 1..933: mol_type = other RNA
atgatagtgtataaggagctctcttccttgactaatgatctcggtttctcagtcaaagctctgtattccgctagcaatcatatctcatcgcactatcataaggcaaagatcctaaagaaaacaggcgaatatcgcgagctctctgtcccagacgacttcctgaagagcattcagaagagaatagtggagaagttgctcgtgtatgaagaggtgagtccgtatgctacagcctaccgttattccacatccataatcaagaatgcgagggtgcatctgcacaataacacgatccttaagctggacatacgccacttttttgaccacatcatttacccagtcgtgaaggaaaaagcctttcccaaggaaaaatactcagaggagaataggattttacttagcctgctgtgcctgtaccacgatgcacttcctcagggggcccccactagtcctatcattagcaacatcatcatgaaagacttcgacaataccgtgggagcatggtgcaagtctaaaaaaattcgctacacccgatactgtgatgacatgactttcagtggtgactttaacattagggaagtcatctcctttatcaaacgggagctgggaaaaatgggcttctacttgaacgatgccaagaccgttgttgctaggtctgggcagaaacagatcgtcaccggcattgtggtaaacgataaacttaatacccccttactctaccggaagaagctgcgacaagaactgtattactgtaagaagtttgggattgccagccatctaagacagaagtctatagatatgagcgagagagagtacatcctgaaactgttaggacgggttaatttcgtgctttcagtaggccagacgaacaaagaaatgcaagaatacaagagttggttgctggatcagaacaacctcttcattacagagaaatga

SEQ ID NO: 9629 - RNA, 921 nt, synthetic construct
  source 1..921: mol_type = other RNA
atgatcatatacatggagctctcctcaattattcacgatctgggcgtgtctgcaaaagccctttatgctttgtctaatcacacagaaaagcattaccacagagcaaaaattctgaagggcaatggtgagtatagggagcttgcggttcccgacaattttctgaaatcggtgcagcgaaaaatcgctgataccctactggttcacgaggagatatcaccctacgccactgcctatcggtatgggggatccgtcattgccaatgctgaacctcacctgggcaacagctccattttaaagttggacattcgcaaattcttcgacaccataacttaccccttgatcaaagacaatgcatttccaaagaacagatatagcgaaaagattcgcattttgctgactttcttatgtgtctacaacgatgtgcttccacaaggggccccgacatcacctgtgattagtaacatcatcatgcgggagtttgataatacagtaggcgcttggtgtcgacagaggaatatctgctacacaagatactgtgacgatatgacctttagcggagagctaaatagggaagagataattgactttgtcaagaaggagctgaaaaagatgggcttcttcctcaacgacaaaaagacggccttcatacatgacggacaaaagaaaatcgtgaccggtatcgtgatcaacaagaagctcaacaccagcaaaaagtaccggaaacaggtacgtcaggagatcttttattgcaaaaagttcggggtggcctctcatatgaagcatatcaactccgataagagtaaaaacgattatctgctgagtctcctcggaaaagtcaatttcatcctgagcgttgacaaatgcaacgcagaagcgctggggtacaagaagtggctttctgaagaaatcaagaacaattga

SEQ ID NO: 9630 - RNA, 927 nt, synthetic construct
  source 1..927: mol_type = other RNA
atgatcgtttaccgcgaattgtcaagcctgtctgaggatctcggggtgtccaagaaggcgctatatacagcttccaatcacgccagttcccattacaggaggatcaagatccctaagggaaacggagaatttagagagcttgcagtccccgataattttctgaagagtatacaaaagcgcattgctgacaaactcctgatctatgaagagatctctaagtatgccactgcctacagatacggaggttctgtcgtcgcgaacgcaaagccccatataaagaacgggacggtgcttaaagtggacatccggcacttttttgaccacattatctatccaatcgtgaaagacaaagcttttcccgcttacaggtactcagaacctaatagaatcatgctgagcctgatttgcttgtacaaggacactctcccacagggagcaccaaccagcccggtcattagcaacattattatgaagaacttcgacgattgcattggccagtggtgcgataagaaaggtatagtctatacacgctactgtgatgatttaaccttctccggcaacattatacccggcgagattatatgtttcgtgaaacaggagttggcaaaaatgggcttctacctgaacaacaaaaagaccgtaatcgcccggaatggacagcgtcagctaatcacaggcgtagtggttaacgacaaactgaatattcctctcgattataggaagaagctgcggcaagagctttattactgtaaaaaattcggtgtgagcagtcatctgtcaaagatcaattctgaacagaatgaagagaaatacctccaaaaactgttagggcgagttaattatgcccttatgatcgacaagtcgaatgcccagatgaatgggtaccgacagtggttggtgaacgagctgaaaaagtataacggctga

SEQ ID NO: 9631 - RNA, 927 nt, synthetic construct
  source 1..927: mol_type = other RNA
atgatcacttacaaagaactctcctctctgaccaatgaccttggattctctgctagggctttgtacagcatcacacataacattcacaaacactataagccggtgtcgatacccaaaggcaacggcgagatgagaaagctatgtgttccagataaattcctgaaagccgtacagagaagtattgcccgcaacctgctctcctacgaagagattagcccatatgcgactgcctaccggttgtgcggttcaaccgtggtaaatgctcggccacatcttggagcggaggtcattctgaaactcgacatttgtcacttcttcgatcacataatctatccagtcgtgaaagataaggtgttccccggtgagaagtattctgaagccaatcgtgtccttctcacattgctgtgtacctaccgcgagagtattcctcaaggcgcacccacatctcctgcaatctccaacattgtgatgagagactttgatgacacggtcggggtttggtgcgaggaccgagggatatgctatacccggtactgcgatgacatgaccttttcaggtgacttcagccctaaggaggtgataagctttgtgcgaactgaactgggcaaaaagggctattttctgaataacaggaagaaggtgatcgcaaagaggggacagaagatgcaggttacaggaatcatggttaacgagaagttaaacgtacctaatacctataggcgcaagctaagacaggagttgtactactgtcggaaatttgggatcaagagtcatatggagaaaatcggggtggagatcacggaacaagaatacatcatgaaactgctcggccgtgtcaattaccttttacaggtgactcccgatgacaagtccgccaaagaagctaaactgtggctgattaaggaactgaagaaggcctcactctga

SEQ ID NO: 9632 - RNA, 939 nt, synthetic construct
  source 1..939: mol_type = other RNA
atgtttcgcaaaagagagggggggtttgccgtcattgtttattccgagttatcatccttgtgtcgggatctgggcttcactgcccgcgagctgtatgcagctagccggaacaccgacagactctacagaaaagccgtgctgccaaaagcgggtggaggagtacgggaactgagcgtgccatctcctcttctgaaagccattcagacagcggtctatgagaaactcctgtcgcaggaaccggtgtctcggtatgcctgcgcatataggcccggtggcgggatcaagagatgtgccgcaccgcatgtgggcagaggccaagttcttaccctggatattcgacgatttttcgactccgctatctaccccctgataaaggagaaggtgttcgctcccgagcgttacagcgctcctaacagggtcttgctgtcaatgctgtgtacatacagagatgctcttcctcagggcgctccaagtagcccagccatctcaaatatattactgtacgggttcgacgaggcggttggggaatactgcagggagcgtggcattaggtacacgcgatattgcgatgacatggcatttagtggtttgtttgacgcacgcgaactgactgccttcgtggagtccgagcttcgcaaactcggattctacctcaatcgaaagaaaacaaggctggtgcggcctggacaacgtcaggcagtcaccggagttatcgtgaatgaaaagcttgctgtgccccgggagtacaagaggagactacgccaggagctctattacatcgaaaagtacggcatggaagaacacctgtctcgcctcgggggcgaagcccaaaacgtcgattatgccgcacggttgctcggaaaggtaaactatgtgttaagtatcgaacccggtaatattgaggccgcccactgggctaggttgctaaaggacaagtga

SEQ ID NO: 9633 - RNA, 930 nt, synthetic construct
  source 1..930: mol_type = other RNA
atgatcatctacaatgaactggcgagcctggaagccgacctgggttatagtgcaaagcaattatacagcctgtcaaatggaattaaccggcactatcatcctgccgagatccctaaaagcgacggcggctctcgttcactatcggttcccgatgctcagctcaaggcagtccagagtaaaattgctgataggctgctttctctcgaagatatttccgtatatgctaccgcataccggccagggggctccatagtgagaaacgccctgccacatattgggcattcagatgtgttaaagttggacatacgcaggttttttgattcgatcacgtacccactcatcaaggagaaggccttccctgcaaagcggtacagcgaaaaaaatcgcatcctgctagcaatcctctgcacctacaaagaggctttgccgcaaggtgctccctcatctcccgccatctccaacatcatccttcgaaatctggacgacgccgtcggctcctggtgtagatccagatacattacctataccaggtattgtgacgacatgacatttagcgggcgtattagtacagccctgaaaaaggagatcattaacacagtagagcagcagctccggaaagcgggcctgtatttgaacgccgataagacagtcttcgtgcacgacggacagagaaaatgcgtgactggcatcattgtgaatgaaaaggtgtccattcctgctggttatcggagggatataagacagaagatgcactacatatgctcctacgggatcaagtctcacattcagcatactggaagtaaattgtctgaggaagaatacctgcgaaagcttctgggacgcattagcttcgttttatctatcgacccccacaacgaggagatgcttggatatcgaagcaaactcatagagatccgcaggactctgtga

SEQ ID NO: 9634 - RNA, 918 nt, synthetic construct
  source 1..918: mol_type = other RNA
atgatcgtctatcgtgaatttagtagcctgactgaggatctggggttttcaggcaaggccttatattcgctgtcaaacaagatccaccgccattataagaaggtggaaattccaaaggccgatggatccgtgagatccctatcagtgccagacgacttcctcaaggccgtgcagcgcagaatcgcagatcggctcctgtctatggaagagatctccccctacgccatagcataccgccccggtggatctccactgaagaacgcaagacctcatatcgctaaaaacaccgtcctgaagctcgatattacctgtttctttgaccacattacttacttcttagtgaaagaaaaggccttccccaaagaaaggtacagcgagaggaatcgaatccttttgacgatgctgtgtatttacaatgatgccttgcctcagggtgcacctacatctccggttatcagcaacataatcatgaaggacttcgataatgcggtaggaaggtggtgcagagagcggcggattgtttatacaagatattgcgacgacatgaccttcagcggggactttgacgtctgcgaggtcaaaaattttgtgtctggcgagctaaggcgtatgggcttctttcttaactccaaaaagacaacagctgttcgacgcggacaacggcacactgtgaccggcattgtagtcaatgagaagcctagtattagcgctaattacaaagccaaattgcggcaagaactgtattacatcatgaagttcgggatcaattcccatttggagaaatgtgggatagacatacccgctgagaaatacctgcagaagctcctcggtagggcgaactatattcttagtgtggagccagataacaaaaaggtgaaagaatacaagggctggctgaccgcccagctgaagaaatga

SEQ ID NO: 9635 - RNA, 921 nt, synthetic construct
  source 1..921: mol_type = other RNA
atgatcgtctacagagagttatcttctctcgaaacggacctgggggttagcgccaaagtgctctacaccctaagcaacagtcgttcgtcacattatcacactgttatgctgccgaaggagaatggagagttgagacaactgagcgttcctgacgggttgttgaaaagtgtacagcgaaaaattgcgaggcagctgctcgtctacgaggaggtatccccatatgcaatggcttatcggctcggaggatcaactctccacaatgcagtgccccatgtggggcagcccatggtgatgaagctagatatcaggaagttctttgaccactgtttttacccgctggtcaaggagaaagccttccccgctgctaggtattctgaaccaaaccgggtgcttctgtctcttctgtgcgtctaccacgacgccttacctcagggagcccctacctcacccgcgatctccaatataattctgcgggatttcgataacgccgtgggctcctggtgtgctaagcgccatatcgtctacacacgctattgtgatgacatgaccttcagcggttcctttgacccagccgaggtgaagacgaaagtacggacagaactgagaaaggtgggcctgtttctgaacgataacaagactgtcgtgcttaatggcggccaacggcagacagtcaccggcatcgtggtgaacgaaagggtttcagtgcctagtgactataggcgaaaactccgtcaggaactgtactactgcagaaagtacggtatagcagcacatttggaacacattggcagcgaggctgacgtacgctcctacgagagacagctcttagggagggtgaattacgttctgtatgccgatccatgcaaccaagagatgcaggaatatcgacgctggctgcagaatacacttaccggtaaatga

SEQ ID NO: 9636 - RNA, 912 nt, synthetic construct
  source 1..912: mol_type = other RNA
atgattacatataaggagatctcctctttggagaacgatcttggtgtcagcgctaaagcgctctatacccttaccaatgagatccatcgccactacaggactgtaatgataccaaaggacaacggcgagctgcgtaagttgtcggtgccagacccctttctcaaaagcgtgcaacggaagattgcccacaatatcttgtttttcgaggaaatcagcccgtatgcaactgcttatagacctggaggaagtaccctcattaacgcactgccacacgtgtccaagaacactgtcatgaaactcgacataaacaagttcttcgaccacattatttaccccattgtgaaggagaaagtcttccctgcccacaaatacagcgaagccaacaggattctgcttaccctgatctgtatttacaaggattcactcccccagggagcaccaacaagtcctgtcatctccaacatcgtgctgaaagacttcgataacaaagtaggtgagttttgctttaagaggaatgttacgtatacacgatactgcgatgacatgaccttttctggagaattcgacccccagcaaataaagagattcctgcagaacgagctaaaaaagttagggctataccttaattccaaaaagacagtgatcctgaagaacggccagcagaaaaaagtcacgggcatcgtggttaatgaaaagcctaacgtgtgtgccaagtacaaacgcaagctgagacaggaaatctatttctgccagaaatacgggattaagaatcatttggataagaccggctcatgtctgactgaagcccaatataaggctcagctcttagggcggataaattactgcctgtctgttagtcataaagataagaatatgcagggctttaaggagtggctgatcaataataaatga

SEQ ID NO: 9637 - RNA, 1119 nt, synthetic construct
  source 1..1119: mol_type = other RNA
atgaacgttaattttctgacagccgcagcctcacgttgcgggcagacctacacattcgattcacggttcgcccctgaaaagctgactgctcagtatacaggcccctgctctatggggtggcgcattctactgcgcatttttagtatgaggatctctattgcatcccatgctttccgggaaggcagtagcgtggtcattgtctaccgggagctttcctccttggtcagtgctttagggttttccgccaaaacgctctacggtgtgagcaatcgtgtgaccacacattacagacagctgaagataccgaagtcaaacggaggtttccgaacccttcacatccccgatcagctgctgaaaagcattcagcgacaaataaatatgcagctgctgctccctgagcctgtgagcccgtttgcaaccgcctatagaccaggaggcagcactcggataaacgctcttccacatgtcggcaaacctatagtcctcaagcttgatatcgatcatttctttgaccacgctttctatccattggttaaagagaaggcgttccccgcaatgaggtattccgaaaagaatcggattttgctgagcctattgtgcacatataaggatacccttcctcagggtgctcccacgagtcccgcgatctctaacatgatcatgtacgacttcgacatggccgtgggcaaatggtgtgtgatgcataatgtgagctacactaggtactgtgacgatatgaccttttccggaatgttcgacattgcagaggttatcgcggtggtgaaggacgccctgaaagactgggggttttttttaaacgccaggaaaaccactgtgattagatcgtcacagcgccagactgtaacaggactggtagtaaatgagcaagttcacattccatcttcttacagaaacgccctccgccaggagctgtattactgtagaaagtttggaatccagtcacacctggagcacaggcacatcaaaatggaacccgaagcctacgcattatctttgctcggcaagatcaactattgtctctccatccacgctgccgacccaatgatgctggagatgaagcagtggctcatgcaacaaatccgaaacaattgcttctga

SEQ ID NO: 9638 - RNA, 954 nt, synthetic construct
  source 1..954: mol_type = other RNA
atgatcatttatcgggaattttctagcctgtctcgcgatcttgggtttagcggccgaaccctgtacggggtcagtcacgccgtgaccaaacattacagaccagtccgaatccccaaacgcggtggtggaactagggagctgcatatccccgatcccctactgaaagcaatacaaacgcggattgccgaaacactcttgcctctggaggaaatttctccatgtgcttcagcctaccggcccggaggcagtaccaaaaggaatgcgttgccgcacgtgggccggcagacagttctgaaattggacatctccgggttcttcgatcatattacctacccacttgtaaaaaagaaggctttcccagcctccaggtatagtgaatcaaacagagtgttactcgcaatgctgtgcgtgtataaggattccctgccacagggcgcacctacttcacctgctatatccaatatcgtgatgaaggacttcgacgatgccgtttggaggtactgtgccgcgcgcgagatcgcttacactagatactgcgacgacatgacgtttagcggcgacttcgaccctgcccccttgattgcatttgtaaaagcccgtcttaagaagatgggtctatttctcaacgagaagaaaaccgctgttttaagacagggacgcaggcagcaggtgacaggggtcatagtcaacgagaggccaggagtgcctgccgagtataagcgggcaattcgccaagaggttcactattgcgaaaagtatggcgcggctgatcacctctcgttcagaggagatccaactccgcctgccgactatctgatgtctctgatgggccgagtgaactacgtgctcagcatcgaacctcaaaatgaagagatgcgtgggtacaagacactggtcgctgcctggcttaaggaggctgcacagcccaaaaagacccccgaggaacagccctga

SEQ ID NO: 9639 - RNA, 924 nt, synthetic construct
  source 1..924: mol_type = other RNA
atgatcgtctatcgggagctctcttctctggctcgggaccttggggtgagcgggagaactctttacgccttgagcaaccatgtcgtgaagcactaccgtcgagtgctcctcccaaagggctcaggcgagtaccgtgagctgcacgtccccgacgatctcctgaaaatggttcagaagcgcatagcagaaaggctgctggcgatggagccagtctcaccttatgcgactgcatatagagtggggggaagccctatgttgaatgccaaacctcacgtgggcgctcctgtgctcctcaagatggatattaggcatttcttcgatcacgtgatttaccccgtggtcaaggaaaaagtcttctccgcagagagatatagcgaaaagaaccgggttctgttgactcttctttgcatgtacaaagatagtttaccccaaggggcaccaacaagcccggttatttctaatatcatcatgagggacttcgacgacaggatcggatcatattgtcgcgagaggggcattcggtacacaaggtattgtgacgacttaacattctccggtgactttgatcccgccccaatcaaagcctttgtacgcgaagaactgattaagatgggattttacctgaacgataaaaaaaccgttgtgctgcgagaaggtcagaagaagacggttaccggcatagtggtgaatgagcgattaaacaccagttcggcctacagaagaagtctgcgccaagacgtaagattttgcaagaagtacggtgtcgctgatcatctgaaacacattggaaaagtgggagtatctgaatactcctatctatcccagctattgggccgcgccaattacatcctgcaggtagacaaggataacgctgaggtgaaggggtataaacggtggataatcgagcagatgaccaagcattga

SEQ ID NO: 9640 - RNA, 912 nt, synthetic construct
  source 1..912: mol_type = other RNA
atgataatataccgggaactgtcctccctgtctgatgacctgggcttcagcgctaagaccttatactcagtaagcaattctatttcttcccactaccgctgtgtctcaatcgccaaaccaggaggcggctatagagaactctctgtgccggattgtctactgaaaagcattcagaggagaattaacgagaagcttttgtggatggaggagatttctccctacgccacagcctaccgagtgcttgggagcaccaagaaaaatgcattccctcataagggtaaccctatcgtcctgaagttggacatacgccactttttcgactcaattatttatcccgtcgtgaaagagaaggtattccccaattatcgatactcagagcagaacagagttcttctgagcttgctgtgcgtgtataaagatgctttaccccaaggcgcaccaacgtctccagccatctcgaacatcatcatgcgggactttgacaacaagataggatcgtggtgcagcgaaaggggggtggtgtacactcgttattgcgacgatatgacattttccgggaatttcgatcctaaaccgctgcgcgcacatgttaaatccgaactcagaagtatgggcttctttctgaatgaccggaagagtgtgatcctcaaccggggtcagtgtcacatcatcactggagttcttgctaatgagcgactccgggccccaagtgactacaggcgcaggatcagacaggagatgtatttttgtcgtaaatatggaatcgggtcccacctgcgcaggatcggtattgaagacgacgtcgcccattataggttagtgctgctcggcagaattaactacgctctatccctggatcctgcggatagcgagctcgtcagttacaagaagtggttgtgcgaaaatgattga

SEQ ID NO: 9641 - RNA, 924 nt, synthetic construct
  source 1..924: mol_type = other RNA
atgatcgtctaccgcgagttttctagtctcgcaggcgatcttggcttcagtgcgcgtaccctctatggggtgagctatcatagagctagccactaccaaaccgtcagaattcccaaggccaatggcgaatatagagagctgcacgtgcctgacgccctattaaagtcgatccaacggcggatcctgagcgtgatactggaccgggaggaaatctccccatatgctaccgcctacaggtacggaggtggtattgcaaagaacgcagctccacatgtaggcaagccagtggtgctgaaactggatattaggcactttttcgaccgagtcatatacccccttgtaaaagatcgggccttccccgcagaccggttttcagagagcaacagggtgcttttgaccatgctctgcatgtatagagatgctttaccgcagggggctccaacatcccctgcggtttcaaatatcatcatgagggagttcgatgacactgtgggggcgtggtgtgcaagacagcagattgcttacacacgatattgtgacgatatgacattctctggcgactttgaccctaaacccgttattcagaaggtgcgccaggaactgcagaagatgggttttttcctgaacgacaagaaaactgtggtggtccgcgatggacaaaaaaaactcgttacaggggttgtagtcaataggagactgagggcccctgccgaataccgtcgtaacctccgacaggagctgtactattgcaggcgcttcggagtgtccagacatctggagcacagggcccttcagcaaactgagggccagtacctacgaggactgttggggagagtccagtttgccctgcagctcgatccggatgaccgggaacttcgcgacgatcgcgcctggttgttgtcccggatctctgactgcacgtga

SEQ ID NO: 9642 - RNA, 924 nt, synthetic construct
  source 1..924: mol_type = other RNA
atggtcgtgcatagagagctgagttctttgtgccaggacctgggttacagtgctcgcgcactttattctctgagcaattcagtcagcgagcactatcacgatgcgatgatccccaaggccaatggcgagtaccgactcctgcacattcctgataaattcatgaaggctgttcagaaatctatcgctcagaacatcctgagctatgaggatattagcccttacgccatggcctatcggccagggggctctaccaaggccaatgcgttcccccatgtaggggcatcgatggtgatgaaactagacgtgcgcaagttttttgaccacattacctaccctatggttaaggaaaaggtgtttccgagcgagaaatacagcgagtccaatcgtatcctgctctcagtgctttgcgtatataatcatgccatcccacaaggggccccaacttctcctgccatctcaaacattatactgagagatttcgacaaccgtgttggtgactggtgcggtaagagtggaataacctacacacggtattgtgatgacctgaccttttcaggggaattcgaaccaaaagaggtgaaggcttttgttaagaaggaattattcaaggaaggcttcttccttaactccaaaaaaacaatcgtgttgaggaacggccaacgcaaggaaattactggaatcgtcgtgaacgagaaggccgcagtccccgcaagatacaaaaaaaggatacgacaggagttgtactactgtcggaagtttggcattgacgaacacgtgaagcggctcggactacccgaatccacggaagcttacgcaaggaaactgctcggaagaattaactatgtgctctccgtcgagccggataatgacgagatgaaaaggggccgcgctgagttactgagttggttccagtccacatcctga

SEQ ID NO: 9643 - RNA, 912 nt, synthetic construct
  source 1..912: mol_type = other RNA
atggtggtctaccgggaactgtcttccctgtgtcacgatctcggctattcagctcgcgccctctataccctgtcaaacagcgtggcagagcactaccacgatgtgatgattccaaaggctaatggggagcagagacttttgcacgtgccggacaaattcatgaagtccgtccaaaaaagcattgcgcgtaatctccttgcatacgaggaaatcagcccttacgctatggcctaccggcctggaggttcgacgagagccaacgcaaggcctcatgtaggggcgccaatggtgatgaagcttgatgttcgcaagttttttgaccatatcacttatcccacagtcaaggagaaggtgttcagcagcgaaaagtattccgaaagtaaccgagttctgctgtccgtcttgtgcgtgtattcacacacaaccccccaaggagctcctacatccccagccatcagcaatatcataatgcgagatttcgataacagagtgggcgattggtgcgacaaaaggaacataagttacactaggtattgtgacgacttaactttcagtggagagttcaacccatctgaagtcaagacattcgtgaaagaggagctgtttaaggaaggtttttttctgaacagtcggaaaaccgtggtgctgcgtaatgggcagcgcaaggagattaccggcatcgtagtcaatgagaaagcctcagtgcccgccgagtacaagaagcgcattagacaggagctcttttactgtcagaaatacggcatcgacgagcatgttaaaaggttgggtctatgcgaatctggggaatcttatgcacgaaaactactgggccggattaattacgttctctctgtagaacccgaaaatgaggagatgaagagaggacggaccaacctgcttctgaggttatga

SEQ ID NO: 9644 - RNA, 930 nt, synthetic construct
  source 1..930: mol_type = other RNA
atgatcgtgtaccgcgaactgtcttccctgtgtcaggatttagggtattccgcccgggcgctctacaccttgtccaacacagttacggagcactaccacgacgtgtcaatcccaaaagccaacggagagtataggctgctccatgtgccggatacattcatgaagagcgtccaaaaatctatagcccggaacatcctcgagtatgaagagatctctccttacgctaaagcatataaacccggaggtagcaccattagcaatgcagagccacacgtgggggcccagatgataatgaaactggatatacggaagttcttcgatcacattacttatccaatggttaaggaaaaagtgtttctggctgaaaagtactccgaggcgaatagaattctgctgagcgtgctttgcgtatatagtcatactgtccctcagggagctcccaccagtccagtgatctccaatatcatcatgaaagactttgacaaccgcgttggcaagtggtgtagcgagaagtcaattacctacactcgttactgcgacgatatgaccttctcgggtgtgtttaaacccgccgaggtgcggaaatacgtcggcgaggagttgttcaaagaagggttctttctcaatgggcaaaagacagttgtcttacgcgagggacagcgaaaggaaatcacaggcattgtgataaacaacaagctgagtatccctaaggcctacaagaataagattaggcaggagctatactattgcaggaaatatggcatcgaagaacatatcaggagattggagattaaggaacgtcctgaacgataccttagaaagctgattggtagaattaactatgtcctctgtgtagagcccgagaatgaagaatttaaggctggcaaggagtgggcatcagaagagatcaaaaagctttctgacctgtga

SEQ ID NO: 9645 - RNA, 930 nt, synthetic construct
  source 1..930: mol_type = other RNA
atgatcgtttataaagagctcagctcactctgtcatgatctgggctttagtgcaagagccctgtacactgcatccaactcagtggaccagcattatcacaccgtcgaaatacccaagggcaacggagagactaggacattgcacgtcccagacccatacatgaagaccatccaaaaatccattgcaaagaacctgctggcctacgaagaagtcagcccatacgctattgcatatcgattcggcggcagcacaaaagctaatgcggctccgcatgtgggccaccctgttattttgaaaatggatatccgcaagttcttcgaccatatcacataccccatggtgaaagaaaaagttttccccgagaaaaagtatgcggaatccaatcgcattttactatctattctctgcgtatacgatcacacgattccccaaggggctccgacgtctccagccatatctaatattatccttcgggagtatgacgacattgtcgggaagtggtgcgaaaatcaggccataacatataccagatattgtgatgacatgaccttcagcggtgattttgagcctgcccccgtaatcgcctttgtgaagaaggccctgtttgagcagggattttttgtgaacaacaagaagaccgtggtgttgagaaacggacagaggaaagaggttactcggattatagtgaatcaaaagatctccgtgcctgcttcgtataagaaaagtttacgtcaggaactgtactactgcgagaagttcgggatcgagagtcatcttaagcacatcaaagccaatgaaaatgaggagcactacatcgaacggctgctgggtagggtcaactacatcctgtcagtggagcccgataatcaggagatgaaaaaatatcgacagtggcttctcaaccagaagccttacatgactaaggcatga

SEQ ID NO: 9646 - RNA, 918 nt, synthetic construct
  source 1..918: mol_type = other RNA
atgatcgtgtacagagaactgccctcattgtgcaaagatctgggcttttccgcccgggctttatatgcggcctcaaataccattaataagcggtatcataaggttaggatccccaaggctgacggagactaccgcgaactttacgtgccagatgactttttaaaatcaatccagcgcagcatagccaagaacatactggcctatgagccaattagtccctacgcctgcgcatatcgaattaacggatccacagctctgaacgcctgtacccatgtcggagagccaacgatcctgaagctagacatcaggaagttcttcgatcacattacttaccctatggtcaaagagaaggtgttccccgcagaaaaatacagcgaacagaacagaatattgctctcgatcctttgcgtctacctgcagacagtacctcagggcgcaccgacatctcctgccatttccaatattattctgcgagagtttgatgaccgtgtaggcgaatggtgtaaggcgaggaacatcaattataccagatactgcgatgacatgactttcagtggttcttttgacgcaaaggaactcaaacagttcgttgagaatgaaattcaaaaggagggttttttcatcaacgctaagaaaaccgtggttctgcacgatgggcaacggaaagctgtgactgggattgtggtgaatgagaagctgagcgtccctgccgaatataaaaaggacatcaggcagatcatgtattattgtaacaagtacggcgtgatcgatcacatgatggcaaataagatcatcgggtataaaagtgactacctcaacgttctcctaggcaaaattaattacgtgcttagcgtggagaaatctaacaagcaatttatagagtaccgctcccaggtcaagaaatggttggccgagtga

SEQ ID NO: 9647 - RNA, 939 nt, synthetic construct
  source 1..939: mol_type = other RNA
atgattaccataacctacaaagagctgagttctctaacaaatgatctcgggttctctgcaagggccctctatgccctgtccaaccactccacaaagcactaccataagacagtgatccccaaacatagcggaggggagagggtgctccatgtccctgatgagtttctcaaagcagtgcagcgctcgattgtgaggaacttactggcctacgaggctgttagcccccatgcccgcgcctactgttatggcgcgagcaccgtgaagaatgcgctgccgcacaaggggcaccgagttcttctcaagcttgacattcagaatttcttcgacagcatcaattatcctctggtgaagaacaaagtcttcacaaaggaaagattctctgagtcaaaccgggtgcttctttccctgttgtgcacgtataaagacactctgcctcaaggagctcccacctctccattcgtctccaatatcataatgaaggactttgacaacactgtaggtacctggtgtaacgaaaggaacattacttatactcgttactgcgacgacctgacgtttagtggagacttcaatcaggatgaggtcaaaacatttgtaagtcaggaactgcgaaaaatggggttctttttaaacgctaagaaaaccaccctgctgcacgatggccagcaaaagtgtgttactggaattgtggtcaacgataagttgaatgccccactgagatatcgcaaaggcatccggcaagaggtttattactgcaagaagtttggtattgaagagcacatcaaaaaacagggtatagaaaagacccgggaaggctacctaaagtcactcttgggcagaatcaactacgtgctgtcaatcgatgatactaatgaagagatgaaaagctacaaggcatgggcattgaaggagtgcaaaacagctcagttaaaaaagtga

SEQ ID NO: 9648 - RNA, 930 nt, synthetic construct
  source 1..930: mol_type = other RNA
atgatcaccattacatataaggaactctccagtctaacctgtgacctgggattttcagccagagctctgtactccttgagtaaccacgcctccaaacactaccacaaaactgtgattcccaaagggagtgggggcgaaagggtgttgcatgttcccgacaatttccttaaggcggtgcaaagaagcatagtccgcaatatactctcccacgaagaggtttcaccttacgcccgagcatatagatatggcgcaagcactttgaagaatgcgatgccccacaagggtcataaagtcatcctgaagctggacatcaaaaattttttcgacagcatcatctacccactcgtcaagaaaaaggtgtttccttctgagcggttttcagagtccaatcgggttctcctgacacttctttgcatgtacaaagatgccttacctcagggggccccaacatcgccctgcattagcaatattatcatgaaggacttcgataacaccgtaggcacctggtgtaaggaaaggaacatcacctatacgcgctattgcgacgacctgacattctctggagatttcaatgtagatgaggccaaggcctttgtggaggctgagctgaagaaaatggggttctttctgaatgcaaagaagactactgtcttgcgagacggtcagaagaaatgcgtgacgggcatccttgtgaacgataaaattaacgcaccgttagaatatcgtaagagcataaggcaggcagtgtactactgtaagaagttcggcattgatgaacatctgaaacgcaacggaatcgagaaagctgctgagggatacctcaaatctctgctgggtcggattaactacgtcctctctatagataacaccaacgaagagatgaagggctataaagcttgggccgtgaagcagctaaagaagctgaaatga

SEQ ID NO: 9649 - RNA, 924 nt, synthetic construct
  source 1..924: mol_type = other RNA
atgatcgtctataaggaactcagcagcctaaccaccgatttaggctttagcgctcgaactctatactcggtggccaggatggttagaaagcattaccacgaagtcagtattccaaagaaggatggaacagagcggaagttgagcgtaccagacgaactcctcaagaggattcagagacgcattgccgagaaaatactgatgtatgaagacattagcccctatgcgacagcatatagggtatgcgcctccacacttatcaacgctaaagcccacctggacaagaaatgcatattgaagttagacatcaaccatttcttcgattccattatctttcctgtggtgaaaaacaaggtttttaccgaagagaaatactcatacgcaaatcgcatcttgctcactgcgctgtgtatctatgaggattccgtgccccaaggggcacctacttcaccggtgatctccaatataatcctgcgagaatttgattttcacatcggctcttggtgcagtgagcgggggattacctatacaagatattgtgacgatatgacctttagtggcgagttcgaggctaaggaggtgataaaagaggtcgaggatgcactcgctaaggaaggattctaccttaatcggaagaaaacggccttcctgaaagacggccagcgtaaagaggtcaccggcatcgtggtgaacgataaggttagcgtgcccaaagagtacagacgcaagataaggagtgaagtccactacattaagaaattcggaattgactcacatctgtctcacattggttgtaacatggacaaggtgaaatacctgatgtccctgttcggtaagatcaactacgccctttctgtttctcctgacaatgccgaaatgaaaaattgcaagaagatcattgggaaaatcctgtacaagctgaaatga

SEQ ID NO: 9650 - RNA, 939 nt, synthetic construct
  source 1..939: mol_type = other RNA
atgaagaacacgtactttgagctgaaaacactggaaaatgatcttggagtgaaggcagggaccctatataggctgtcaaacaacattaactcccattatcggtctgtaagtataccaaaacctgacggcagcaaacggactttaagtatcccggaccccgtgctgaaacacgtacaaaaacgaatcaacgacgtcattctatctacaatgaatgtttccgtgtattcgaaggcatattcatttggcgattcacctctgaggaatgctatcccccatctgaagcagaagttaatcctgaagttggacatcagaaagtactttgatcacgtcacatatccccttattaaagagaaggtgttcaaagatgatcagttctctgagagcaacaggatcttgttgagcctgctctgcatttataatgaaagcttgcctcaaggagccccaacttcccccgccatatctaatatccttttatacgacttcgacaatgtgatcggcgaatggtgtcgccagcgcaactttgtttatacgcgatactgcgacgatatgacattttccggtaatttcgacggacttcaccccatcgacataattagaaaagtcgagctcgagctgaagaagtacggcctgttcattaaccggaagaaaattcagagtctccatgatggccaaagaaagaaaattaccggtatcgtggtgaacgacaaaccaaatgtgcctgcgaattacagacgcaagatcaggcaggaaatgtactacatcaacaagtacgggctgcaggatcacctcaagaaaaccgggtcaaagcagaccgaggccgaatatctccgttctctcctggggcggataaactacgtcttgagtattaattgttccagcgagttcgaggtttaccgtaccaagactgtgagcctgctggatgctctcctttccgtctga

SEQ ID NO: 9651 - RNA, 930 nt, synthetic construct
  source 1..930: mol_type = other RNA
atgatgaacacttactttgagttgaatacccttgaaaaggatctcggaatttctgcgaggaccctgtattcgctgagtaacaacatcaactcccactaccatagcgtggtgatacccaaatctgacggcggctccagaaaactatcgatacccgattacagcctcaagaatgtccagaagaggatcaacaatgttatactgagctgtatgaatgtgagtatttatgctaaggcctatacgaatggtgacagtccgctgagaaatgccttgcctcatctcgacaaaaagaccattctgaagctggacataaggaaatacttcgaccatattacttaccctctgatcaaggagtcagtcttcaaaaaggaaaattttagcgagagcaatcggatcctcctttccttactatgcatgtttaatgagagcctccctcaaggtgcaccaacaagccccgccatttccaacattcttctgtatgatttcgataattggatcggggagtggtgccgacgccaggacatcacttacacacggtactgtgacgacatggcattttctgctgaagaactgaatagtgatataatcatcgagcgagtacgcctcggactgaaaaaatatggcttgtacatcaacaacaagaagactcagattatccacgatggacagagaaagaaaataacggggatcattgtgaacgacaagccaaacgtgtccatcgattattgcaagaaaattcggcaagaaatgtactatatccgtaagttcggcattgattctcacttaaaagctatcgggtacgagaagaccgttgacgactatctgaggtcattgctgggcagaatcaacttcgtcctttctatctcattttccaaagagttcgatgattaccgcacaacaattgcctatattcggaacaccattttttcatga

SEQ ID NO: 9652 - RNA, 948 nt, synthetic construct
  source 1..948: mol_type = other RNA
atgaagcacacgtactttgaactggagacattagaaaaggatcttaacgtgcacgccaagactctttacgggctcagcaataacataaatgcccactaccactctaggataattaagaagtctaacggcggtgaccgcgtgctcagcgttcctgacttcattttggtcaaggtgcagaaccagattaatgacgttatcctgagtcgcatgcccgtgtctgtgtacagcaaggcctacagcgcaggagattccccattaggtaacgcggcacctcatctgcgtaatgataccgttattaagctcgacattaggcagttttttgaccatgtcacatatccactcgtaaaagagaaagtgtttagaaaggaactgttctccgagtccaatcgcatcctgctatcattactgtgcatgtataatgaatcacttccacagggcgctcctacttctcccgctatctccaatatcctgctgtacgacttcgataaccgcatcggtgaatggtgtcgacagcggaatattatctacacaagatattgtgacgacatgactttctcaggagattttgagaactgggatccgatagacattatcagaaaagtcaaactggagctcaagcaatacggcctcttcatcaacggccggaaaaccaagatcctacataacgggcagcgcaaaaaaattaccggaatcgtagttaacgataaacccaatgtctccatcgactacagaaaaaaaatcaggcaagagatgcactatattcggaaatacggattgaagaaccacattcgtaagaccgggtgcgataagtcggagatggaatatctgcggagtttgcttggcaggataaactatgtgttgagcgtgaatagaatcgaggagtacgaacggtatcgagacgatgtggtcagttatctgaggcatatggggctgcgacaggatctgtga

SEQ ID NO: 9653 - RNA, 972 nt, synthetic construct
  source 1..972: mol_type = other RNA
atgaaacacacttatttcgaactgaaaaccctggagaaggatttgggagtctccgccaaagtgctttatacactatccaatcagatcaatcggcattaccgctctgtggagatcccaaagtccgatggtggcacccggaaacttagcgtccctgaccccttactgaagtctgtgcaacgaaagattaacgaggttatcttgtcacggatggatgtcagttcttacgctagagcatatagttacggggactctccgctcaagaatgcctcttcccacgtgaacaaaaaggagatttttaagctggacattcgcaaattctttgaccacgtcacatacccactgattaaagagcgcgtgttcacagcggaccgattcagcgagagcaaccggattctactgtccttgctgtgcatgtatgacgaaagcctccctcagggagctccaaccagtccttcgatatcaaacatacttctctacgagtttgacgaagaactgggcatctggtgtaaagagcgggatgtgtcctacactcgttactgtgatgatatgacctttagcgccaatagcctcactcccgaggaaatcgaacataaggtatcatctatgcttaagcagtacggcctgttcatcaaccaaaagaagaagcagtatattagggggagtagaagaaaaaaagtgactggcatcgtggttaatgaaaagcccaacacgcccgttgagtatagaaagaagatcaggcaagagatatttttcatcaacaagtacggtctgaaagatcatatggaaaggattaaatgcacagatagccaggggagttatctgtcctcactgttaggaagaatttcgtatgtactctccatcaatcagagcgaggagtttgaaaagtaccgtgagcagatatcaaccttactcaaggagcaggacgacatgcgcatcattcagaaatctgaagaaacgaggaggttgctgtga

SEQ ID NO: 9654 - RNA, 927 nt, synthetic construct
  source 1..927: mol_type = other RNA
atgatagtgtacaggaccatgcaggctttggagacagacctcggcttttccgcccgcacactctattccgccgctaataccattgacagacactaccatgaagtccggatccccaagcgtgatggcacagagcgtattctgcatgtgccagacgagttcctaaagcgaatccagagaagaataaacgatgttctcttggcgggaatgccagtgtccaggtatgcaaccgcttacaatcctggtaattcgatcatgcagaacgcacagccccacgccggcaagcacttcctgttgaaacttgacatccgagacttcttcgatcatattacttacccactcgtaaaggagaaggtttttccggaacacatctactctgagcagaaccggatactgctaagcgttctttgcgtgtaccatgactcaatcccccagggagcccccacttctgatttaatcagcaatatcgtgctctacgatttcgacagaaccgtggggcgatattgtagagaacggaacatagccttcacaaggtattgcgatgacatgagcttttccggcgattttgatccacaagaactgaccgcatttgtctcagaggagctgcgcaaagacgggttctttctgaatcgcaaaaagactgtcacggctaggcctgggcaggccatgagggtgactggtctgtctgtgaacgaaacggtcaacgtccctagtgagtatcgccggaagattagacaggaaatgcactttattcagaagtacgggaccgcacaacacattaaacgcctgggcatcggaatggaggagcaagcgtatctgaatagcttgaaaggacggatcgcctatgtattatcagtgcgtgaaatccctgagttcagggaatacctgaaacaaattagtcttctggagaagcggcagatgattcagtga

SEQ ID NO: 9655 - RNA, 987 nt, synthetic construct
  source 1..987: mol_type = other RNA
atggtctactataaggatctgagcactcttgagaaggacataaggatcccaaggaaagtgctgtacaagtttagccggaatattttctcaaactacaagaccgtcgaaatcatgaaaaacaacggagagatccggacccttcacgtcccaaaggacaatttaaagagcatccagaggaaaatacgcttttatatattgcggaagatgccgacaagtatctacgctaccgcatacatccgtggggagggcatagttaataatgctaaggttcacgtgggggcggaaaatattctgaaactggatatccgacacttctttgataacatcacctatcctatggtaaaggagaaggttttcaaacccgacattttttcagaaccaattaggatcctcctatcaatcctgtgtgtgtacgagcactctattccccagggagcccccacttcgcctgacatttccaatatcattatgcgcgatttcgacaaagaaattggtgactggtgcaaagaacggaacataaactataccagatattgtgacgacatgacctttagtgggaaattcgataaagagcctgtgatcgagaaggtggaatccgaactccgaaagatgggattctacatcaacaataggaagacaacgtacctccattccgggcaatccaagaacgtgactggaataatcgtcaatgagaaattgtctgccccccgtaaatacaaaaaggaaatcagacaggagatctattactgcaagaagtatggcatcgaaaaccatatgaagcattctgtgctgaaaaagaaatccagacagcttagtgatgccctgaagggccaaatcgacattgacattgatgtggagattagcacagagcagtatattaattctttgatgggccgcattaactacgtcctgagcgtagaggataacgaggaaatgagagagtacaaggaatggctctatggctgcggtaatacacagaaattttga

SEQ ID NO: 9656 - RNA, 975 nt, synthetic construct
  source 1..975: mol_type = other RNA
atgactaacgcgaaaaaaaagtattccgatctgtcctccttagccctggatctcggcttcactggaaaagaactgtacaccgtgagtaacgcgataacccgatattacttagaggtggcaattccaaaaagcaatggcgagacgagaaccctccatgtgccctctgggatgctgaaaatgatccaaacctctattgccagggtcctgctgccaaaagtgcctgtttcgcgttacgcctgtgcgtataagcctggggccagcgccgttaaaaacgctatgccgcacgtgggggctcctatagtactgaagttggacattcggaaattctttgaccatatcatctttcctatcgtgaaggagaaggcctttcccgaaaaaatgttcgctgagaagcttaggattctcctaactattctctgcatctataaggaggcactgccccagggctcaccagcttcacctggtataagcaacatcataatgagggacttcgatgataaagtcggcggctggtgtgcagaaaggggtatagcctacacacgctactgtgacgatatgaccttttccggcgattttgatccaaagcccgtgaaggacttggttcgcaacgaacttagaaagatggggttcttcctgaatgacgcaaagacagtggtcgctcacgatggaatgagaaaacaggtatgcggcattgtcgtgaatgagcggcccagcgtgcccaaagattacatcaagaagatccgccaggagatttactacattcgtcgctatggactggcctcacacctaaagagaacaaatccaggagtggaccctgtcaattacatcaactctctctctggacgaatccggtattccatctatgttagcaaggctagtgacaggtgcgccgacccggagttgagtgggtacctggatgtaattaagaaggaaatggacatccttgcaggtcgggactatcgggacagaacatga

SEQ ID NO: 9657 - RNA, 1026 nt, synthetic construct
  source 1..1026: mol_type = other RNA
atgctggccgcagagcagcataccagtagagtgcacgctctgactggatgtcctgcagccgctctgcagaatattttgaaatggtgtcagaaaggggggagaatgattgtatatagggaattatcttccctttgcagtgacctagatgtatccgcaaagaccctttacactctctccaatagtatcacttcccgttataggacagcccagttactcaagaaagacggaggctacagaacccttcggatccccgatccactgctgaaggaggtccaaagaaaaattgtccaggtgcttttgagcagaatggaaataagcccctacgctaccgcttatcggtacggcgcgtctatcaagaagaacgcaagcgtccacgtgggccagaaaacagttctccacctggatatccggcgcttcttcgataggatattgtttccccaagtgaaagagaaggtctttccaaaggagcgctatagcgagccaatccggatattgctgaccattctctgtttcgacggggagaacctaccgcaaggtgcccctacgtcaccctggatcagcaacatcatcttatgtgactttgataacacagttgccgcttggtgccgcaagcgtggcatccattactccagatactgcgatgacatgacgttctcaggtgaatttgaccctgcggccgtggaggacttcgtggaacgccagctgaaaaaggagggcttcttcctgaataggaagaagacacgacgaatggataggtcacgtcggcagtatacttgcggactcgttgttaacgatcaggtgtctgtgcctagcagtgtgagaaggaagattcgccaggaaatgtacatgatccagaaatacgggctggactcccatctccggaagatacaatatgaaggttctgaggaagaatacttgaattcacttctgggaagggtcggctttgtgctgtcgattcaggcctctgacgagtttctgcgatataaacaaaccctgctccgcatgatgaagaaacgaaatatttga

SEQ ID NO: 9658 - RNA, 933 nt, synthetic construct
  source 1..933: mol_type = other RNA
atgatagtgtaccgtgagctctcctcgctgtcccgtgaccttgaggttagcgttaagactttgtattcactttcaaacagcatctccagacactatcatactgtccagcttcctaagaaagatggaggagtcaggactctgagggtgcccgacccccttctcaagcatgtgcagaggcgcattgctgaggtactgctggctcagacagaaatctctccgtatgccaccgcctaccattacggggccagtatcaagaaaaatgctgcggtgcacaccggtaatgagaaggtgttaaggctcgacattcgacaattttttgatcacatcctcttcagtcaggtgaaacagaaggtgttcccagcggaaaggtatagcgaacctattagagtcctgctaacaatcctgtgtttcgatgaggagactctaccacaaggcgcccctacaagcccctggatatccaacattatccttaaggattttgacgacgctgtatctgcctactgcagatcgaaaggcattcactactccagatactgcgacgatatgaccttttccggagaactggacgagaaagaactcacggaattcgtttctgaacagttaaaaaaggaaggctttttcttgaatcgcaaaaagaatcggctgatgaaggcaagccagagacaatatacctgtggtctgattgtgaacgaaaaagtgtcagtcccatctgatacgcggcggaagattcgccaggaaatgtacatgatacagaaatacgggctcagttctcacctggaggccgtgcatttcgagggcagcctggaggaatatctctacagtttgctgggccgggtcaactttgttttatcaatcgagaaacgcgaggagttcttgaagtatcgaaaggcactgctggagatgatcagcgggaacacagacacccacgcatga

SEQ ID NO: 9659 - RNA, 1035 nt, synthetic construct
  source 1..1035: mol_type = other RNA
atggggcctggtacagccgctgcacgcaggaacatcagaaagtggtgctttggccgcgaagaacggcgtatgatcgtttaccatgagcttagtagcctttgcttggacctaggaatcgaagcaaagaccttgtacgctttatccaacaatgtctccagtcattaccatgaagtgaaaattcctaagaagggcgggggaatgaggaccctgcatgtgccggacgatgtgctcaagcacgttcagaagagaattgctgaccagctgctcgcgtgtgaggagatttcagcatacgcttatgcctacagatatggctgctcggccaaaatgaatgcaaagagacacgtgaatcaggaaattgtgatgcggttggatattagggactttttcgaccacataacattcgctcaggtgcgcgagcacgcttttccaaagtggaagtactcagaacccctgcggacgctgctcagtgtactgtgtatcgacgaagatagccttccacaaggttcccccgcgtcacccgccatatccaacattattatgcgcccctttgacgatgtcatgggagagtggtgccggcggaagaaaatcacctatactaggtattgtgatgacctgacctttagtgggtctttcgagcctaatgaggtcatcgcacaagccgccctattcctgagccacctcggctttttccttaatgagaagaaaactgtgatcagacggaaagagcagcgccagttcacgactggactgatagtcaacgagagcgtcagcgttcctccagaatatcgtcgcaaaatccgtcaggaaatgtactacctccagaagtacgggttatcttcccatctggagcagattaacgagacagatgagaaaacctatctgcgatctctcctgggtcgaatccgatatgtattatacatccactcttcagaagagttcaggaactatgaagccatagtgctgaaattgactgaggagacaagccacggcagagacaatcaaaaaaccgattgtgatgccggcagggccgaatga

SEQ ID NO: 9660 - RNA, 948 nt, synthetic construct
  source 1..948: mol_type = other RNA
atgatcttttatggtctagcgaaactggagaaggccctgggctacgaggcaaaaactctgtacgcgctgtcgaacaatgttaagaaacactatcatcccgcacagatccccaagaaaaacggggaaatgcggaatttgctggtgcccgatatggccctgaaaagcgtccaaaaagctatagccgaaaagatcctccagaatttcccagtatccccgtatgcctatgcctaccgcaaagggttcggaattaaaaagaatgctaggcagcacaccggcaaagaaaaggtgttgaacctggacattgaaaagttcttcgaccacattctttacacacaggtcaaggattacgcatttcctaaggccttttttgccgaagacgtgcgcatcttactcagtatcctctgctatggagagaaagggcttcctcagggcgctccaagctctccagctataacgaacctcgtgatgcacgactttgatatgaaaattggtaagtggtgcgaaaagcagggcattgattactccagatattgtgatgatatgtctttctcaggcgacttcgacgagaaagccgtaatctcattcgtgaaaaaagagctccggcgtctgaacatgtccttaaagcgtgagaagacccgggtggcaaagaaggggagtaggcaaacagtgactggtatcgttgttaatgagatccctagcgtccctagtgagtaccgcagaaagcttcggcaagagatttactaccttaagaagttcggcgctggacatcagctgcgacattacggactgaagatgaccgcaaaagactattttttatctctgttggggagggtcaattatgtcctgcacataagccccgacaactatgaaatgtggcaatacaggagataccttaagaacatgctgagacagtcacgcttgcagccacgaaggtccgtgctactctga

SEQ ID NO: 9661 - RNA, 972 nt, synthetic construct
  source 1..972: mol_type = other RNA
atggcttatctcgaccccgatgtcattgctgtgttactgcacgtaccggtccacatcctgtacgcgttttctaacagtagctataagcactataggctgatctcgatcccaaagaagaatggcaagacacggcagttgaccgtgcccgacaatgacctgaagatcatccaacggtcaatttactttcgcttcctcaggggtagagaggttagcccagctgccaaagcctatttgaaaaaaggaacaaccacggaaaacgcaaaaccccacgtgggtaagccaatgatactgaagctggatatacgccattttttcgacaacgtgctgttttggcatgtgaaggagaaagtattcactagtgacatttactccgagaacgcccgggtcctcatgacctacttatgtacctacgatggccacttggcacagggcgcaccttcatcccctgctattactaacatcctcatgaaggatttcgatgatgagattctacggttttgcggaaaggatggggtttgctacactcgatattgcgacgatatgacattctcaggagtatttgaaccagatcaagtgatcagcaaagtggcctgggagctgaaaaaaatggggctccacttgaatcctgccaagaccagagtgatttggcagggccagcagatgaatgtgacagggcttgtcgttaatgataaggtgagcgttcccgcctcttatcgacgtaagatccgccaagagattcattatatctggaaatattccgtggaagaccatctcaagcacatgggaagagaagaggacgaacagtacagttacctgtctaatcttctgggcaggataaactacgtcctttccatccataaagacgacttcgaattccaggagtacaaagactacgtcgttatgggctgtgatggtaggcttcgttacaaggaaagaccttatcagatagggattgacgagctgctaggatga

SEQ ID NO: 9662 - RNA, 1008 nt, synthetic construct
  source 1..1008: mol_type = other RNA
atgaaacgttccattaaaaaactgattaggcccaaggacgctgccatgtggttatataaggcccagagcggtaaggaggtaactgaagctcttatgctactttacgacatgagtaacaatgcacctaaatattaccagaagaaggagatcccgaaaaaacaaggaggcaaaagagtgctctcggtccctgtcaccgaactgaagcgggttctgtgctgtatcaaggcagagatattggattacatacctgtgtcagactacgcccgagcgtacaagaaaggcggcggtatcgcgcatgccgccaaggaacacgtggggcacgagacgctcctgcgtctggacatcgaaggtttctttgatcacattacatacaaggaggtgtataagcacgtgttcggacggtattacccacgcaaagtcgccggcttgctgacagctctgtgttgttatgaaaagcatctcccccaaggagcccccacttctccagccatttctaatattgtgatgaaaggattcgacgacgaagtagctgttttttgcaagatgaacaacatccattacaccaggtactgcgacgattgtatcttttctggtaagtttgacgtgggcgccgttattaaaaaagtgaagtcagagttgctgaagatgggcctaagactgaacgatgaaaagacaaaggtgataagccagggacagaggcaaatcgttttaggggtttgcgtcaatgagaaaatgcaggctcccgctgcatatcgcaataggatcagacaggagatttattactgcaaaaaatacggggtcaaaaatcacctgttgcgactcaatgatgaacgcttcgtgaagaagacccctgggggggtatttgtggatgcagtgggctatctcatgcagcttaaggggaagataagtttcgtcctcagcatcaacccagatgacaaggagatgcgggagtatttcaacctgctttccgtctccaagaagagcacgagagcaaaaaaatcctgttga

SEQ ID NO: 9663 - RNA, 1224 nt, synthetic construct
  source 1..1224: mol_type = other RNA
atgaacagaagcctgtacctgccccaaatggactccctgtacgcatttgcctaccagtatctgcgcgtcaacggacggtcttgcaggtcagacgacatctactcctgtggcggagagatcaaagcgattcttgatgatacaaggcctcattatcgcaaaattctcatacccaagcctaataagaaagaaatgcggactgtcttcgaggtgacccaggacctacgatcacttcaacatttcatcaagcggtatatcctggatagactcgacgcaatgtatacttcgccttacgctttcgcctatcgcctcggcctgtcagctcgtgataacgcttctgcccacgccggacacagatacatgcttaaactcgacatacgccatttctttgagagcacacgcgcagggcaagtctactctatgtttagaaagtacaccccatataacagacagatattgggcacactgacccgtctggtgtgctataagggcgccttgtgccagggcgcttgcacttcccctcaaattgccaatctgattctctccgattttgacatggccatcggaacctgctgccgcgatatgtgtattacctacacgcggtactgtgacgatatgacattctctagcgttcttcccttcgacaagagcgctctggaacgaacggtggccctaatgttacagccatatcactacaaactgaatacacgaaagactcgatttctagggcccgggcacagactcgaggtaactggcgcggtcgtgaacgagagggtgcatgcaaagcgtgaatataggcagaaaatcaggcaagaactgtactacaccaatcgctacggggtagcagatcacctggagcggactcggcctgcttggtaccataccccctgttcctgtgcccagattaggcacttcctgtatagcctccagggaaggatcaattatgttaggatgttggacccagacgaccccttcctgggtgacgcacagtaccagttatttagattgtttctcagagaacagagcgccttccggaatatttatgctgacgtgggcccagtttcacagcggcagggtagtacaagtggatttttccccgaggagggtcccgtggggtttgatgatcttgacaccgatttaatggaaccacctttcaacatcccggatatggacccaccagagttgccgtttgacgtgctggggtgggatgatcctttcagtggctga

SEQ ID NO: 9664 - RNA, 1149 nt, synthetic construct
  source 1..1149: mol_type = other RNA
atggactctgacgagatatatgcatgcgcgggcgaaatcaaagccatcctggacgacgtaagaccccattaccggaagattctcatccccaaaccaaaccaggaggagatgcgaacagttttcaaggtcactagcgacttgcagctgttacagtacttcatcaaattcaggattctggaccccctggaccgcgcttatacctccccttacgctttcgcttaccgtaggggctattcagcccgtgataatgcctcccagcattcaggaaggaagtacatgctgaaattggacattagacacttcttcgaatccacgcgggcaggccagatttatagtatgtttcgcaaatacactccttacaataagaccatcctgggtacactcaccaggctggtttgtttcaacggagcactctgtcaaggcgcatgcacctcgccccaaatagccaacttggtcctgagcgattttgatcgcacaatcgggagctattgcaagtgcatcggggtgacttatactagatactgcgacgacatgactttttctgcctattggccttttaacaaggtggctgtgaaggatatggtcgaagacctgttgcgcccctatcactacaagcttaacacagccaagacccggtttctcggacccggaaaacggcttgaagtgacgggggctgtgattaatgacagagtgcacgctaaacgagagtaccgccataagttaaggcaggaactgtactatgcctgtaagtactctgtcgccgaacatctagagagaacccgacctaaatggtaccactccccgtgtacagcggagcaagtgagacacttcatatacagcgtgcagggccgtattaattatatccggatgctcgatccggaggatcctttcctcgagtatgcccaggatctgtttcaagtgctccaccttagtgaggtaagcgcatttagtcggaatggccacttcaggggctctgagcccgatgaggatctgcctgacccattagatattcctgacctgtttttcaccgatcttgaagaaccgccattcgatgttatgggggattattttccaggtgaggaattttttcatcctggagactaccccgtcccaggtccacaggacgatccactattcgggtcagagtga

SEQ ID NO: 9665 - RNA, 1476 nt, synthetic construct
  source 1..1476: mol_type = other RNA
atgaaacccaccctccccaaaatggactcagcttatactttcatcaaggcttatcgccggtctaaaggttatagcgaaaaccgtaacagagcgtttcgagatacccgtgaactcctttcggtattagacgagatatctgaacactacgaaaaacactttgtctccaagaaaaattccgacgagcttagaaccgtttttagcgtgagctaccctctccgggagtatcaggagttcataagagctcaggtgctcactccactggacctggcgtacacatccagtttcgcctacgcatataggagaggattgtccacaaaagacaacgccaaggtccacgagaagagtcgatacatgttgaaactagacattaggcacttctttgagtccacacgcaagcggcttgttttcgccacattcgagaagtacacgtcttataacagaagcatcctgggaatcctaacgaagctggtgtgttataatggcagtctgtgtcaaggcgcctgcacgtcccctaccatagctaacctggtactcgctgattttgatgcctctgtcggtctgttctgtgacggcctgggcattcgatatactaggtattgcgatgatatgaccttttcttctccctttgaattcgaagccaaaaatgttgaggagtttgttaggttgcagctgaagccactgcggtactccctgaatgaccgaaagacccggtttttcagaccaggacagagactcgaggtcactggggccgtagtgaatacacgggtgcgtgccccgagagagtacaggcagaagatcagacaggatctgtattacatcaacaagtatggcttcatctttcatctcgagaaaacccgcccaagttggtactcgggtaaagctactgaatacgacatactgcacctgctcaaaatcatgaaggggcgaattgcatacgtgaagatgcttgaccctgatgatcctttcgcaagcaatgccaggaaggaactggatgccgctgcactaaggtacggagtgggagacttgagcaagatgcaagatcggcagatcagcttcgaaattgagaacgcaaaaatcctgcggttcatgacactggaagagaggttgcagcgctcagtgagtcccgaggtgcatttaatggtctggcatgccatgaggggtcttgaataccatcccgaggggaatgggggctttgtgtcagacgaggaggatgacggcctctttagcgatgaacgcgacgttcgcgataatcgctgcttcgcagacgaggggcacacctctatgcaagacgcgaacgacacattaccctttgaagctgtgaacttccccacctttgatgaagtctcaattcccccgttcgacgaggacttcccaacttttgacgaacatcgcattccgtcattcgacgaggtcattgtgccatcccctgatgaggataagactcctcctcttggaaacgaatttccagatgattga

SEQ ID NO: 9666 - RNA, 1542 nt, synthetic construct
  source 1..1542: mol_type = other RNA
atggtggtcaattgggagaaaaaacgtcgcaggaggctgacagaattggaacaaaaaatcctggcagagaggccaggcgaacctgcatttaacgccggttcaggcgatctccctgtgatcggatcactgatgagcctcgtgatgctagctcgcggaaactccttctcaagcgaggaaggcttttggcgcgagtacagaagggcatccgcaatggttgatgacacttccccctattataggcactacccaatcccgaaagctaacgggcgcggctacagggaaatctacacagtggacgacgggttacgcgtctaccaggaggcaattagaggcacaatcctggatccccttgatgagaaatatagtagcaagtacgcttatgcatatcggagagggcgttcggtcagagataatgctgccgtacacgctggtcatggttatattgtcaaactcgacatcaaggacttcttcgactctactggaaagtctgatgtgtatcggatgttctcacgctacacaaattactcaagggccgcaaagacagtacttacggccctggtctgtcgagatggccacctgagccagggaagctgcacgtctcctcagattgccaacctggtcatggttgacctcgatggagagttggccgcatactgcgagccacagaagataacctactcacggtattgtgacgacatgaccttctcttccgatgaacccttcgaccacgaggctcttattaggtttgtaagtctacggctgcggcaaatgcactaccgattaaattgcagaaaaaccaaggtgttaggcccagactctagacatatcgttaccgggatcgtcgtgaataacgagcggatcagagtgaccaaggagtacaagaaaaaactccgacaggaaatctactacatacggaggtacgggataactagccacctgaagcgaatacgtccgggtgagtacacccctgtcttcgaaggcgccggaagtaagcacgagattcactatcttgcccatctgttggggcaggccgcttatgccctgtatatcgatcatgacgatgaggaactgcgcgcgatggtggactatctgaaacaggctgtgaccgaatgtgtagcctctacaggcacacggcgcagcgaatatctttccgttatttccaggcaaattttgaataaccgtatgtgcagcgtgaacgaccggctcaagattagagtgtcttgtcagtatgatgaaatcgtggtaactgccagctttcggctcatcgacgatcccgacgttcgggaggtggccgatcattatacaaaatactcccgcgttcagcgaaggtgcagaggccgctttgtgaagcctggtaggggaaccggaagaggtactgagtcggctaccgaaagtactacggcgactggcggggatgggataatttgttacgaggttgtgattccagaacgagacttctccagatacaatgaggcggtgcccgaggtcatggatgacatcacctggatttatagtgactttatgaagtacaagctgatctga

SEQ ID NO: 9667 - RNA, 1581 nt, synthetic construct
  source 1..1581: mol_type = other RNA
atgaagctgcagattgaggattttgagaacgttaaggtcgacatcaaggaattcatcgagtatatcatgccttctaataaacagtcgatgaataagcttgccagaatactctacccagacagcaacgagaaggattacgactctctcactaactatctttacgtgatgctggacggaatcgagaaagattacgaggagttcaccatcaagaagaagaacgggaaactgagaaccatttccaaaccaaatgaagctctagctgacattcaaaagcgcatctatgagtacatcttgagaaacgcacctgtgagcccctgtgctgccgcttatgtaaagggcaagagtattagggatgcaacagccaaacatattggccaaccaatcctgattaagatcgatgtgaaggacttcttctacaacatattctttgattctgtgaacgatgcattcaccaacttgggatttgataaatatcaggccatcactttggcgaatttttgttgctacaaaggaagtttaccccagggcacttcaacctcccccatgctctcaaacctggtctttcgtgacttcgatgatgagatggagaaactgtgcttgaagtataacatccgctacacacggtattccgacgatatgctgttttccggcagctttgacaatgagttcgacaccaaacggtttgttccgtacgtaaagttcatgcttgaagatttcggttttcagatgaacctcagcaaaactaagataattaagcaggggcagagacagacagcattaggagtcgtcctgaatgagaagcagcaggtcacaaaagaataccggaagcaaataaggcaagaaattcactactgcagtgaacactctgtgaaatctcacttggagcacatccaggacgaaaggtttctgcttccaaacggagagcccgactatattggctatattgacaatctgaacggcaggattaatttcgctctgcaaatcaaccctgatgacatggaaatggtgtcgtataaaaatagcctcaagtctctgtcaagcagtatgtatcaggcaaaggtggtggaacagaatcagcttatggaatgtctctacaaagtgttcagtgactatgtaaactccaaaatcaagtacaccattctgtataagaagctactggaatacgggttttccaattcacaactgagcaaaatcggcatctatgaggagaaaatcgtctacgggtttgacgaagtttatctcacgaaagatgacaagggtaattacctatccttgattaccaaacattcatgctccgagcacctgggaaatgtcataatcaacccttactgtgatggtttctttggctctcgattcgacaagaatctggggtatcttacagttactagcgacaaaattgctgccgtgacgtctggcctcaccaactacgtttcctttaataacgccccgtcaaagttcttcctcagcaaaaagaagctggagatgatccgaaagtacgggaacaaagtagtggtggccgattgcagtggtgccgagtacatacgcttacagatgattgcgaatcatatcgaagtgatatga

SEQ ID NO: 9668 - RNA, 966 nt, synthetic construct
  source 1..966: mol_type = other RNA
gaaacagtgtacattacaaaagcatctggaaagaaacgggagatcaataaaccagatattgtgctgaagtccttccaaaagtctgtatataagaacatccttctgcacattccgacatcctattacgctgtggcctataagaagggctctagcctaagatactcaacagcggtgcacattggcaagcccatgatcctgaagctggacatcaagaacttttttgggtccatcctctacaaaactgttcaggaaatgttcctgaaacaaggatacgattacttcatggccactaccctggcaaccttgtgttgctataagggacgcttaccccaaggcacacctaccagccctgccattagtaacatcatcatgaaggacttcgatgataaagtcgcctgtttttgctacgcccgaaatattgcttatacccgttacagcgatgacatgacatttagtggtagtttcgactcagacgaggtgatcgagttcgtcaaaaataaattgaacaagtccgggttccagctgaataataagaagaccaaactgataaagcaggggcagaggcagactgttaccggtgtagtggttaacgaaaaacagcagttacccaaaggctacaggaaacagatccggcaggaaattcattactgccagaaatatagcgtgaagtcgcacatcctgcataccaatctcacggcttatatacggcctaatggagatgtctactacaaggagtatctgctaaatttgtatggcagaattaactatgcactccaaatcaacccaaccgacgaggagatgctgaaatacagatccgtcgtgaagtcagccatagacaagcttgatattatcaaacgcaagataaacgatgagatttttaggctcgctgtcgactttttcactagcgacaaatacaagacgaacaaaatctacctctatcttaaggaatctgggtatactaactga

SEQ ID NO: 9669 - RNA, 1074 nt, synthetic construct
  source 1..1074: mol_type = other RNA
atgtactggaatcgcgaaacaaacgcgatttccataagtgccggcgacatgaagatcatgcgccagtgcaacatatccatggagagactgatgcagaaacctgccaatccgcaactcccacctctttggtcaattctgtcttacgcaatgctacggagtgatggggatgcagccgtcggcatttggcgaaacttcagactctatcaaaaactgttcgagaatccaaatcagttctatttcggtaaggagatctgtaaaacagacggatctgtccgggaactcaacgtacctatgtcaagactgcgttgtgagcaagagttcgtgttcgaaaacattctgtccaagctccccgtcgacagccacgcatatgcttacaggaagggcattagtatgcaagattgtgctcgaccccacgtgggtaaaaaagtgctgatcaggctcgatattcaggacttttttggaagcgtgaccgagaatatggtttacaaccgccttctggaggataccggctacccacgcaaactctgcagatttttggccaagttatgttgctaccagcaccatctgcctcagggcgccgtgacaagccccatgctgtctaatatagttttccggcccttagacgaaaagttggctgaatttgccggtttctgcgggatggcctataccaggtactctgatgacctatacttttcaggagacgaaatcgatgtgacttcctttatctcgtgtgtgaaactggttctcggaaattccgggtttcgtctgaacggaaagaaaacccgcgtccggatgccacagcatcgacaggcagttcttggtcttactgtgaacgagaagcttcaggtcagcaggacgtacagaagaaacttgttacaggaaatctactacctggagaaattcggaaagaactgcctgggggcccagaaggaggggaattatctgcggtatgtacagcggctactcggcaaggtgaattatgcgatcgctagcggcgctgaagacccgaagttgaaagccgctgcagaaatgctgaagaagaggattttcttgatcgagagggagttttattga

SEQ ID NO: 9670 - RNA, 1065 nt, synthetic construct
  source 1..1065: mol_type = other RNA
atgaaatggaaggagagaagcagtacattttgcctggagccccaggacatgcagatcattgctcagtgcaagatgagcctcacagagatggtacggcatgaccacccaaataaaaatatcccgccactctggagtgtcctgtcctatgtgatgctgcaatcaacttcacatgcaaatatttggtaccgctaccgcgcccttcgcgaaatggcctcgaatacaaagctgtggtattatacccaatacatacccaagtccaacggtggcgcacggcggatatccgttcctacgcacgccatacgcacacagcagaagtatatcctggcaaaaatactgaaaggattgcccgtgtctgaccacgcctacgcctaccgtgaagggcgctcaattcaggactgtgctaagcctcatgagagccaggacgtgctcattcacctggatttgacagatttctttggttccatcagcgaaaacatggtattcctcacgttttatagggaaactggctactctagaagtctgtgtcgatttctagctaaaatgtgctgcctgcggggatctctaccacaaggcaccgttaccagccccatgctgtcaaacattgtcttttatagatgcgatgaggatcttgcaaggttggccgctaggtacggcatgaactacactcgatactctgatgatctgtatttctccggtaatagtgcccttgatgtgggggaggtgttaaagaagattactcgcattctgttgtactatgggttcaggatcaacgaaaagaagaccaagatccggagacgtcagcatcggcagaccgtcctcggccttaccgtgaatgaccatatccaagtgagcagaaaatataggcgagacttactgcaagagctttattacctcgacagattcggagaaaactgtaaaggggctgtcgcgtgtggagattacctgaaatatatgcagcagctccagggcaagttagcatacgttttgcacgccgaccctgaaaacgtgaaaatgagggaggcgcactctaagctgatcagaaggatccaccagtactccgagtga

SEQ ID NO: 9671 - RNA, 1098 nt, synthetic construct
  source 1..1098: mol_type = other RNA
atgaaatgggagggcaagcaggttcttttctctgcggctgatctccaggtcctgatgcaggctcggtttcgacctgatgaggtgccggacatggaggaagtcaaggaagggctaccacctctttggtcgcccttgtcatacaccctgtggaaatgtcacggcgaaacgtctcggaagaacctgtggcgccagcaccgtgaagcacttctcatggctaagagtggctccggatactatcatcacatgcttgtgcgaaagaacggtggaagcggcgtgcgaaggatttcagttccatgttacgagctgcgggaccaccagcggttcatatacaagaatctactcagcagactgcccttatctccgagagcgtgcgcatacaggaagggtgttcctctccgccgctgtgctgagccacattgcggagccgaagtcctcgtgcatctcgacattagggacttcttccctagcatcacagaggaaaaagtgagttttgccctccaccgcgccacaggctatgaggaagagctttgcgacttcctggccggactgtgttgcgagaatgggaggctaccccagggagcagtcacttccccagctctttctaacttggccatggctggcatggacgggaccttcggtgccatggccgccatgctggggtttacctacactcgttatgctgatgatatctacctgtcaagtagcgatcgatccgccgatgccgctaggattgtgaagttggccagagattttttaagatccgagggctttgaattgaatagggacaaaaccagaatcatcagacaggggcgtcatatggcggtgctggggctgagcgtaaacgagaaagtgcaggtgtcaagaaggtatcggagagaggtccggcagaagctgcactatctgaaacggtatggcgcagacgcacagggcgttcaagaagcaggcggacaagagccttacgcattgcacctgctcggaaaagtggggtatatactgcaggtaaatcccatggaccaacaagctctgcgcgcccgcctggaactcttgacaggtctgcaccgcttacataggggtatgcccttttggtggtccgcctga

SEQ ID NO: 9672 - RNA, 1266 nt, synthetic construct
  source 1..1266: mol_type = other RNA
atggagtgggatccccgccgggaaaagcttagcctgagtgagcgcgatctcaagatcatgaaagattgcggaatgacgcccgccgagattttacgtgctgtggagagcaggggaaggattgtcccactgtggtccgtgctgagttttttcatgctctatgagacaagcgaatctcccaaggctttctggaggacctataggcagggcgaaactgcggctcgctatagggactgcttataccacgacaggaaaattccaaagcgttgtggtggtgtgagaacgatcgcaatgccaatgtggccgcttgcacaaatgcagacttgtattgccgagaaaatcctccagcatatcatgcctgatgatcacgcttgcgcataccggagaggaatgagtgtgtcagactgtgctgagcctcatcggaagaagcggattgtcatccacctggacattcgagatttctttgggaccatcagggaggacatggtgttcgatgctctattgcgcgagacaggctactcaaaaaagctcgtcagatttctttcccggttgtgctgctatcaggacagactgcctcaaggcgcgtgtacctctcctgcattgtccaatctggtatttaaaccgtgtgatgaggccatcggcgggttcgcagccagtcttgggatggactacacacggtattcagatgatctctacctgtccacctccggagaggttgacaccgggctggtcattgaaactgtgagaaagatactcgccgaccatggctttcgtctgcacaatgagaagactaaaatcatgggaagacagcagcggcagagcgtggtcggcatagtggtgaacgagaaattgaggccctcacgaacctacgttaggaccgtactcaaggacgtttattacgtttctcgattcggcgccgggtctaaccaggttgctgcctttggcgactactattcgtatttgcgtcagttacaaggtcgcgtgaactatgtgcgctgcttcatgccagaagaccgggcagtgctcgaagccgttcaaacagtgcgcagcctgataggtgcctatcacagaactcttctggacgcggtgacagcactggaggcccagtgtcgggacggatacgtagtcgtattcagcgaaaattattaccgccctctggtgaagctgaaagaacagctggctgtggtcaggagattcctaccccgagattaccgatttcatgatgccgaggaaagagtctacgccatgctgggggaagaactatactga

SEQ ID NO: 9673 - RNA, 1104 nt, synthetic construct
  source 1..1104: mol_type = other RNA
atgcgctggtacccaagtgggaaactgaacttcacagccgcagatctggctgtcttgtcccatcctgcttttgcaagcaaaccttgggccggagctggagcatggttaagagctgaccctgcttatcctcctattccctcagctctggtgttcagccttctggcgggcccaagagaatctagaccggaacgcatgtggaaacagtatcgcaaactcctggagatcgcgaatgatcctgcccaatactatgtgagtcatgaaattgttcagcacagaaaaccaaggaccatttccgcccccttctatgaactggcgcagtaccagcggtggatactcaagaatatactggagcgagcccccacaaccgacttcgcattcgcctacaagaagggtctgacactggccgacaatgccagggtgcatcttgggcgatccgtaatagttaaactggatttggtccactttttcgattcaatcacatttggcatggtctatgaggtcttcgcaggtcaactgcggtatccacaggaaacggccgtgcttctggctaatctgtgctgtctcaacggcaggctcccacagggtgcttgcacttcgccctatctatctaatctttgttttgcaaaggcagacggcgagttagctggttattgccgggaaaaaggccttgcttactcaagatatagcgatgacttaactttctccggagacagaatcgacgtgaaggaactgattgcgtttgtgagggagactgtgaagaagtatgggttctctctcaactaccggaagatccacgtagacggaaaaggaaggcgtcaccgcgtgaccggcattgtgtgcaatgagaagctaaacgcaggggcagattacaggcggaaggtgaggcaggagatctactacctaagaaagtatggagccgccgaccacttgcgccgacgtaacgatccggcctacagaaacgccgatgggaccccctgtgttgagcgatactacgctgccttgctcggccggatcagctttatcttgcaggttgaccccgaacaagaggagttttggagttaccgggactacgtccgcgatctcatgctgcgtgccgccgagtga

SEQ ID NO: 9674 - RNA, 1077 nt, synthetic construct
  source 1..1077: mol_type = other RNA
atgatctggcgtaagcgcgagcgaattaaccttagcgagctcgatgtttttgtgcttcggaaatacgcaggacagacaaatcctatggaggagattctgaacagcgaaatacccgaaaatttgccaccaatactgactccctaccatctccccctgtttatgcacaactttaagaagatgtactacttctgggagaattatagggacattatgaaatgctctaacgagcccagagaattttaccgcagatatgacattatgaagcgatatggaaagatgcggaccgtctataaagtgagcggtgtccttgcagatgtgcagcactggatcctgcgcaacatcctcgatgaactccccgtatcacggcatgccaccgcgtacgctaagggcaggaagatcatggacaatgcagcgcctcatgtgggcaagaagctagtagttaaagccgacattactgactttttcggcaatgtgaagtacttgagtgtatacgatgtgttcaaaaacgctgggtatagtaagtcagtcgccacactgctggccaatctgtgttgttgcgatggacacatcatgcaaggtgcctgcacctccccggctttgtccaacctgtgttttactaaaatcgattcagtgatctctgaattctgcacggagcgtggcattacctacacacggtattccgatgacatgaccttttccggggacttcgctcctagtgagctcataacttacctgcgacgggttctgaaattctatggtttcactatgaacgacaagaagaccaaagtgttatatcggcaccacaggcaaacggttacaggggccgtcgtgaatgacaaaccacagcctaccaaagagtacagaagaaggattcgccaggaaatgtactatatccgcaagtacggcgtcttgggacacatggataggcttaaggacgagaaaagctatgtgtctccaatcaactacctcgaaaacttatatgggagaatgaattacgtcctgcagtatacaccggatgacgaagaactaaaaaggtggatgcatgaggtggatagaatagagcagtcgctgttctga

SEQ ID NO: 9675 - RNA, 993 nt, synthetic construct
  source 1..993: mol_type = other RNA
atggatgagatcctaaagtccaacataccggagaacctgcctcctctcttaactccatatcacatccctacactcatgcataatttcccaaaggtgatttcattttggaaatcataccgggaactgatccattgttctaatcaccctgaagagtattacaggtgtttggttttgcccaagagggacgggaagatgcggaaagtgtatgcggtaagtggggcccttgcccaagcacaacactggattcttcggaacatactggatgaactgccagtgaacccgcatgctatggcttatgtgaagggaagaagcctcctcgataacgcgaacccccacgccgggaagaaactcgtagtgaaggccgacattgaggacttctttggaagcgtgaagtacatctctgtctaccacgtatttaagtccgcaggatatagtgaaagagtctccgcagtgctggctaatttgtgctgttgcaaaggccatatcatgcagggcgcttgcacctcgcccgctttaagcaatctgtgttttgccgtgatagacgagaaaatatccgccttttgcgcactccgcgggatcacatatacccgatactctgatgatatgaccttctctggtgattttgccccctcagagcttatcacttacctgcgaggcctgctcaagttctatggcttcaccatgaatgacaagaaaacaaaggttctgtaccgccaccataggcagacggttactggagccgtggtcaatgaaaggcctcagccaacaaaagagtacagacggcgcattagacaggaggtctacttcattcgcaaatatggtgtcctggagcacatggaccgtctgaaggataataaatgctacgttagccccattaattaccttgaaagcctgatcggccgtatgaactatgtgctacagtacaacccacacgacgaggaattgctgagttggatggacgaaattgacaaaatcgagcagggtttattctga

SEQ ID NO: 9676 - RNA, 1029 nt, synthetic construct
  source 1..1029: mol_type = other RNA
atgatccagactctggaagagttctgcgaatggctcgatccgtctgtgtccccccggatcttgcaaaaaaaggtgtattggctccggagcctgcgcagtgccaaaaagaaacgcaaggagtacgggctattctggttggctaaaaggggggggggatataggcctgtggcgtctccgtctcctggactgaagcaggtgcagaggggtattctgtcactgcttgcctatggcgaaattgcgccaccagctactgcgtatcgtcctgggagaaacctcctagacaacgcagcagttcacgtggggcagcctatcctggtgaagctcgatctgctgcacttcttcggcagcatacacttcccttccgtgttctgtgctatcgatcgcacactgtcccaaaaccccgagatcgctccctactccaaagagtcaaacggtaagaatgcaggcagcaccagagccgactcctttaatgccctgctgagctttttcttcactacattctgcacgcttgacggaatcctcccacaggggagtccagccagtcctatgctcagtaaccttgtcttttttcctttagaccagcaaattgccgcattttgtggccagagacatatacactacaccaggtacagcgacgacctgaccttttctggcgatttttcaccagagcccctgatcagatttgtataccagctgttgagaaagaatggattcttgctcaatcccgcaaaaaccataattgctcgacagggccggcgacagcaggttacaggtattctcgtcaatgatcatccgcaggtgggccgggattataggcgccgtatccgtcaagaggtccactacctacgacgctttggagtagcttcgcaccttcttcatgaaggccagacaggttgggccttacatcccgccccctacctccaatcactgttgggaaggattcagtttgtcctgcagatttgcccatatgaccgggagttcttagaatatcgggcctacgttctgagattgctgaagagctctctttga

SEQ ID NO: 9677 - RNA, 1020 nt, synthetic construct
  source 1..1020: mol_type = other RNA
atgatccagactcctgaggacttttgtcaatggctgcagccagacgcctcaatccgcagcgtgcaaaagagtctctattggctgctgagcttgaggtcggcccgtaagaaaagaagagagtaccaggtcttctggctggcaaagcgggggggaggatatagacccgttgctgctccctccttaggattgaagaaagtccagcgcggtatactgagtttactgtccgtgggggaggtttctccccatgccaccgcttatcagcctgggtgcaccctacttcgtaatgccgccccccatgtaggccagccctttgtggtgaaactcgatatcgcaaatttcttcggatctataccgttccctgctgtttacgccgcaattgacagagcactttgtaggaaccctgagattcagagttccgccaaggcgtcatcagcacgggaaggtgccaccgagagttacaacgcggccctcagcttcttcttcgccaccttgtgtactctggacggcgtacttccgcaaggggctccaacatcaccactgctctccaatttggtgttctttccactggattgtaggattgccgcgttctgcgagggccggaaaattcactacacacgttacagcgacgatcttacctttagcggcgatttctctccagatacactgataagattcatcaggaggctcctgtgcgaacacggctttctgcttcacgagagcaaaacggtgatcgctcgcagaggcaaccggcaacaggtcacaggcattctggtgaacgaccggcctcaggcagggaggaagtttcgccgccgaatccgacaggagctctattatattcagcgatttggcctttcttcccacttactgcatgaaggtagaactggtgaatcctgcgctcctggaccctacctacactctttgctgggaaggatccagtttgtgctccaggtctgcccatatgatcgcgaatttctcgggtatcgggcttacatcctgcaacagatgaagcattacacgtga

SEQ ID NO: 9678 - RNA, 1035 nt, synthetic construct
  source 1..1035: mol_type = other RNA
atgttgcgaaccctggaggatttttgtagggccgtttacccaggactgacacctgagcagtttaggaagaactcacaccagctggcggcctacgcagactcccgtaagaggagaaaatcttatagagagtgctggattcctaagaaacacggaggagcccgaaggatactagtgccatcaccaggcctgaagcaaattcagcgcgcagctgcagcactcttgaagaatggtagcgtttctccgtacgctacggcatatcagacaggccgaagtgttctcgacaacgccgcccctcatgtagggcgtgaactgttggtcaaacttgacatccggaactttttcggctccatacggtttccggccgtgtttcatgcgattgaccacgctctccgcaggaacccagaagtcggacggcactgcaaggactacccccacgggtcccgggaaagccacaattataatagtgtgctgagcttctatctggcccagttctgcaccctagatggggtgctgccccaaggcgctccttcctcacccattctttctaacctcgtgttcgattccttggattgcaagatcgccgcttactgtgagcgcagaaatatccaatatactcggtactcagacgacatgacattcagtggctgttttcatcctgaggtgctgatccacttcgtaagaaggttacttgctgaatacggtttcaccctccatgaggaaaaaacagtgctggctggaagaggttgtcggaaatctgtcactggggtggtgattaacgagactccccaagtcagccgttcgtatcgcagaaatctgcgacagcagatctattatatcagacgcttcgggttaagagagcacttgctgcatttaggaaggaccgccgatgcagggcagcccgaacagtacctccgccagctgctaggcaaagtcagcttcgttcttcagatctgccccgaggatccagaatttcagcaataccgggcgtactgtctgggcctgcttagggctcatgccggcaagaaggccctctga

SEQ ID NO: 9679 - RNA, 1104 nt, synthetic construct
  source 1..1104: mol_type = other RNA
atgcgcagagctatgaatcacacattgcgcgaatttctggagtcgattaagagtaagcatacatacctgctgtttcggtacacggacgaggcctataaactacggcgctgctaccgtccagtaatccttaagaagaaaaacggcggattcagagtcctccaggtgcccgacgagaatctcaagaggttacaacgtcagttgctcacctatctgcagcacgccgaaatctccccttgtgcagccgcctatgtgaagggtagaggcctgtcagaacatgctcattatcacgcgggccggagtatgcttctcaagctggacattgaggactttttcgggagcatcagttttagcaaagtcctgtttgctgtgaaagaggccctgaaacgatctccactggtgggtcaggaacagcgatccgagatcggatggttcatcgcaaaagcttgtacacttgatggggtgctgccgcaaggagctcccacttcccccattctgagtaacatggtctttttgcacctcgatcaagagattaatagctactgcatccagcgaggaattcattataccaggtacagcgacgacctgttcttctctggcgattttagaccttcagagataatccctcttatcaggaagttactgaggcgcaacgggtacaccttgaatgaaaacaagatcgttgcagcaggaagagggtccaagaaactggttactggcgtagtggtgaaccagaggcctcaggcggaccgctcatatagaagggagattaggcaaagcatctactatataggaaagttcggactcgaagaacacctcaaacggaaggggctgctagacgaaggtatgcagcccgaggatatgcgttctgaggccgcagggaatgaggatttcggcagggaagatgtcatcatccgagcccagatggtgaaagagttgcagcggctaattggtagaattgtttttgtgcttcagattgacccacaaaaccgcgagttccaggattacaagaaattctgcataggcctgttaaaccggcttccagtcatattcaatggccggctcctgtccgaagccgaaataaatgagggctgggggtctgcttga

SEQ ID NO: 9680 - RNA, 1035 nt, synthetic construct
  source 1..1035: mol_type = other RNA
atgctgcataccctggaggcgttctgtgcttggcattacggcgggggcgacccactaagactggctagacgcacccgctggttgatgaggctggcaagaggccggcgattagaaggggaataccgccctcaagagattcccaagcggaagggaggaacacgcaaactccttgtcccctcccataggttggcccacctccagcgcggaatactgagactccttgaagccggagaggtgtctgctgcagccacagcgtatgaacctggttgcagtctaaggcagaacgctctccctcaccgtggggcaagacttctagtccgtttggatctggccgactttttcggctctatctcgtttcaacaggtctttcaggctgtggatcgggctttgcggagaagcccccttgtgggccggcatctccttgacggttacgaccggctgcagagggaggagcgagtgtacaaccaagtgctgtccttttatttcgcacgcttctgcacttataggggacacctcccccaaggggccccaacttctccgcacctctcaaacctcgtattctttccgctggatgaggccctgctgcgttattgtacacggcgcggaatcacctacacgaggtattccgacgatcttgcatttagtggagaaaccttcagcgttggcgagctgctgcgcttcgtgcagaggttactggccgcacacggcttccggttgaatgagggcaagaccgtggttgcgggtcctggccagagaaaaagactcccaggtgtagttgtgagccataagctacaggccgacgtcggcctgagacggcaattacgacaggaattctactatattggcaggtttgggttggcctcacacttagagaggactggggagcagcgacccccaagtgcctacctgaggcggctgctgggaagaacagggttcgtcctccaggtgaatcctgaggatagggagtttcaggagtacctggagcgtgggaagcgctggctgaaagaacaggaagaacgagctgctgaaggttga

SEQ ID NO: 9681 - RNA, 996 nt, synthetic construct
  source 1..996: mol_type = other RNA
atgctgcacaccctcgaggacttctgccggtacctctaccataaccgagacgagaggaagttctatcgctgttactaccaattactcaggctgagtagggagaaatatcgctgcagctgttatacgcttcgggaactgccaaagggagaagccggaactcgcttgttatgcgtcccaaacagagctctgagacgggtgcagaaaggaatcctggggttgttgccagctgctggcccttgttgtgtgacagcctatctgccgggaaaaagcgtcctggataatgctagaccacatctaggccagcccctggtcgtgaagcttgacatcagggcgttctttgactcaatctcgttcgctcaagtttttcgggccgtcgacagagcgctggaagcatcaccttacgtagggtgccactacctgaacgcagatgatcgatcatccctcgagaatagaaactataattccgtgctctctttctattttgcacgtttctgcacccgtggtggcagtcttcctcaaggagcccccacctccccccttctgtctaatctcgtgttcggccccatagacggtcagatcagtgcatactgcggtcgacggggcattgcctacacaagatattctgacgatatgaccttttccgggacattcaaccctcttgccttaattgactttgtgagaagggtgttggccgagaacggcttcactttgaatgataggaaaacacgcatactgaacagaggacagcgcaggaagatcactggcgttgtagctaatcagaagctccaggccccgcgtgagtaccgaagggatattcggaaagagctgtactacattcggaagtatgggtgggaaagccatctgagccacgaaaacatcgcccagggccccgaagaatatcgccgaggcctgctcggtcgcgttgggtttgtgctgcagctgtgtcctgcagatggggagtttcagcaataccggcagtggctactagagaattga

SEQ ID NO: 9682 - RNA, 1059 nt, synthetic construct
  source 1..1059: mol_type = other RNA
atggaagacgccgcacggttcgagagggaaactgggctgccctattttccggatgcgcatcaatttgctgatgcctatttaccaacagacaggtccgaagaacatggtgaaaacgtgcggcgcttatacgatctggccaacgctcccagatggtattatcggtcagtgagcatcccaaagcaaagcggaggcacaaggaccctgcacatcccatacggcacgctcaaaagtgtgcagcactttctgctgcactcagtcttggaacggcttcctgtcagtccttgtgcagtggcctacgtccggggagtgagcctcagcgagagtgttagggtgcatgtcggcaagccattgttggtaaggcttgacctcaaggactttttcgatcacattggttttcttcaggtatatcagaatgccttcgccgcctaccctaaagctgtgcgggtcttgctctccagactgtgcacttacacactgccttcaggtaggtcttgccttccccagggcgcacccacctctccttacctcgccaatctgtgtatgcgccgcgctgatgacgcaatatacgcatactgtgctaggcgctccatcgcatatacgcgctacgctgacgatatgaccttcagtgggagcttcgaaccagagcgcctgattgaaactgtgagaagcatacttcgtcgtgaggggggctttgagttgaacgaggagaagacccggattctaagagcgtgtcgcagacagtcggttactggggcggtggtaaatgagaggccccgagcatctgctacctatagaagagagatcaggcaggagtgcttttattgcaaaaagttcggcgtgcgatcccatctactgagaacaaaaaaagcccctttcgtgcgaccatctgaatccgtcaaggacggatactatgtttctcagacacgctacctggagcacctgttaggaaaaatcaacttcaccctgtcactggatccgaaggacagagagatgcggctctgccgaaaggaggttctactctggctggccgaacgaaatgctgccccccgtgagcggtga

SEQ ID NO: 9683 - RNA, 1062 nt, synthetic construct
  source 1..1062: mol_type = other RNA
atggattttaaccactataaagaggccttcattaaggagagccggaaaattggtttttctcttccaaacatccagcactgcctggactatgccgaggtactattctcacaccatgttccagtcatatataatccatcacatctgtctgccctggttggctacaagaaggaatacttaaaaaaggcttccctatttccaaattacttctaccgagattttgaggtggcgaaaaagaatggaacaaagcgcctgatcagcgaacctttgccctcgttaaaagagatccaaatttggatcctgcgttccatactgtataagatccccgtgtccccgtttgccaaagcctataagcctaatgtaacattgctggaaaacttgcggttccataaaaaccagtccaagatctttacccttgatctcgaaaacttcttcccgtccatctcagcagagctggtcgaggcagaatttctggaactcgggtatagtaagatagtgtctaaactactgagcagactctgcaccaggaatggaaatctgccccagggcgctccaacttctccttacttgagcaatctcattttcaagaaggcggacgccgaaattgctagctattgtaaagactacaagatccgctatacaaggtacgcagatgacatgagttttagtggggattttgaccatgaggaacttctgaagaaagttactgagacagtcgagaagctcaacctgagaatcaacgcaaaaaagacgaagctgatgacgcctaatatgagacaaaccgtgactggcgtcgtggtgaaccaaaaaccccaggtgatcttctataaacggaatgaacttaggcagaccctgtactacattcagaagttcggttttgaagagcacaagatcttcaaaaagaacaaccacaacaactacttagagcatctgctcgggaagattaatttcgtcctgcagatcaatcctaaggatgctgaattcattaagtacaaagccgtgctcttcgaccttaaacacaaacaggacctcaccgctattgagaacgagttgtttcccatatga

SEQ ID NO: 9684 - RNA, 1062 nt, synthetic construct
  source 1..1062: mol_type = other RNA
atggattttacacactataaggacgctttcatcaaagaagcacataaaaccggttacagcttgaccaacattcagaggtgccttgactacgccgaggcacttttcctccacgaggtcccggttatctataacccatcacacttgtcttctctggtcggatataagaaagagtacctcaagaaggcttccctgttccccaattatttctacagagatttcgaggtagcgaaaaagaacggcaccaagagattgatttccgagcccctaccctctctgaaagagattcagatatggatactacgcagcattttatacaaggtgcccatttcaccattcgccaaagcctataagcctaaagtgactttaatggagaatctgcggttccataaaaagcagcctaaagtgttcaccctggatctcgaaaactttttcccatccatcaggatggaaactgtacaaaacgtctttcttaagctgggctacagcaaaatcatcagtaagtttctgactcgactctgcactcgcgatggaacacttcctcagggttcacctacgtcgccttacctttccaacctcatttttaaacaggccgatgccgaaatcgcgagctattgtaaagactacaagatacggtatactcgatatgctgacgacatgagttttagtggcgactttgatgagaatgaattgctgcaaaaggtcacagagacagtggagaagatgggcctgagaatcaacgctaagaagaccaatctcatgacaccaaatatgcggcagacggttaccgggattgtggtgaaccagaagccccaggtgatctttaagaaaaggaatgaactgcgccaggcactgtactacatacagaagttcggatttgaagagcaccgtgagtacaaggaaattgaccaaaagaattatctggaacacttattggggaaaatcaattttgtgctccaaatcaacccgaaggacgcagaatttataaaatacaaggccgttctgttcgacctgaaacataagaaagggattaaaaccatcgataacgagttcttcccaatctga

SEQ ID NO: 9685 - RNA, 1062 nt, synthetic construct
  source 1..1062: mol_type = other RNA
atggacttcgcccattacaaagatgctttcattaaggaagctcacaaaacggaatactctttgactgatatccaacggtgcctggactatgccgaagctttatatcttcaccaggtgcctgttatttataatcccacacacctgtcaggtctggtcggctataagaaggagtatctgaaaaaagcatcgctgtttcctaactacttctatcgggactttgaagttgcaaagaaaaatggcggcaagcgactgatctctgagccgctgccctccctcaaagagattcagatctggatactgagaaacattctttacaaggtgcccagctctgcattcgccaaagcctaccgcccaacagttacactgctcgagaatcttcgtttccacaaaaaccagccaaaagtctttaccctagatctcgagaacttttttccaagcatccgcgttgaggccgtcgaaaatgaattcttgaaactggggtactccaagattgtgagcaagctgttgtccaagctctgcactcgcaatggcactctaccgcagggagccccaaccagtccctacttaagcaacctggtgttcaaagaagctgacgctgctatcgcgacttattgtaaggagcacaaaatcaggtacacccggtatgccgatgacatgtcattcagtggagactttgacgaaaatgaactcctgcagaaagtaaccgaaaccgtggaaaaaatcgggtttaggattaacgcgaagaagacaaaattgatgaccactggtatgagacagacggtcacaggcgtggtagtcaacgaaaaacctcaggtggtgttttacaagaggaatgagctgagacaagcactttactacatacaaaagtttgggttcgaggagcatcgagagtataaggagatcgatcagaagaattatcttgagcatctcttgggaaagataaacttcgtgctccaaattaaccccaaggatgccgagttcatcaaatacaagtccctgctcatcgacctgaagaacaagcaggatctgaaggcattagaggacgagctacttcctatatga

SEQ ID NO: 9686 - RNA, 1062 nt, synthetic construct
  source 1..1062: mol_type = other RNA
atggatttcgctcagtacaaagaaacctttacagacaaatctcacaaaattggatactctttgcctaacattcagcggtgcctcgattatgcagaggtcctctttagccatgatgtgcctatcatctacaatcctacccatttaagtctgctcgtcggctacaaaaaggagtacttgaagaaagccgccgtttatccaaggtatttttatcgcgacttcgagattgctaaaaaaaatgggactaagagactaatcagtgagcctctaccctctctgaaagaaatccagatctggattttgcggaacattttaaacaaggttcccattagcccatttgccaaggcctacaaaacgaacgtgtccctgatcgaaaacctcaaattccataagaaccagcccaaggtatttactcttgatctggaaaactttttccaatcaatcaccatcaagctggtggagaaggagtttcaccagcttgggtatagcaagatggttagcaggctcctatcgaaactgtgtacacgtgacaagaccctcccacagggtgctccaacaagtccctatctgtccaatctgattctgaaagatgcggacgcccaaatcgccgcatattgcaaactccacaaaattcggtacactcgatatgcagacgatatgtcattctcaggcgacttcgacgagaataagctgttgcacaaggtaatagaaatagtggaaaagctgaatctgcgaatcaacaagaataagaccaagttgatgacttccaatacccgccagacggtgacaggcatagtggtgaatgagaaaccgcaagtcgtgttccataagagaaatgacctcagacaggcgatgtactatattaagaagttcggtatcgaagaacacagggagtacaaggaaatcaaccagaaaaactacctggagcaccttttgggaaaaataaatttcgtcctgcagatcaaccccaaggacatagagtttctggaatacaagtccattcttaaggacctgaagaaaaaacaagatcttaaggctatggaggatgagttactgccgatctga

SEQ ID NO: 9687 - RNA, 1062 nt, synthetic construct
  source 1..1062: mol_type = other RNA
atggatttcactcagtacaaagaatcatttactgaagaagctcacaagatggggtacattgaacaaaatatagagcactgcctggaatacgcagaggtgttgttttcacacgatgttcctgtcatctataatccatcccatctttcactgctgctgggatacaagaaggagtatcttaagaaggtgagtctttttccccggtacttctatagggactttgagatcctgaaaaagaacgggagcaaacgactgatttctgaaccgcttccgtccctaaaggaaatccagatttggatcctgaggaacattttgtacaaggtggccatctcgccatttgccaaggcttacaaacctaatgtgtgcatcttggagaaccttcgcttccataagaatcagcccaaagtgttcacactggatctcgaacatttctttccttccataacaattgagaaagttgagaaagagttcagagagctgggttattccaagatggtttctaaactcctatctcggctctgtaccaaggatggtagcctcccccaaggagcacccaccagtccatacttaagtaacttgatctttaaggatgctgacgaagcaatctctgactactgtaaacagcataagataagatacacacgctatgccgatgacttatcctttagcggcgactttaatgaaaacaaattgctgcacaaggtgaccgaagtgattgagaagctgaacctgaagattaacaagaacaagaccaagttaatgatgcctaatacacgacagacggtaaccggcattgtagtgaatgagaaacctcaggtcgtcttctataagagaaacgacctgaggcaggcgatgtactacatcaagaaattcggattccaggagcaccgtgagtataaggagatcgaccaaaaaaactatctggagcacctcctcggcaagatcaatttcgtcctacagattaatccccgggatactgagttcatcagctataaaagcatcctcatagacctcaaaaaaaaacaagaccagaaagaactggaggatgccctgataccaatttga

SEQ ID NO: 9688 - RNA, 1062 nt, synthetic construct
  source 1..1062: mol_type = other RNA
atggacttcatccaatacaaggaaacatttagccacgatgcacagaagaaaggctattctgaacagaacattaagcggtgtcttgactatgccgaagtcctgttcgcccatgacgtgcccgttatttacaatactacccacctttccctgcttgtaggatacaagaaggagttcctcaagaaagctgcattatatcccaaacggtattaccgagactttgagattctcaaaaaaaacgggtcgaagagacttatcagtgaacctctgccctcattgaaagaaattcagatctggatactgcgcaatatactgtacaaagtgccaatcagtccttttgccaaagcctataagcccaatatctccattttggagaacctgcggttccacaaaaaccaaccaaaggtctttactctggacctggagcatttctttccgtcaatatcttttgaggccgtagagaaggagtttctagagctggggtacagcaaaatggtcagcaagctgctatccaagttatgcatcagagatggtagcctgcctcagggagctccaacttctccgtatctgtccaatctcatttttaagaaggccgatgctgttatcagtgactactgcaaacagcataagataaggttcaccaggtacgcggatgatctatcattctctggtgactttgatgagaacaagctgctccacaaggtgacggaaaccgtgggaaaactcaacttgcgaatcaacaagaacaagacaaaactgatgatgcctaataccaggcaaaccgtgattggcatcgtggtgaatgagaagccccaggtcgttttccacaaaagaaatgagttacgccaggctatgtattacatcaagaaattcggcttcgaagagcatcgtgaatacaaggaaatcgatcagaagaactacctggaacacctccttggcaaaattaacttcgtgctccagattaatcctaaagatgaggagtttatcgggtataaaacaatcttgatcgcactcaagaagaagcaagacctgaaaacaatggaagacgagttgataccaatttga

SEQ ID NO: 9689 - RNA, 1062 nt, synthetic construct
  source 1..1062: mol_type = other RNA
atggatttccctcattatacttgcgtctttacgcgagaggcatcgaaacttggatacagtcctaaaaatatccagaggtgtctcgagtacgccgaagtgcttttctctcacggtgtaccagtcctgtataaccctagccaatttgcactgctggtgggatacaaaaaagagtatcttcagaaggccgcgctctaccccaattacttctacaggaatttccatattaccaaaaagaacggaagcaagagattgataagtgagccactaccaagcttgaaggagattcagctctggatcctccgtaatattctgtacaaggtccccgtgtctgcatttgcgaaggcctataagccgaccgtctccatcctggaaaatctgaaattccacaaaaagcagcctaaggtgtttacgctcgacgtcgaaaacttctttccttccatcaagtatgatagtatacagaaggtgttcctgcagttaggctattccaagatgatgtcccggctcctgacacgattatgttcttgtaatggggccctcccacaaggtgcttgcacatcaccgtatttgtccaatctgatcttcaaagaggccgatgccgctatctcaaacttctgcatgcagagaaaaatccgctatactcggtacgctgacgacctgaccttttcaggggattttgacgaaaacgagctactgaaacatgttactgaaattatagagcgccagaatttcaggattaacggcaataagacaaagctgatgacaccaaacagcagacaagaggtaaccggcatcattgtgaacgaaaagccccaggtggtgtttcacaagcggaacgatcttagacaagctctttactatatcaagaagtttgggttcgaagagcatttagagtacaaagaaattaaccacaggaactacttggagcacctactgggcaaaataaatttcgttctgcagatcaacccccgcgatatggaatttatcagctacaaatctttcctgattgacttgaagaaaaagaaggacctcaaaatgactaccgtttttcccctgctgatgtga

SEQ ID NO: 9690 - RNA, 1062 nt, synthetic construct
  source 1..1062: mol_type = other RNA
atggatttcgaacagtatcgcaacaatttcagtaaggaggctttgaaacttggatattccgagcagaacgtcgtgcgttgcctggactacgcagccgtcctctttagcaacaatgttcctgtgatctataacatatcccacctgggacagctggtgggctataagaaagagtatcttaaaaaggcgtctacttatggcgacaacttctacagaaacttcgagattacaaagcggaacggtacgaaaagactgatctccgagcccctgccaagcctgaaggaaatccagctttggatattgaagaacatcctctacaaaataccagtgtcaccagtcgccaaagcctataaacctaaggcacgaattatcgagaatctcaaatttcaccggaatcaacccaaggttctcactctagacctggaaaattttttcccctccatcaagatgaaggcaacccaaaatgtctttctgaatttgggatacagcaagtacatggccaatattctaagcaaactgtgtacaaaggaggattcattacctcagggtgcccccacctcaccgtatttgtctaacctgattttcaaatctgcagatgctctcattttcgacttttgcagacaacgagaaatcaggtacacccggtacgctgatgatcttagctttagtggcgactttgacgagaagatgctcctagggaaagtgacagatattattgaatcgctgggattcaaaatcaataacaccaagaccaaactgatgacacctaatacgcgccagactgttactgggatcgtggtgaaccagaaaccacaagtggtagcccacaagaggaatgctctcaggcaggcgctctactacattaaaaaatttggcctgaaagagcatcaggaatacaaggaaatcgtccagaagaattatctggagcatcttctgggcaaggtaaacttcgtgctgcagatcaacccgaacgataatgagtacaagaattacaaggacttcttgatcgacttaaagaagaagaacgaactggggataaaaaacgcctctcccagtttaatttga

SEQ ID NO: 9691 - RNA, 1053 nt, synthetic construct
  source 1..1053: mol_type = other RNA
atggactttacacaatactcttttgctttttccaaggaagccctaaaattcggctacaccgagcaaaatatcaagagatgccttgattatgcagtggttctttttagtcacgacgttcctgtgatctataataccagccacttagctcagctggtgggatataagaaggagtaccttaaaaaagctaccctctatactaatagcttctatcggaacttcgagattgtcaaaaaaaatggcagtaagcgcctcatctcggagccgctcccatctttgaaggaaatacagctctggatcctgaagaacattctgtacaagattccggtgtcacccgtggccaaagcgtacaaacccaatgtgagaattattgaaaacctgaagttccataggaatcagccaaaggtgttaacgctggatctcaagaattttttcccctccattaagatcaacgccattaagaacatcttcatagacctgggatattcaaaattcgttagtagacttctggccaaactgtgcactaaggaagacgcactaccccagggagcacctacatccccttacttgtcaaatctgatcttcaaaaaagccgacgcgctgatatttgacttctgtaagcaacgcaaaatcaggtatacccggtacgcagatgatctctgttttagcggtgattttaacgaggaggagcttctggaaaaggtgacagatattgtagaggatatgaacttctccatcaacaaaagcaagacgaaattgatgctccctaatacacgacagactgtgatagggatcgtagtgaacgagaaaccacaggtcgtctttcataagcgtaacgccctgaggcaagctgtttattacatcaagaagttcggcctgaatgaacaccaggagtgcaaaggtattttgcagaacaactacctcgaacacctgctagggaagatcaattttgtcttgcagattaacccaaaggacaccgaatttcggaactacaaagacttcttaatcgacctgaagaagaagaatgagtggtctaaacccgtcttccaccattga

SEQ ID NO: 9692 - RNA, 1062 nt, synthetic construct
  source 1..1062: mol_type = other RNA
atggacttcgcccaatataagaataccttcacacaggaggcgtcaaaaaatggctattccgagcagaacattcagcgatgccttgactatgctgaattgctgttctcacacgaagtcccagtgatttacaatactagccacttaagtaatctggtaggatacaacaagaaatacctgaagaaggcgtcatattatccgcagtacttttatcgcgactttgaaatcacaaaaaagaacggcacaaaacggccaatatccgaacctctcccgagcctcaaggagattcagatctggatcttaaagaacatcctctacaaaatccctgtttctccctttgccaaggcttacaagcctaacactgcactgatagaaaatctgaaattccacaagaaacagccaaaagtgttgactcttgacttggagaacttctttcctagtatctccgtgaagagcattgaaaagattttcatcgagatggggtactccagaatggtgtctcagttgctggcaaaactgtgtacccgggacaagacgctgccacaaggtgcccctaccagccccactctaagtaatctgatttttaaggatgccgatgtggctatcgcagatttttgcaagcaacgaaaaataaggtacacccgctacgcagacgatctgtcgttcagcggagactttgacgagaaggaattgtttgagaagattaccgagactgtagagaatctgaacttccatatcaataagtctaagaccaagcttatgacacccaacacaaggcaggttgttacgggtatcgtggtgaacgaaaaaccacaggtcgtgttccacaaaagaaatgagctccgtcaggccatgcattacatcaaaaagttcggcattgatgagcacagagagtacaaggagatcaaccaacggaattatttagaacatctgcttgggaggatcaactttgtcctgcaaataaatcccaaagatctggaattcattgggtataaagccgtcctcattgatctcaagaaaaaacaggctctaaaaatgaagaagaaccagcccctccttatgtga

SEQ ID NO: 9693 - RNA, 1059 nt, synthetic construct
  source 1..1059: mol_type = other RNA
atggactttacccattataaagaggcattcattcaagaagcttccaaaaactccttcagtgaacacaatatcgagcgctgcctggaatacgccgctgtactgttttcaaacaatgtccccgtgatatacaatacatcacatctaagcgcactcgtggggtacaagaaggagtatttaaagaaagcctccctctatcctaaatatttctaccgggattttgagatcacgaagaaaaacggcagtaaaagagccatttcagaacctctgccatccctgaaggagattcagatttgggtgctgaagaacatcctgtacaaaatacccataagccctttcgccaaagcatacaagcccaatagcggcttgattgagaaccttaaatttcacaagaagcaaccgaaggtgtttaccctggaccttgagaacttcttcccatctatctccattaagagcattgagaaggtgtttttaaccgcgggttatagtcgcatggttagcaagttgctgtcaaagctctgtactagagatgggacattgcctcagggagcccccaccagcccatacctgtctaatttaatctttaaggatgctgacgccgtcattagctcgtactgcattgagcgtaagattagatataccaggtatgcggacgaccttagtttttctggagacttcgacgagaaagagctcctttctaaaatcacttctatcgtggagaacctcaatctgcatctgaacacagctaaaacgaaactgatgactcccaacatgaggcagacagtgactggaatagttgtcaatgataagccacaggttgctttccacaagaggaatgaattgcgacaggatatgcactacatcaagaaattcgggatagacgaacatcgggaatataaggaaatcaatcactccaactaccttgaacacctactcggcaaagtaaacttcgtgctgcaaatcaatgccaaggatctggagtttatcggttacaaggccgtcctgatcgcactcaagaaaaaacagcagaaaacacagatgatccagccgctattgatgtga

SEQ ID NO: 9694 - RNA, 1056 nt, synthetic construct
  source 1..1056: mol_type = other RNA
atggacttctctaattataaggatacattcaccaacgaggctattaaacggggctactcagaacagaatattaagcgctgcttagactacgcagccccacttttttctaatgatgtacccgtgatttacaataccagtcacctgagcgtccttgtgggctacaaaaaggagtacttgaagaaagccgctctgcacaccaagtatttttacagggatttcgagattgttaagcggaacgggaaaaaacggcccatcagcgagcctttgcccagcctcaaagagattcagcattggattctgaagaacatcctgtataacataccagtttccccttttgccaaagcatacaagcccaatataagcctgatagaaaacttgaagttccaccgcaatcagccgaaagtgtttaccctggacctggagaacttttttccttccatcacaatcgattccattgagaaaatattcatcgagctgggttactccaagtcggtcagtgacctcctagcgaaactttgcactagggatggcaccttgccacagggggctcccacatcacccagtttatctaacctcatcttcattgaagccgacgcgcttatagccgactactgtatccaacgtaagattcgatacactagatatgcagacgacctcagcttctcaggggattttgatgaaaaagagctgttcgataaggtgaatggcatcatcaagaagatgaactttaacatcaacacggccaagacgaagctcatgacccctggatctcgccagactgttactggtattgtcgtgaacgaaaaaccacaggtagtgttccataaaaggaatgagctacgacaggctatgtattatatacagaagtttggcatcgaccaacatagagagtacagggaaattaatcagagaaacttcctggaacacctgctgggaaaaatcaatttcgtgctgcaaatcaatccgaaagacacagaatttatcggatataaatccttcctgattgatctcaagaagaagagagacttaaactatgatacactcaagatcatctga

SEQ ID NO: 9695 - RNA, 1062 nt, synthetic construct
  source 1..1062: mol_type = other RNA
atggacttcagtcaatatgaagatgcttttacaaaggaagccacaaagatgggctactccccacaaaggattgagcggtgcttagattatgcagagatgctctactcaaatgacgtgcctgtcatttataactcatctcatctggccgggttagtagggtacaagaaggaatatctgaagaaggctgccctgcatacgaagtacttttatcgagacttcgagattttgaagaagaatggcaagaagaggcccattagcgagcctcttccgtccctgaaagaaatacagcattggatcctgaagaacattctatacaaaagacccgtgagcgcatttgcaaaagcttataaaccgaacgtttctctcatcgagaatttgaaattccacaaaaatcaggcaaaggtcttcacactggacctcgagaatttcttcccttcaatcggcatcgaatcagtcgaaaaggtatttgccgacgtcggttatactcggtccatcagcgaccttctgagtaagctatgtacccgcgatggatctctgccacagggagcgcccacctctccttacctcagcaacctgatctttgaggaggccgacaaggttatatcccagtactgcattcagaagaaaatacggtatacacgatatgcggatgatttgtcgtttagcggtgactttgacgagaaagagctgttcaacatcgttaccgaggccgtggaaaagttgaaactgaaaatcaacccaagtaaaaccaaattgatgactccagattctcgccagactgtgaccggcatcgtggtgaacgaaaaaccccaagtcgtgtttcacaaacgcaatgccctcaggcaggccatgtactacattcaaaagttcgggattgacgagcacagagaatacaaagagattaaccaggctaattaccttgaacacctgctgggaaaaatcaacttcgtgctgcagatcaatcccaaggattccgaatttataggctacaagagtttcctcaaggatctcaaaaaaaagcgtgaggctagcaataacagaatcatgcctttacttatgtga

SEQ ID NO: 9696 - RNA, 1113 nt, synthetic construct
  source 1..1113: mol_type = other RNA
atgggcgtatctgattctaagagtccgcactccattaacgacagcgatgcaatggattttgttcattacaaggactccttcactaaagaagctctaaaaattgggtattcgcaacagaatattctgagctgcctggattatgcccagattcttttgacaaaggacgtgcccgtgatatataacagtagccatctcgctgtactggtcggctacaagaaagagtacctgaagaaagcagctcaccacacaaaatacttttatcgagacttcgagattactaagaaaaatggaaagaagcggcctatcagcgagccactgccctcactgatggagatacagcactggattctcaaagaaatcttgtataagctgcccgtctcaccatttgccaaggcttaccgaccaaacatctcaattatcgagaacctgaagttccacaaaaaccagcctaaagtgtttaccctcgacctggagaattttttcccttcaatcaagatcgaagccgtcgagagaatcttcacagagcttggttactctaaaaacatatccaacttgctcgcccagctatgcaccagggatggtcgcctgccacaaggagcaccgaccagcccttttctttccaatttaatcttcaaggatgccgacctgatgatctccgactattgtaaggaacacaagattcgctatacgcggtacgcggatgatcttagtttctctggggacttcgacgagaaaaaactgctccacaaggttactgaaaccattgagaaattggatttcaagatcaacgcagcgaaaaccaagctaatgactcccgatagacggcaaacagtgactggcatcgtggttaacgaaaaaccccaggtcgtgtttcataaaaggaataccttgcgtcaaacgatgtactacattaaaaagttcggaatcgacgaacacagggaatttaaggagatagaccagacaaatttcctcgaacatcttctggggcagatcaattttgtgttacagatcaatcctaaggacagcgagtttatccattacaaagccttcctcattgacctgaagaaaaagcaggatgccaagaacataaagagaggcctcctgttaatgtga

SEQ ID NO: 9697 - RNA, 1062 nt, synthetic construct
  source 1..1062: mol_type = other RNA
atggattttaccaaatacaagaaggatttcactgatgaggcgaccaaaatgggtttatcgaagcgcaatattcaggattgcctggactatgcagaagtattagtgtctcacaacgtttcagtaatctacaacccgtcccatctctcagcgttggtcggctataagaaggaatatcttaagaaagccgctctccacacttcttacttctaccgcaattttgaaattaccaagaagaatgggaagaaaagaccaataagcgagcctctcccttccctgaaagagattcagatctggatcttgaagaacattctggagaacattcctgtgagcccatttgccaaggcctacaaaccaaagatgcggcttatcgaaaatctaaagttccataagaaccaacctaaagtgttcacacttgacttggagaacttctttcccagcataaagatcgaggctgtcgagaaaatttttctgaaactgggctacagtaagatcgtgagtgaacttctcgcaaaactctgtacgaaagacaatgccctgcctcaaggggcacccacatctccgtacctgagtaatctggtcttcagggatgccgacgcaattatcagcgaattctgcaagcaacggaagatcaagtataccagatatgctgacgatctttccttttcaggagacttcgacgaaaacgagctgctggataaggttacggaaacaatcaaaaccctgaacctgcgaataaatgaaagcaaaaccaaactcatgacacccgacatgagacagactgttactggtattgtggtgaataacaagccccaggtggagtttaataaaaggaatgaactccgtcaggccatgtattacataaagaaattcggctttgaggagcatagggtgtataaagagatctcccaggccaattaccttgagcacctgctgggaaaaatcaactttgtcctgcagatcaacccaaaagactatgagttctctgcctacaaagctctgctcattgaactgaagaagaagcagaacttgaagataaagaaagagttacccctactattgtga

SEQ ID NO: 9698 - RNA, 1062 nt, synthetic construct
  source 1..1062: mol_type = other RNA
atggatttcactaaatacaaggttgactttacggcggaagcctctaagaagggcctgagcaagaataacgtgcagcggtgtctcaactatgctgaagccctgatctctaagggcatagctgtgatttacaatcctagccatcttagcgccctgctggggtataagatcgagtatctgaagaaggccgctctgcatccgtcctatttttatcgggatttcgagatcgctaaaaaaaatgggaaaaaaagggccatatccgaaccactgccctctcttaaagagatccaggtgtggatcctcaaagatatcctcgaaaaggttccagtgtccccttttgcaaaggcctataagcctaaaacgtcgttgacagaaaacctgaagttccaccgtaaccagcccaaggtcttcactttagatctggaaaactttttccccagtataaagattgatctcgttgagaaggtgtttctggagcttggttacagtaagatggtcgccaacttactggctaaactatgcacacgagacaacgccctcccacaaggagctccgacatcaccctatttgtccaatttgattttcaaagaggccgacgccattatcgcagattactgcaagcagcagaaaattagatacactagatacgcagatgacctcagtttctcaggtgactttgacgaaaacaagcttttcgagaaagtaaccaatgtggtcgagaaacttgacctacgcattaataagtcaaaaaccaggctcatgacccccgataagaggcaaagcgtcaccgggatcgtcgtgaataataaaccccaggtagcatttaagaagagaaacgcgctgcgccaggcgatgtactacattaaaaagttcggaattgacgaacaccgggtgtacaaggagataaaacaagcaaactatctggagcacttactgggcaagattaactttatcctccagatcaatcctaaagacacagagtttatggaatacaaaaccctgctgttcgacttgaaaaaaaaggaggatcttaagatccgaaagcctctaccattgctggtgtga

SEQ ID NO: 9699 - RNA, 1038 nt, synthetic construct
  source 1..1038: mol_type = other RNA
atgaaatttgaacagtacaaggaagctttcgagaaaaaagcaagcatttttgggtactccgaggacaatatacaactctgcttaatctatgccgaattgcttttcaaaaacaatgtccccgtcatttacaatacgtcacatctctctgcgctcgtgggctacaacaaggagtatttaaagaatgcaaccaaacacactccgtcgttttatagggatttccagattaagaagaagaatggaacactacggactatcagcgaacccttaccttcactgaaagagatccacatttggatcctggagaacatattggccaatgtgaagctgagcccatttgccaaagcttacagaaaaaaaatccgcatcttcgagaacttgaagtttcataagaatcaacccatcgtgtataccatcgacctgaaggacttcttctgcagcattaataccgatgctgtagaggccatcttcaagtccctgggctacagccttctgatctctaatctactagctaagctgtgtacgaaagataactcactgccacaaggggcacccactagtccatgtctgtctaacatcttttttaaggaaaccgacaatctgatcgccaactactgcctcgaacagaagattaagtatactcggtatgccgatgacctgagtttttccggtgagttcaatgaaaacgttctgctcgaattcgtcaaaaactccatcgagaaaattgggcttaagattaacgaggataagattcgtttgatgcgcacaggatcccgacagacagtgaccggcatagttgttaacgagaaacctcaggtagtgttctacaagagaaacaaacttaggcaggacctgttttatatcaagaagtttggccttgcgggtcacatgtctcatagaaaaatagagaaaaccaactacctggaacacctgctcggccagattaacttcgtgctgcagataaatcctgatgacaaggagttccagggatacatgacatatctcattgagttgaagaaactcagtgaaatcagggactga

SEQ ID NO: 9700 - RNA, 1035 nt, synthetic construct
  source 1..1035: mol_type = other RNA
atgaactttgaacgatacaaggaggccttcgagaaggctgcctcaaattccggatatagtgaagagaacattaactactgcctaggctacgccgaggtgctcttccgcaataacgtccccgtgatatacaacacttctcatctcagcgcgctggtgggctacaagaaagaatatttgaagaaagccgttgtgcacaccccattcttttacagggacttccagattaagaaaaagaatggtaagcttcgcacgataagcgaacctctgccaagtctcaaggagatccaaacctggatactggactctatcctttcgaatgtgtccgtgtcaccttttgcaaaggcatataggaaaaacgtcgggctgttagaaaacattaagttccacaaaaaccagccccttgtgctgacaatggacctgaccgatttctttacttccgtaaaaacaaattccgtggaagagatctttagatcactggggtatagtgacttgatcgctaatctccttgccaagctgtgcacaaaagataatagccttcctcaaggagcccctacgagcccggccctatctaatttgttctttaaacccgtggacgagaggatcgcagcttattgtaaactgaatcacatccggtatacccgatacgctgacgatctcaacttctctggcgatttcgatgctgaaaaactgaaggcatatgtcaaaggtgcggtagagtcagttggcttgatggtcaacgactccaaaacaagagtcatgaagagcggtagtcgtcagctcgtgaccggaatcgttgtgaatgagaaaccccaggtagcatttcagaagcgcaacaaactccggcaggatctgttttacattaggaagttcgggttagaggaccacatgaagcggagaaaaattaagcaggccaattacctgagccacctgttaggccaggtcaactttatcgttcatattaacccagacgataaggaattccaggattacaagacttatctggtgggattgaagcaaactctggggcatgcttga

SEQ ID NO: 9701 - RNA, 1038 nt, synthetic construct
  source 1..1038: mol_type = other RNA
atgacatttgaacaatacaagatcgccttcgagaaggccgctagcaatagcggttactcagaacttaacattaagaggtgtctggattacgcaaagccactgatcgagaataatgtgccgataatctacaacacatcacacttttccagtcttgtggggtacaagaaagcctatatcaagaaggcagtctattacacaaaatccttctacacggattacgctataaagaagaaaaacggaaagaccaggactattagcgagcctctcccaagtctgaaagaaatccagacctggatattacagaatatctttcagcagctcaaagtgtccccctatgcgaaagcttataaaagaaaggttagcattgtggagaacctcaagttccattataatcagcccaaggtgtttaccctggacctgaaggacttttttccttccattaaaatccactcagtggaacagatattcaaatctttagggtattcagacctgatctcgaatctgttggccaaactctgcactaaggagaattgtctgcctcagggagcaccgactagcccctatatctctaatctgtatttcctaccagccgataatcatattagtgagttctgcaagcaacactctattcgatacacccggtatgcggatgatttgaccttcagcggaaacttcgacgaaaacgctgttcttaactttgtcagtgagcagatcgtgaagctcgagctggtgattcatcccgacaaaattaaactaatgacaccaaaccagcgccaatccgtcacagggatcgtcgtaaatcaaaagcctcaagttgtgttccacaaacggaacaaggtccgtcaggagttgtactatatcaaaaagttcggccttgccaaccacatggaacgcaaaggtatcaagaagagaaattacttggaacatctgctgggcaaagtaaactttataattcagatcaaccccaccgacactgagtttattgagtacaaagagtacctcatcaagctgaaatctgaaatttctggccagacgtga

SEQ ID NO: 9702 - RNA, 1029 nt, synthetic construct
  source 1..1029: mol_type = other RNA
atgaaatttgagcagtacaagcaggaattcgaaattaaggcatcacaaagtggatattccgcggagaacattactagatgtctcaattatgctaagcctttgatagataaggggttcccggttatttacaacaccagccatctgagcgttctggtcggctacagaaaagattacataaaaagggctgtggtctacaccccatatttctatcgcgatttcgagattaagaagagaaacggtaaaatgcggaaaattagtgagcccttgccgagcctgaaagaaattcaagactggatacttgtcaatatcctagaagtggaaaaggtgtcaccatttgcaaaagcatacaggaagaaagttggcctaatcgagaacgtaaagtttcacaaaaaccaacccaaagtcctgactctggatctgaaggacttttttccatccatcaagcgggagaatgtggaatctatattccgttcctttggctactctgccctcatctctaatctcctgtcgaaactgtgcacgcgcggagggtgtttaccccaaggagctcctaccagcccctacctgtctaacatattcttcaagtcagccgatgacattattatcaagtactgcctggccaatgatatccgatatacccggtatgccgatgacctttccttcagtggaaatttcgacgagaaaatgttaatcgaactggtcgacgacaccgtgaggcagctcggcctgactctgcacccagacaaaattaagatcatgaagcctaacgaacgacagacagtgacagggatcgtggtgaatgaaaaaccccaggtggtatttcacaagaggaataagttacggcaggagatgcattatatcattaagtttggcatccaggaccatatgcagcgcaagaacattaaatacagaaactacatcgagcatctcttgggtaaaatcaactttgttcttcaccttaatcctaaggatacagagttccagaagtataaagagcacttgatcgagctcaagaagcagacaatctga

SEQ ID NO: 9703 - RNA, 1029 nt, synthetic construct
  source 1..1029: mol_type = other RNA
atgaacttcgagcagtacaaggttatatttgaaaaggaggcgtccaattcaggttactctgagacgaacatccggcgctgtttgacatacgccgaaatccttttcgccaataaagtaccggtgatttacaatacaagtcacttgagcgtcctggtggggtacaacaaacgatatctgaagcgggctgtggtctatactccctatttctatcgggactttcagatcaaaaagaagaacggaaaattccgcaaaatctctgagccactcccttccttgaaagaaattcagacctggattctagagaacattcttagcaatatacctatctcaccatttgcaaaagcctataagaagaacacctccatcattgaaaatctaagattccacgttaaccagccaaaggtatttaccctggatctcgagaatttctttccctcgatcaaaaccgactctattgaaagtattttcctcaatgtgggctatagcaagatcctcagtaatctgatggcaaaactgtgcaccagggataattctctccctcagggggccccaacaagcccctatctgtcaaatatatttttcaagcccgtcgacgatatcatttccagatattgcatcgacaacaaaattaggtacacgaggtacgctgacgatttatcattcagtggtgacttcgatgagaacagcttgatggagtttgttagcaatgtcatatctgaactgaacctgaccattaacaagaacaaaactcgcttaatgacacctaatatgagacagactgtgacaggcatcgtggtgaacaaaaaaactcaagttgtgttccacaaaagaaataatctgcgaaaggatatctactacattaaaaagtacggactccataaccatatgaagttccgtaatatcaagcagtccaactatcttgaacatcttctgggcaaggtgaactttgtcctgcaactcaaccccaatgacatcgaatttaagaggtacaagaactttctgatcgagctgaagaacaagatagagtga

SEQ ID NO: 9704 - RNA, 1041 nt, synthetic construct
  source 1..1041: mol_type = other RNA
atggactttgatcagtataagacggaatttgcaaccctggcaagttccgtgggatatactgaacagaatatccagaaatgcctcaaatatgccaaacctctgctcgataagaaactccccgttatttataacactagcaatttgtcgaacctggttggatacaaaaaggagtacttgaaaaaggccgtgagatatacatctagctactaccgcgattttgaaatcaccaaaaataatggtgggaaacgtaaaatctccgaacccttaccttcactgaaggagatccaaatatggattctggataatatcctctctcaaatcgaaatctctccatacgccaaggcctataggcagaatgtgactctaattgagaatctgaaattccacaagaaccagcccaaggtcttcaccatagacctggagaatttcttcaccaccatcaaacaggacagtatacagaagatttttggagagatgggctactccaggctgatcagcaatcttttgtcaaagctgtgtacccgcgatgattcacttccgcaaggcgctccaacatctccttatctgtccaacattttcttcaaaagcctggacatagagatcactaagtattgcaacgagaataagattaggtatacccggtacgctgacgatctgagttttagcggtgattttgacgaaaagattctcctcgagtttgtaactgagaagatcacaaaggcgaaattagttattaaccccgacaaggtgaagctgatgaagaaaaacacaagacaaattgtcacagggattgtggtcaatgaaaaaatgcaggtggtgttccataagcgaaataagatccggcaggacatgttctacattaaaaaatacggcctagtaaaccacatggaacacttaaagataaagaagaacaactaccttgagcatttgatcgggaagataaactttatcctgcatattaacccaaacgacaaagagttcatcgattacaagtccttcctcaacgaccttaagaataaagtcaacaaaacgaatgcctga

SEQ ID NO: 9705 - RNA, 1032 nt, synthetic construct
  source 1..1032: mol_type = other RNA
atgaccttcactcaatataaacggaaattcacagcagaggcctttaagtcggggtattctcagcagaatattgataggtgtctagtttatgctgaacgtcttttttccaataaagtgcctgtcatctataatactagccacctttctggccttgtagggtaccgaaagagttacttgaagaaagctgcattattcaccacgtacttctaccgggacttcgagatcctgaagaagaatgggaagaagaggcagatatccgagcccctgccatcactgaaagagatacagttgtggatactcgagaacattctgtacaaagtcaagatctctaaattcgccaaagcttatatccccaaggtcaatttgaagcagaatctcaagtatcatgtgggaaaaccactgatcctggcgatcgatattgaaaacttctttcctagcatccgccagaacaacgtggaaaagatttttcaggagctcggatactcaaatcttatctcaaatcttctggccaagttgtgttgcaggggagaaagtctcccccagggcgcacctacaagcccgtacttgtctaatatctacctcaagccactggatgatgacgtgtccgaatactgtctcgagcggaacatccattatacccgctatgccgacgatctcaccttttccggtatgttcaacgataaagaactgtgcaaatacctgcacatagagatcgagaagttaaacctgaagatcaataacgacaagacgaaggtgatgacaccaaataccagacaaactgtaactggcattgtggttaatgaaaaaccgcaagtgtgctttgtgaaaagaaacggtattcgccaaaccatctattacatcaaaaaattcggcctagaaaaccacatggacagaattaagattaagaagcagaactacctgaaacatctcttaggccaggttaacttcgtcctatttataaaccccagcgacaaggagtttattgagtataaaaactacctgcgaacactgattattcaccctctgagttga

SEQ ID NO: 9706 - RNA, 1023 nt, synthetic construct
  source 1..1023: mol_type = other RNA
atgagcttcgaacactaccagaaagaattcactagcaaggctgttaactctggctactctgaacagaacattttcgactgcttagaatatgccaagaaactcatcagtaacaatgttccagtgatctacaacaccacgaatttgtcagcactggtaggttacaaaaagtcctaccttaaaagggccgcaatctataccccttacttctatcgcgagtttgacatactgaaaaagaacggcaaaaagcggaaaatatctgagcctttgcccagtcttaaggagatccaactctggattttgaacaatatcctgtacaaggttgaagtgagtaagtttgccaaggcatatattccaaaggtgtcgatcaagcagaatctcgttttccataaaaaacaagcgaaagtgctcacaatagatctcgagaatttttttccttccattaagatcgatcaggtaatagtgatctttaagagcctggggtatagcaacatcattagctccttaattgctaagctctgctgcctgaacgattgtctgccccagggcgcttccactagcccatacttatccaacattttccttcgaaactcagacgatattatctctaagtattgtctcggaagaaatattcggtacactagatatgccgacgacatgaccttttcaggagattttgacgaggtcgaactgctgaaattcgtcaggacagaaataaaaacactgaatctgcaggtgaacgacgaaaaaacaaaactgatgctgccgaactcacgtcaggtggtgaccggaatcgtggtcaacaataaaccccaggtcgagttcaataaacgcaataagattagacaggagatgtactacatcattaagtttggtttggagaatcacatgaataggaagaacattaagaaggccaactatgtgcctcatctactggggaagatcaatttcatcttgcaaataaacccccttgataatgagttcatcgagtataaaaagcaccttaaggctctaaccctggtctga

SEQ ID NO: 9707 - RNA, 1044 nt, synthetic construct
  source 1..1044: mol_type = other RNA
atgaatttcgaacagtactccctggcatttagcagggaggcatcgcagtccggatacactgagcaatctatcatccgctgtctcaaatatgctgaaaagttgttcagcaacaaagtccctgtaatttacaataccagccatctctcagttctagttgggtatagaaaaaactatctcaagaaggctagcttctatacaccatacttttaccggaacttcgagatcctcaaaaaaaacgggtctaagcgtattatttctgagccgctgccaagtctgaaagagattcagatttggatcttaaacaacatcctgtacaatatcgaagtttcaaggtttgccaaagcgtatattcggaagtcccacataaaacagaacctggtcttccataaaggccagttgcaggtactcaaactcgatattgagaacttctttacttctatcaagctaagctcaatacaggatatatttatgtcggtgtggtattcccaactgatcagtaatcttctcgccaagctgtgctgtcaccggggctctttacctcagggaggtcccacctccccctatctttcaaatttgtacctgaagagtgtggacgagagcatctatcactactgcatgcagaaagaaatccgcttcaccagatatgccgacgatatgacattcagtggcgtctttgaagagaaggggcttataaagtttgtgacagaggaactgcggatccttgacctgaagattaacgaaaaaaagacgaagatgatgtccagatccagcaggcagttggtcaccggagtggtggtgaatgagaaactgcaagtgcccttttacaaacgcaataagctgaggcaggacctgtactacatcaaaaagttcggcctggaaaatcacatgcaacgccgaaagattactaagtcaagttatatcgagcatctgctaggtaagataaatttcattctcagcatcaaccaggaagatcaagagtttttgtcttacaagaactaccttattgagttaaagagaaagtcccgtgagatccgacctgaatga

SEQ ID NO: 9708 - RNA, 1032 nt, synthetic construct
  source 1..1032: mol_type = other RNA
atgtcgttcatcgtttatgaaaagctcttcactgcaaaagccgtgaaggcaggcttttcccaggacaatatccaaaagtgtttagcatacgccaagcctctgatcgataaggggctgccagtcatctataatacggctaatctgtgcgctctggtgggctataacaaaaactacctgaagcgtgctgctctgcatacccagttcttctataggaagttctttatccggaaacggaacgggaaagccaggttaatcgtggagcccctgccaagcctaaaggagattcagctgtggatcctgcacaacatactatacgaagtcaaggcgtctagatacgcgaaagcttatattaaggggaggaatattgtcgacaacgtacgctaccacagggaaaaagacattgtgctccgcatagacattaaggacttctttccttctatcggcttttccaaaattcagcttctgtttgagcagctcggatactcatccaacatcagcaacttactcaccaagttgtgttgcgtgtatgagacacttccgcaaggcgcccccacaagtccctacctaagcaacttggtccttaagaactttgataaacgacttgctgagttctgcgtagcaaagaatatacggtacactagatacgccgatgacctgactttctctttcgcaaagacaatagaccccaatgaggtccgcctgtttgttgaaaatgaactttcaaaagagggtttcagcgccaatcctgataaaactcagatactgacacctaacaagcggcagattgtgaccggaatcgtggttaacaaggtgctccagatcccaaaaattgatagaaagctcattagacaggaaatgtactatatttccaagtttggtttgcgagatcatatgaaaaagacgcaaaataccaaggccagttatctgctgcacctcttgggaaaaaccaactacgccctccagatcaatccagaggacaaagagatgaagaaatataaagccatcatctggcagatgttgaatcaagaatga

SEQ ID NO: 9709 - RNA, 1050 nt, synthetic construct
  source 1..1050: mol_type = other RNA
atggattttctggagtataaggtgaagttcgtgaagaaagcgctggaagcgggttactctgaggttgaaattgaccagtatcttacctacgccaaagtgttgcttgacaagaagcttccactcatctataatacctcacatcttgcagccctcacggggtacagtacacgctatataacaagggcagctctgtacccaaaaagcttttacaggacgtttaagatcaagaaaaagaacggcaaaatgcgcgagattaacgagcccttaccttcgctgaaagagatacagctctggattaacaagaacattctactgaacatcaagcctaacaaattcgccaaggcctacattaagaaaaccaacatcctggataatgtcaagtaccacaagcggaagaagtatgtgttcaatctagaccttgtcaatttcttcccctctatcagcactaaaaccgtggagatgttctttaagaaactgggctacagcgataacctgtctaaccttttggcaaaactgtgttgctttggggacggcttagctcaaggagctccaacatcccccgccctgagtaatcacatcttgtatgaatttgacgatctactcggaagtttcgcagtagagaataacctgaggtatactagatacgctgacgatttgactttttccttcaatgatgagtttgacgtctccataatcgaagagaaggtgattaataccctcgacaagacagtgctctactcaaaactcactgttaatcgggaaaagaccaaactgctcagacagaatgatcgacaaatcgttaccggggtcgtcgtaaatgataaaactcaggtgccgtcttcatacaggaagcagatccgtcaggaaatttattacatccgaaaattcggtctgagcaatcacctgaatagactgaacgaagttcgctataactatctctatcatttgctgggaaagattaatttcgtgttactggtgaacagcgaagacaaagagatgaaagagtaccggaacgccatcaagatgttgatatccaacagacctacatga

SEQ ID NO: 9710 - RNA, 1089 nt, synthetic construct
  source 1..1089: mol_type = other RNA
atgtttaaaggcccagcacgaaagctggcaggcttaaatgagatcaacatgaccgccgcacagtatgaatctgctttccgcaagaaagccctggtggctggttacagcgaggagaacatccagaaatgtctgagctatgcaattccactcctatccaaaggctttcctattatctacaacactacaaacttcgccggactggtcggttataacaagctataccttaaaaaagcggccctgttcaccgctagttattaccgtaccttcaaggtgaagaagaagaaaaagaaggactacagggagatcaaggaacctctccccagcctgaaggaaatacagttgtggatcctctataatatactgtaccaagaaagaccctcaaagtacgctaaggcgtacattcagaagaggaatctgagagagaatgttaagttccacgtgggcaaaaacaaagtcctgaatttggactttaagcacttttttccgtctattaaacaggacgcaatagagaagattttcctgtcatttgggtattctagcaacatttccaacttactatcgaaactgtgctgtctcgatggcagtctgcctcaaggggccccgacatcaccttacctttccaatctgtacttaaagaccttcgacgaagatgttttcggcttctgcaaaaataaacacatccgctacacacgatacgctgacgatatgacatttagtggggacttcaatgaactcgaggtgataaacttcatcaaagagaagatcgaagatagcccccttgaaattaacgacgaaaagaccagagtcatgaggcgcaatcagcggcaggtggttactggaatcttggtgaatgataagacgcaggtatctaaaaagtataggaataacatccgtctcgagatgtactatatcagcaaatatggaattgccgagcatttggccaaaagtaagaattcccgggccaactatttgtcacatctcctggggaagattgaatacactcttcattttaacccagatgacgtagagtttctcgagtatcggtccaaactgaagcaactgcttcccaagaaacaggatgctgagtga

SEQ ID NO: 9711 - RNA, 1035 nt, synthetic construct
  source 1..1035: mol_type = other RNA
atgaacttccagcagtattctgaggctttcagaaagaaggctttggcggccaccttttctgaggatgagattatttactgtttggattacgcaaaaccgataatcgaaaaaggccttccagtagtttataatacgacacacctggcagctctggttgggtatagaaaggtttacttaaaaaaggcagtcctctataccagttacttttacaggagattcgtgatatcgaagcgaaacggcaaacctcgcacaattagcgaacccctgccatcactcaaggaaattcagatctggatcctaaagaatatcctcgagaatctgcctgtgtctaaattcgcaaaggcctacctggccaaaaaagatgtgcgcgacaatgtgcggtatcacataggcaagccaatagtgttgaagctagacatcaaggacttctttggaagcattacacagcagtcagtccagcaaatctttctggatgccaactattcatccaacatcgcgaatttatttagtaaactgtgcacccttaggggcacgctccctcaaggggctagtacctctccttacctgtccaacctcttcatgaacaaatttgacgaggtcgtaggtggatatgccattaaagagaagactaggtacactcgttacgctgacgatctgaccttctccgggaattttaatcccgacaacgtcatcgaatttgtgcagacagaaatagagaaaatcggtctgagactgaacctgtccaagaccgccgtgatgcggcagaacagccggcagtttgtgactgggattgtcgttaacgagaagatgcaagtaccaaagaaggataggcaaaatctgcgccttgaaatgcacttcattcagaaattcggattagagaatcatttgcgacgtgtgaagaataagaaagccaactaccttccccatattatcggccggattaattacttcatcactatcaaccccgacgacgaggaattcgtgagctacaaaaagtatctcatcgaaacctatgtgaatgagaacctcacatga

SEQ ID NO: 9712 - RNA, 1068 nt, synthetic construct
  source 1..1068: mol_type = other RNA
atgggccccgagatatcgttctggcctcataagaagatgaatttcagccagtatgagaagaccttcagaatcaaagccactaagatcgggttttctgaggaagaaattactgcttgccttaattacgccgaacctttaattagcaacaaactccccgtcatatactctaccgccaacctggccgctctggtgggttataagaccaattaccttaaacgcgcagtgaagtttaccaagtatttctatcgagacttccagatcaaaaaaaaggatggcaaattgaggactctgtacgaacccctaccttccctcaaggagatccagtcatgggtgctgaaaaacatcctgtccgaggttaaacccaacagattcgctaaggcatacatcaagaacaaaagtctgattgagaacgtgaagtatcacaaaggacgcgagggagtcctcacattggatatcctggacttctttggcagtattaagacggcccacgtagccgggatttttagcgaaatggggtactctgctaatatcgcatctttattggctaaactgtgtacatacgatggatacctgccacaaggcgcgccaacctccccgtacctgagtaatctctatctgaagaacttcgacgatatagtgtccaagtactgctcagagaacaatattaagtatacacggtacgcggatgacatgacgttttcagggaaagaagaggacctgaatatcactagctttatcgaggttcaacttttcaatattggcctgtatctgaactcagataaaagcaagcttatgaaacggaacgagaagcaggtcgtgacaggtatcgtagtgaacgacaaactacaggttcctcgtgaggatcgggactttattaggaatgaagtccatttcttgacaaagtttggactcaatgaccacctcaataggaccctcaacaaaaaagccaattacattgaacaccttctgggtaagattaactttgcattacatatcaacccagatgacttgaagatgaagagatataaggcaaaggtgatagaatatgccaaatccatcgaggaatga

SEQ ID NO: 9713 - RNA, 1032 nt, synthetic construct
  source 1..1032: mol_type = other RNA
atgaacttcgcccagtatgagaagaaattccgcttaaaggccttaaaatctgggttttctgaggataacatcgtggcctgcctcaattatgccaaacctattctggagaagggactgccggttatttacaacacggcaaatctggctgccttggtgggttaccggactacatacctgaagagagcagctaaattcaccaaattctactatcgcagctttaccataaaaaagtctaatggcaaactcaggacactcatggaacccctgccttccttgaaagagattcagacatggatattggaaaatatgctctcagaaatcccagtgtcaaaatttgcaaaggcgtacgtcaagcaccgttccctaaaggagaatgtgaaacatcacaacaacaaggaaggcgtgctcacgtgtgacattgcaactttttatgacagtgtcagattcaaggatatcgaaaagatctttaacgagctggggtattccgaggtgatgagcaatctgcttgccaagctgacaacattcaatgggagtctgcctcagggcgcgccaacctctccctatctgtcgaatcttgtcctgcgggagttcgaccagaagataagtgactactgcatcaataacaacatccggtataccaggtacgccgatgatcttacatttagcggcgaggtaaagtccctcaaactaaaaaacttggtagaagctgaacttaacaagctgggtttagagctgaacccagataagaccaaactcagaaagtttagccagaggcaaatggttaccggaattgtggttaatgagaaaactcagatacccaaattcgaaaggaacttcatccgaaacgaagtgcacttccttacccgctttggactcaaggaccatctgcggaagactaagaataagagagagaattacttgctacatctgctgggcaaaatcaactttgctctgcacattaatcccgctgacaagaagatggagtcataccgaagccaggtccaaaaaattatccaaactgatgccgggtga

SEQ ID NO: 9714 - RNA, 1041 nt, synthetic construct
  source 1..1041: mol_type = other RNA
atgacctttccccaatatgagaagaaattccgggtcaaggctattaaatctggctttagcgagtatgaaatctccgcatgcttgctgtatgcaaaaccactgatcgagtcgaacttgcccgtcatttttaataccgccaacttcggcgccctcgtagggtacaagacaaattacttaaaacgggctgtgaagtacactccatacttttaccgcgcttttactatccgcaaaaagaacggtgggtcaagggagctcgtggagcctttacccagcctgaaggagattcagacctggattctagaaaacattctcagagaagtgaaggttagcaagtatgccaaagcgtatgtgaaaagtagaacgcttctggaaaacgtgcgttatcacaagggaagggaggcagtcctcaccttggacattgaaaatttcttcggatccatcacactgctccatatcgaacatatctttctgggcctgggatactcaagcaacatctccaatctattagctaaactctgtacctatgagggtgtgctggctcaaggggcacctacgagcccgtatctttccaatttgtacctccgacgtttcgatgagatcatctctaaattctgcaaccagaatgatatcaggtacactagatacgccgatgacctgactttctcaggccagaaggacgccctcgacatagtggaattcattcgcaagacactgcaaaagttttcactgaagctgaacaaggacaaagaaaaattgatggtcagaaaccagaggcaggtggttaccggcatcgtcgtaaatgaaaaacttcagattccaaaagcggcccggaatttcatacggaacgagatcttctttatcaaaaagtttgggcttgacagtcacctggagaaaacagataacaagaaatctcactacctggagcatctgataggaaagataaatttcgcccttcacataaaccctaatgatctaaagatgcagagttacaagtctatcgttctgaagatttatcagtcccgagatgaggacaagatttga

SEQ ID NO: 9715 - RNA, 1020 nt, synthetic construct
  source 1..1020: mol_type = other RNA
atgacgaaccagcaactgtacgcaaaaaaattcaccgagaaggccatcgaaaacggatttagctctgattatatcgagaagtgcctttcatatgcctcccccctcctggaaaataatctgccagttgtctacaatatcaaccatttgtcgggactggtcggctacaatgttagctatctgaaaagggccgtgaaatttcctaagtatttctaccgtgagtttgagattgagaaaagtaacgggaaaaagcggaaactgcatgagccactcccttcattaaaagaaatccagctttggatactagacgagattctctataagctaaaagtcagcagatatgcgaaagcctacgtgcccaaacggagtattaaggagcacacaatataccacacagacgagccgttcgtacttaccctggacatcaaaaacttcttcaactccatccagtttgattcagtggagtccctctttaaaaagattggatactccgaaaagatggctaacctctttacaaagctgtgctttcgcgacgacgaactgccacaaggcgctcctacttccccctacattagtaatttgattctgaaggacttcgatttcgccgtgtcaaagtactgtatggaacacaatatcaagtacactcgatatgcagacgacttagctttctctggggatctcaacgctgaagaaattgagaaacttatcaaggatgaactgtctaagattggtatggagcttaatgatgagaagagaaagttgatgaaacccaatcagccacaactgataagcggtatcatagtgaataagaaggcacagctgccgaagaagatcaggaattctctacgaaacgaaatgtactatatcaagaagttcgggctgcccagccacctcgagagaaccaaccagaaaaagcctaactatttgaagcacctcatgggccggatcaattatattctgcagattaaccctagggataaggaatttatcgagtaccgcaaacatttgcatgagttaaaatga

SEQ ID NO: 9716 - RNA, 1020 nt, synthetic construct
  source 1..1020: mol_type = other RNA
atgaataatcagcagttatacgtccggaagtttaccgagaaggcttcagagaacggtttctcatcagattatattaagaagtgcctgtcctatgcaaatccgctgctggagaagaacctcccagtagtgtataacattaatcatttgtccggcttagttggttacagtgtgtcttatctgaagcgtgccgtaaagttccaaaagtacttctatagggaattccagatcgagaagcggaacgagcagaaacggacgctatacgagccactgcccagcctcaaagagatacaactgtggatccttgatgaaatcctttataagctcaaggtgagcaggtatgcaaaggcctacgttcccaaaagatccattaaagaacacaccatgtaccataccgacgaaccgtttgtgctgactctggacatcaaggaattcttcaagtctatcaagtttgagtcggtcgaaagcctgtttcgaaacatagggtactccgaaaaaatgtccaacttgttcacaaagctctgttttagagagaatgaattaccccagggagcgccaacaagtccatgtatttctaacctgatccttaaggactttgacaatgccatctctggatattgcatcaagaatgaggtgaagtttacacgctacgccgacgatttggctttttcaggaaatctgaatgctgaagaaatcgagaaactcgtcaaggatgagctgagcaagatcggcctggtgctaaacgatgaaaaacgaaggcttatgaaacctaatcagcctcagttgattagcgggattattgtcaacaaaaaaccccagctgcctaaaaaagttcggaatagtctcaggaacgagatttactacattaaaaagttcgggctaaccgatcacctggagagaactaaccagaaaaaacccaattaccttaagcatctcatgggcagaatcaactatgtgttgcaaataaaccctcgcgacgaggaattcatagagtataaaaaatacctccacgagctgcgctga

SEQ ID NO: 9717 - RNA, 1029 nt, synthetic construct
  source 1..1029: mol_type = other RNA
atgaataatcaacagttatatctggagaagttcacacaaaaagcattggaacacggtttcagctccgaatatataaacaaatgtctctcctacgccaaccctctactagagaataatttacctgtcatctactctatcaaccatctgtcaggattggtagggtatagcgtgtcctatttgaagcgggctgtgaaatttcaaaaatacttctaccgcgagtttgagatcaaaaagaggaatggtaagaataggacgctctatgagcctctgccatctctgaaggaaatccaactatggattctggatgagatcctttacaaactgaaagtgtctcggtacgccaaggcgtacgttcccaaaaggagtattaaggagcacaccatctatcataccaatgaacccctggtcttgactctggacataaaggagttctttaacagcatcaagttcgagagtgtggagtatctgttcttttcaattgggtatagccgcaaaatgagcaacctctttgcaaagctgtgctttagagaaaatgaactgccccagggagcccctacatcgccgtacatcagtaatcttatccttaaggacttcgacaccgaagtgagcaagtactgcatgaagaacaagattaagttcaccagatatgctgatgatctggctttttccggcaatttaaacgccgaagagattaagaagctggtgaaaaaagagctttccaaaatagggctggagcttaatgaagagaagacaaaactcatgaaaccaaaccagccacagatcatatcaggcattgtcgtaaacaaaaaggcacagctgccaaaaaagattcgaaactcactccggaacgagatgtactacattaagaattatggactggcctctcacattgaacgtactaaccagaagaaatctaactacttgaagcatctcatgggcaaagttaactacgttctccagatcaatcccagagacgtggaattcaagaagtacaaggagtatctccaggaacagtacaaaagttcctga

SEQ ID NO: 9718 - RNA, 1020 nt, synthetic construct
  source 1..1020: mol_type = other RNA
atgaacgaccagcaaatctataccaaaaaatttaccgagaaggctctggagaatggtttttcaagcgactacatcaagaaatgtctcaactatgccaagcctattttggcaaataatctgcccgtcatttacaacatagaccacttttccaacctagtgggctataatgtcagttaccttaaacgagcggtgaagttccagaaattcttttacaggaagtttgagatcgacaaaaggaacggtaaaaaacggatcctgaatgaaccattaccgagccttaaggaaattcagctctggatcctcaatgaaatcctatataagaacaaggtgagtagatacgccaaagcctatgtacctaacagatctattaaggagcataccatataccacacagatgagaagttcgtattaactttggatatcaaggagttcttcaagaatatcaagtttgaattcgtcgagtctctgttcaagtctatggggtactcccggaaagtttccaatcttctgactaagctgtgctatctggaaaaagagctgccacaaggggcttcaacctcaccctacattagcaacttgatactgaaggattttgacaacgttatctccaactactgcatttctaataagatcaagtacacacgctatgctgatgatctcgcattcagcggaaacctgaacacagacgaaattgggatactggtgaacaaagaattatccaagattggactggagctgaatgatgagaagacgaagctgatgaaaccaaatcagccccagcttattagcggcatcatcgtgaataaaaaggcccaactacccaagaaaatccggaactcgttgcgtaacgacatgttcttcataaaaaagtttggactcgtgaatcatatggaacgcacaaatcagactaagagtaactaccttaaacacctcattggcaggatcaactatgtgctccagattaatcctagagataaggagtttatcgagtaccgaaaatatctgtatgacttgaaatga

SEQ ID NO: 9719 - RNA, 1035 nt, synthetic construct
  source 1..1035: mol_type = other RNA
atggagaaagcctttgataagtataagaagcagtttgtcaccaaggcccgaaaaaacgggttctctgaagacaatattaataaatgcctcgactactccaagccgcttattacaaaggatctaccagtcatctataacacaacacatctctctcagttagtgggttataacttaatttacctgaggcgggcggctagattcactaagtatttctatcggtctttcaaggtgctgaagaacgataaaacctatcgcacaatatccgagccacttccctcattgaaggagatacagatttggatcctgaaggagatcctgtacaaaaacaaagtcagtaagtatgcaaagggatacgtgcctaaacggagtattaaagaccacgtgcggtaccacaccaaagagagcaaagttttgactctggacattaagaacttcttcgattccatcaagattgactacaccctgaaaatgttcattcaaatgggatattccaagagtgtaagcaatctgctcacccagttgtgttatctggagaaggggctgcctcaaggagcccctactagcccatacatcacgaatgttctgctgtacgaatttgacgaatcaatcgctaaatactgcaggcaaaaagaactcaaatacacgagatacgccgatgacttggcttttagcggtcagatcaagaaaaccgaattgataaagcttgtaagatcagagctgaggaaaattggccttaagctcaacaacgacaagatcattctgatgaaacgcaatcaaaggcagacaatctctggcatcgttgtgaatgacaaaactcaggtgcccaaatataagagaaacagcatccgtaacgaaatgttctacataaagaagttcgggttaaataaccaccagaaacgtaccaatcagactcgagataactatctgaaacatcttatcggcaagataaattacatcctgatgctaaatcccaaggataaggagtttctcgattacaagaagtacctctatgagcagaataaagcatcgcgctga

SEQ ID NO: 9720 - RNA, 1050 nt, synthetic construct
  source 1..1050: mol_type = other RNA
atgaacattaccttcaacaagtacaaaaagctcttcaccgaaaaggctattaacagtggctattctgaggataatatcgtgaaatgtctctcttatgccgagccaattatcaataaaggcttccctgtcatctataatacaagccatctgtcatccctggtgggatacaataaaaactatctgaaaagagccgtgaatcacacaaagtacttttaccggaaattcgaaatctcaaaaaaggatggtactaagagggttttgcttgagcccctgccttctctgaaggagatccagaactggatcctgaacgaaattctctacaagcacaaagtttcgcgttatgctaaaggatatattcccaacagaagcattaaggatcatgttcgctaccatacaaaagaagagaaggtgctgaccctggacatcaaaaagttctttgataatgtgagcttcgaattggtggagaagatctttattcacattggatactccaagatcatcagtaacctcttaactaaactctgctttcttgacggcaaattaccccaaggcgcgcctacatccccatatatcagtaacatcatactgttcgagtttgacgagaagatatcaaagtattgctccaacaataacctcaagtttacgcggtacgcagatgaccttgcatttagcgggaagatcaaaaaaactgaactggtcaaacttgtaagatctgagctgaaggccttggggctaaagcttaataatgagaagatcaagctgatgaaacgcaatcagccacagattattagcggaatcatcgtcaatgaaaaagcacaagtaccgaagaggaccaggaaccagatacggaacgaaatgttctatattaagcgattcggtatagactcccatatgcagaaaactaatcagaccaaatcaaagctcgcttacctgaagcacttgattggcaaaatcaactacttactgacgataaaccccaaggacaatgagtttattgagtacaagaacatcctacacaaagaaataaagcctgccgggaataatgtgtga

SEQ ID NO: 9721 - RNA, 1059 nt, synthetic construct
  source 1..1059: mol_type = other RNA
atggactataacaaatataaaacgcagttcagcgcgaaggccaaaaatgcaggttactctgaagataatatcagtagatgtctggcctatgcaaaacctattctcgaggagggctacccagtgattttcaacaccacacacctgtcttccctcgtgggctacaataagaactatctgaagcgagctgtagcctaccaaaagtatttctaccgggaattttccattaccaaaaagaacggggaactcaggacacttagagaacctcttccaagtttaaaagaaatccagtcctggattctgaacaacatattgtacaaacacgaggtgagccggtacgctaagggctatattcccaagcgaagcataaaggatcatgccaagtaccacacgaacgaactaaaagtcctgaccttggatatcaaaagcttctttgactctattagcttcggccaggtagaggccatcttttccaatatcggatactctaacatcgtttcgaatctgctggcaaagctgtgttttcttgagaagaatttaccgcagggtgcacccacttccccctgcataagcaatattcttctactcgaatttgacaatgtgatctctgcttattgcagtgagaagaaaattaagtacaccaggtatgccgacgatctggcgttttctggggacgtgaagaagactgctcttatcaaattggtgcgctccgagctaaaaaaactgggcctcagattaaacaaccaaaagatcaagctgatgaaacagtcacagccacaaattatctcagggatcatcgtcaataagaaagtccaggttcccaagaaaaaccgtaataagatacggaacgagatgttttacataaaaaagttcggattccagtcacatatggagaagacaaaacaaaccaagtcaaattacctcaagcatctgatcggacgcattaactatttgctcactttgaaccctaaggacacagaattcctggagtacaaaaagatcctgtatcagctggagagtactgccgataattccacccagatgtcgaataggcctagctga

SEQ ID NO: 9722 - RNA, 1083 nt, synthetic construct
  source 1..1083: mol_type = other RNA
atgaaggactttacgaagtataaaaagaagttccgcgaaaaggccgaagatataggttttagcgaggacaacatcgtgaaatgtctcaactatagtgagaagctgagcaacaacaatctgcccattatctacgattcaagccacctcgctgggctggtcgggtaccatcgatcttatctgactcgtgcactaatttccaccgaatttttttatcgcacgttcaaaatcccaaagaaaaatggcaaaatccgaattatctctgaacctttaccctccctgaaagagattcagtacttcatattgaacgagatcctgtacaaacagaaggtttctaagtactgtaaaagttacatcccaaagcggaagtttagagagtatcttaggtttcacactgatgaaaagcaagttctcacactggacataaaggatttcttcccttccattaaattcaaccatatccacgaatacttcctgaatcttggttttgcaaaggacgtgtcactgtatctcgcctgcctaagtacctatacccacaaagaaaatgactttattgagttcaagcggttccttcctcaaggcgcccccacttcaccatatctgtcgaatttgatcttaaccccttttgacgataaagtcgctgaattctgcttcgacaagaagataaaattcacacggtacgcggacgacatggcttttagcggggaatacatcgaccaggaggaacttttgatattcatcaagaacgagcttaatgtatacggactagagctgaacgaggaaaaaattaacttcatgaagcagaatgtgccacagataatcagcggagtgattgtcaataagaaactgcagttacccaaagcccagaggaacgagatcagaaaggtgatgtactttattaacgagtttggcattgataaccatctcgaaaaaacaaacgaaaccagggagtactatctgtcccacctgctgggaagaattcagtacgccctcaatttgaatccggatgattccgcaatgaaagagtataaaaaccagatcatcgagatcaagaatgagcaaaatttgaagttcctcattgagtga

SEQ ID NO: 9723 - RNA, 1077 nt, synthetic construct
  source 1..1077: mol_type = other RNA
atgaaggattttgagagttataagaagatcttccgggaaaaagcactgaactctgcctatagcgaagagaacataatcaaatgcctgaaatacagcgagaatctggtgaataacaacctccccattatatacaattcatatcacctcagcgggctggtcggatatcaacatgattacctttctagggcaattttgtccaccgaatttttttatcgtcacttcaagatcgagaagaagaatggcaaatccaggaagatttccgagccgctgccttccctgaaagaaatccaatacttcatcctcaaagagatcttgtacaaacaaaaagtgtctaagttctgtaagtcctacattcccaaaaagaagttcaaggagtatttacgattccatagcaacgaaaaagaagtcctcacactcgatatcaaggactttttccccagcattaagttcaacctaatccacaactatttctcaaagatcggttatagtaaggacgtggctttatatctgtcttgtctgtgcacttacacggacgtgaatgtggaaaagaaaaacaatacatccatccggtacctacctcagggtgcaccaacttcgccctacctgagcaatctggtcctcatagactttgataatgacgtagccaactattgctcagagaaaaagcttaaatacaccagatacgccgacgatatggcgttttctggagatttgattgttaagaacgagttagtggaatttgtaaatgcccagctgaaaaaatacaatctggagctcaacgatgagaaaattaattacatgaagcagaacgtcccacagatcatcagtggggtcgttgttaacaaaaagttgcagctgccaagaaaggagcgcaacgacatcaggaaggtgatgtacttcattataaaatacggcatcgagagtcatattgaaaaaacccaggaaacacgcgaatattacatttcatatctccttggcagaatacagtatgctcttaacctgaatcctaatgacgctgagctaaagaagtacaaagactttcttgtggagttgaagaagaatattctgatcctgtga

SEQ ID NO: 9724 - RNA, 1080 nt, synthetic construct
  source 1..1080: mol_type = other RNA
atggacctggaactctataagcgacattttcgtgagaaggctctgaatagcgggtttagcgaggagacaatcatcaagtgtctcaaatattcggaggtgctagcatctaagaatctgccagttatctacaattcgtatcaccttgctggtttagttggctacaaacacagttacttgagcagggccataatttccaccgactttttctaccggaaattcaagattcagaagaaaaacgggaaatatagggagatatcagaaccccttccatctctgaaagagatccagtacttcatattgaaggagatcctctataagcagaaagtctcaaagtattgcaagtcctatatacccaagaagaaatttcgggaatacttaaagtaccacagcaatgaaaaacaggttctcaccctggatataaaggactttttcccgtcaatcaaatacgagttcatctacacatactttatgaaccttggctacgcaagagatgtatcctatttcctggccaccctatgtagctatgtgccaaaagcgcccaaaggagaaaagacggatctctccaagcgattcctccctcaaggcgctcctacatccccctacttatcaaacctcatcttgtctaactttgatgaccttgtagccaaatattgcaatgagaataagctgaagtacactcggtatgccgacgatatgactttcagtggggatatcatccaagaagacgaactgatttcctttgtgcagagcgaactgaataaaatcggcttgaaactgaacattgataagatcaacttcatgaagcagaatgtgcctcagattgtgagtggtgtcattatcaataaaaaggtgcaactgaccaaagaggacagaaataaaattcgcaacgtcatgtactacatttctaaattcggcctggaggatcatttgaacaggactaacgagaaaagagactattttgtgttccatctgctcggaaagatccagtatggactgagcctaaaccctaacgaccacgaacttaaacgctacaaggagattctgattgaggaaaagaagaagtattacagtaagtcttga

SEQ ID NO: 9725 - RNA, 1077 nt, synthetic construct
  source 1..1077: mol_type = other RNA
atggtggatttcgagttgtataagaaacactttagggaaaaggccctgaatattggctttagcgaagagatcataatcaaatgtctcaactactcagaaaacctcgtttccaaaaagcttccaatcatttacaactcctaccaccttgcgggcctcgtggggtatcaacattcatatctgtctagagccatcaactctacagagttcttctaccgcaagttcaagatacagaagaaaaacggtaacttccgcgaaatctccgagccactcccttcattgaaagagattcagtatttcatcctggaagagattctgtacaagcaaaaggtgagcaggtactgtaaatcttacacccccaagcgcaaatttagggaatacctgaaataccatacgaatgagaaacaaatcctgactttggacattgaggatttttttccgagtatcaagttcaacaacatcttcaactactttctggcattgggatatgcaaaggatgtatcctattatcttagcaatctgtgcacatacgtgactaaagggaagaagggacagcgagtcaatataagcaatcgttatctgccccagggtgcccccacaagtccatacttatctaatctcattctgagcgaatttgacgattcagtcgctaagttctgcatccagaatcagctgaaatataccagatatgctgacgatatgaccttttcgggaggaaacattaacaaagaggacctcattacttttatcattgtggagctgaataagatagggttaagactgaacattgagaagacaaatttcatgaagcagaacgttcctcagataatcagtggcgttatcgtcaataagaaagtacagcttcccaaggccgaacggaacaaaatcaggaacagtatgtactacatttccaagttcggcttggaagaccatctaaaacggaccaatgaggagcggaattactacgtgtttcaccttattggcaagatacaatatgggctatctctgaatcctgaggacttagagctgaaacgatataaggaaatcctcatcgaggaaaaaaaaaagtactatagctga

SEQ ID NO: 9726 - RNA, 1077 nt, synthetic construct
  source 1..1077: mol_type = other RNA
atgaaagactttgagctatacaagaaacagtttagagagaaggctctgaacaacagcttttctgaggatatcatccagaagtgcctgaattactccgaaaacctcttttccaaaaatctgcccataatctacaattcgtatcatcttgcaggccttgtggggtatgaacatagttacctcacacgagccattatcagcactgacttcttctaccggaaattcaacatagttaaaaagaacgggctactcagagaaatatccgaaccattgccaagtctgaaggaaatccagtactttattctgaaggagattctctacaaacagaaggtgagcaggttttgcaaatcctatatccctaaacggaaatttagggaatacttgaagtaccactcaaacgagaagcaggtgctgacacttgacatagagaattttttccccagcatcaaatacaagcacattaacaactacttcacagagctgggttatgccgaggatgtgtccagtttcctggcctctctttgtacctatagcattagcaagaagaagaaagagaaagtagagttaaacgaacggttcttgcctcagggagcgcccacctcaccttatctctcaaatctgatcctcatgaagttcgatgatacaatagccaactattgtaaggaaaagtccatcaagtacactcgctacgctgacgatatggctttttcaggatccgacttcgacaaggaaatcttaattaagctcgtgcaaagtgagctgaacaaagtagacctgaaactgaataagagcaagatcaatttcatgaaacagaatgtcccacaggtcatctctggcgtcctggtgaataaaaaaatccaactgccgaaagagattagaaacgagattcgcaatactatgtatttcattaccaagtatggctatgaggaccacattaaacgaaccaatgaaacgagggattactatttattgcatctgttggggcgtatccaatacgcactaaaccttaatcccaatgattctgagctcattaagtacaaatctgttctgctggaatacaagaagaagtattataactga

SEQ ID NO: 9727 - RNA, 1062 nt, synthetic construct
  source 1..1062: mol_type = other RNA
atggaaaaaacaaactcctacaagaagaagttcacagagctggcgatcagcagcgggtactctgaagagtacattgagaaatgcttgaagtacagcgaacctctgctcaataaaaaccttcccgtgatttactccataaatcacctctcagccctggtgggttattctcagtcatacttaactaggtcgatgatttccaccagcttcttctatcggcacttcaaaataaaaaagaggaatggaaacctcagatcaatcagtgagccgctgccatccctgaaagagattcaaaactttatcctaaaggagattctgtacactcagaaagtgtcgaaatactgtaaaagctacattccaaagaagtccatcattgagtacctgaagtatcatgtgaacgagaaagaaatcctcaccctcgatctgcaagattttttcccaagtatcaagttcgagctgataaagaacttttttctgcagcttggctactctgatgaagttagctattatctgtctactctaacgacctattgtgacaagcaagaaaagtttgacgacagtcagagatatttgccacagggcgcaagcaccagtccttatctttcaaatctgatcctcaaggactttgacaataatatagggaagttctgcaacaacaagatcaaatatacacgttacgccgacgacctggctttttccggagataaaatcccctccgaggacataatcgactttgttaataaggaactcgagaaacttggtttgaagttgaaccctaagaaagtcaatttcatgaagcagaacatccctcagattatttctggcgtggtcgtaaacaataaaatgcagctgcccaaacaacagcgaaatgagatccggcagaagatgtatttcatcaataggttcggaatcgaatctcatttagaacgcattcaggagaaacgggaaaattacatcccgcacttgttagggcgcattcagtatggcctgaacctcaaccccgatgatctagagcttaaaaagtacaagaaggatctgcaagaaatttacaacaaagtcaagtga

SEQ ID NO: 9728 - RNA, 1032 nt, synthetic construct
  source 1..1032: mol_type = other RNA
atgaagacattcgaaatttacaagcaggagtttaccaaaaaggcgttggacgccggctattcagctgatgagctgaataaatgtctgatttacgcagagcctttatacaacaggagactgcccattatctacaacctctctcatttcagtgcctacgtggggtataacgctaaatatattagacgagcaatcaagactgattccaccaagtttttctatcgggagtacagcatactaaagaaaaatggatcacttagggtgataaatgagcccctgccgtccctcaaggaaatccaaaagtggatcctggataatgcactgaataacatggcaatctctgcttatgctaaagcctacacttttaataggagtatcaaggatcacgtaaagtatcataagaatcagaagtctctgttgacgctggacatcgagaacttcttcaataacattaccgccgacaaagttgagaagctgttcattaacaagggatacagcctcctggtcagtaatctcatgagcaaaatatgcacactcaaaaactgtcttccacaaggtgccccaacgtcccctcggatcagcaacatccttatgttaccattcgacgacaaaattagcaagtattgcaagacaaaagggaacatcaaatacacccgctatgcggacgacctggccttctctggagaaatcaataaagaagagatagtggaacttgttaccaacgagttgaaagaacttggtttgaccctgaatatcgataagacaatcgagaagaagcagtcacagcagcaaatcattagcggcattgtcgtgaacaaaaaaatccaggtgcctcgtaagaaacgcgatgaattacgacagtccatgtactacatagagaagtttgggctcgaaaaccacctggtcaaaattaaatgctccaagtcgaattatctcaagcacctactgggcattgccaattacattatctttattaaccccaaggacgaaaagactatagagatccggactaaattgtttaagatgatcgagtga

SEQ ID NO: 9729 - RNA, 1050 nt, synthetic construct
  source 1..1050: mol_type = other RNA
atgaatacattcaacatctacaagaaggaattcacgaagaaggccctcgagtctgggtatagtgcggatgaactcaataagtgtttggtgtatgccgagccactgttcaacaaaagactgccgattatctataatctgtctcactttgctgcacacgttgggtactctacaaaattcatccggcgagcaataaaaaccaacggaaccgagttcttttaccgcaaatattcaattcccaagaaaaatggctcatcccgtgtgataaacgagccactgcccagcctgaaagaaattcaaaaatgggtcctggacaatattctcaacaacatgcctattagcgcctacgccaaagcgtacacctttaatcgaagtatcaaggaccacgtaaagtatcatgagaatcaaaacgtcgtgcttactatggacatagagaacttcttcaacaacatcactagcgacaaagtggagagactatttatcgacaagggctacagccctctggtgagtaatttattgagcaggatctgcacgttaaacaattccttgcctcagggagcacccacctcccctcggatctccaacatcctaatgctcccatttgataacgagatcgctaagtattgtaagcccaagtttatcggtggtaagaaggtgcaggtaaaatacacaaggtacgccgacgatattgccttctcaggcgaaataaataaggctgagtttgttgagctggtgtctaatgaactccagaagctggatttatcactgaacgaggataaaaccatagaaaagaagcgcaatcagcagcagattatttccggcattatcgtgaaccagaaaatccaggttccaagaaaaaagcgggatgagcttaaacaagccatgtattacatcgaaaagtttggactggaaaatcatttggctcgcataaaatgcacaaaggctaattacgtctcgcatctccttgggattgcaaactatatcgtcttcattaatcccaaagacaaaaaaactctggaaattaggactaagcttttcgagatgaaggactga

SEQ ID NO: 9730 - RNA, 1035 nt, synthetic construct
  source 1..1035: mol_type = other RNA
atgaaaaactttgagagctataagtcggaattcaccaagcgggcttataatgaaggttttagcagtgacgagatttccaagtgccttaactatagcgaaactctcctgaaaaagaatttgcccatcatattcaacagttctcatctttcagcactggtcggatacaacaaggattatctgaacagagtgtccaaggtcaataaaacaagctacttctatcgagactactatatacctaagaagaatggcgagaagaggctgatccgagaaccccttccctctttaaaacagatccagaggtggttactagacaacttattcatcaagctgccaatctcaccttacgcgaaggcttaccgtgcgaagaaaggcattcgcgatcatgtgcgctatcacaagaaagaggaagtggttataaccatggacatagaaaagttctttgacaatctggagtctggactgatcgtgaatatcctcctctccaaaggctactcctttcaggtagccaacctcattacaaaaatttgtacgctgaatgatgtgttgcctcaaggtgcaccaacatctccagccattagtaatattctcctttacgagttcgacaatgaaatctccaaatatacaaacagcaagggactgaagtataccagatacgcagacgatctggccttttcagggagtattcaggatgttgataccctcatcaagatcgtaaaagaaaacctagccaaaatcaacctgaagattaaccactccaaaactcgggttatgagcaaaaaagccaggcaaattatttcagggattgtcgtgaatgacaagattcaggtgccgcggaaagaccgcgatgatctcagacaggccatgtattacatcgagaaattttctcttgaggagcacctgaagaagatcgactgcaataaagctaactacatagagcatctgttggggaaggctaattacatgttgaagatcaaccccaaagatgagaaaatcaaggtgatatacaacaagctgaaggtcatgaaaactggctga

SEQ ID NO: 9731 - RNA, 1056 nt, synthetic construct
  source 1..1056: mol_type = other RNA
atgagattctcatcctacgagaaagagtttaggcggatcgccgaaaagcgcaattatccttctagcgtcatagagaactgcctcaagtatgccaaagtgctgctcgataatggcgtccctgttatctataacactacacacttaagcaatctcatcggatacaccaagagttacattaagcgtgccactcatcacaccccttatttctaccggaaatacagcattttgaagaaaaacggttccaaaaggtttctgtccgaaccacttccctcattaaaggagattcagatatttatcctcactaacattctctcttcaatcaaagtctcacgctatgctaaagcatatgttagtgggaggaccctaatcgaccatttgaagtttcacaagggacagaagtgcgtcctgaccttggacattgagaactttttctcctctatatcaactgagagcatcgagaagattttcctggaaattggctataccgacatcgtgtccaatttgctggcacggctgtgtacacttgagaattcgttgccccaaggggcaccaacgagcccatacctttccaacctgtacctcaaaggctttgaccaggagctggctaaaatagtcagaccaatgggcatcaattatacgcgctacgctgatgatatggcctttagcggggatacaattgacaaagaggcgatcatcgaacatgtttctagaatgctatctggcctgggactggtacttaacccggacaagacactcctgatggtaaagcctagccggcaagtgatcagtggtattgtggtgaatgaaaagattcaggtgccccgcaaaattcgtaggtccatccgacaaagtgtgtactatataagaaagttcggattcgaaagccacaagcagaagaccaagatttacaaacgaaattacgataagcacctgctggggcttataaactacatcttattcatcaaccccaaagaccaggagttccagtcttacaaagaagaactggagaagatcattaaagacgctgataacaatggttatacacaggccggctga

SEQ ID NO: 9732 - RNA, 1029 nt, synthetic construct
  source 1..1029: mol_type = other RNA
atgacctttagcagctatgaaaaacgctttacggatctcgctaagaagaggaattattcaagtgaggtgatcacaaaatgtctatcctatgccgagccgcttatacggaagaaagtccccgtgatatataatatcgcgcatttcagttcacacgttgggtatacagtcaagtacatcaaaagggccatcaagcatacagactacttttacagacattatgagatcagcaaaaagaacggaggcaagagaaaaatctcagagcctttaccatcgctgcaggaaatacagaacttcattttgaccaagattctttacaagcagaaggtgtctcgctatagcaaagcttacgtccccggacgttctattcttatgcacgcaaagtaccatgtaaataaccacaccgtgctgacgatcgatctcaaggactttttcagctccattcgaacccaccatatcgaggccatctttaaggagatcggctattcccagattgttagcaatatgttggccaaaatttgcactctgaacgggggcttaccccaaggtgcgagcacatcccccgcactttctaacatcttcttctctaagatagacgaactgattgccaaagaagtgcggcctgaaataaactatactcggtatgccgacgatctggcattcagtggggaaaccatcgacaaagaggtcttggtggcaaaagtacaaagtattctggaaccatacgagctcaagattaatgcttccaaaactaagctcatgacccaacaccaacagcagatcattacaggaattgtggttaataagaagctgcagctgccttccaaagataggagaaaaattcgccaggaactgtactacatcaagaaatacaacatggcatcacatatgtctaagaaaaacatccacaacaagaagtacgctgcccgactactgggtaagatcaattttgctctgttgctcaatccaaaagataaggagttcatcgagtacaagaaagtgatgcacgagataatccagcacactatttga

SEQ ID NO: 9733 - RNA, 1017 nt, synthetic construct
  source 1..1017: mol_type = other RNA
atggaattcgagatttacaaaaagaagttcgaagccaaagcactcaaaaccggcttgacagacttagagattactgattgcctgaattatgccctgccccttatcgagaaaggactgccagtcatttacaatacaagtcacctttcaaaactggtggggctgcgcaagacatatgtaaaacgggctgctatttatacgaagagctattaccgaaacttcaccatcgcgaagaggagcgggatgcctcgtgaaataagcgagcccctgcccaacctaaagatcatccataagttcattctggaggaaatcctagagaacatcaaggtatctgcattcgcaaaagcctacaagaagaagtccaatattttggagaacaccaggtatcatatcaatcagaacaaggtggtcactctggacattgaaaacttttttccatccataacgacagataaggtggagaacatctttcgagggcttggatattccgatctgattagtaatctgctctcgaagctgtgtaccttaaataattcacttcctcagggtgctcctaccagtccgtacctgtccaacctgtttatgaagggtttcgactctaaactggctgacttctgcctcagcaagaaaatcagatatactcggtatgccgacgatataaccctgtctggcgacttcaatgaaaaagaggccatcgattacataagcgttttgctaaaagagttagacttggatctcaattgtaagaccaagataatgaagagaggacagcagcaaattgtgactggcattgttgttaatgaaaaatctcaggtgcccaggaaggagcggcttaaactcagacaagagatctaccatattaagaccaaggacctggactcacacaaaaagtttaaacagatcactcagcgcaactacctctaccacttgtatggcaaaatctcctacgtggtctttgtgaacccaaaagatgaagaattcatcgagtacaagaagtttctcaaaacactcatgaactga

SEQ ID NO: 9734 - RNA, 1020 nt, synthetic construct
  source 1..1020: mol_type = other RNA
atggagtataacatttacaaggagaagttcacaaagaaagcaatcaaagaaggtctgaccgaaacagaggttaatgaatgccttatatacgccaagccattaatagaaaatgggctccccatcatctttaacacaagccacttctcaaagctggtgggagtgcgaaagacttacattaagcgggcagcaatttacagccgctcttattatagaagcttcacaattgcgaagcgtaatggaaatcctagagagatcagtgaacccctgcctaacttgaaactgatccagaactatattctcagcgaaatcctgtacaatgtgaagatatctgcttttgccaaggcctacaaaaagaagaccaccattatcgagaacactcgttaccacgtgaatcagaagaagctggtcacccttgatataaggaatttcttctcctccattaagaaagagcaggtctacattatctttaacaaactggggtactcggagatcattagcgatctcttctcaaagttatgcactctgaacgatcagctacctcaaggcgctcccacttcaccgtttttgagtaacatttttatgtccgacttcgacatgtttgtggccgattactgtacgtctaagaacatcagatacactaggtatgctgacgacatcagtctgtccggcgatttcgacgaaaaggagatcatagaactcattatagagcgcttgaaagaaaaagggttggagcttaacaatgagaaaacgaaaatcatgctcagaaatcaacgacagattgttaccggcattgtagtcaacgaaaaaaatcaggtgcccaggaaagaacggcttaaactacggcaggaggtatttcatatacggaccaaaaccctggaggtgcacaaagaaatcaaaaatatcaagaaccgcaactatctctatcatctgtacggtaagatctcttatgttgtcttcatcaatccaaacgacaaagagttcattgagtataaggagtatatcaggacactgtttaagtga

SEQ ID NO: 9735 - RNA, 1032 nt, synthetic construct
  source 1..1032: mol_type = other RNA
atggactttactacctaccagaaaagatttacagaaaaggccaccagacagaagatgtcagattcggatatagccgactgcttggaatacgctaatgtactcttcaaaaacaatgtggtgaccgtctacaatacgtcacatctatcaaagctggtcggaattaggaaagcatatattaaacgcgctagcatatataccaaaagctactacaggtctttcgagattgctaagcgcaatggcaacccacgaaccattagcgaacccctgcctaatctcaaggttatccaagacttcatattagaagagatccttaacaaggtgaccgtgagcgctttcgcaaaagcgtacaaaaaaaattcctccatcaaggaaaacgtgaggtaccatgtagatcagaaaatagttctaagcctggatatccaggactttttttctagtgtgtcaattgagatggtcgagaaagttttcctggatcttggatatagcgaattgctgtccgacctcttctccaagctgtgtacgctgaacaagtgcctgccacagggggccagtacttccccttatattagtaacatcatcctgaaagggtttgacaaaaaaatcgccgattattgtctcgaccagaacatccggtacacacgctatgccgacgacatcactttgtctggcgattttgatacaggaactgcaattacattgatcgaggacgagctgctcaagctcaacttatctatcaaccgaaataagaccaaggtgatgactcgtaatatgcggcaagtggtgacaggcattgtcgttaacgagaagatacaggtatctggtaaagagagaaataagcttcggcaaaacatcttctatctcaaaaagttcgggttactggactatattgagcacgagaaaatcaagttcaacaattacctgtaccacctgtatggtaagctttcctacattgtctatattaatcccaaggatcaggaatttatcgactacaagatctacgtgaaggatctgattaagaagcactactattga

SEQ ID NO: 9736 - RNA, 1038 nt, synthetic construct
  source 1..1038: mol_type = other RNA
atgagcttcgaaatctacacccggaaatttcgcgagaaagccgaaaatcttgggtattctgaatccaatatagtgaagtgtatcgattacgcctcacccatttacgagaaagggttacctattatttacaatctgacacacctgtcacgccttgttggttacgaaaaaaactacattatccaggccgccatcgctagtaagcattccgaggcatattacagataccataaggtgctcaaaaagaacggagacgtgcgaaaaataaaggagccactacccaacctgaaagctattcagtactggctgttacacaacattctggaaaagatcgagccgagtgcatatgctaaggcatacgtgaaaaaacgaggcttgaagcagaatattagatttcacaaagggcagaaaaaggtccttagcattgatatcaaggacttctttcctagcatcacgttcgagaaggtcgagaacatatttctcaccataggctattcggtagagctctctaattatctggcgaaactgtgttgcctgaaggaaaagcttccccaaggggcccctacctccccctacatttcaaacctcattttcaagaacatcgacgagatcatcgctgtctactgcaaaaatctcaacatccgttatactaggtatgccgatgacctgacatttagtggcgattttgacgagactagcttgctgaactacatcaacgagattatgactgagaacaacttcatccttaataaggacaagaccaaattgatgctgtattctgaaaggcaaatcgttacaggtatcgtggtgaatgacaaaccacagttagacaaggagacaaggaaagaaataagacagcacctctactatattaagaagtacggcctggagtcacacatggaacggaataatattaatagcaacaccttcctgacgaatctgatgggaaagatctctttcggactctatttgaatccaaaggatgaacatttgcgggattccataaactatctatcccagctgtataagcaaatcatgtga

SEQ ID NO: 9737 - RNA, 1038 nt, synthetic construct
  source 1..1038: mol_type = other RNA
atgtcttttgaggtgtatgcgaaaaaattccgagtgaatgctgaaaacctcggctattccgaggaaaatgtggtaaaatgtatcaattacgcgcggcccatctacgaaaacggactgcctattatctataatctcactcacctgtccaagctggttggctttgaaaagaattatattatccaggccgccgtggtatctaaacacagtgaggcatattaccgttatcataaggtcctcaaaaagaatggggattttaggaagattaaggagcccttgcccaatctcaaagccattcaacactggatactggctaacattctggaagaaattgaaccgtctgtctacgccaaagcctacgtgaaaaaacgaggtttaaagcagaacattaggttccataaggcacagaagaaagtgttcacaatcgacattaagaacttctttccatccatcaacatcaaccagatcgagaagatctttatcgagacaggttacagcatcgaactaagcaactatctggctaagttgtgctgcctgaagaacacactcccccagggagccccaactagcccttacatttcaaacctcattctgaaggacatcgataactcaattgccatcttctgtaaagagttgaaggttcgctacaccagatatgctgacgacttaacgttcagtggggatttcgaggaggaatcgctttacgagttcgtcaacgcactgcttgagaaaaatggctttgagcttaataaagagaagacccggctcatgctcagttcacaaaggcagatagtgaccgggatcatagttaatagcaagccacagctggataaggaaacccggaagctgatacgccaagaaatttactacatcaagaaatttggcctggagtcccatatggagagagctaagctgtccggatctctttacctaaatcagctgatggggaaaataagcttcggattgtatctaaacccttcagacatgaagctgagaagctacataaaatatttggcaggcctttacaaagagttatattga

SEQ ID NO: 9738 - RNA, 1044 nt, synthetic construct
  source 1..1044: mol_type = other RNA
atggactacaagacttattctgaaaggttcaagattgaggcatataatgtaggatatagtgagagtagcgttgccttgtgccttaactatgccaaaattctctttgacaagaatctaccagtcatctacaatgtcacgcatctgtccaatctgaccggaattaagaagaactacatcatccaggccgctaccgtgagtaaacactcgcacgcatactatcgggatttttccatagctaagaagaaaaagggcgaaagaaggttcatttctgagcctctacccaaccttaaacaaatccagtattggatactgaacaatattctctaccaggtgaaagtgtcaccatatgccaaagcctacatcaagaattttggcttgaaacagaacttaagattccacaaaaacaagaagaaggtcttgaatctggacatcgaaaatttctttagcgccattaaattcgagaaagtggagaaggtattcctgaacctcgggtattctaataccgtttcaaaaacgctgagcaagctgtgtacacttaaggagcagttaccccaggggtcaccgacaagcccttacttatccaacatcattatgatgtccttcgacacagaagtgtctcttttcgctaagaacttgaacatcagttataccaggtacgcggacgatctgactttcagcggtgatttcgacgaaaacgtggtcgaggattttatcgaaactaagttgctggaaattggttttaccctcaacagaaataagaagaagctaatgtacgattcccaacgtcaaatcgttacaggcgtcgtggtgaacaagaagattcaactgtcaaaggagcagcgaaaaaaactccgccagattcattattacatcaaacggtttggcatagaaagccatctggagcgccagaaactgtccaaaaaaaagtacctctctaagatactgggacagatcaactttgggctctaccttaataaacaggacaaaaatctgctggagatgaaagcatgcatcctcaaatacaagaaggagtttgatctgtga

SEQ ID NO: 9739 - RNA, 1557 nt, synthetic construct
  source 1..1557: mol_type = other RNA
atggatttcaaagaatataagcagctcttctctgagaaggccaaaaacaaaggacgggacctcaattatatagactcttgcctggcttacgccgaaaggttatacgataaacaggtacccgtgatttatgacattacacacttaagtctgctggtaggcgtgaaggaagactacatccgaaggagcatcacttacactaagaagtactactggagctttgacatcccgaagtctaataacaagaaaaggacaatcaacgaaccattgcctctgctaaaagagattcagctttggattctccataacattcttgaaaagcaagctacccacccctgtgccaaggcttatgttccgcataagaaactcaaagagaacgcaaagtatcatactcgccaaaaaatagtgatatctttcgacgtacagaatttttttccctccatcaatcttgagggcgtctcaaagatattcaatatcatcggctatagcaaaaagaattcctatctcttggcaaaactatgttgcctggatgataagttacctcagggcgccccaacgagcccctacttgtcaaatctgtatatgttcagtttcgacgaaaacctaatctgctattgtagaaaaaacggaatgatctatacgcgttacgccgatgatattacaatctcgtcgcaaaaagatgtggacatcaatgcgttgactaagctggtggaggaagaacttagtaaaaagggtctgagcctgaatataagcaaatccaaagttatgcacaagtctgactcacaggtggtgaccggtattgtggtcaacgaaagaatgcgcctgcccaaaaagaaaagacagaaactacggcaggaaatgtactacctcatcacccgggggctggaagaccatataaactttatcaagtgcaagaagcgaaactatctgaaacacttggctgggaaggtgatgtacgcattgcatctggagccaagtaacacagagttcaaagactactacattttcctccagaggctgatcaatcccgattttaaacgcaagaagaagagactcattttagatagcaacgtgatccttaacgaggtgcttattgagaaactgccagaggactatactacctacatcgcgaacaacaactccataaaaaagatcaagaacctcgacctgtgttatggacctaatttatgtcacgccaattctctcctgtttgcaattatgcttaaggaacagtaccctacaatcgaggttaatatttccgagggcattgttgtccgcaccaatgggttcgcctacacccacttttgggtccacattttgcataataatgagcaggagttctgcgacgtgaccagagattgctttgagaaaaagattctgcaagccaaggaacgtcggtattacaaggtcaagaaccacactatcgatgagatgacccagaggatggcttccaataacgtctttctggattcaaaggagtacctgtccctgtactacaagaaatatcctaagtatttcgagctgtacaatacactgaacatcatgctccaccagcaatga

SEQ ID NO: 9740 - RNA, 1407 nt, synthetic construct
  source 1..1407: mol_type = other RNA
atggattttaaagaatacaagcgcctctttactgagaaggcccaaaataatggcagggactcagattatattaacctgtgtctatcctatgctgagaaactgtacaatcagcaggttccggttatctatgacattaaacacttgtcactgctggtcggtgtgaaggaagattacattaggagagcaattacctataccaacaagtattactggaacttccacattcctaaattgaacggcggcaagagaactattaatgaaccattacccctcctcaaagacatccagctgtggatcctccatcatattttggagaagcaagagacacacccctgtgccaaggcgtatgtacctcagaggaagcttaaggaaaatgccaaatatcacacccgccagaagctggtaatcagttttgacgtgcacaatttcttcccatcaatcgatctcgaggcaatctccaagatcttcattaacattggctactccaaaaagaatagctttctgctcgccaaactctgctgtctcaacaatgaattgcctcagggagcccccacaagcccgtacctgtctaatttgtacatgttctcctttgacgataacattatgcgatattgtcgggagaaagggattatctatactcgttacgcagacgatattactttctctagcaagtccgatattaatatcaaaacccttacggagttcattaagcacgaactgaggaacaaaaagctctcattgaaccccgcaaaaagtaaagtgatgtacaagagcgacgctcagatcgtgacagggatagtggtgaatgaaaggatgcgtctgcccaagaaaaaacgccaagagctgcgacaggagatgtactacgtgataaccagaggacttgaaaaccacataaacttcatcaaatgcaacaagaagaactacctaaaacatctcgctggaaagataatgtacgctctgtatctggagcctagtaatacagaatttcaggactaccatacttttctgcaacggctgatgaacccaaactacaagagaaaaaagaaaaagctggctctggactcgaacatcatccttaatgaggtacttatcgagcagttaagcgagaattacataacgtgcatcgagaacgacaatagtatacagcgggtgggatctctagaactgcactatggcttaaacctttgccacgccaacagccttctgttcgcgatcatgttaaaagaacagtatccaaccgtcaaagtgaatatatctgaggggatcgtcgtgctgaccaacggttttgcctatacacatttttggatccatgttgtccagaataataaggaggagttctgtgatgttacacgcgattgcttcgaaaagaagtattacaagcaaaagaacgtcgacatcattcggtga

SEQ ID NO: 9741 - RNA, 1038 nt, synthetic construct
  source 1..1038: mol_type = other RNA
atggagtttgacaaatacagtttccaattcgcacaactggccatactcaatggctacacaaccgaatacgtggattcctgtctaaagtatgccaagaaactagccgacaacaacttacctattatttacgactcagagcatttttctgaattggttggcttcaagctgtcttatatcaagaccgttgtggagtaccccaagtccttttactggatgtacaaaataaagaagcacagtggaggtatccgaaaaattaatgcacccctccccaaccttaaacagattcagtactggatattagagaatattctcaacacccagaaggtgagcccatacgcaaaggcttttgtgcagggtaagaagcttaaggaaaatgttaggttccacaggaatcggaaaattgtcatcaagtttgacgtacacgatttcttcgggagcatcagagaaaattccataaaagcgattttccgttccctgggatatatcaaccctgtggctgatctcctggctatgttatgctgcttggaccatgtgctcccacaaggagctcctacgagcccctacctgtccaacctctacatgttggactttgatactcacatcgcccagtactgcaaggaacatacaatctattatacccggtatgccgacgaccttacattcagctcagatagtaacatcgatgagtatgaactaacgtcactggtcaagaaagagctgaatattatcggcttgtacctcaataacgataagactaaagtaatgccacgcaacacaagacaggtcgtgactggcatcgtcgtcaatcaaaagcttcaggtggacaaagataagaggcgcaagattcgacaggaagtgttctatatcaaaaaatgggggctggagtctcacctccagaaaattggctgttcgaagaaaaactatctgaagcatcttctgggggagatgacctttatgctgtctctgactccgcagaacttgcagctgaaagccgacatcgaatatatcagaaaactgtgggaggagaatctgatgtga

SEQ ID NO: 9742 - RNA, 1065 nt, synthetic construct
  source 1..1065: mol_type = other RNA
atgaccttcgacgaatatcgaatcaaattctctactaaggcctatcagtatgggtactccgaagtctacgtctctaaatgcctcaattacgctgctcgcctttttgacaagaaccttccagtgatctacgacttcgaacacttctgccgtttggtaggctacagttcctcctatataaaaagagccgtgaacagtccgaggagcttctattacgactataacgtgccaaaaaagaacgggaatggtgtgcgccttatctcgcagccattcccatctctgaaggaaatccagtactggatcctgaacaatattctgtacaaacttgaggtttctccctatgcaaaggcatacgtacctcaccggaagtttaaagacaacctacgctttcataagaataagaaattcgtgatcacgtacgatgtggctaattttttcccttccattaagaaggagaaaatcgaggcctattttattgaactcggttacacagagctactgagcaacctgtttagcaaactggtcacccatcggggatatttacctcaaggagctcctacctcaccctatttatccaacctctatatgaagcagtttgacaacaaaattgcagcgtattgtaagtgtaggaaaatattctacaccagatacgccgacgatctcactttttcaagtaacgaggatgtcgatatcaacgacctgttcaacaccattaaaatagagttgagcatcctgaatctggagctgaatcaggacaagacacatattatgaattcttcaagtcgccagatcgttacaggcgtggtggtgaataagcggctgcaagttcccaaagaattcagaagcgagattcgaaaagagtgctactatattaacaagtttggactgtcagaacacctcgccaggatcaagcagacaaatgaaaagtactatatcaagggcttgttagggaggataaattacgttttgcagattgatcccactaacaaggagtttaagagctacaaaaaggagatgcaaagattcgtgatccgggatattaatctggacgattacgatgtcctctga

SEQ ID NO: 9743 - RNA, 1029 nt, synthetic construct
  source 1..1029: mol_type = other RNA
atgaactacaacgactacaagagagagtttaccgagaaagccctacgttccggtttctcctatgaggttctgcaggcctgcttgcaatacgctgaaaagctattttctaatgacctccctgtgatatttaaccttacccattttgcctcgctggtcgggtacaagcagacatatattcagagagcgatagtgtttacacatcatttttaccggaagttcgagattagcaaggccaatgggtcccaaagaaaaatctcagaacctctcccgagcttaaaggagattcagggttggatccttaaacacatcctgtacaaactgaaggtaagtaggttcgcaaaagcatattctcccggcatctctattaagcagaacctgcagtaccacagggatcagcccctcgttctctcaattgatgtaaaggactttttcacctcacttactagggacaaagtggaacaggtattcaaaatggctggatactcttctagcttaagcaatctgttttccaaaatctgtactctcgacggccggttaccacagggcgcaagcactagtccatatctgagcaacttgatcctgtacaagttcgacgaggagataggcagtttctgcaagcaacaatcgattcgatacacaaggtatgctgatgatatcacaatttctgggaatttcgatcccgatctcctgcgccagaaagtgcagatcgaactggacaagttgtcacttgttgtgaatgagaaaaaggtgaaagtgatgaaagctggagtgcgccaagtcgtcaccggcgtggtcgttaacaagaaaattcaggtcccaagaaacaagcggaaagagattcgccaagccatctattatatcacgaagttcggtctgcagggacacttgtcccgagaaagtgtgaatcggcgtaattacataaatcacctgttgggacaggttagcttcgtgctgtttctcaaccctcttgacaaggaatttatcgggtataaggatttcctggtcatgcagaagcagcaggactcctga

SEQ ID NO: 9744 - RNA, 1026 nt, synthetic construct
  source 1..1026: mol_type = other RNA
atggaactcgaactgtataaacgacgcttcaccgagaaagctcttgcaacaggctattctgccgagaagattgagaggtgccttaaatacgccgaaaaactgctctcatacgacttgcctgtgatttacaatctcgagcacctgtgcgctctcgttgggtatcacagcagctacctattacgtgcagtagaccatccaaacttcttttaccggtccttcaagatcaagaagaacaataaccagtttagggacatcgatgaaccccttccttctttaaaagagatccaggattggatactgacaaatatcctctatcagattgccccctccaagtacgctaaagcctatgtgcccggaacttccctcaaacagaacatcttgtttcaccgagatcaacccatcgtgctgaccatggacataaaggacttcttcccatctgtcaagagaagtcagattaccgccctgttcttccggctcggttatagcatcgccatctcagaccttcttgcgaagttatgttgcctcaatgattgcttgccgcaaggcgcctctacgagtccatatttgtcgaacctgatactggctagttttgatgatgcaatcgcggtgtactgtatccctctgggcattagatacaccaggtacgcagacgatctgacatttagcggtaagtttgattgtgaagtactgaagttgcaagtgatcaagcatttgtcaattcacggccttaaaattaacgagcagaagactcgcattatgcgctttggcgagcggcagattgttactggagtcgtcgttaataaaaagatgcaggtgtccaaggaaaaaaggatggccataagacagcaaatgcacttcattaaacgtttcgggctcgaggagcatatgaaggctcggaagctgagcaaagggaactacgtgcgccatctgctgggaaagatcaatttcatcctgtacataaatcctgatgacctagagtttatcaaatatagagacgacctgctgaagctagggattgaaaaatga

SEQ ID NO: 9745 - RNA, 1026 nt, synthetic construct
  source 1..1026: mol_type = other RNA
atgaggtgggatagctatgaaagaaagtttcgcgacttggcaggtaagtctggggcggcccaggaaaaaattgagagttggctgctttatgcaaaggagctgacatctaacaacctgcccattatttttgatcagacgcacctagcattgctgctcgggatagacaatgagtacctccatagaatgagtaatgccccagagtacttttatcgaaccttttacatacgcaagcgtaacgggaagcaacggcggatcgatgaaccactgcctgacctaaaaaaagtgcaatcgtggatcctcaccgaaattctgtacaaggtgccttgctccaaattcgctaaagcctacgtaccacatacctccattaaagacaactcccggttccaccgcaaccagaagatcgtggccggggttgatctgaagaacttctttccaagtataaagtccggttctgtgctttctgtgttcctgtcaatgggatacaatctgcccactgccgtgtttttaacaaggctgtgttgcttacgtgagagcctgccgcagggagcacctacaagcgcttaccttagcaatttgattatgagacacttcgacgaacagatttcagcctactgtatggaacggaagatccgttacacgagatatgcggatgatctcacattttcaggcgatttcgacgttgctgccttactctataggatcgacggagaactgaagtatcttcatctgcggaggaatcctcaaaagctcaaagtcatgcgcggcggcgatcgacagaaaaccactggaatcgtagtcaatgagaaacagcagctgcccagagagtatcgcatgaagattcggcaagagatccactacatccagaagttcggcctggacgaccatctcgctcacatcggtgagactcgaacccattatctacagcaccttatgggcaagatcgaatatgctttgttcataaaccccaaagacgagaaaatgaaagcctacagagaggtcttgcgcgcatacaggccgagggagtga

SEQ ID NO: 9746 - RNA, 1026 nt, synthetic construct
  source 1..1026: mol_type = other RNA
atgaggtgggatttatacgaacctagatttcgggatctagccgagcggcagggcatcctcgataaaaatatcaatgagtacctcgcttacgcagagaatctatataagaagaacctgccagtcatatttgaccatacccacctgagcctcctcatcgggatcgataacgagtacttgcaccgcatctctaacgcccccaaatatttctatcggacgttccacattaaaaaacgcaatggcaaactgagacgtattgacgaaccactgcccgacttgaaaaaggtacagacctggattctgaaggagatcctgtacaaaatcccgtgctcaaagttcgccaaggcttacgttccaaagacatcgataaaggacaatacacgttttcacaagaagcaaaagattgtgttaaccctagacattaaggacttttttcccagcattaaatccggatacgttctgaatttgttcctttcctgtggttataacctgcctgtagctgtgttccttactcggctctgttgccttaatgagtcactgcctcagggagcacctacgtccgcctatctcagtaaccttgtcctcaagaaattcgattacaacataagcgagtactgcaaaaagaataacatccgctataccagatacgcagatgacctgactttctcaggagatttcaacatcgcctctgtgctgtttctcgtcgacacagaactgaaataccttaacctgaaacgcaacaataaaaaggtgaaggtgatgaggaataattctagacagtgtgtgaccgggattgtggtcaacgacattcaacagttatgccgagagtaccgaatgaagattaggcaagaagttcatttcatagagaaatttgggttggacgatcacttggcgcatatcggtgaacagagggtgaattatgtggaacatctgagtggcaaaatcaactatgtcctgtccgtgaaccccaaagatgagaagatgcaggaatataagaagagcatagacactatcaagtatcagacatga

SEQ ID NO: 9747 - RNA, 1038 nt, synthetic construct
  source 1..1038: mol_type = other RNA
atgatggagtggaacgaatacaaggatagatttaccaaaaaggcagaacaatcaggatacaaagagagctacattgagaaaaatctggcctatgcagaggtgatcgtgaaaaagggatatccaattatctacgacgtggtccatctatcaaagctggtgggcgtttcgtatgagtacattttcaaagtaagcaatgcctctaaatacttttaccgccggtttgagattaaaaagaagaacggcaagaagcggacaatccacgagcctctacccctgcttaaatccgtgcagatgtggatactcaggaacattctggagaagaaagaagtgagcatctatgcaaaagcctacaagaaagaggtgagtctgaaggaaaacgtccgattccaccgcgggcagaaaattgtcatgaagctcgacgtacttgacttcttttctagtatcgaaccccggtttgttgataatttcttccgctctataggctatagcaaaaacttgtccagggttctcacgaatatttgcgtattaaatcatggcctccctcagggtgctcccacttctccatatttgtccaacatcgtgatgtataatctggatagaaagatctcatcctattgccgagtggaaaagatcagatacacccgttatgctgacgatatgactttcagcggagactttaagccggctaagatcatacacttcctgaagaaagagttatccaagctgaaccttgagctgaactacaaaaaaaccaagatcttgagacagaatgaccgtcagaacgtgacaggggttgtcgttaaccaaaagatccagattgatcggacaactcggaacaatttaaggctcgaaatgtacttcaagaagaaaaaccagaagaagcacctgagtaatgcctgtgaagcgggccaagagcgcaaatatttgattgggctgcttggtagagtcaattacggactccatataaacgagaaagataccgtcctgctcaattacaaggaaatcatctatgaagtgctgtcaaggtacaggatttga

SEQ ID NO: 9748 - RNA, 1035 nt, synthetic construct
  source 1..1035: mol_type = other RNA
atggaatggtccgagtataaggataaattcaccgaaaaagccaaacagtcaggttataccgagaggtatatcgaaaaaaacctggcatacgctgaaatcatcgcaaataaagggtaccccatcatctacgatgttgctcatttttccaaattggttggcgtgtcctatgagtacatctacaaggtgtcaaatgccagcaagtacttttatcgaaagtttgacgtcaagaagaaaaacggtaagaaacgggtgattcacgagccactccctttactgaaaagcctgcagatgtggattctgcgcaatattctggagaaaaaggaagtctccatctacgccaaggcctataaaaaaagagtgagcctgaaggaaaacgtccgctttcatcgcgggcagaaaatcgtccttaaactggacatcctgaacttcttcagtagcattgaaagcatttacgtttatgacttcttccggtcgatcgggtataacaagtctgtgtctcgggtacttactaatctgtgtacattgaaccgtggattaccccaaggcgcttccacatcaccatacctgtctaacattgtgatgtataacctcgacagaaagattagcaactactgcaagaaaaagaagatacgttacacccgctatgctgatgacatgacttttagtggcgatttcaaacctgcaggtattatacacttcgtgaagaaggagctgagtaagttaaatctggagctcaactatgagaagaccaaaattctcggacagaatgataggcaaaatgttacgggagtcgtagtgaatcagaagatacagatagatcgaatcaccagaaataatttgaggctggagatctactttcttaagaagaaccaagagaatcacctcaggaacatttgcgaagcgggccaggagtctaagtacctaatggggctacttggaagagtgaactacggcctccatatcaatgagaaggacacagtgctcttgaaatacaaggagatcatatatgaagccctgtcacactaccggacttga

SEQ ID NO: 9749 - RNA, 1032 nt, synthetic construct
  source 1..1032: mol_type = other RNA
atggaatgggaactgtataaagagagttacgagaaggaagcacagaaccacaacttaagcgatgagactatcaagtctaatctcaagtacgcctacaacctgtacaaacagaatgtgcctatcatttacgaccaattgcacttttcgctgcttgtcggtatttcctatgaatacatcctgaaggtcaccaatgcccctaagcaaagctacagacggtttagcattgccaaaaaaaatggggataagaggatcattcatgagcccttaccgactctcaaaataattcaggaatggatactacacgaaatccttaataacatcgatgtgagcccatacgcaaaggcttataggaaaaaggtcagccttaaagataatgtgaagtttcaccggaaccagaagaaggtgctgagactggacattaaggatttcttcgggagtattaaacagaaccaagtgctctccatattcttaaagatcggctacacaatagacgtaagtacgctcctagccaaaatctgcaccctttccggcaaactgccccaaggatctcccacctccgctgcgttgagcaatttggtcatgcgaggcttcgacaaagaaatctcactgtattgtaatgagaagaagatccgctatactagatacgctgacgatatgacattctcaggcgacttcaaggagcagaagctgatcaagaaggtgaagtcttatctgagttggattaggctcgagcttaacctagataagaccaacctcatgcgtaaacacaatcggcagctggtaacaggaataacagttaacgagaagatccaggttaacgttcagaaaaggcgcaaactgcggcaggaagtgtatttcattcgcaagtatggtctgtgctctcatctgcgacatagaggcttcgcagagtacgactcagagatgtacatcaaatccttgattggaaagattgggtattgtctgtttatcaacccaaaagacgaggaatttcgcgagtatttgaaatttctcaagtctgagctctcaaaatga

SEQ ID NO: 9750 - RNA, 1047 nt, synthetic construct
  source 1..1047: mol_type = other RNA
atgaataatgacgagtgggagaactataagaagatcttcgagaaaattgcgcgcaaaaacggtaaatcgcagaactacataaataagaaccttcagtatgcagaaatgctggtgaaaaataacatgcccatcatttacaatgccgaccatctaggactcttaatcggcatcaaaagttcctacttttataaagtgaccaacgaagataagctcttctatcgaaagtttagcattaagaagaagaacggtgatagccggattattcatgagcctttgcccaatctgaagatcatacaaaagtggattttggaaaacatcctatacaagttggaagtctcaaagtttgctaaagcttatataccgaccattagcgtgaaagataatgtgcgatttcataggaaacaaaagtacgtactcaagctcgacattaaagacttcttttcttcactgtccgagatccacgtctacaagatctttaaaaaaatcgggtacactgattccctatctgtgctgctgagtaaactttgcacacttaagggcgtactgccacagggggcctctacctccgcctacctgagcaatttaatattgctggacttcgataagagcgtcagcttatattgcctggagaggtccatccgctatacgcgttacgccgatgatctcacattctccggagaattcgaccacaaggctctgttgaactttatcgactataaactgaaagctctcggcctgaaactgaaccagtcaaagaccagactgcttagacagaatcaggcacaggttatcacaggcatagttgttaatgaaaagatacaagtccctcgggactaccggaaaaggatccgcctggaggtgtactatatcaagaagttcgggatttacaaccacctgaaaagtaatcactctaaggtggacgccaaaacttatctcaaagccttgaacggaaagatcaattattgtctgttcatcaacccaaatgacctcgatatgaagaactacagagatattattgaggacgcataccagaagctttcaatttga

SEQ ID NO: 9751 - RNA, 1062 nt, synthetic construct
  source 1..1062: mol_type = other RNA
atggactgggagtactataagaagaagtactgcctggttgcatttgagaataatatctccagtcacgaaatagaaaacaacctcttctacgccaaaaaattgtacgacagagggttgccaattatttatgacgagattcacttgggtcagctgatcggaattagccatgaatatatgttcaaagtcgccaacgacgcctcctacttctacaaatcctttaggatcaaaaagctgaatggagggagcaggaagataagcgagcccctgcccaatctcaagattatccagaaatggatccttgaggaaatcctgtacaaattgaacatacacccaagtgccaaagcatatgtaaaaggcctctcgatcaaagataacgttaagttccaccgaaatcaaaagacagtgctcaagcttgatatcattcggttttttaacaacgtcaaggaagacctgatttaccgcattttcaaggagattggctactctaaggaaatctcatggttattaacaaggttgtgcatacttaacggcgctctgcctcaaggggcggtgacatcaccttacctaagtaatcttgtgatgctcaacttcgatcggaaaatctattcctactgtaaaaagaaacgcattcgctatactaggtacgctgacgacctgactttctcaggtgagattaacaagcaccatgtcatctctagagtgaagaatgagcttttaaagattcacctgcagctgaatgaaagcaaaattcgggtgctcaaaaaccatcagcgtcagattatcaccggaatcgttgtgaataagaagattcagaccagcatcatctatcgaaaaaagataagacaggaggtgtattacatcaagaagtttggcatctataaccatatttccaagaccctggggataaccgatatcaatacggagctggagctcaaatacctaaagtctctaataggccggatccactttgtcatcttcgtaaacaagtttgataaggagatgagcacttatctgcatgacctgaaaatggtgtatgatgaactgtctaatacacacgaatga

SEQ ID NO: 9752 - RNA, 1059 nt, synthetic construct
  source 1..1059: mol_type = other RNA
atggattggagtatttataagcagaagtacacatcaatggcccttgatcaaggtatagaaaccaaaaccatagaggaaaacttgagctatgctgaggtgctctataataagcagcttcccattgtgtacgacgaggtgcatctagggcagctgactggcatctcacacgactatatgtttaaggtgtccaatgactcaaagaaattctacaagacctttaggatcaaaaagagaacagggggatataggaaaatttccgagcctcttcctaatctcaaaattatccaaaactggatcctaaatgagattctgtacaagatagttgcccacccctccgcgaaggcatatcgcaaggatatctccatcagagagaatgtaaagttccaccgcaaccaggagatcgtgctaaagctcgatatacaatctttcttcaacaacatcagagagaaatatgtctacaggatcttcaaagaacttgggtacaaaaaaaacatcgccaacctgctcactaaattgtgtacgctgtctggatcgttgccacagggtgccgtcactagcccgtacctgtctaatttgatactgcggaaattcgataagaagatctatacctactgccgcaggaagggcattcgttatacacggtatgcagacgacctgagttttagtggcgaatttaacaagagacatctgatttctcgggtggagaacgaacttagcaagttaaagctgaaactgaacaccaagaaaattcgagtgctgaggagccatcagcagcaaattatcacaggtattgttgtgaacgagaaaattcaggtttccaagaaatatcggaagctgatacgacaggaagtatactacatcaataagtacggcttaaacaatcacctctcagtcaaatacaatctcgaagagagcgatgagtttaagaagaccgtctacttaaaaagcctgattggaaaggctgaatacgtgctgtttatcaataagaacgacaaagaaatgccagagtacatcgctctcctccgcaatttgctggtcaaactgaaactggaaaattga

SEQ ID NO: 9753 - RNA, 1095 nt, synthetic construct
  source 1..1095: mol_type = other RNA
atgattttgaactgggaagagtacgagatcgcctttagagagaaaaactctgaactcaatagattctcccagagtgaattggagaacaagcttcgatatgccaagaaaatttatgagaatcgggcgacggtgatatatgacgccaaacacctggcagaacttgtgggggtgaaatattttgaggtctataagatcgccaacagcaatagcaggttcttttataaggaattcctcctgcagaagaaaaatggtggcgagcgtaagatcaaggcccccctgccaacactgaacatcattcagaagtggatttttgagaacatcctggcaaacttgaagtgcagtgtgtactgtaaatcataccaaaaaaacctgtctctgaaggataacgctaaatttcacaggcggcagcccattctcatgaaactggacatcagcagcttttttgataatatcagctggggactgatctacaacatcttcaaaaacctaggatactctgttgaagtctcaaccttgatcaccaaattggtgatgtacactgagaatggcaaggtcaagggcataccgcaaggtgctattacttcacctatgctgagcaatctcgttctaaaaaagttcgatgagaatattggctactactgcgtgaacaataagataagatatacacgctatgcagacgatttaactttctccgggaattttgacacgtacaagttaaaggcttttgtaaacaaggaacttcataagaatgggtttttcctgaataaccgaaagaccaaaattcttaagtccaatgataggcaggtggtgacaggaattgtagtcaatgagaaaatgcaggtttctaggaaatatcggaagaatttacgcctcgagatctatcatctgctcttccgcacccagcagcacttcgaatacaaaaagcttaaaaactacgacgagaagtcaatgtatctcaagacaatcattggcaaagttaacttcgtgctgcaagtcaattccagtgacaaagaattcaaaacctacaagaaagagatctacaagatcatagattccataaacaactcggaactgaacaagaacaattggaattga

SEQ ID NO: 9754 - RNA, 1059 nt, synthetic construct
  source 1..1059: mol_type = other RNA
atgaattgggaggaatacaagaaaaagttcatcgaaagaaacgaactgactaaaagatttagcgaatctgaactgaacgaaaagttgaactatgctaagaacttgcacaataacaagatgcccattatttacaatgtggatcatctgagccgactcatcggcgtttcgtattcagagatctacaaaatcaccaacagcgagtccaagtattactacaaagagttcaagctcaagaaaaaaagtggcgggtttaggaaaattaaggctccactcccgacactgaatataatccagaagtggatcttcgagaacatacttcaaaatacgaaagcctccatttactgcaaatcttattccaaaggagtgtccctgaaagacaatgcaaaattccataggcgccagaacattgtgttaaaactcgacatcgccaacttttttgatgagatctcttacgaggtcgtgtataaacttttcaaggacttcggctactcaaacgaaatagttattgtactagcacgtcttgtgatgtataccaataacaagatcaccaaggggatacctcagggagccagcacatcccccatcataagtaatctgatcttgaagaagttcgataatgaaatcgcttcaatatgtctgaaagagaacattcgatacacaaggtatgcggatgatctgacctttagtggcgatttcgaagtgacgttcatcgaggaaattattaaggagaaactacggttgctgggtctgaagctgaacgccaaaaagagaaagatcttgcacaaaaacaaccggcagattgttacaggaattgtagtcaatgagaaactccaggccccaaggaaataccggaaaaatctccgcctagagctgtactatattctgaaccacagcaagaatcactttaacaagaatggtctgtacaaccatgacgcacgcaagaattatctgatcactgtgcttgggaaggtcaattacgtcttacaaatcaatcctcaggactctgagtttattgacttcaagaagaagctctataagcttttaaccactcagttttga

SEQ ID NO: 9755 - RNA, 1071 nt, synthetic construct
  source 1..1071: mol_type = other RNA
atgaattgggaacagtacaaaaacaacttcatccagaaaaacaagatccacaagaaatttgacgagaatgaattaagcctaaagctgaattacgcgtataacctctacgaaaacaatctgcccattctgtataatgtcgaccatctttccaaagtcatgggaataaataaggagtacctctataaggtatcgaacagcaactttaaatacttttaccgcacattctaccttccaaaaaaaaatggtgggactcggaggattgatacccctttacctaatcttaagctagcacagaaatggatttacgataacattttgctcaagctggaaacatctatttattgcaagtcctacaaaccgaatttttctattaaggacaacgccaagtttcatcgtaatcagaatctggtgctgaaactggatatcaagaacttcttcaagaatatcaggcacaaagatatctaccttctgttcaaagagattgggtataacaatgatatctgcaatttgctcaccaaactggtcattctcaacgacgacaccaaaataaaaaaaattggtatcgctcagggggccattacctctccatcaatctccaatctgatcttaaagggattcgataacaagatagctgaatactgtaagcaatcaaagatcaggtatacccggtatgccgatgacctaactttttcaggcgactttaaccccaataacatcataaacttcgtggaaaagaaccttaataagcaaggcttcgtgctgaataagaacaagatcaagaagatctacaagaatgagagccagatcgttacaggcatagttgtgaatgagaaattgcaggtatccagacagtatcgaaagaatattcggctggagatatatcatctgctgaatcacactaaagagcacttgaacaaaaaagaggtgacgaactactttgagcaaagagagtatattttggcactcatgagtaaaatcaacttcgtgctgagcattaacaagaacgacaaaaagatgatcgaatacaagaacaagctgtataagctgctcagaagtctcgaccgcatgtga

SEQ ID NO: 9756 - RNA, 951 nt, synthetic construct
  source 1..951: mol_type = other RNA
atgaatgttaagtatctcaccatcgagaaactgctgacagattgtaacctgtccaagaaggattttttaaccctttgcgaccttgattctaagtacgtttacgatatcttccttatccccaaaaagacaactggatttcgcaccatccgtgtacccaatgcgcaactgaagattctacagtgttggattaacaagaatgtgttaagtaaggccgatattagtaagttttgcaagtcttatcgcaagaacatgtccattgtgacaaatgccaggttgcacaaaaaccagaaaattgtcctgaagctcgacatcgcagacttcttttcctcaatatcttggagccaggtgtataaaatattcgtcgagctcaatatcaacgaggagatctctgaatactttgctaaactcgtgacgatcaatgatggagaagtgaggctgggaattccacaaggcgcttgcaccagccctacaattagtaattgcattctcaaggactttgacaacaagctgggctcctactgtattaaaagaaagatccgatacactcggtatgcagatgatctgacctttagcggcgacttcaactataagaaagtgatactgttcgttaagaagttgttggacaaattcgggttcaaactcaacaatagcaagatccgggtaatgaaaagcgggcagtcacagatcgtgactggtatacaggtcaacgagaaaatccaagtgccaaggaaataccggcataaccttagactcgagatttaccacatcctgaatcatcctaatgaccacttcaaaatgaagaacttgtacaattcagccgaaaagtcccagtacttaaaatcggttctggggaaagtcaactatatactgcaggtcaataagaaagacggtgaattcatcaagtataagaacctgctacataaaatcttggtggaagtgctgacgatttga

SEQ ID NO: 9757 - RNA, 1041 nt, synthetic construct
  source 1..1041: mol_type = other RNA
atgaatgataagcagtgggaggactataagtccaaatttatcgagctcgctaagttaaacaacaagacacagaagtacattgaccagaatataaactacgcctttaacctgtttcaaaaaggcctgcctatcatctatgacacgactcatctcggtctgctgaccggaattaaaaaggagtatatctaccttgtggtcagttcaccccgacactattataggcacttcaagataccaaaatcaaacgggttcctgagagagatcgacgagccccttcccaatctaaaaatcatccagaagtggattctcaataacattcttcagaacgttcccgtcagcccatacgccaaagcctacttgcacaaaacaactctgatagataatgccaaattccacaagcggcaaaagatagtctataagctggacatccaaaacttttttccgagcatctcctctcacatgatttacaactttttctgtgaagcaggctacgatctcaaactgtccagggttctaagccgtattgtaacattgaataatggcttgccacagggagctcctacctcaccttaccttagcaatattatcttcaaggagatcgatctgaagattgcaaaatattgccagcagcataaaatcagatacaccagatatgcagatgacttgaccttctctggagacttcaactacaataaactgaagacctttgtggaatggaacattcagaagtcgggttttaacttgaacaacagcaaaacgaagatcttacctaagaataaacgccaaattgtgacagggatagtggtgaatgaaaagctgcagatttctaagaatgagcggaaaaagattaggcatgaactccattacctcaaacttgatactaacaaacacctcagtctgcgcgcgaacaacgagaaggctcaaataaagtatctgcagcagctgctgggcaagatcaattacggactccagattaatggcaaatccaaggaactactgttagggaagatcttcatccttaatatcctgaaacagttctga

SEQ ID NO: 9758 - RNA, 1089 nt, synthetic construct
  source 1..1089: mol_type = other RNA
atgatgtcctcctgcttcttctttgcgaaggaaatgaactgggaaaactacgcgacctctttcgagaatgccgccttgtccaacaactttgacgcaagttacgtaaaacgttgtctggcctatggcaaagttctgttcgataagtcactgcccattatttattcactggaccacctggctaatctcgtgggctacgactccgaatttattgttgcagtgagttttaggcagaatgggtactatcggaacttctttatcccgaagaagtcaggagactatagagagatcagcgagcccttaccttccctgaaaatcatccaacgatggatcacagagaatatcctgtataggataagtgccagccggttcgccaaggcttttgtgccaaccaggtctatcaaagataatgcccgcttccacaaaaatcagaagcttgtgctgactgtcgacatcaaggatttcttcctgtcgttgtccagcaaattagtgtacaagttttttctcggctgtgggtatagtaaacgcgttagctacttcctgacccgtctgacgacactcaacggatcgctaccacagggagcccctagctccccctacttgagcaatctcctcttttctgaaagtgacgaggaaatttccacattttcaagatcagaagctattcgctacactcgatatgcagatgatctaaccttctctggcgatttctctccctgcaaaataatcaccagggtccggcgggtgctgggtaagttggaccttaggattaacgaaaagaagacacgtgtgatgaagcctcaccagagacagatcgtgactggcatcgtcgtcaataacaaattacaggccgtaagagagattagacgcaaccttcgccagaacatacattatatagagaagtttgggttcgagtaccatgtggctcgaattagggagcaccgggctaattaccagtttcatctcatgggtcaggccaattttatactcttcatcaacccacgggacaaggacgctattttcgcactggaagtccttagaaaaaacctgcaacacagcgcaaatagcgagtctcaacatgataacaattga

SEQ ID NO: 9759 - RNA, 1047 nt, synthetic construct
  source 1..1047: mol_type = other RNA
atgaactggatcgattaccagaaggaattcactgccaaaagtatctccgctggctataagaaagactacatcgaaaggtgtctcacctatgcccaccggctctacgagcgcaatctcccgattatttatagtcttgatcactttgcctccctggtgggttatgagaaaagctacctgaactacattgcttatcgccagaaccctttttacaggaatttcgagattccaaagaagtcatcgggaaaacgagagattagcgaacctctccccaatttgaaaaaaatccaaaggtgggtccttgacaatatcctgtatcgggtcagcccttcccaatacgccaaagctttcgtaccaggacgctctataaaagcaaatgccagatttcataggaatcagaagatggtgctgaccctcgatattaataacttcttccctaggctgagctctaagctcgtgaagcagttcttcacaaagtgcgggtattccaagaaggtcacttattacttgacccgactgtgtgttctgaacggcggactgccacagggtgctccaacaagccccgcactggcaaacttgatgcttaaagatttcgacctaaatatcgccaagtactgcaagagtaaaaccataagatatacgagatacgctgacgatctcacattttccggcgtattcgcggaaaatgagctgataaaacaggtgaagaaggaactaaaaaagattgacctggaactgaagaacagtaagacccggcttatgcttaagcatcaacgtcaggaagttacagggatcgttgtgaataacaagctgcaagccccccgagagttccggagaaatttaagacaggccatcttttacatcgagaaatacggcttggagaaccatttggcaaaattaaacgagtttcgggcgaactatgtgtcacacctattagggcaggctaactttgtgctgtttattaatccccgcgatcaggatgccctgaaggcactggagatactcaaagactgccgttcttctaactttatgatcacttcagacgactga

SEQ ID NO: 9760 - RNA, 981 nt, synthetic construct
  source 1..981: mol_type = other RNA
atggactgggaaatttacagctcccgattcgccaaagccgcacaggacaggggtgatcactatattgagcggtgcctggcctatgccaagcgcctcaacgatcaatcactgcctatcatttatagcccagatcatctgggaaaattgacaggctatgaccccgcttatctaaggtacgtggcgtacaaacagcgaagtttctaccgcgagtttagcatccctaagaagagcggcggcgtgcggtctatctctgagcctctgcctaacctgaaatccatccagcagtggatactgacttcaattctctacaagctcgaaccctccgtctatgccaaagcctttgtgccgcagcgctcaatcaaagaaaacgctcgtttccatagaagccaggaaatggtgtttacggttgatatacgggacttcttcccctccctctcagtgaagagaataaacaatattttcctctcccttggctatgagcggcgcgtggcttactacctgaccaggctgtgcagcttagatggaggtcttccgcaaggagcacccacttcgccagccctctctaatatcattttttccccaacagacaatcgtattgcgaaatattgtaccccactgggaattcgttacacgaggtacgcagatgacctcaccttttcggggaatttttctgtgagtgatctgttgaagatcatccgacgggaattgtctgctcttgagctaacactgaatgacagtaaaaccagattgatgaagaagcacgagaggcagattgttactggcgtagtagttaatgagaaattaaatgccaccagagaactgcgccgcgggctgagacaaagcgcatattacatacagaagtacgggctggagaaccatatcaaccggatcgacgagaagaggggcaactacttactgcacttgatcggtcaggctacacttggggtcagtgaattcctttgtaagagagacttcgtctga

SEQ ID NO: 9761 - RNA, 1062 nt, synthetic construct
  source 1..1062: mol_type = other RNA
atgaattggaacgagtataaaaacaagttctactacttcgccaagttccataataaggacgataattacatcaacgactgcattaattacgcagagaaactcttcagtaaaaacctgcccgttatctatgacgtgacgcatttttcctatttagtgggctataaggaatcatacattatgaaagtcgccaactcccagtcaccattttatcgcgagttcctcataccgaagaagaataaggacgaatacagggagatctccgagcccctccctaatttgaaggtgatacagcgttggatcctggacgaaatacttcacaagctgaatcctagcccctttagcaaagcattcagaatcgggtattctatcaaagataacgcgaaatatcacagaaaacagaagcttgttctgaacatggatattaaggactacttcaacagcatctcaaacgacaaggtattcatgttctttaaaagcctcgggtatagtaaacaggtggcattggtactgtcaaaactctgcattctggataacggactccctcaaggggctccaactagtcccatgctgtccaatttggtgacacaacaaattgataaacgcatcgctagcttttctgctaagcataatttgcgatatacccggtatgccgacgatcttactctctctggcgactttgacgaaggatttgtcattaactgtgtcaaaagaatcctgaacagtgaaggcttctgtataaatgagaagaagacccgggttaggaagcagaatcagcagcaagaagtgaccggtattgtggtgaatgagaagctgcaggcctctaagaaataccggaaaaatctgaggcagaagatgcactacatcaaaaaatacggattcgaagatcacataagcaagctggagattgacaacaagatcaagtacctttatcatctgctgggtacagctaactttattctgaatgtcaacccatacgataaagaggccaaagattcctttgagtacttaaagcagctactattccactacaagttaaagacatccatctcggaatttgattga

SEQ ID NO: 9762 - RNA, 1062 nt, synthetic construct
  source 1..1062: mol_type = other RNA
atgaactgggacgattataagaacaggttttatcatttcgccaaatacgacaataaggacgataactacatcgactcttgtttgaattacgccgagaagcttttcctgaaagacatacccgtgatatacgatgtgacccatttcagtaaactcgtcggctataaagaagcttatatcatgaaggtgtcgaattctcagggcagcttttaccgcgaatttaagattccaaagaaaaagaagggcgaatatagagatatttacgagcctctcccaaatctcaaaaatatccagaggtggatcctggacgaaattcttaacaagctgaaaccttcaccttatagcaaagcatttcgggtggggtattcaattaaggataacgccaaataccatcggaatcagaaaaaattgctcaacctcgacattaaggactatttcaagagcatcggctacaaaaaagtctacaactttttccggtccctgggttacagcaagcacgtatcagttgtgctggctaatgtctgcacgttggatgatgagctaccccagggcgccccgacttctccaatgctgtccaatcttataacacagcgtctagatctgcgaattgctaaattcgcgagcaagaacaaaatcagatacactcgctatgcagacgacttaacattcagtggagactttgaggagggaattgtgatcaatttcgttcggaaggtgctgttaagtgatgggttccttatcaatgagcagaaaaccagagtacgcaagcagaatcagcaacaggaggtcaccggtatcgtggttaacgaaaaattgcaagcatccaaaaagtataggaagtccctcaggcagaagatatactatatcaagagatacggactggaagaccacatctctaagatcgaatttgacaacaagattcgatatctctatcacctgcttgggacagctaactttattttaaacgtcaaccccaatgatgaggaggccaaggagtacttcaactacctgaagcagctgctgtttcaatacaagttgaaaaagctggatcaagaggtggaatga

SEQ ID NO: 9763 - RNA, 1041 nt, synthetic construct
  source 1..1041: mol_type = other RNA
atgaactgggaagtgtacagggacaacttttatagctctgccaaaacaaaaggatacaaggagaattacatcaacaggtgtctcgagtactcaaaaatcttgttcgatcagaagctgccaatcatatacgatcaaaagcacctgtcgctgttaattggctatcaggagatctacctcattaaggtcagcaatagtcaggaacctttttatcgcgagtttaagatacccaaaaagaacaagaacgaattccggaaaattcacgagccgcttcccaacctgaaaaatattcagagatggatcctggaagaaattctcaatatacttgagccctccccttattcaaaagggttcagaaagggctatagcataaaggataacgcacgattccataagaagcaaaaaaaggtgctttcaatcgacattgagaactacttcggatctatcagttacgacatggtgtattccttcttccgcaacttagggtatagtaaacaggtgtccgtaatgctggccaatctgtgcgtccttgagggcaggctccctcaggggtcaccaacctcccccatgctatccaacttgatcaccaagcgactggataatcggattggtggatacgcgaagaaaagggggattcgttacactaggtatgctgatgacctgacctttagcggcgattttaacgaaggcgcattgatcaattttgtcaagaacgtctttgagtctgagggttttgtcatcaatgaaaaaaaaacccgggttcgcctgcagagccagcaacaagaagtgacaggtattgttgtgaatgagaagatgcaggcttctagaaaatatagacgggagtttcgcacaaagatgttcttcatcaaaaaatacggactagacagtcatctcgactatgtggaagaagagaagaagatcgagtacgtataccacctgctgggcactgccaatttcatcgtgaatgttaacccaaatgacttggagacgcgtgaacattatatttacctgaaggagttactctctgacctcaaaaagagctga

SEQ ID NO: 9764 - RNA, 1035 nt, synthetic construct
  source 1..1035: mol_type = other RNA
atggaatgggaggaatacaagtccaaattctaccattatgccagttttgagggcaaggatcccgattacattgataattgcctcaattatgcagagaaactgttcaacaagggcctaccagtgatatacgaccagctgcacctgagcttacttgtcggctatgaggagatctacctcataaaagtgagcaattcgcaggatagcttctaccggaagtttgacattcttaagaagaataaacgcgattaccgaaccattagcgaacctctccccaaccttaagaatatccaacgttggatcctaagcgaaatcttgtccaagctgaaaccttcagagtactccaaagcctttaggcctggattatcaataaaggacaatgctagattccatcgtaaacagaaaaaattgctcacagtggacatcaaagactactttggttctatcgacttcaagaaggtgttcatattctttcgaaacctgggatatagtaagcaagtgtcagtgatgctggcaaatatttgtactctgaacaacggcctcccgcaaggcgcaccaacatctccaatgttgtctaaccttattacgaaaaacctggaccagaggatcgccgggttttccaagaaaaataacctgcggtatacccgctatgcggatgatttgacattctcaggagacttcaacgaagggcacgttatcgaattcgtaaaggaggtctttaagagtgaaggttttactatcaacgattccaaaaccagggttcggaaaaggaaccagagacaggaggttaccggtattgtggtcaatgagaagatgcaagcttctagaagctatagacgcgactttcggcagcagatgtactacattaagaagtatgggctcgatagtcacgtaaataatattgaaggcggagacacactgaaatatctgtatcatctgctcgggatggccaatttcatcatcaacattaaccccaacaatcaggagactaaggaggactaccactacttaaaagatctgcttcagaagctgaagtga

SEQ ID NO: 9765 - RNA, 1032 nt, synthetic construct
  source 1..1032: mol_type = other RNA
atgaattgggaggagtacaagtttaaattctaccactatgcttcctttaacggtaaagaccaggactatattaacagttgtcttaactacgcagaaaagctctttaataaaggcctcccggttatatatgatcagttccatctcagtctgctcgtgggctacgacgaaaagtacctgataaaagtcagcaattcccaggagctattctaccgcgaatttaacatcctgaagaagaataagaaggactatcggacaatcagcgaacccctccctaatctgaaaaacatacagcggtggatcagcaaggaaattttgtctaatcttgagccctctgaatacagcaaggctttccgcacggggtattcaatcaaagataatgccaagtttcacaggcgtcagaagaaagtgttaactatcgacctgaaagactatttcggatccattgactataagaaggtcttcaccttttttagggacctgggatattcaaaaccagtatccgtgatgctcgccaaaatttgcacattgaacgatgggcttcctcaagggagtccaacctcgcctatgctttccaatttgatcactaaaaacctggatcatcggatcgcaggcttcagcaggaagcagaatattagatatactcgctacgctgatgatttaaccttcagcggcgacttttctgaggggtacgttatcaagttcgtgaaaatgattctgaacagtgaaggattcacactaaatgattcaaagacccgtgtcaggaaaagaaatcaaagacaggaggttacaggaattgtagtgaacgagaagatgcaagcctcacgaaaatacagacgggactttcgcaaacgaatgtactatatcaagaagtacggcctgaactctcacgtggagaaaatagaggccggtaattccttgaactacctgtattatctgctgggtatggcgaatttcatcatcaatattaaccccaacgataaagcaaccaaggaggattacaactacctgaagaacctcttactgaagtcttga

SEQ ID NO: 9766 - RNA, 1068 nt, synthetic construct
  source 1..1068: mol_type = other RNA
atggtgataggattgaacgaaaatggcgatatcatgaagtgggaggaatacaaaaagaagttctaccactatgccacgtataatcagaaatcagaggagtatattagctcttgcttggactacgctgagagactgttcatgaaggatttgccagtaatctatgatcagaaacatctatctcagctcgtgggataccgcgaagagtatctgtttaaagtggctaacgcatcagagctcttttacaggaacttcaaggtgctaaagaaaaacaagaaggactatcgcgagatttcggagcccctccctaatctcaaggacatacagcgatggatcctggaccagattctgtacaaacttgaaccgtctgagtacagtaaagcgtttcgtaaaggtgtcagcattaaggacaacgcaaaatttcacagaaagcagaagaaagtacttaccattgacatcgagaactactttggcacaatcaaattcaaagccgtcttcaagttttttaagtccctcggatacacaaaacaagtgagtatgatgctggccaaactctgtgttattgatgacgaattaccacagggggctcccacttcccctatgcttgctacactgatcaccaagaatatcgataagcggttatccgcgttcgcaaacaaagaaaagatccgatataccaggtatgccgacgatctgaccttttcaggcgatttcaatgaaggttacgtgatcaaatttgcagagaaggtgataaactctgaggggttcaaggtgaatccctttaagactagggttcggcttcagcatcagagacaggaagttaccggcatagttgtcaatgagaagctgcaagccagcagacagtaccggaggaagttccgtcaaaatatgtttttcatccggaagttcggcctggaaagccacatcatcaatatcaacgtgtccgatcctaaaagttacgtctatcagttgattgggacagccaatttcattcgcaacattaacccaaaggatattgacgtccaagtggactatgaatacctgaaggagctgctgcaaacttataaatga

SEQ ID NO: 9767 - RNA, 1044 nt, synthetic construct
  source 1..1044: mol_type = other RNA
atgatttgggaaaagtataaacgcaatttcactgaatcagctttgaaagcaggatacgatagcatgtacattgaagaaaacctgaaaaaggcacactccttgcatttacaggggatccccataatctacgatcagatgcacctgtcatacctggttggttatgacatcgagtaccttctgaaagtctctaacagccaaaaggggttctacagatacttcaagattccgaaaaaaaacgggggcttccgcaacatcgccgagccattgcctaaccttaagtctattcagaaatggatcctggaagaaatgttatattcttgcaagacttccgaatttgccaaagcttacaagaagaatgtgtccttgaaggacaacgccaggtttcatcggggccagaagatggttctgactatcgatatcaaagacttctttggatcaatcaggcacatagatgtctataatttctttagctcgctcggatatagtcaggatgtggcaaccctgctgacaaatctctgcaccctcaaaggtgcgctaccccagggcgccataacatctcccgccctcagtaacctgcttatgaaagacattgacaagagaattagtgcgttttccaagaaaaagaagatccgctatacgcgttatgccgatgacctcacattcagtggcgattttcaggtgggtgagattattaaatttgtcaccaccgtgttaagaagcaagggcttttcaattaacgataagaaaaccagggttaggttccctcatcagcggcaggaagtgacgggcataattgtgaaccaaaagatacaagctccatgtgagatgcgaaaagagctgcggaagaacatttactttatcaagaagtacgggctgaattcccacctcgagttcatcaagaaagacaaatatcagtatctgaagcacctactgggaatcgctaatcatatctacttcatcaatcctactgacagccgagtatacgagtacctgaattatctcaaggagctttggcaagtagagaaaatcacaagcgaggactga

SEQ ID NO: 9768 - RNA, 1017 nt, synthetic construct
  source 1..1017: mol_type = other RNA
atgaactggaaatcctactctgaagcattctccaaaaaagctaagcagaataagtacgatcagaattacatcaacgaatgcctcggttacgccaaacctctgttcgagaagaagattcctattatctataaccaggagcatctcagcctgctcgtggggtattctgaggaatatctcttgaaggtatctaacgctagcgatcggttttacaggaatttcagtgtccctaaaaaaaatggttctagccgacagatatttgaaccactgcccaatttaaaggatatccagagatggattctcgaagagattctctataagtgtcccatcagcgactacgccaagagttatgtgccccggcggagcacaaaggataatgccaggtttcataggaggcaaaaaaaggtattgactctggacataaaagattttttcccaagcatcaggttccacaaaatttacctgtttttcttcaaccttggatacaccgaatcacttagtatgatgctggcgaatctctgctgccttaacggatcattaccacagggggcaatatcctcgccggcactttctaacctgatatttaagtcattcgacaagagaatcagtgtcttctgtaagtcaaataacattcggtatacgcgatacgccgacgatctgactttttccggcgactttcaaccagggatgctgatcaagttcgtcgagaacatcctagtgcccgagggctttcagctgaacaacaaaaagacacgggttagactgcaacaccagcgtcaggaggtgaccggcattgttgtgaatcagaaactacaagccccgagaaaaatgcgtagagagttgcgccagaagatacactatatcgaaaaatatggactggactcccatttagagcgctcccagattacccgcgtgaactacatcaaacatctgttgggcattgctcactatatccgccacattaatcctggcgacgagaagatcaatagctacatcgaaaagcttaaggcttacctgtga

SEQ ID NO: 9769 - RNA, 1017 nt, synthetic construct
  source 1..1017: mol_type = other RNA
atgaactgggaaacatacagagtcaacttcacactgcgcgccaaggagttcgagtatgatgaagagtacattaacaaatgcctgcagtacagtaagaacctgtttgacagatcccttcctgttatctatgaccagcagcacctgtcagccttacttggctacaagtactccttcttattaaaagtgtccaattctgcgaagaacttttacaggaattttgctattagcaagaagaacggagggttcagaaaaatctcagagcctctgcccaacttgaaggaaattcagcggtggatcctcgaagagatcctctacaaaaacaatgttagcgagtttgcaaaggcttacctcaaaggcaagtcaatacgagataacgttcggtttcaccgggggcaaaaatatgtcattaccatcgacatcaagaatttcttcccatcgattagcgaagagaaggtcttcgtgctcttcattgagatgggttatagtaaaccagtaagcgtgatgctcgctaaattgtgttgtctaaacggcaagctcccacagggagcagtcactagtcccatgctgtccaatatcattatgaaacgcctggacaaaaggatagccgcatttgccgtgaagaatcgcgttagatatacgcgttatgcagacgacctgactttctctggcgatatcgagcccgggaaggtgatcaatttcgtgaaaaaggtgctcgatgcggacaattttaagatcaacgattccaaaaccagggtgatgacaaagaatcaacggcaattggtgaccggatctgtcgtgaatgagaaactgcaggcccctcgagaagtaaggcgtaagatccgccaggaactgtactatataaagaaatttggcttggcctctcatctggagaagctgaatagctataaagccaactatctgaagaggctgcttggtttgattaattactgccttctacttaacccgaaggatgctgagctgataaaagggaagaactacctcaaagaactgctatga

SEQ ID NO: 9770 - RNA, 1056 nt, synthetic construct
  source 1..1056: mol_type = other RNA
atgaactggaacgaatacgagaataactacattcggctcgctaagctgtcagggaagagcgatgagtactgcattaaacagctcgagtatgccaagcatctctttgaacaagacctgcccgtgatttatacccaggaacacctatgcagactagtaggttacgcgactgagtacgtctatgccatctccaacagtgcatcttgtttttaccgcaccttctcaatcaagaagaaaaacgggaaggaaaggatcataaatgagcccctgccgtctctgaaagagatccaggactggatcctcaaagagattcttgaaaggataaacatcagcccatacgcgaaagcctacgtgaagggaagatctattaaagacaatgctagattccacaaaaggcagaacaaagttctgacaatggacttaaaggacttttttccttccattactttcggtcgagtcctgaatgtctttcgtaaagtggggtacagggaaaatgtagcagtgatgttggcaaatctgtgctgtcttcataatgaacttcctcagggcgcccccacaagtccagccttatccaatatcatagtcagcggattggattataagattgccgagttcctgaaaggcaaagagattagatacacccgctatgccgacgacttgacattctcaggcgacttcattgaaggagacattattaaaagcatcgagcgcatcgtgtgtcggcaaggtttcaagatcaaccatagcaagactagaatcaggaagagaaaccagcggcaggaggtgacgggggttgttgttaacgaaaagctgcaggtgaatcgcgaactgcgacggcgaatacgcagcgatgcttattacatcgagaagtacggcttctattcccacgtggattatacctcgcaaaatcgttccaactacttgtattatctgataggcatcgcatcatacagtctctttatcaacccttacgatgataagatgcgggagtatctcgagatctttaagaaagaacttgctaggtgtaagcaggagggagtcgatgtgtgctctccatga

SEQ ID NO: 9771 - RNA, 1044 nt, synthetic construct
  source 1..1044: mol_type = other RNA
atgaaatggaacgaatatgagaacaatttcatccagattgccaaaatgcaaggcaagacagaggagtattgtatacagcagctcgaatatgccaagaagctctttgctaataacttccctatcatttacaaccaggtacacttctgcaagctggtgggatacgctgaggagtacgtgttttcagcatgtaatcagcctaaatcattctatcgcacttattacatccctaaaagaaatggcaagaagagggagatcagtgaaccactaccctccttaaaggaaatacagaattggatataccaggagattctttgtaatgtgaaagtctcttcctacgccaaagcatacgtgaagggaaaaagcatcaaggacaatgctcgctttcacaagagacagatcaaagtcctttctatggacattaaagatttctttccctccattggctttaagcgtgtgctgaatgtattccggaacataggatatagggaaaacgtggcagttttgctggcgaacctgtgctgcctgaacaattccttgccgcaaggcgccccaacaagcccagttctgtctaacattatcactagcaagcttgacgacaagatagtgaactatgtctccaaggaacggatccgctataccagatacgccgatgatttgaccttcagtggggatttcaatgaaggggacgtaatcaaaaacgtcgaaaggatcgcgaactcactggggtttaaaattaatgaggagaagacacgggtgcgtaagcggaaccagagacaagaagttacgggcattgtggtcaacgagaagatgcagttaagcaggaaaatcaggaagcgaatcagatcggatatgtactacattcaaaagtatggtgtcgagtctcatctggagcatatcggagaaagccgcgagaattacctgtatcatatgatgggtctggttagttacgctgccttcattaacccctatgatgagaacctaaagaaataccgactctttctcaaagaggaactcaataaacacgtggcactggtggacaattga

SEQ ID NO: 9772 - RNA, 1017 nt, synthetic construct
  source 1..1017: mol_type = other RNA
atgaaatggagcgactacgcaagcaaacttattgaggaagccatcaagcttgattacactaaagaggctattgatgaatacttgtcttacgccgagcacctccaccgcgcgaaattgcctataatattcgaccaaatccacctgagttttcttgtggggtataagtacgaatatctgctcggagtgagcaacgccccccagtccttctacaagattttctacataccgaaaaagaacggagaagtcaggactatctctgaacccctgaccagcctgaaagagattcagagttggattctgaaagagattctgtataagtgcaaagtctcttccaatgctaaagcctatgtcattggcaaaagtattagggataacgcccggttccacaagaaacagaataaggtgctcaccatcgacatcgaagactttttcccctctatcaagataaacaaggttatcggcgtattcaggagagctggttatagcaaggcggtttcaacattactagctagactgtgttgtacggataatggcctcccccaaggcgcaccaacatcccctgcaatatcaaacctcgtaatgtattacctggatatgaggatctttgggttttgcaggaagcgcgccatacgttataccagatacgctgatgatctaacattttccggagacttcgatgacaatgaactgatctcattcacacgctcgatcctcgaacgtaagaacctgtttatcaacaaccagaagaccagattacgaaagcgacatcagcagcaggaggtgaccggagtcgtggtgaatgagaagctgcaggtgccaagagactatcgcgagcggtttcggcaagagttgtatttcatcaagaaatacgggctggttggccatgtcaaacatattaatgcaggggatccagaccggtatatccgggtgttaattggtaaggccaattttatttcccagattaatcctaacgacacggagatcaaagactacctgaagatcctttacactttgtga

SEQ ID NO: 9773 - RNA, 1041 nt, synthetic construct
  source 1..1041: mol_type = other RNA
atgaagtggattgagtacaagtcaaagttcattgaagtcgcacagaagaataataagaacaagaagtactgcgatcgatggctgaaatatgcgcggaatctatgggagagggacgtgcccatcatttatacgcaggaccacctctgtgccctgctgggctacgaacctacttatgtatatgcggtgtccaactccccacacaatttttaccattgctaccagatttccaaaaaaaatggagggaagagatctatatctgaacccctgcctaacctcaaagaaatccagcgttggatcctcgagaacatcctttatcgctttgaagttagtccttacgctaaagcctacataaaggataagagcatcaaggacaacgttcggttccatcgaagacagcgtaaggtactgtcgctggacgtgaagaacttctatgaccatttaaccgattggatggtctatcagcttttcattgaggtgggctattctgagagcgtggctatgatgcttacaaacctgtgttgcctggagggatcactgccccaaggtgccccaacttccgctgccctcagcaacatcttgatgaaagacttcgattacaaaatcggggccttctgtaaaatgtacaagattagattcacccgctacgcagacgatatgacatttagtggtgacttcgacgaagtcaaggtgattagctttgtcaggaaatctctgaaagatttgcagcttaccatcaatgatgccaaaacaagggtgcggaaacaaggccagcagcaggaagttaccggcattgtcgtgaactataagccacaattggctaaatcagtgaggaagggcattcgcaaagacgtttactacatcaataaatacggactgcaaagtcacctaaagtatgtgcaggaggaaagaagcaattatttagagcacctctttgggctcataaactacgcactgtttatcaatccgaatgatgaggagatgaaacggtataagatagacatcaagtacttgatgaagaaggagaacgatgagtttaaatga

SEQ ID NO: 9774 - RNA, 1029 nt, synthetic construct
  source 1..1029: mol_type = other RNA
atggaatggattgaatacgaattgaagttcgccgaaatcgccaagaaacataataagtctcagaaatactgcaagcgctggatggagtatgctaaaaaactctgggatagaggcctgcctatcatattcacccagaaccacctatgtgctctgttaggttaccagcccgtgtacgtttacgcagtatcgaacgccccttgcaatttctatcactactataaggtgcagaaaaaaaacgggggcacccggaatatctctgagcctttacccaatcttaaggaaattcagcgctggatcctggaaaacatcctctacagatttgagattagtccatacgcaaaggcctatgtgaaaaacaggagcataaaagacaacgttcggtttcatagaaggcaacgaaaggtcttgtcccttgatgtcaaagatttcttcggccacctcactgactggatggtctatcagctcttcattgagagtggctatagtgaatcagtcgcaatgatgctgacaaatctgtgttgtcttgaggggtccttgccgcaaggagcaccaacctcagcggcgctgagcaacatcctgatgaaggacttcgactacaagattggagacttttgcaagatgtttaagatacggttcactcgttacgccgacgatatgacatttagcggggatttcgatgaaactaaggtgatctcttttgtgaagaagaatcttagggacatgcagttgacgattaatgacgctaaaaccagagtgcggaaacaagggcagcagcaggaggtgacaggcattgttgtaaactataaaccccaactggctcgctccattaggaaggatatccgaaaggatgtgtactatatcaaaaaatacggtctgcagtcccatctccagtatatccaagaggagcgttcacactacctagagcacctgtttggactgataaactatgccctctttattaactctgacgacaaggagatgaaacgctataagatggatatcaagtacctgatgagcaatgagaagtga

SEQ ID NO: 9775 - RNA, 1053 nt, synthetic construct
  source 1..1053: mol_type = other RNA
atggagtggaacgaatataagattgcatttatcgaagctgcacgtaaaagtggcaaaaacaacgcttattgtgagaaatacctgaattacgctgagcagctctggatgcatcatatgccggtaatttatactcaggagcacttatgcgcattgctgggatacctgcccacctatgtttacgcggccgccaacgcccctgaggacttttataggcaatttctgattcccaaaaagaatggtggaagcaggatgatcagcgagcctctgcccaatctcaaagagatacaggagtggatccttaagaatatcctgtacaaagccgagatctccacctacgcgaaagcttacatccccgggaagtctgtcaaggataatgtgcgcttccatagacgacaaaagaaggtgctttccctcgatataaaggccttctatgaccacctcacagactggatggtctttcaattcttcatcgagaagggctataacgaagctgtggctatgatgctcactggactgtgttgccttcgcggttgcttgcctcagggagccccaaccagcgcagcacttagtaacctgttaatggtcgagttcgatgaaaaggtgggcctgttctgcaaggaaaaaaagattcggtacacacggtacgccgatgacatgacattttcaggtgatttcgacgagctggaagttatacgctttgttcggcaggaactcaaatccattggactgagactgaacatgaaaaaaacaaggacccgtaaacaagggcagcagcaggaagtaaccggcattgtggtgaattacaaaacgcagctacctaagtctatcaggaaggaaatcagaaaaaacatgtactacatccagaagttcggcctggagtcacacctcgaatatattgggttggagtgtcgaaattatcgcgaacacttactaggccagatcgggtatgccttgttcatcaatccaaaggaccaagagatgaagagatacaaggagattattcacgacgtggacatatgctgtaaaaagcagactccagatcggtttgtctga

SEQ ID NO: 9776 - RNA, 1029 nt, synthetic construct
  source 1..1029: mol_type = other RNA
atgaattgggacatctataaagagaacttcatacacgaggcaaagaaacaccataagaacgagaactacattaataagtggcttgagtacgcccataatctgaacagtaagaaacttccgataatctatgaccaaaatcacctatgtgagctgatcggcttcgataaaaactacgtatatgccatctctaatggaggcaaacatttttaccgtacatttgagatcaagaagaaaaacgggggcacaagaattattcatgaaccactgcccaatttaaaggatattcagcactggattttgaagaatatcctcgactatgtggaagtttcaccctatgccaaggcataccggaagggatatagcgtgaaagataacgtcaagttccaccgcaggcagaagaaggtactgtgcctggacattcacagcttctacgattcattgaaatccaatctcgtgctggatgtgttcatcgaattgggctacaagaacgatgttgcgatcatgcttaccaatctgtgctgccttaactataaactacctcagggcgctccaactagcagttccctcagcaacataattatgaaaaacttcgactactccgtgtctgatttctgtaaggataatgccatacggtatacaagatacgctgacgatatgactttttctggtgactttgacgagatcaacgtcattaggttcgtcaggaacgaactcaaaaaaattaacctgcggttaaacaatcagaagacgagagtccgcattcagggtcaacaacagttaatcaccggaatagtggttaatgagaagacccagttgcctaagaaaaaacgcaaagagattaggcaaaccatgtactacatcaagaaatacgggatcaacgagcatatgaattttaagaacatcgacaagtcctactatctcgaacacatcatggggattgtgaattatgggctgtttctgaatccccgagacagtgaactgatcgaatatcgatcgatactccaggtgctgaagaattcacaggactga

SEQ ID NO: 9777 - RNA, 1029 nt, synthetic construct
  source 1..1029: mol_type = other RNA
atgagtgaagagaagaagtgccctcagatcggcagaccacgggagctgtgtagtttattgggacacaaagcagaatacgtttatggcattgcaaacgagacacataaatactatcagcattcccgcataccaaagaagagaggagggtttagggagctctatgagcctttgcccgagctgaaaaaaatgcagacatggatcctgcatcacatcctcgatctgttagagcccagcccctacgccaaagcttatcggaagggttactccgtgaaagataatgcgaagttccatcgaagacaaaaaaaggtcctctctcttgatattgaaggctttttcgatcacatacgcaggtacccagtatttcgggtttttctggatgccgggtacaagaaggacgtcgcaatgctcctggccgctctttgttgccggaatggatgtctgcctcagggggcccctacgtcagctgctttaagtaacctggtgatgctggggtttgatgctaaagttggcgccttctgtagagaacgcggaatccggtatacaaggtatgcggacgacatgactttctctggtgacttcgaagaaaccgaagccatccggtttgtgaaagaagagtgcggaaagttgtctatgaagctaaaccgtgagaagaccagagtaaggaaacaaggccagcaacaggaagtcacaggtatagtggtgaacgaaaagactcagttgccggagagcgagcgcaaaaaaatcaggcaggagatgtactacattcgaaagtacggccttgaatcccacctgaggcacctgcgagaggggcttgcatctggaaagaatcacctccaggaggcttcaggcaatgggaaggaaagctgcctgagagaaactggcacctcgcgtgacctaagcaaggagcgctatctgtcacaacttctcggtagaatttcctatgccctcttcattaaccccagggacgaggccatgcgcgagtacaaaaaggcagtgattgagtggatgaaaaccgacatcatcaagtga

SEQ ID NO: 9778 - RNA, 1041 nt, synthetic construct
  source 1..1041: mol_type = other RNA
atggattggaacaaatacagggaagattttctgatcaaggctaagaatcagaagaaggataagaaatactgtgacaaatggttgtcctacgctcacaatctctacgagcaagaactcccaattatttataaccaggagcacttttgcaaactggtcggctatatgcccgaatacgtgtacgcggccagcaattctgcagatcacttctatcggacctttttcattccgaagaagtctgggggcctgagaaaaatttgcgaacccctcccaaatctgaaggaaatccaaaagtggatactggagacaatacttagcaagatgcaagtctctgtttatgccaaggcatatatcaagggcaaaaacgtgaaggaaaatgccagatttcatagagcccagaaaaaagttctgtccctcgacatacaggatttcttcagtaaaatttccccttttctggtgtacgaaactttcatcaatgtggggtataacaaggacgtatccatgatgattactatgctgtgttgcaaggagggtggtttgcctcagggcgcacccacgagcgctcttctttcaaacatcatcatgaagaacttcgacaacgtcatcggggactacattatcaagaacaaaatccgatacacacgatacgccgacgatatgacattctctggagagtttgacgagttagaaatcataaggctagtgaggcatgagctaaagaaatatggattctgtttgaatggcaaaaagactcggttacgccaggagggacaacgtcaggaggtgaccggaatcatcgtaaataaaaaactccagatctcaaaggatcagcgcaagaagatacgtcaggagatctatttcattaagaagtatggcctgcaatcacaccttacctataccaacgagcagcggaaaggttatattgaacatctgtttgggaaaatcagttacgctctgtacattaaccctaaagacgaggaattaaaagagtaccgcgaatttctcctgcagtacaagagcaacagtgagatttcgttgaattga

SEQ ID NO: 9779 - RNA, 1050 nt, synthetic construct
  source 1..1050: mol_type = other RNA
atggaatggattgagtacagagagcaatttatcacaacagctaaaaaagcatccaaaaatagcggatacattaagaagaatctgaagtatgccgaaaaattgtacaatcagaaactgcccatcatctataacgcctcacatttttctaagctggtaggttatagtctgcaatatctttacgctgcatctaacgattcaagcaagttttacagagagttcgagatcaagaaaaaaaatggtggctcccggaaaattagcgaacctctacctagtttgaaggaaattcagaagtggattctggaaaacattctgaacaagatccagaaagagaaagtgagtaagtacgccaaggcatatcaaaagaagatctccattaaggagaatgtcaagtttcaccgggggcagaagaaggttctctctctcgacataacaaacttcttcctgaacatcaagatcgataaaatctacgaagtgttctacaatttgggctattccaaatctctctctacgctgtttagcaatctctgcactttaaattactcattgccccaaggagccccaacctcaccaatcctgtccaatatagtgatgctaaacttcgacaatgaaatcgagaaaatcgttcttgagaaacggataaggtatactcgttatgcggacgacatgacttttagtggcgatttcctggagaaggaaataataaagtatgtcaaggagaacctcaataagatcggcttaaagatcaacaacaaaaaaacccgagtgcgcaaaaattggcagcagcagatggtgaccgggatcattgtgaacgagaaaattcagatttccaggaaaaagagggatgagctgcgccagaccatgtattacattgagaaatacggcattgatagcttccttaagtacaaaggaattaagaacaaggtctactacttaagccaccttaaagggatcctggaatatgcttatttcatcaacaagaacgacaaaaagctgttcaattacatagagtacctcaagaacaatttcttcaaggaaaaaagctcgatctga

SEQ ID NO: 9780 - RNA, 1026 nt, synthetic construct
  source 1..1026: mol_type = other RNA
atgaattggaagaattactgcgtcgagtttcgcaaggaagcggcattaaaaggaaagaacgaagaatactgtgacacctggctgcaatatgccaaagtcctcttcgacaaaggcctgcctattatttacaaccaggagcacctgtgtttgcttctcggctataaagaagaatatgtgttcgctgtgtccaattcagcttcgaacttttacaggaactatgagatacctaagaagaatgggggagttcgggagatttctgagccactcccctctttaaaggagatccagcgttggatactggataatatcctatctagcataaacatctccgtctacgctaaggcctacgtgaaaaaaaagtcaatcaaggacaatgccagatttcacaaaagacaggaggtgttgctgaccctggacgtgagtaacttcttcgatagcattagcagtgataagatctataacctgttcctggaccttggctacaaagaggacgttgttgtcatgctgacaaatctctgctgcttgaacggatggctgccccaaggtgccccaaccagtccaatgctgtctaacattatcctgagacagtttgacaatgtcatgggaaaatataccaacgaaaagaaaatccggtatactcgctatgcagatgatatgacttttagcgggacatttaatcccggacagatcatatcagtagttcggaaggaactgttccgactcgggcttcagctcaatgagaacaagacaagggtgcgcaggaaggggcagtgtcaggaagtgacgggtattgtagtgaacgaaaaattgcagctcccgaaaaatgtgcgaaaaaagatcagacaggatctgtactacatcaggaagtacggccttgagagccatatggagtactgcgatatttccaaagagaagtatttgcagcatctgaagggtcggatccaatacggcctattcattaacccttatgactacgaattacaaggctatctatcctaccttgagaatatgtacgggcagtattga

SEQ ID NO: 9781 - RNA, 1026 nt, synthetic construct
  source 1..1026: mol_type = other RNA
atgaattgggacaaatactgcaacgaattttgcaaagaagcggagcacaatggtaaaaacgctacctactgtaatacctggctgcagtacgcaaagtcgctgtatgagaagaagctaccaatcatttacaaccagaagcacctgtgcctgcttctcggctacaaggaagaatatatatacgccgcttccaattctgcaataaacttctatcggacctataaaattcccaagaagaacggaggaacacgagagatcagtgagcccttgcccagtctgaaagaaattcagaggtggatcctggataacgtgcttgcccctgtaaacatttctgtgtatgcaaaagcctacgtcaagaaaaagagcatcaaggagaacgccaggttccataagagacaacctatagtactgtcccttgacgtggagcggtttttcgacagcattacttcagacaaaatctattccctcttcctaaaactcggctataaagaagatgtctccgttctgttgacgaatctgtgttgtcttaatgggtgcttaccacaaggtgcccctactagccccatgctcagcaacatcgtgttgactgagtttgacaatatcattggcaaatacaccaatgaaaagaagattcggtacacaagatacgctgatgacatgaccttttctggagacttcaagcctgggcagatcatctctttcgtgaagtacaatctcagtaacctgggcttaaagctcaatgagcgcaagatcaggacacgcaaaaaatgccagcgccaagaggtcacaggtattgttgtgaatgaaaagatgcagttaccaaagccggtccgaaagcagattaggcaggaaatgtattacgttagaaaatacggactggagtcacacatgcagtactgtgatatatcaaaggagaactatttgcagcatcttaaaggccgtatccaatatgggctgtttatcaacccatatgattacgagctgcaggattatctcggctacctggacaaagtgtacgggaagtattga

SEQ ID NO: 9782 - RNA, 1020 nt, synthetic construct
  source 1..1020: mol_type = other RNA
atggattgggaggattacaaaaacgaattcatcagagtagccaagaaaaatgaaaagaacgaggattattgcgacaaatggctgaagtacgctaagaagctttatgataaacgcttgccaattatcttcaatcaggagcatctgtgcctgctgctagggtacaaaaagcagtacgtctactcagtctctaattccccggcagacttttaccggtattataagatacccaaaaagaacggcaactttcggcagattagtgagcccctcccttcgctgaaagagattcagaaatggatccttgacaatatcctggtgaacgtcgatacaagtgtgtacgcaaaggcctacataaaaaagaagtcaatcaaggacaacgctcgatttcatcgtaagcaaaaggttctcctttcactcgacatcaagaactttttcgacagcatctcctctgataagattttcgatctgttctggaatttgggctataaagaggatgtggtggtcatgctgaccaacctttgctgtctcaatggtagtcttcctcagggagcccccacatccccaatgctgtctaacatagtgttagaagactttgacaatgagattggactgtataccatggaacagaaaatcaggtatacaaggtatgccgacgacatgactttttctggcgacttccaccctggtaaaataatctccaaagttaaacgccagttaaatgatctcggcttaaaactgaatgatgagaaaacgcgaaccagaggaagaggacaaaggcaggaggtgactgggatcgtggttaacgaaaagatgcagctgccccgccctgaaaggaagaagattcggcaagaaatgcactatattataaagtacgggatcgagagccacctggagtattgtaaaatcgaaaaggcgaactacctgagccatctcaagggcaaaattgagtacgggttgttcgtaaacccatatgattacgaattgaaggagtacctaagctacctcaataatattaaggactga

SEQ ID NO: 9783 - RNA, 1059 nt, synthetic construct
  source 1..1059: mol_type = other RNA
atgactatactgttggtgttggtagaaggctctttcttcatcatgcaatgggaaatttacaaacggaagtttacgcacaaggccaaaagcgccagatttgatgaggggtacatcgaacgatgccttaattatgcagagaacctgcataagcagggggttcccatcatttatgacatcgagcacttttctcatctggtcggctatgacgtgagctatcttctacgggcaagtaatgcccaggctaggttctaccgccattttaccataccaaagaagaacaacacagagcgatccatatcggagcctctgcctagcttaaaagaagttcagaggtggattctcgataacatcttggataagctggccttatcccgctttgccaaaggattcgttaaaaaccggaacattaaagagaatgcgaggttccatagaaaacagcgttacgtgctgagcctcgatattaagaacttcttcccgagcatcaagtacaaacaggtctttcacctcttttcctctattgggtattgtgaatcagtgagcaccctgttatcaaatctgtgcacactagataatagtctgccccaaggggctcctacttccccagctatctctaacttggtctgtcgacgggtggacagtagactgtcaggcttcgccctgaagaataaaatacggtacacccgttacgcagatgatattacgttctcaggtgactttgacccaggaaggatcctcaggttcacatctaaagtgctgagcgagtctaagttcactgtcaacaagaccaagacaagacttatggaacagcaccaacgccaggaggtcaccggcatcgtagtgaattccaagatgcaagcgcccagggaacttagaaagaaactccgccagcagatctattatattaaggagtttggtttggagagtcacctgaaggccaccaataataaacgcgctaactacctttcccacctcaagggcctcgctggattcgtgctgtttattaataacaaggactcggacgcaaaagaggccatcgactttctggaaactttctcctga

SEQ ID NO: 9784 - RNA, 1047 nt, synthetic construct
  source 1..1047: mol_type = other RNA
atgggcttagtcgaaaagaaattcaattgggaagactatagtgaaaagtttacagttttggcacgtaatgagggacgagacgccatctacgccgagctatgcctctcctatgcccaccgcctttattccaacaatatccctattatctacgacgttgagcacttgtgcaaacttgtgggctacgataaatattacgtgctgggagcctcttacgaaacagagaagttctacaggaaattcaaaatccccaagaaatcagggggttttcggactattcacgagcctctgcccagtctgaaggagattcagagatggattctggataacatcctctataacatcaacattagcaaacatgctaagggcttcatacatgaccttagcataaaggataatgcaaagtatcatcgcaatcaaccttgcgtgctgtccttagatatcaaagacttctttccctccatcatgcggcaccgggtttatgggatatatcggagcattggatatacccagctcatttcaaatatcctatctcgcatatgtacccttaacgaatctctgccgcaaggcgcgccaacttctcccgctctctcgaacatcatttgtttcaatctggatcgtcgactggctggcttcagtaagaaatacgactacaggtacaccagatacgctgacgatatcacgatttccggtaacatcgtagccgggcgcgtgataaggtttgtgaaaaagatcctcggggattacgacttgtttctcaatgacaataagactcgactgatgcaaagacaccagagacaggaagtcacaggcatcgtagtgaacgagaaaatgcagaccccaaaggagattcgccggcatgtcaggcaggaagtgtattacatcaacaagtatggaatggacagccacctggataaaattaaggatgtcaggagcaattacgtgaaacacattatcggtatagtcaactacatcaagtttgtgaacccaaatgacagacatgcagcgcaggccctgtcaattttgatggagaactacaacaagaagtga

SEQ ID NO: 9785 - RNA, 1038 nt, synthetic construct
  source 1..1038: mol_type = other RNA
atgcccagtagcctgatttggaagaaatacagtcaagctttcgccaagaaaggcaagaaggagggacacagcaaggagtacatacatacctgcttgaactatgcagaacaactctataagagatccgcacctattatttttgatccagtgcacttctccctgctagtcgggtattctccaaaatacatcatggccgtgactaacagtccggataatttttatcgacagtttagcatctccaagaaaaacgggggctcacggaatatcactgagcctctgccctcactgaaggagatacagcactggattctgaccaacatcctgaacaacattcctgtttcgaagtacgcaaaagcctacatcagcaaggaatccatcaaatccaatgctcggttccaccgaaaacagccaacagtcttatgtctcgatatcaaagacttttttggatccattcacggcggcattattttcaatctctttcgcaccatcggctaccgttcttctatagccagtttgctgaccaacctctgcatatatgatgatgcactgcctcagggtgccccaacttctccggcgttgtcgaatatcattatgaaggggttcgaccagcgcgcagccggtttctgtaagaaaagggagatcagatatactaggtacgctgatgacctgacatttagcggaacgttcttcccaaaggaaataatcagattcatcacatctgcgctgtcagaccttaagatggacttgaatcccaccaaaacgcgtattttaggacagggacagcaacagcgggtaacagggatcgtggtgaatgagaagatgcaggttccccggaaaaccaggagaaacctaaggcaatcaattttctacatcaagaagtacggtatcagctctcatcagaaccatgaaaaaatctacaagagcaactatgtccgccaccttcttggcatagccaaccatattctgtttattaatcccaaagacgccgacgctctcaatgctttatccgtgcttaaacctctgctcaataaaaagtga

SEQ ID NO: 9786 - RNA, 1026 nt, synthetic construct
  source 1..1026: mol_type = other RNA
atgaactggaagaagtatcggaaagagtttaccattcaggctactgccaagtctctcgacgagaagagcatgcagcacgcgctgagctacgctcgcggcttatacaaagccaatctccctatcatattcagtcagaaccatcttagcaggctcgtggggtacaatattgactacattagaaacgcctcatctaccaaaagtgatcagttttatcgatgctacaagattaagaagaagtcctctgataccatgcgtactatttgcgaaccgttgccctccctgaaggaaatccagaggtggatcctggacaacatcctatcccaagtcacaattagtaagttcgcaaaagcctatgttgtgggcttctctattaaagacaatgctaggtttcatctgagacagaaacaggtgctgaggatcgatgtaaaagatttctttccctccattaaagggcagaacgtattccacatctttaagaatatcggttacagcgctgaagtgtccgcaatgttgacagggctgactaccctgaaaaactgcttgcctcagggagcaccaaccagcccaaccctttcgaacatatttatgaataggtgtgacgctagaatagcaggatattgtttagcccgcaaaatccgctatacacggtattcagacgatctcacattcagcggcgaatttgacgttggaaagctgatctcattcattaatatggtcttcaaggattcaggacttctgctgaataagactaagaccaaacagatgtttaagcaccaacgacaattcacaacgggtctagtggtgaacgagcgtataaacgtctgtcgcgagaaaagacggaagctccgacaagagatcttttacatcaagaaatacggcctggatggccacttgatacggaccgaggagaaacgcacgaattacatcatgcatcttctggggctgagtaacttcattactcacattaacgccaatgacagagacgcgctcgaggccaaggaaatcttacggaaatatatcacatga

SEQ ID NO: 9787 - RNA, 1029 nt, synthetic construct
  source 1..1029: mol_type = other RNA
atggaatggcagcaatacaaggccttgctcatcgcagaggcccaggctaaagggtacagtgacgaaaagttgttagagacgctcgattatgccaacaacctgatcaataaatcattaccggtcatttatgacctgaaacacctgagcttacttgtgggctacaagacagcctacatccagcgggcaacccaccgcagtcaattcttctataggcggtttgagatacgaaaaaaatcgggagccacaagggttatattcgagcctctcccatctttgaaagaaatccaactgtggatcctgaaaaacattctgaacaattgtccgatctccaagtacgctaaggcctacgtaagaaagaaatctataaaggatgccgcacgatttcacaagaaccagaaatatgtggtgacaattgatatcgtgcagttcttcgagtttataaattatcccactgttcttggtaagtttattctaatgggatactcaagagaagtatccacgatcctcaccaagctctgttgcaaaaacgacagcctgccccagggtgctcctacctctccctcactgagcaatatcgtctttgcagacatcgatttcgaaatttccgagtactgctatgctaacaacatcagatatacacggtacgccgacgacctgattttcagtggcgatctggaacctaagcttttgataggaaaaattgaggggattctgctgaataatgggttcattttgaacaacagcaagactagaatcatgaggccatggcagcgccaaattgtcactggccttatcgtgaatgagaagagcaaagttcaggtgccaattgaggcgaggcgcaagctgcgtcaggaaatgtattacatcaataaattcggcctcgactcccatctgtcctacaccaagaactataaagcgaagtatctgatacatctacttggcgtggctaagtacatgttttttatcaaccccaatgataccaaggtcgcaaattacatctaccagctcgagtcttatattaacaattga

SEQ ID NO: 9788 - RNA, 1113 nt, synthetic construct
  source 1..1113: mol_type = other RNA
atgatgcctttgaggttacgcctaagagattacataatctcctacaaccactgcaatgccgctgtttcatcttctattatggtgtggcagacatatcaagccgactttactgccaaggctttagctgcacgacggcctatagctgaaacggaaatcctcctggcgtacgcaaaaaatattcatgacaaagggatgcctattatctatgacatcggccacttgagtcttctagttggttacaaggtcgacttcctggtggctgcatcaacctatccacgcgcttactatcgaaacttcaggatcaagaagaaatctggggcctcacgtgtgattagtgagcccctcccctctcttaaggctatccagacctggatcctcgaaaacatactggagaagttcgaggtgtccctttacgccaaggcctacgttaaaggcagaagtatcaaagagaacgcccggtttcataggaaccagaataatgtgctgaccattgatatcaaaaacttctttggatccatcactaaggtgcgcattatttccttttttagctcccttggatattcgcgtcaggttgcgctcctgctggcaaggttatgctgcaaaaatagtcgattgccacagggagcccccacaagcccaacactgagcaatatagtcctggtggccttcgatgagaagctgtttaacgtgtgtagcctgaacaaagtccggtttactagatatgcagacgatatcacgtttagctatgagaacaaaaacctcaccggccccttgatcgagtacgcacgggaactactccggggggaaggtctggtactgaatagagacaaaactagattgatggagcggcatcagagacaagaagtaaccggagtgattgtgaacaagaagcttcaggtgcctattgagatcaggaaggatctccgccagattttctactacataaacaagttcggcctggactctcacattgagcgcattcaagaaaaaaggtcacgttatctgtatcacgtactggggctgtgtaatttcgtcctcttcatcaatccgaatgacaaggaggtcaagggctacctgatcacagcccgcgattaccttaccagcgaagagtga

SEQ ID NO: 9789 - RNA, 1038 nt, synthetic construct
  source 1..1038: mol_type = other RNA
atgaagtgggaagtgctgaaagacaagatcataaaagagtgtaagttcgcaaacaagagtgagaagtatactagcgcttatctagagtactgccgaaagctttatgaaaaggagctgcccattatcgcaagtcctaaacattttagcttgttggtgggcatcgatcacgaatacgtgtgcaaaatggcctatagccaaaatttgttttaccggtccttcaagattaataaaagcaacggaaagaagcgggagatcaaagaacctctcccagacctgaaatatgttcagaagtggatcctgaacaacattctgaacaaagtggaggtcagtgattacgctaaggccttcgtcaaaaaccgtacactcaaacataacgcgaagttccataaaaaacagaatgtcgtagtcactcttgacataaaggattttttcccatccattaccctctatgacgtggctgacatctttaaagatctaggttactttgagaacgttgccttatttctcgcgaacctgtgctgttataaaaaacagctgccccaaggggctcctacatcaccatacctgtccaatctcagattccgcaagatcgacgactccatttctagttacaccaaagagctgaatatcagatacaccaggtatgccgatgacatgacattctctggagatttcaatccgcaccagttaattaaaaagatttccgacatcatccacaactctggctttaacataaattcaaagaagacccgcgtggcctacaagaacgcacgacaggaagtgacaggaatagtagtgaacagccacatgcaagtttcgaagaataagaggagggacatccggcagcaggtgtactacatcaagaaattcggtctggattctcaccttacgcatatacaggaaactagagccaattatttgaatcacctgctgggccagattaatttctgtctttttgtcaatcccaaggataatgagatgaaacagtactttgggcagattaaggatctcatgcaaaagcagaactcagatgactga

SEQ ID NO: 9790 - RNA, 1029 nt, synthetic construct
  source 1..1029: mol_type = other RNA
atgaagtgggaagtggtagagaaaaacatcaaaaaggagtgcaaggcaaggcacaaagatagtgtatacattcagaagtacatcgcctactcaaaaaacctcttcgacaacgatcttcctatcatcagctccccagagcatttttccctgctgattggaatggagcaccagtatgtgtgtaatatggcatatgcggccgacagattctaccgccatttcacgatccccaagagcaatggaaagaagcgagaaatagacgagcccctgcctgacctgaagtttgttcagtcatggatcctcgaaaacattttagaaaagtgcccaatctccgaatacgcgaaagcttattacaaaggccgcacactgaagcataatgcaagattccaccgcgctcagtcaatagtcctaaccatggacattaaggagttttttagctccataagcgtccgtgacgtgactaagatctttgaggacatgggttatttccacgaactgtcttgtttccttgcctacctgtgctgtttgaataacgtgctgccgcaaggcgcacctactagcccctatttgagcaacctgagaatgaggatccttgacaataaaatctctcagtacacatcccagaggaagatccggtatacccggtatgctgatgatctgacttttagtggggacttcaatccccaccacgttatcaaagacatttcgaagctagtttatgatgagggctttgtgataaaccctgataaaaccagggtggctcgtcgaaacgccagacaggaagttacagggattgtcgtgaactctcacatgcaaatttctaaagagaagcgcaagcaaattcggcagcaagtctattacattaaaaaattcggggtggagagtcatctcgaacggataaatgagtcaagggccaattaccttaatcatctcttaggtcagatcaattttgccctcttcgtcaacccaaaagatgaggagatgaaggaatacttcaacgtgattaagaccctgttggtggatcagaactga

SEQ ID NO: 9791 - RNA, 1041 nt, synthetic construct
  source 1..1041: mol_type = other RNA
atggaatggagtacactgagaaatgccattattcggaaatgtaaagaacatcgtaagggtgacgaatacagcgaggcactgctgtcttattccgaaaagttgtttgtccagaacctcccgataatcacctgcccggcccatctgagtcttctcataggattagagcacgactatgtatgccgaatggctttttcgccagaacacttttaccgccatttcaccattaagaaggcgaacggtaaagacaggtcaatagatgagcccttgccagacctaaaattcgtacagcagtggattctgtccaacatcttggaaaatgtccccgtgtctacctatgccaaggcttttatcaagaaacggggggtgaaggagaacgctcggttccacagggcccaaacagtggtggttacaatggatatcaaggatttcttcccatctatcaacttacagcagatcgtgaacatattttgtaccctcggatactcaaacgacgtgagcaactttatcgctcacctgtgttgctatcactattctttgccccagggcgcaccaacttctccttacctctcaaacatcagaatgcgcgagtttgacaaaaaagtggttgactattccagtcccctgaagattaggtatacccggtacgcagatgacatttcactgtccggcaatttcaatcctcacactgcaatcaagtaccttagtagccttgtcttcaaagaggggttttccattaatgccgaaaaaacacgcgtcgcctaccagaatgcccgacaagagatcactggcatcgtggttaatagccacatgcaggtccctaaagctcagcgcaaaaagatcagacaggaggtgtactacattaagaagtacgggctcgattcccatctgagccatataagcgagactagagaaaactatctcaaccaccttctaggaaaaatcaatttcgcgaggtacatcaatcctaaggatcaagaaatgcaagagtattacgagacgattaagaagattctgattctgttccgtaatgagagcttctga

SEQ ID NO: 9792 - RNA, 1092 nt, synthetic construct
  source 1..1092: mol_type = other RNA
atgtatgcaaagaattctttggtagtacagtccataaaatgctatgtagctttgctgggggattacatgaagaaaaactactacgacaagatcattctggagtgcaaaaagcacaacaagtcccaggagttcgtggatacttacctggcctattatgagaacctgacccagaaaggcctgcccgtgatatcaagtcctaaacactttagcatgctggttgggatggatcacgattatatttgctccatggcgtacagtccaaagcatttttacaggacattttacatcgaaaaggcaaatggcatgaagagaaaaatatcggaacccttaccagatttgaagtacgttcagaaatggatccttaaaaacatcctggagaaagtgaaggtgagtccatacgctaaagcttatgtctccaactcttcagtgaaacataatgcccgatttcacaggaagcaaaaggtcgtgctctctatggacatcaagagcttctttccttccgtgaaagtgaagtctatcgtggatattttcaagtcctttggctacaccgagaatgtcagctgctttctcgcctacctgtgttgtaataactactgtctgccgcaaggcgctccaacgtcaccctatctttcaaacctgcgtctgctaaagttcgacagcataattagccaatacacctcccttcggaagattcgctatactcgctacgccgacgacttaacattcagtggtgacttcgacccttctaacctcataaggtttgtgtctaaatgtgtgtgggaggaaggattcaaaatcaacagcgacaagactagagtcgcctatggaaatacacggcaggaagttaccgggatcgtggttaatgataaaatgcagatccccaaaaccggacggaagaagattcgacaggaggtttattacattagaaagtatggtgtcagcagtcatctctcacatattaatgagacacgcgtccactatcttaaccacctcttggggaaaattaacttcgcactattcgtgaatcctaatgatatcgaaatgaagggctactacgactatattatcagcatcatcgaagatgtcgactga

SEQ ID NO: 9793 - RNA, 1044 nt, synthetic construct
  source 1..1044: mol_type = other RNA
atgatggattgggacaaatttaagacacaagctatccaaaaggcacgtgtggatcgaattcgcgatatagagcttcggagctatctgtcctatgctgagaagcttgtgaaacagaatctgcctgtgatcgtagacgcagcatccctggcatcattcgttggcatcgatttgctgtatctctgtcaaatggcctatgggactgagtatttctacaggaggttccagataagcaagaagagcgggggtatgcgtgaaatcgctgagccattaccagatctgaaggctgtccagaattggattctgaccaacattcttaattacacttcagtgagtaagtacgccaaggcctacgtcaagaaccagtcaatcaagtctaacgcccggtttcaccgggaacagaaagtgctcgtctccatggatgtaaaggatttctttccgagcatcaaaatagaggacgtgtttaagattttcgtcaacctgggatatattgagaacgtgtcttggtttttagcccatctttgctgcctgaatggcgaactacctcagggagcccccacctctccctacctctccaatctaagaatgaggaacttcgacagcgaagtgggcacttacgccttggaaaacggctggagatacactagatatgccgacgacctcacgttcagtggtgatgggaatgtgaaggaactcatccggacagttagtgggttgctgctgaaaaaccacttgtaccccaatacaaagaagacgagagtcgctcgccaaaacaccaggcaggaagttaccggcattgtggttaataaaaaaatccaaaccgcgaagcagtatcgaaagaaaattcgccaggaggtgtattacatcaaaaagtacggattggactcacacctgaccttttgtcagatctcccagaaaaactacctaaatcatctgcagggaaagatactgtatgcgctgttcgtaaaccctaaagacaaagagcttctcgagtacaaagagtttattagcgacctcctgatcaagacaaaatcgtctttaaaatga

SEQ ID NO: 9794 - RNA, 1035 nt, synthetic construct
  source 1..1035: mol_type = other RNA
atggattggaatgagttctgcaatcatgccaaattccaagcatccgtggatggaattaatgaagaggaactgaaaaagtaccttcagtatgcaaaacgcctggttagaaaggacctccccgtgattgtggacccatactcactggccaaattcatcggcatcgacttccactatctgtgcaacatggcttatggaacagagcatttctatcgaaactttctgatccccaagaaaagcggtggcacccgggagatttctgaacccctacctgacctcaagcaagttcagcactggatgctcaacaatatcctgaactacatcgagatctctaaatacgccaaggcgtatgtaaaaaaacagggcgtgaaatctaatgcccgcttccatagggggcagaaagtccttgtgtcgatggatgttaaagacttcttccctagcattaagaagatagacatctttcacgtattccacggcctgggttacgatgaaaacgtgtcctggtttatggcctacttatgttgcttaaatggtgagctgccacagggagcccctacctcaccatacttgagcaacattatcatgagttcttttgacaaggacgttgccagttacgcaatcgaaaagaagtggcgatatactaggtatgctgatgatctcacattttccggcgacggaaacgtggaagagcttatacgggtagtcagcgaattgctcctgaagtatcacctgtaccccaataccaaaaagactagagtggcttaccaaaacgctcggcaagaggtcacggggatcgtggtcaataagaaactccaggctgcacgtcagtacaggcgcaagatcagacaggaggtgtactacataaagaagtatggcattgagagtcacattgcgttttgtcagatttcacagaagaactatctggaacatttgcaagggaaaatagggtacgccctgtatgtgaacccgaaggatattgagcttttagagtaccagaagtttctacatgaagtctccgatagcttgcagaatcagtga

SEQ ID NO: 9795 - RNA, 1056 nt, synthetic construct
  source 1..1056: mol_type = other RNA
atgcagaataaaaactgcacttgggaccaataccgatctgcattcatcgaattagctcagaagagtaacaagagcaagccgtacatacgaaggtgtctggaatacgccgaacccatttttgaaagaggactgcccatcatctttgatgttcaccacctttcaaagctcaccggcagaagcgcaaaacacatcttctccctgagtaggtttgcccgctgccattaccgctccttttcaattacaaagaagagcggaggagagaggaggattgatgagccagtggaggatttgaaatatatccaacggtggattctacacgagatcctggagcgcttaccagtgagcccatacgccaaagcgtacgtgcctgggcttagcgtgcgggacaacgcacgcttccatcagaaccaagacaagatcttgaccgtagatattaaagactttttccccagcgtgcggagtaagtcagtgtttttcgtgtttcggaatgctggttatagcgacacagttgcaacgattctatctaatctgtgttgcctggaacatcgcttgccccagggtgcccctacatcgccaatgctgtctaatcttgtgttctcagatctcgacaaggtcatagcggatttctccatacagcgggggctcagatatacccgttatgccgatgacctgaccatctctggctctttagacatcagagagactctccattttctttatccgctgctgaacaacaggggcttccgtctgaaccccgagaaaactagggtgctctcccgaaatatgagacaggccgtcaccggaatcgtcgttaatcaatacctgcaggtccctctcaacattcgcaagaacatcagacaggacgtcttctacataagaaaattcgggctcaaatcccatatggaacacatcgacgaaaccggcgataattatattgacaggctgattggcatcgtggggtacgctatttttgttaatcctcacgacaatgagatgaaggattatttctcctacctgcggagtttgaagaacgatgagaaagtacagacagcttga

SEQ ID NO: 9796 - RNA, 1071 nt, synthetic construct
  source 1..1071: mol_type = other RNA
atgaaggagtcaaactattcatggaacgagtacaaatttcggttcgaacagaaggctatcgacttcggccacccgctgtctaagatcgagggtctgctgctctatgcacagaaactttttgccgcaaatctccccgttatttacgacttacgtcaccttagctacctgactggataccgtgaggaatatatgctgcgggccacgagccgaccagaaaatttctaccgatactttaggatagcaaaaaagaacggccatagtagagagatttcggaacccttgcccggactaaaagagatccaatattggctgctcgacaatgtgatcaaaaaactgcctccaaacaagctgaacaacgcctatcttgagggcagatccattatatccaacgcgaagttccacactaaacagcagaagctcctgaacattgacatcgagaaatacttcaacaacatcaccaaaaagcaggtggaaggcttcttctctagtctcggatacaatttagaggtgtcatctctcatagccggtctgttgactatgaaggatgggcttcctcagggttcgccttccagcccatacttgagctctatcatgaccgtccaaatcgatgtaacacttctcgccgagtgcagggcattggggctaagatattcccgctatgccgatgatatcagtatctccggagaatttaataccgaggaagtggtcaaaaaggttaatgccgtgctgttagcgaatgggttcaaagctaatagcagaaagaccacagtgaaaaagtctcaccaaagacagatggtaacaggggtggtcgtcaacaagaagttgagcgtcaagaaaaaagtgattaaggaactgcgccaggagctgtactacattcataagtatggcctggaacaacatctgcgaaggaaggagatacagaggcgcaattatctgaacgttctcgaaggcaaactgaattacttttgttctgtgaagcggaacaatgctgagctatcatatattcggaggatgctctccgaaatcaagattcgcgagagcgctgagcagcttcggagtgcttttgaatga

SEQ ID NO: 9797 - RNA, 1044 nt, synthetic construct
  source 1..1044: mol_type = other RNA
atgcaggagtcaatcttctccaaaaacgaatacctgttcaaacttgagaagaaagctcaagagctggggttaccaaatcagtccgtgctcgggctgctcagttacgccaaaactctgcaagagaagaatctgcccgtgatcttcgacatcaaacacctgtcttacctgacaggtttcaaggtcgattatatcctgcgcgccattaagtctcctgacaagttctataggaccttttttatcaggaagaagaacggcagatctcggcagattaaggagccgctgccaggattgaagtctattcagtactggatactcaacaacattattaagaaggtccccacgtcgcgttttaacaatgcttattcgatagggaaatccaccgtcagcaacgcgaaattccatactaaacagcaattcgtgctaaacctagacatcgaggcttttttcgacaatataacggcctcaatggtaagcttgttcttttccaatttgggttataacagcgatgttgtttccgtattgagtagtctctgcacattaaatggaagtattcctcaaggatctccttctagcccctacctctccagcatcctgaccatcgacatcgatgaaaatctgtacaagtactgtcgagaacggaatcttcgctacagcaggtatgcagatgacatcaccattagcggctcatttcacgcaggagtggtcatcgccggtgtgagaaaactgctgaatagccttaacttctccattaatgactcaaagacaagggtgaagtcacagcaccagagacagctagttacagggctggttgtgaacaaaaagatagccgtcaaacgatccgatttgaaagaatttcgccaggaaatgtattacattatgaagttcggcatcgagagccatgtaataaagcagaacgtgactaaaaacaactatatcgatcatctcctgggcaaggcaaatttttatctctttgtgcggaagaaagatagtgacctttttaagtacaagacctaccttattgacgtgttaaaaggcaaaaagtga

SEQ ID NO: 9798 - RNA, 1044 nt, synthetic construct
  source 1..1044: mol_type = other RNA
atgaattacaacaagtactccataatcttcaagcaggaggcgaacaaccagggactgtctgaggacgagattgaagtgtacctgacatatgccaaagttctcctggacaaatccctccctatcatttacaatcaggatcatctctcgaaattactcggcattcacccgatctacttgtatactctgactaatagctccgacaaattctacaggaagttcaaaatcaacaagaagaacggcaagaaaagaaatatagaagagccactgagtatcttaaaagaagctcagtactggattcttgaacacattttgcttaagtgctcatgtagcaactataccaaagcatttaaagccaactcatccatcaaagagaatgccaagttccacaaaaagcagaatatagtgatcaatctggacatcgaagattactttggcactatcaagggccacaaagtctacgaattttttcgcaccttggggtataacaacgaggtaagcatcatgctgaccaagatatgcacaaataaagattctctgcctcaggggagcccaacttccccctacctttctaacattataacggagaacttggacaataagctggctgagctggccaagaaggaggaatatggactgagatatacccgatatgcagatgacatcacctttagtaccaacaacaagattaacattacgaatctcatcatcgatacaaaatacgtcctaaagcaagagggtttcaagattaactataagaagaccaaggtcatttctagcaataagcggcaaatggtaacaggcattgtggttaatgacaaactccaggtgagtaagcaacagcgcaggaaggtgaggcaggctatgtattacatcgagaaatatgatctggagtcacatattcggaacattggttggcaaaagggaaaggataaatatttacgtcatctgctagggaatatcaattttgtgcttttcatcaatcccaaggacaaagaacaccttaagtacaaatcacagctcatacagaaactgaaagaaatctga

SEQ ID NO: 9799 - RNA, 1041 nt, synthetic construct
  source 1..1041: mol_type = other RNA
atgttcacgaccaaacccagcctgagcgagtacaaactctccttctcaaaggaggctcgccgcaaggactacaacgattacgacattaaagaattcctggactatgcggagatactgtatctcaaagacctgcccataatctacaacatcaaacactttagcctgttagtgggctataaggagacatatttagcacgagctgccgaaacaacatttaacttttaccgctcttttgacatcagaaagaggaatggaaaactgcggaaaatcgatgaacctctcccctctctcaaggagatccaaacctggattctgactaatatcctgtacaaactcgactgcagcaaatacagcaaggcatataagaaaaagaactcgatcaagaccaacgccaagttccaccgggatcaggatgtcgtattgtccctggacgtcaaagattatttcgggtcaattcgtgtagaggacgtggagttttttttcgcagaccttggctacgaagaaaatttgtcaggcatgctcgcatctctatgctgtcttaacgggagcctgcctcaaggctccccaaccagtccatatctgagtaacctcataactatcgagctggacaacgatctttctgaattggccaagttatataatgtccggtacactaggtacgctgatgacattacttttagtggaacctttacagttggtgtgctaattaataaagccaaggaggtggccaccagatatggcttcgaaattaacgataagaagactagggccatggggaaacatgaacagcaactggtgacgggaatcgtggttaatacaaagaagttgcaggtgtccagagagcggagaaaggatttgcgtcagcagctgtactatatacagaaattcggtttggagaatcacctggcgaagcgaaacattaataagaggaactatcttcagcatctgctcgggctaaccaatcatatccttatggtcaatccgaaggatgaggaagctctgcgctacaaacaggttattttctcctacatgaacgactga

SEQ ID NO: 9800 - RNA, 1041 nt, synthetic construct
  source 1..1041: mol_type = other RNA
atgaattttctgacatacgagcagaaatttaaggaacaggccgagctaagcggcaaatctgagtattatattgacgagtgccttaattatgccaggaacctcaacaagaatggtctgcctattatttacgacgatgtccacctgagcaaactgttgggcatccgcttggatttcctgatcagtattagcaattcacagaaagactactatcggtttttctccatttctaaaagtaacgggaagtcacggaaaattgcagaaccactgcccctgctgaaagaaatacagcatttcatccttgacaacattctacttaaagtcccatgttctgtctattcaaaggcctacaaaccaggcgctaaattaaagagcaatgccaaatttcaccgcaaccagcctgtcctgatcaagatggatctcaaagactattttccaagtctggacgaacatagagtgtataagttcttccatcaccttggatacaaagattctgtgtccgtgttgctcgctaagttgtgcacattgaacaaggcattaccgcaaggagcaccgacctcaccctacctcagcaacctcctgacaagggagctggatgaagatatctacctgttttgcaaagagaatgggaatctaagatacactcgttacgccgacgatatttccatctccgggaatatgatccccactaatataatcaagggtgtggtaaagatcatcgctaaacacggcctcaagattaacaaagaaaagaccgcggtgatccctaacagtaataggcaggttgttacgggcgttgtggtaaaccaaaagcttcaggcttctaaaccctatagacactccatacgcctcgagatgcattactgtatgcggtatggaatcgaggaccatataaagaagtcgaagaagattagcaacaacaccaacaagcgaaagtactgtcagcaaatgctgggaaaggtgaatcactgcctccagttaaaccctaatgacagcgaaatgaagtcctaccgagatttcctgctgcaaaagatcgtggagtga

SEQ ID NO: 9801 - RNA, 1056 nt, synthetic construct
  source 1..1056: mol_type = other RNA
atgaatttttcaacctaccagcgggaattcatcgccgaagccagaaagcatgacaagaatgatgaatacatagagaagtgtctcgcatatgccaagaatttggtagataaacgccttccaatcatttacgacgagaagcacttttcccagctggtagggattgacttagattaccttctttccgccgccaatagcccaaagcacttctatcgatattttaccatcccaaaaaggaacggaaagatccggcggatatccgagcccctaccggtactgaaggaggcgcagtactacattctaaacaatatcctcaagaaggtgccttgctctatctatgcgaaggcctacaaacctggggctactctgaaaggcaacgcaaaattccacaggaaacagcccatcctggtcaaacttgatctgaaggactattttccgtctctgcacgagagtcgcgtgttccagttatttcatcagagtttcgggtacggcaagtcggtgtctattttaatgagtaagttgtgcacgctggatggaggcctaccccaaggtgcccccaccagtccatacctctccaacctgctcacctcagagatggatgacaagatataccaattttgcagctctaacggcaacctgcgctatacaagatatgctgacgacattagcattagcggatccatgaaccctagtgatataatctccggggtgtcacgaattgtgagcgagcatcatctgcagatcaacaaatcaaaaactgcagtgttcagacctcataagagacaggtcgtcacaggagtcgttgtgaacaataaaatccaagctcccaaggactaccggcgcagcatcagactggaaatgcactattgtatgaaatacggtattgagtcacacattttgagggctactaagaggtcttccgacgcagttgaccgtgttaaattctgccagagcatgttgggaaaaatcaactattgtctgcaactgaattctaaagatacagaaatgcagaggtatcgtgattacatgctcgaacagctccacggcaatgctcagtga

SEQ ID NO: 9802 - RNA, 1083 nt, synthetic construct
  source 1..1083: mol_type = other RNA
atgaactttataacttacgagaagatgttcacagaggctgcccgtaaggctggcaaatctgatgattacatcaagaactgcattaactatgccaaagcacttgccgataagcatgtgccaattatcttcgacatccaccattttagccagctgatcggtatcaggctggacttcttgctcgctatttctaattccccaagaaacttctacagatatttcaccatccctaaagcatcgggcaaatttaggaaaatagcagaacctctgccaatcctgaaagacatccagcactacatcctccataacatcctgaaaaagattccgtgcagtatttatgcgaaagctttcaagccccgcgcaagtctcaaggggaatgccaagtttcacaggaatcaacagacactaatcaagctggatattaccgattactttagtaatctgcacgaatcaaaggtcttctacttgttttttcacaccgtcggatacagcaagagcttgtctactctcctgacaaagctgtgtactctgaatggcgggttgccacaaggggctcccacatccccctacttgtctaacttactgaccattgacatggacaccgccatttttcagttctgcagcgaaaacgggggactgcgctacacgagatacgcagacgacatatctatttccggagctatgaacccctccagcgtgatccacgccgtaacgaaaatagttagtgacaatggcctgaaaattaacaagctcaagacagccgtgataaaacaccacagccggcagatcgtcaccggtgtggtggttaatcagaagcttcaggcccctaaaaactatcgaaaatcaatccggctagagatgtattactgccagaagtacggcctgatttcccatttacagaagtcaggtaaatcgtctactcctcttgatgcagcgaattattgtcagtcacttcttggaaagatcaactattgtctacaactcaatgcctatgatactgagatgaaaaagtatcgggagtacatgctgaagcagttccatcattataatcaatccctctattccgccagccaggctttaaagtga

SEQ ID NO: 9803 - RNA, 912 nt, synthetic construct
  source 1..912: mol_type = other RNA
atggagttcaccatttacgacgtattaaagtttaaccccttcatcatcaagaaaattttggctaacaaggacaagtactacaagatattcattatcaagcagaggaatggaaagacacgtcagattactgccccagtgagggagcttaaagtgttacagaagaacattctgaagagcttgctagaaaagatggaatattcaaagttcgctaaggcctatactaagcagaaaagcattaaagacaacgcaaactttcaccagaaacaggccttggtcatctgcctcgacataaagaatttcttcgacaatatcaggttcaacagtgtgaaagatgtctttcagaaaatttccattggcaaggccgagattctggcagaaatctgtacttaccacggaaaactgccacaagggggtgttacatcgccttacctgtccaatctaattatggaacccatcgacaaaaagatatccaacttctgctttaagtacgatctgaattatacgcggtacgctgatgatattaccataagcacccatcttctgtctaaaaatgagcgcgaacgctttgttaagctggtcattgagaatatcaacaacattctgtcagaatacagttttacactcaacgagaagaaaatcaaagtacagtatgcgtaccagcaacaaagagtgacaggcatcatcgtgaataataccatgcaggtgcctaaagaatatcggatgaaaatccgacaggagatctattatataaagaagtatgggctcgattctcacctcatgagaaaccatcaagagaaacagaaatacatcaacatccttaagggcaagataaattacgtgctgtttgttaatcccaaagatgagaagatgaaagaatacctgcattatatcgagaaccacctcagatgttga

SEQ ID NO: 9804 - RNA, 1041 nt, synthetic construct
  source 1..1041: mol_type = other RNA
atggatttaaacgagtatatcgagcagttcaccaaaaacgcaattcacaagctgaatccagaagaaataaatgtgtgcgtccgctacgccaccaatttgatgaataaaggactgcctattatctacgacctaaagcacttatcctaccagaccaaatatgagacaggctttctctatctgtgtatcaactttaaagacaaggtgtatcgccagttttccatcaaaaaacgaaatgggtctgaccgcaatatttccgagcctctccccaatctgaagaacattcagacgtggatcaaaaaaaatatcctggaaaagctgtcggttcacaaggtcgctaaagcatttaggaagaaccagtctatcaaaaacaacgcctatttccacaaaaaccaagatactgtactggccctcgacattaaggacttcttcaataatattgacggcaagactgtgtatctcctgttcaggcggtgtggttacagtagacgtgtgtccaacattttgaaggagttgtgcacctttaatgattgtctgccgcaaggggcacctacaagcccaatcattagcaatttgattttcgctgcgattgacaaccgaatttacaattttaccaggaaggagaatctctactatacacggtacgccgatgatataaccatatctggaaacgacatcaaaatcaagaaggtcatcagcttcatatcaatggtacttaaggagaataacttcgagctcaaccaagacaagatcaaaatcatgcggaagaacagttgccagctggtgacagggattgtgagcaacaactcagttcttaatgcccccaaatacaagattaaagacttaaggaaggagatctattacattcggaagtacggaatagatgatcatatggcctacgttggcatcaaaaaggcgcattatatcgaacacctgatgggtatagcaaacttcatactgttcatcaacaagaacaacaaaatcgctactgaagctcttgattttctaagagaacttcagaagcagagaaatcatcccttttga

SEQ ID NO: 9805 - RNA, 1041 nt, synthetic construct
  source 1..1041: mol_type = other RNA
atgaactggaccgactacaaaaagcagttcgaactgaagtgtgatttgaaaaaaatccctcaggtacaggtcgatgtgtggatcacttacgcaaggtgcttatgggagaaaagctttcctatcatatttgataaggcccacctgagtaaacttctcggctatgagtgtagcctgctagacaagataatccacagacccgggaaattctacaggtcattctcaatttcaaagcgaaacggagaatttcgagagctcaacgctccctacccaacacttaatgagattcaaaagtggatacttgtcaacatcctcgaaaaaaaaaaggtgagtccttatgctaaagcctacattaagagaaagaaaatcctggacaacattcggtttcatacaaatcacgaggtggtgatcaaattagatgtcgatgacttctttggatccatccacaagagcgccataatcaagatcttcaactccatgggttattctcggcagttgtcttttgacctggcttccctctgttgcctgaagaaaagcctcccacaaggtgcgccaacctctccctgcctgagtaatattttctgcgaacaaatcgatgcccgtctatcgaaatacctcaagaaacttaacctgtgctatacccgctactccgatgacattacaattagcggaaatatttccgacgtgcagatcccgcagattatgagcttctgtaagtacttattgtctgactacggcctgaacctgaacgaaaagaagaccaaggttctaaggcagcaccaaaaacagtatgtgacgggcgccgttgttaataagaagatgagtgcagacattaagctgaaaaaggatcttcgccagcagatgtattacatccagaagtatgggctgaattcacatatggtctacaagagaatagaccagcaaaattatgtgtaccatttgatggggaaaatccagtgggtactggcactggagaaatctaatcaggagttcttgcggtataaggagcatctcactgaaattctgaagaacctcaaattttga

SEQ ID NO: 9806 - RNA, 1041 nt, synthetic construct
  source 1..1041: mol_type = other RNA
atgaactggattagctacaaggagaagtttaaggagacatgtcaaaagaagaatatcagcgagattcaaattcagaaatggttggggtacgcaagcgtgctgtatcaaaatggactgcctataatctttgataagaagcacctggccggacttctggggtttaaatgggaactcctgaggaatataatccactctcagacgaagttctatcgaaccttctatatcccaaagaaaagcgggggccggcgatgcctaaaagagccgtatccttcccttaaggaaatccagaactggataaaagacttcattctcaaaaagtgtagcatctccagattcgccaaggcttacgcaccaaaaaggtcagtgtacgaaaatgtacgcttccacaaaaaacatgcggtggtaatgaagtttgacgttgaggacttctttggtagtataaacaaatggcaggtcacttcactgttcgagaaaatgggctataatcaagaccttgcagaaatcctggctggtctatgctgcctcgacaaccatctgccccagggagcccctaccagtccctacctctccaatattttcgccaaagatatcgacaacagactgtctaagtacttgttgaagagaggtctttattacacacgctactcggacgatattactatctcagggaatatttccgataaacaggtgccacagatcattagtttctgcaaatacttactgtctaactacggcttgaggctgaacaatgaaaagaccaaaatacttcggcagcatcagaagcagtatgtgacaggagccgtggtcaacgaaaatgtctctgttgagtcaaagaccaagaaaaagctgcggcaacagatgtactatatccagaagtttggcttagagtcccacatgaatcatctggaaatcaagaagcagaactatgtctaccacttaatgggcaaaatttgttgggtgttgactctcgaaaagaagaacgaggagtttaaacgttataaagatgttctcaaggagctgctcgatgctcccaaaaactga

SEQ ID NO: 9807 - RNA, 1041 nt, synthetic construct
  source 1..1041: mol_type = other RNA
atggactgggggaattatcagaagagattcaagatttctgcgaagaaaaggaatctacccgattcattcatctcagaatgtctggactatgctaagaagctgtatgacaataaggtgcctataatctttgatactgagcatctctctttgctactcggatgcaagattcagtttctctacaagatcacgaacaacttgaataagaactaccgcatctacaaaattccaaagcataacggcaaaatgagaaccataaccgagccttactctgacctgaagaatatccagcaatggattctggttaatatcctgcaaaaaatgcctgttagcatctacgccaaagcttacatctcgaataccagtctgaaatccaatgtccggttccacgtgaagcagcccgtcattattaagcttgacgtacaggacttctttccgagtatccaccaaatcagcttagtgaaactgtttaggaaatatggctatgagctgaacttatccaggatgctctccagactgtgtacctacgagggggttcttccacagggagcaccaacatccccctatattagtaacctgtactgccgccgaattgataatcgcatcggtaagtacataacaaatgcaggcttcaggtatacacggtatagcgatgatatcaccatcagcggtaatatctcagacaaacagatagggaccattattcagttttgtcggaaatgccttgccgaagaaggcttgaaactgaatgaagggaagactcagatattgcgtagccaccatagacaactggtgacgggtgtaattttaaaccaaaagatatccgccggaactaagaagaagaaagatatccgaaaacaggtgtacttcatcaaaaagtacggcctcgaatctcatattgagcacgagaagattgagaaacagaactatatctatcacctcgccggactgatcaactgggtgctttttctcgagaacaacaacaaagaattcctggaatacaaaaagttcgtcaacgagatcataaagcagattaacagctga

SEQ ID NO: 9808 - RNA, 1053 nt, synthetic construct
  source 1..1053: mol_type = other RNA
atggacttctttaagtacatttcagactttacactggccgctaccgagagcgggtacaatgaggaggaaatcttatccttcctgcagtacgcccggacgctgtacgacaagagcctgcctattatctatgaccaggagcacctttccctcctggtcggcttcgattattactgctgtctcttaccaatttcaaattggcaggttgacttctacaaaaagtacgaaatacccaaaaagaacggcggtattcgcattatcgaagagccttatccagccttgaaggagatacagacatggattctgaagcatatccttgagccagcaagcctgaggtatgtttcccctgtggccaaggccttcatgccaggcaaaaatctacgagagaacgcaaggtttcacagaaaacaagaactggtcgtagcgttggatctccacgacttttttggtagtgttaaggcagtctctattttccagctgtttcggaaattcggatacaacaagagtgtgagcatgatgctctcgaagctatgcactctaagaaattctctgccccaaggagctcccacgtccccgatgttgagtaacttgatcttctacgaactggacaaaaaattgttccggtattgtcaagctcgcaatatcagatatacacgctatgcggatgatatgacattcagcggagattctttttctgtctcccatctgattgcctatgtgaaaatgctcgtggggaccaggcattataagttaaacgaagagaaaaccaacgtaatgcgtaaggggtgctgccagaaggttactggagtggtggtgaatgataagatccaggtatcaaaatcatacagagataagatccgacaggaagtgtattactgcataaaatttggggtggctgatcacatgcggaaaatcagcctgccgggctggatcactacccctaccatctacctgcaccatctccttggcaaagtcaactacgtgctccagataaaccccaaggacaaggtgtttcttgagtataggaagtgtctttgtgacctgctgctcaattga

SEQ ID NO: 9809 - RNA, 1038 nt, synthetic construct
  source 1..1038: mol_type = other RNA
atgaattttaaaaaataccgctctgagttccttaaacgggccctcgagcacggctaccaacgctcagaggtggactcgctgctggtttacgcaaaggtgcttttcgacaagaacttacccattatctatgatcaggagcatctgtctctgcttcttgggtatgactatgattatctcttggcactgtgtaatagccagacaatgttctacaagcagtacgaaattcctaaaaaaaacggagccaaaagattgatcctcgaacctttcccaaacctcaaagatattcaaacctggatcctgaaaagcatactggagccggcctcagtgaagatggtgttcccgcaggctaaggcctttatgcccggcaagaacctaagagataatgccaggttccacaggaataccaatgtggtggtcgcgctggacatacacgacttttttggatctgtgaaggagaaatacatctacaacgtgttctacacaatgggctacaaaatgccaattgtggtgatgttaacgaaactgtgcactttgaacgggttcctaccacaaggcgctccaactagccccatgcttagtaatatggttttttccaacatcgacaacaagatcttcaagtattcccgtaagcgatctatcagatatacccgttatgcagatgacatgaccttctccggtaaggaaattgacgtcgagaatctgatccgctatattcggagtctcattgggcacaagcagtttctcttgaatgaagaaaagacaaaggtgatgaggcgcgggtgcagacagatagtcaccggagtagttgtaaacaaggtcctgcaggtccccaagaaatatcgggataaagtgcgacaggaagtctattacagtatgaagtacggctttacttcacacatgagaagcatagagctgccttcctggattagcacagttgaagtatacaagcatcatctgctgggtaaagttaactacatcctccagatcaatcctaaggacacggagtttttgaggtatagggattggttacgggcttga

SEQ ID NO: 9810 - RNA, 1050 nt, synthetic construct
  source 1..1050: mol_type = other RNA
atggacttcaaagagtataagaaagcgtatatcgagcaagccctggccttcggtatctcgacaaatgcaatcgatattgctatcgaatatgccgagcatctgcacaacagaaagttgcccattatatatgatcagcagcatttcttccagctggtcgggtacgatgaagcttacgttatggccattgtgaaccagcctaaaagcttttacaaggagtacagtattcccaaaagaaacggcgacagaaggatcattcatgagccgctcccctctttgaaagagattcagacttggatacttaagtacatactgaatcccggagccaagatctttgtttcaagtgtagcgaaggcttatataccaaaacaatctgtgcgagacaatgctcgttttcacaagcgccaaaagtatgtgctttgccttgatctgaaagactttttcgacagtatcagctttcagcaggttttttccgtgtttcggaatatgggatattccaaggccctcgcaaccctcctctccaatatctgtatcctaaacaatagcctgccacagggtgcacctacatctcctatgttatcaaacatggtgttcaagtactacgatgataaaatctttgactactgcaaaagccgcaacatccgttacacacggtatgctgacgacctaacattttctggagacttcaattgtaaagccgtcgtgtcctttattaggaaggtcctgtcaaagaccagcttcgctattaacgataacaagactaagttcgtgagtcgcggcaacaggcaagaagtcacgggcgtggtagtgaacgaaaaactgcagactgcagccatataccggaaaaagatccggcaggaggtttactatattataaaattcggggtcgacaagcatctggaggcaattgagtggaaaagaccaattatcgagtacttacaccacttgctggggcgaatcaacttcaccctcaccattaataagaatgatagcgagatgaggaagtactacgaatatatccactccgtgctgaaggaatataaagaagaatga

SEQ ID NO: 9811 - RNA, 984 nt, synthetic construct
  source 1..984: mol_type = other RNA
atggagctgctgcttaactatgcacagagcttaaactctcataacttccccatcatttatgaccagtcgcacttctccaaattggtgggatataggtatgggtacatcctctgtatttgcaatagtcctgacgtcttttacaaggaatggaaaatcaccaagaggaatgggaagcttcgcaccatccacgaaccgttgccttcactgaaagaaatccagaactggatcctgaaagaaatactaaacaccgcggttaatgagttcgtgtctccagtggctaaagcatatacacctgatcgcaatattagagacaatgccagatttcacaagaacaaaaagattgttgtctgcctcgacattgtagatttcttcggaactgtaacgtacaagcaggtgtacagcatatttcgacaatttggttacaacaagagtatcgccacactactgtcaaacctgtgcatattggagggatctctgccacaaggcgcacccactagtccaatgctgagcaatctgattttctatcatatcgacaccgctatttttaagttctgtaaggagcggaagataatgtatactaggtacgccgatgatcttagcttttctggggatttcaatgtgggcctgttgatcagctatatatccaaccttctgtcctatcacggcttttccataaacgagaaaaaaacaaaggtcttaagccgcggccggtcccaacagattaccggcatcgtcgttaatgagaagattcaggtgtctaggcggtacagaaaaagaattcgacaggagatttaccatattatcaagtacggtctggaaaatcacctcaaaaagatcgcctatcccaaaagtagcatccagtatctgcaccatctcatggggaagattaacttcgtgttactcatcaacaaatcagacaatgaggctatccgttacatggaatacctcaagtcaatctacaattcctacaagacactcatctga

SEQ ID NO: 9812 - RNA, 1032 nt, synthetic construct
  source 1..1032: mol_type = other RNA
atgaattgggtcaaataccagaccaatttcatcaatagagctagtgatcggggcctggacgaaggcacaatcaattttcttcttgcatatgcgaaagcgttgtatgacaacgagctccccataattttcgataagtatcatttggccaacctggtgggttataaagtatcatacctggagcgtgctacaaaaaatacgtcaagattctacaagacgtacgaggtgccaaagaagcaaggtgggaagcgtatcatatctgagcctttacccagcttgaagcacatccaaaaatggatcctggtagagattctcaacaaactaaagcctagcaaatatgccaaggcttttatcaagaggcggaatactaagagtaatgccgtgtttcataggaataagaatatcgtccttactatcgacattaaagacttcttcggaagcatcaaggcccctgccataatagatctgttcaaaaagttggggtacacaaaccacctatcctgtctgttgggagatctgtgtaccctgaacgggaaactcccacagggcgcttcaactagccccgcattatccaacctgattttcttcgaggtggataacaaaatctccgactactgctcgtctaataacatcttctactctagatatgccgacgacttaaccttctccggcgattttaacgtgggcaagatgatcacatttgtccgcgaatgctttaatgaggccaattttaccattaacgaagaaaagctgagaactcgacgaccgcaccaaaggcaggaagttaccggcatagttgttaatcagaaactgcaggcaccaaaagattatcggcgccattttcgccaggaagtgtattatattaagaagtacggactgcagggtcacctcgagtttattaaggagaagaggaacaactatctcctccacctcattggaaaagggaactacatctacttccttaacaaaaacgacatttacgtgaaagagagtcttattttcctgaaggaactgtactttaagatgatgcggtga

SEQ ID NO: 9813 - RNA, 1029 nt, synthetic construct
  source 1..1029: mol_type = other RNA
atgctaaattttcgcttcagtaaagagtacgtccagcttgacttgtttgatgatttcggaaacgaggacagaggtgctgttgtccagcagtacataaaatgcattagcgataacaaagccaagccaatcctggacacacaacacctgtcaaagcttgtaggatacactgagcagtttctgttctccgtgagcgcctcccccctgcacttctatagagagtacaagatagccaagaagaacggcggggtgaggaccctgaatgaacccctccctaccctgaaggctgtccaaaaatttatcgctggcgaaatcctgaatgatgttgaaccccataaagtggccaaagcgtttcggaagaaccacacattgcgtggtaatgctgtgattcacaggcgccgccccttcatgttaaagatcgacattaaggacttcttctcgaatatcacagagcatgcgatttatacaatgttcttcgaaattggctacacgaggcaagtgtcacggctcctgactggattatgcaccctgaataacggtctaccgcagggagcacctacctctcctatgctcagcaatttagtcatgcgggagttcgaccatacggtgtttgaacactgtgtgcagaatgacatattttacaccagatacgccgacgacatggcattttctgcaagcgatgatcgagtcaagtccctgatacccttcatcagatccgagctcaaaaaatacgggctcgagatcaaccagaagaaaacaagttatagtggccctggggcaaggaaatatgtaactggcatcgtggtgaatgaacggctcaacgttctgcgaattgaccgcaagaatatccgacaggaaatgtattacatccggaagtttgggattaacgggcatctgagaaaaaccaacaactcttcaccaaactatgtggataggttgatgggccgtctcaactttgccttcttcgtaactaaggaaccacactttcttgaggatatgcgctatctgaaggagttgaagaaagttctttga

SEQ ID NO: 9814 - RNA, 1029 nt, synthetic construct
  source 1..1029: mol_type = other RNA
atgttgaacttccggttttctgaggaatacattcagctcgacctgtttcatgactttggcttagcggatcgcgagagtgtcgtttcagaatacatcgaacggatcagttctaatcgcgccaagccaattttcgatactcagcacctgagccacttagttggctacagcgaacaattcctgttcagtgtatctgcttcccctgtgcacttctatcgagagtataagatagcaaaaaagtccggcgggttgcggaccctcaatgaaccacttcctactcttaaagccgtccagaaagtgatcgtgcacgacatatttagagacgtggaaccacataaagccgccaaggcttttcggaaaaaccacacgctccgcggcaatgccgtgatccacaggcgacgacccttcatgctcaaagtggacatcaaggacttcttctctaacatcgatcagcatgctatttatactctcttttacgagacagggtacaccgagcaggtcgcaagactgctcaccgggttgtgcaccctgaacgggtgtctgccgcaaggagcacctacctcacccatgctgtcgaacctggcgatgagatccttcgataacgccgtctttgagcactgtgtgcaaaacgagattttttatacacggtatgctgatgacatgaccttctccgcagtagacgaacgcgtcagaaatattatcccctttattcgtagcgaactgaagaagtgcaggttgcagataaacgagaaaaaaacatcattcagcggaacgggagcccgtaagtatcttactggcgttgtggttaatgagaggctcaacatcctaaaggaggataggaagaatctgcggcaggagatgtactacataaggaagtttggtatcaacggtcatctgagaaaaacagagaatcacagctccaattatatcgaccgcctggctggaaggctaaatttcgcatttttcattaccaaggaagcccattttcaggaagatatgagataccttcaggagttaaagaaagtgctgtga

SEQ ID NO: 9815 - RNA, 1029 nt, synthetic construct
  source 1..1029: mol_type = other RNA
atgctcaaatttcaattcgcccaggaatacgtgcagctggacctgttttcagacttcgggagcgaggatagatatgagatcgtccaagaatatatcgacggcatagccatcaataacgccaagccggtcctcgactctctgcatctgagtaaaattctcggactttctgagtacttcctgcactcggtgtccgcaagtcccgaaaacttttaccgcgagtacaaggtccctaagaaatctgggggcatgaggattatcaacgaacctttacctactctcaaactagtgcaaaaaagcattgtggacgatctgctgcggaatgtggagcctcacaaggcagctaaagcgtatcgcaagaatcacacgttgagagggaatgccgtcattcaccgcaagcggccctatatgctaaaggtggacatcaaagatttctttcccaacattgatacccatagcatctatcagctgtttttcggattaggatacactgcccaggttgcccgccttctgaccggtctatgcacactgaacaacggcttaccccagggtgcaccaacctcaccactcctttccaatttggttatgcgaggcttcgatgcagctgtcttcggccactgcatcgagaaagaaatattctacacaagatacgccgatgacatggctttttcatccaaggctccggatctgccaagcctgcttccatttttgcgtcaagagctgaaaaagtgtcgattgcagataaatgacaagaaaacagacttcgcaggaaagggggcgagaaagtttgtgaccggtatagtagtgaacgaacgactgaacatcctgaaggatgagaggagaaagttgcggcaggaaatgtattacatccgcaggtttggactgaatgggcatctccggaagactgataacgactccgctaattatatcgataggctcctgggccgtcttaacttcgcctacttcgtaacaaaagaggctaaatttcaggacgacatgaggtacattattcagctcaagcgggttgtgtga

SEQ ID NO: 9816 - RNA, 1038 nt, synthetic construct
  source 1..1038: mol_type = other RNA
atgagcaagtttaaaataacgcagtctctgactcacacccagctggatttgttcaataacagctcattcttagatcacgaagagatagtgacccgatacggaaataacattaggtctaatggcgctgttgtgatctatgacaccaagcatctctccaggatcatcggatatgcagaaagccttttgcatgccatttccagcagcccgcaacacttttataggacctttgagatacccaaaaagtcaggaggggtgagagtgattaatgaacctctgcctactctgaaggaaatacagcggtttatcattgactatatcctgcgtggcgtagaaccccataaatctgctagggcctttcgcaaaaactacaccctgagaggagctgctgtcattcacaagagtcgcaactatatgctcaaactggacatcaaagatttttttgggtccatcaagtccttcggcgtctatgatatctattacaatctgggttacacctcacaggtagccggcctgttgagcgggctgtgtactctcgacggggagctccctcagggtgcaccaacatcaccattgatcagcaatttattcctgaaggatttcgatgagtacattttcgactattgcaagaacaactctattttctacacacggtacgcagacgatatgaccttttcttccaacgaggatacaatgaagcacataattggaatcgtcagatcgcgcctaagtaagcacggtctgaagttaaaccaaaaaaagacttccctgtctggcaagggagcccgtaaattcgtgaacggtatcgttgtcaatgaaaaaccaaacattctcaggagtgagcgcagatcgctgcggcagactatgtactatatcaagaattacgggattgacggccatattcgggtggcgaaaattgacacgcccaattacctagaccatcttctcggcaaacttacattcgcccacttcgtgacaaaggaggaggtttataaaaactacatcgactacatccgaagtataaagtccatccttaagtga

SEQ ID NO: 9817 - RNA, 1029 nt, synthetic construct
  source 1..1029: mol_type = other RNA
atgcccgatttcagattctctcaggagtacgtgcagctggatttgtttaacgactttgggagcctggatcgccgggaaatagtcgcaacatacgtgaccgagctgactcgcaacaaagccttggtacttttcgacgtgtcacacttcagccggctcgttgggttctctgaaggtctgctgcacgccatttcggctgcgcctttttacttctatagaagattcgatgtccccaaaaaaagcggaggcctgcggaccatttgtgaaccatttcctacattaaagttgatccaacgctttattgctgaacaggtcatcgccaactccgaaccacacaaggccgcccgagcatttcgacagaatcatagtttaaggggtgccgcagtgattcataaagctagaccttatatgctgacccttgacatccgggacttcttccccaccatctccggattttccgtctatcgggtgttttttgacctaggctataccgctcaaattgcccgcttgctttctggcctttgcaccctggagaacgggcttccccagggagctccaacaagtcctgcattatccaacctcgtactacgtcggttcgatgaagttatcttcaatgagtgcaaaagtaggggagtgttctacacgaggtacgctgatgatatgacattttcttcaagggaggacaatctggcggatctgataggggtcgtgcgcaaagagctgaggactgacggattgaagctcaatagcaagaaaactgtgatggccggcaagggcgcgagaaaatacgttaacggtgtagtggtgaatgagcgtccaaatatcctgcgagagaagagaaggaacctccgcaaggacctgtactacattaaaaagtatggcattaacggccacgttcgtttttcaaatatcgacatcccgaattatctcgaccacctcatcgggaagctaacatatgcccatttcataactaaggatcagaagtataaggaagacgcagcctacctctacgagctgaaaaagctgacgtga

SEQ ID NO: 9818 - RNA, 1032 nt, synthetic construct
  source 1..1032: mol_type = other RNA
atgtcaactttcgcttttgacaaggatctgcagcagcttgatctgtttgacagttttaagaacgagaaccgtgaggtgattgtcgctgagtattcccgaattattctggaaaatggcgccgcagtcattttcgataccgaacatttgtctaggcttctggggttctcacaggagctcctcttcagtataagcgctgcctcaaataagtactacagagagtacaccgtgctcaaacgatctggggggcgacgggttattaatgaacccctgcctacgctgaagatgatccagcgttttattctagccgagttgcttgacggcgtacgcctacataaggctgcccgcggataccgcaaaaaccacacactgagaggcggggccatcatccacagaggtagaccttatatgctaactttagacgtgcaagacttctttcccagcatcaatcaataccaggtgttccaggcgttgctcaaactgggctacacaaaacagatcagcagactgattactggactgtgtacactccacgatggactgccacaaggggctcctaccagcccgttactgtccaacttggtcctctatcaggcagacaaagccatctttgaccactgcgtggttcggggtctgttctacacgcggtacgcagacgatatgacattttcttcaaaagaggataacgttgtagaaatcattccagtagtgcggacacagttatccaatgtcggcctgcgcatcaacccacgcaaaactaatgtgagcaggagaggttcccggaagtatgttaatggcatcgtggtcaacgtcaaacccaacatactcaaaaccgaacgtaggagtcttcgccaggaaatgttctacattaagaagtatggcatagagggacatataaggtggtctaaggtggaggccccctattatgtggataagctcatcggacggctgacctttgcgttgttcgtgaccaaagacaagaggtattcgcaggaaatcaggtacctttccgccctgaagaaggcaatgcaatga

SEQ ID NO: 9819 - RNA, 1032 nt, synthetic construct
  source 1..1032: mol_type = other RNA
atgaccccttctgccttgaatattagattcgacgatggcgtggatgaaaaccatagggaactcgtctacttatacgcttccagaatagagtctaagggactgactgtgatcctgtcacctgaacacctgggccatctgctccaaatgagactggaggacatctatgctatatcaaacgcacctcagcacttttatagagaatacagagccaagaagaaatccggcggtacacgcaagatctctgcccccctgccactgctgttgtcgattcagcggtgggtgctgaaaaacattctagagccgcaagcaatccacccagcggccaaagcatatcttaagaagtcctctattaagcagaatgcacggttccaccgcggtcagaggcacctgtttaagagcgatgttcgtgactttttcgggagcattagtagccgctgggtgtattcccattttcagtcattgggatactcgcgtgctgtgagcatggttctcacagctatttgctgcaaagagaatgctcttccacagggcgcccccacatccggatatctatcaaacatctacatgacgagctttgacaaggccgtattctcttattgtactgagcgcaagttccggttcactcggtacgccgacgacatatccatctcaggatccggaatcaatttctctgagctgagtgcgtttgtgaaccgggaattacgagatattgatctgaaaatgcacagtggaaaaacccgactcatcaggagccatcaaaggcagaaggtgaccggggttgtcgtcaatgaaaaactcggccccggccgggatttcatccgaaaactgagacaggagtattactacattagtaagtatggggtggaggagcagagtagggtcagcgggtggaacaatagcatcgcctacctcaacaacattcatggtcgcatcgctcacgcaatatttcttaccgggcacgacgcccgtttgttagaaatgaagaatgccgtagaaagcctccttcgcaaatccgagtacatcaggggctga

SEQ ID NO: 9820 - RNA, 1032 nt, synthetic construct
  source 1..1032: mol_type = other RNA
atgaacttcagtgacctgaagatcaaattcgacgatggcgtggaggacgggcacaaggatctggtgcatcagtacatctcacggctggagtcccaggggctctcagttattttgagccccgagcactttggtcatcttttacagataaggcttgagcatatctacgccatctcaaatagtcctaggcacttctatcgcgaacatcaagccaaaaaaaagggcggaggaactcgcaagatctctgcaccattacccctactcctcttcattcagcgttgggtgttgaagaacatcctggagccccaggccattcaccctgctgcgaaggcatacctgaaaaaatcctccataaaacacaatgctagattccacaggggccaggcacacctttttaagtccgacgtaaaggacttttttggcagtataagctctggatgggtgtataaccacttcctcgggctggggtattctagggctgtcagcatgctattgacagctatctgttgcaaggaaaactgcctgccacagggtgcacctacatctgggtacctgtcaaacatttacatgacaaatttcgatcaggtggtctttagccattgtttgaaacggaagttccgatttacccggtatgcggatgacatttctatcagcggctctgagattaacttcaaggaactcagcacgtttatcgaccgagaacttcgcaatattgatctgaagatgcatacagggaaaacccgtctcatcagatcacaccagagacagaaagtgactggagttgtcgtgaacgaaaagttgggcccgggccgcgattttatgcggaaactgagacaagagtactattacatcagcaaattcggagtcaacgagcaagccagggtttcgggttggaactccagtactgcctatttaaataatttccatggcagagtgacccatgccctgtttctcaccggacacgacgagaagctgtccgaaataaagaatgccgtagagaatctgctgcaacggtccgaatacattcttggttga

SEQ ID NO: 9821 - RNA, 1020 nt, synthetic construct
  source 1..1020: mol_type = other RNA
atgacaagctcagggatcaaaatcgttttcgctgaggcaatgaagccggagcagtcagccgctgtgagagcgtacatcaagcatttcgaagaaaaaaatctccccgccattttgtccggggaacatctgagccttcagctcggaatcaagcagtctactctgtacgctatcagtaattctgctaacgctttctatcggaccttctatgtgcagaaaaagaatggtggtaagaggcaaatatctgcacccctacctcttctcttggctacgcagcagtggatcttgtcaaaaattctccaaagtgtaacggtgcatcccgccgctaaagcctacaagaaaggcagctcaatcaaggagaacgccagatttcacaaaggacaggagagtttatttaagagcgacgtcgaggatttcttcggttccatttcccagttctgggtctatgagtttttccactccctggggtacactaccgcaatctctaggctgctggccggcttgtgttgcaaggatggcgtgctgccacagggagcggcaactagcgggtacctgagcaacatctatatgtgtgtgtttgatgacgccgtttttacctattgccaaacaaatcgtctgcggtacacccggtatgccgacgatatagcaattagtggagccgggatcgactttgataagaccaaggacattgtgtctacacttcttgaaaaccacaaactgagaattaaccttcgcaagactcggattcaacggagaaatacaaggcagaaaataaccggcgtagttgtgaacgacaggctggggccagaccgccagtttctccgacgcatccgccaggacttacactacatacgaaagtttggagtccatggccacgcacgccaacgaggcttcaaatcgcctctgttttgcattaacaatctcctaggacgtatcactcacgccaaattcttgttaggcagaaatacacctctcgagggcgagaagaagtacctggaaaggctgctggatcagatttcctga

SEQ ID NO: 9822 - RNA, 1020 nt, synthetic construct
  source 1..1020: mol_type = other RNA
atgtcactcttgtcagacaactttgagtttggtgggaagatagggatagcagaaagggaagcggtagagaaatatgcccagcgactaatagacaagggcctgcctgtgatcttttcccccgagcatctttctcacattacaaatatccggctggaggctttgtatgcgatgtccaattctcaagagtcatactatcggagctttgacattcccaagaagtcaggcggcaggagaagaatcgatgccccattaccttccctcgcattcctgcagagatggaccctggataacattcttaatagcgtccctttacacgccagcgcaaaagcctaccgtaaaggaaacagcatattcgataacgccagattccatcggaagcagcgcgttgttctcaaagtggacgttaagaatttctttgggagcattgaagaacactctgccttccttatcttcaaagggctgggatacagcaagaggctgtccaaactgttatccatgaccgcgagtctacacggttccctcccgcaaggggctccaacttctggtgctctggcaaacatttatatgaagaccttcgacgatgccgtgtttaatgcatgtaaggaaagtaaagtccggtatacacggtacgccgatgacctcacattctctggaagtgactttgatacggacgcccagatcaggctggtggacaaacagctgagtaaaatcggcctcagcgtcaacgcaagaaagactcgagtgcttctgccacatgtgaggcaagatgtaaccggcctcgtcgtgaacgaaaaaatctcggttccccaggattaccgacgccgtttgcggcaggagtgctattttatccagaagttcggaatccacggccacgctcgcgaagtcaacgctgctaatcctcgcgtgcgcctggaggaggtgattggaatgttgagctacgtgaagtctatccataagaatgagccctactggtcagacgctcatagtagaatgctggagattagggcctccttcttttga

SEQ ID NO: 9823 - RNA, 1020 nt, synthetic construct
  source 1..1020: mol_type = other RNA
atggattttcaagtggagagaatcgagttcggcgaaaaaatcggccttgcagagagggaggctgtcaataagtatgcgcaattcttggcttctcaatcattgcctgtcatcttctcccccgggcacctgtcctatattacgaacatgcgtatcgagtctctgtatgcaatgagcaactcccaggagtccttctaccgcagatttgaaatccccaagaaatcggggggacgcaggagaattgatgcgcctctgccatcactggctcacattcagcgctggattctagacaatatacttcaaggtgtggcactgcaccctagtgctaaagcttaccgaaagggttactctacatttgacaatgctaggtttcaccgcaagcagtccatagtgctgaaagtagacgtcaagaacttcttcggctcaatcgaggaacattctgttttttcaatctttcacgacctcggatacagtaaacgactcagcaagctgtttagcatgatagccacccttgatggcgtgttaccgcagggggccccaactagcggagcattgagcaacattttcatgcgtgcctttgacgaaaaaattttcgccgattgtaaacggcagggaatcaggtatactaggtatgccgatgacctgaccttcagcggtgacgccatcgatctgagagagcatattcggctcgtcgacaaggaatttagcaaggttggactgacattgaacagtaagaagacacgcgtgctcttccctcacatgcggcaggaagttaccgggctagtggtaaatgactccgtgagtataccccaggcattccgaagacagctcaggcaggaatgctactttatcaaaaagttcggcattcatggccacgccagagaagtgaacgcacggaatccccggatactgcttgaggaggtcatcgggaaattatcttacgttaaagccgtgcatgccaaggatccatggtgggctaagaaccatgccattatgctggaggtgcggaagaatctcatctga

SEQ ID NO: 9824 - RNA, 1080 nt, synthetic construct
  source 1..1080: mol_type = other RNA
atgcagaaatctgaattgatctctcggaacatcaacgtgatttttgacggtctaacggaagcacagattgccgcagtgcaaagttactcagccagcctggcagatcgcgaccttcccaccatctatagccccgtgcacctgtgtcaggtagtcggcgtgtctccacagtacttgtttgctgtcagtaatgatcctaaacgtttttacagagggtttagtataccgaagcggaacggcggcagacgtttcattcaggagccgctgcctctcctaaaagccgtccagcgatggctcttggctaatatacttgagaaagtcggagtctcccccttcgtgaagtcttacatcaaggggattaacctgaaacacaacagccggttccacattggacaggactttgtatttaagctagatctcgagtcatttttcgatcgcatcctgacaaaggatgtcgtggaagtgttttacaaggccggatacacaagagacgtttcgattttcctcgccaaaatttgcgtgtccaatggccggttgtgccaagggtcacccacttccggcgcaatctccaatatagtgctcctcgaatttgaccttacactgttcgagttctgccggtcccgtgggttccgctatactagatatagcgatgacattaccattagcggaaagatggacgccggtaccaatttccatgagatcctgctgttcatctcagaacttgcgagcgctaacggccacaaaatcaacaaagggaaatctcaggtactgtataggcataataggcagaaggtcactggtatcgtagtgaatgagaagctgaccgtgcctagacctgtgcggcgaaggttccgacaagagttattttacttcgaacgctatggaccacgcgggcatgccgaaaggatcggagagggcttagatcagtgtgttgctaggttaataggccaagcgagtcacttgctcttcgttaggcccgacgacgagttcgttagagtgaagaaggacctgctgcttagagttctgcgccagatggatgctgacccacagtttggttttgatctggggggcaggccactgtga

SEQ ID NO: 9825 - RNA, 1065 nt, synthetic construct
  source 1..1065: mol_type = other RNA
atgttgatcacaagggaaatcgacctcgtcctggatgagaatcttggtgtcgccgcgaaggaaaacatcagcgcttattgtggtaaattgtctgaaaggggacttcccgccatcctgagtgccgatcacttttcattaatgattggggtagacggacggtatatctatggtgtctctaacaatgctgacaggtactatcgcgtgtttcagttgccaaaaagacgtgaggggtttaggactatttgcgaacccctcccaattttgaaaatgatccagcggtggatcctggataacatcctgagcaaaatcccccccgcaaagtgtgtgaacagctacatagtcggccgaagtattaagagtaatgcgcgactgcacttaggccaggagtccctgatcaagctagatgtaaaagatttcttcgggagtatttctagccatcacgtgtacaagctcttcttcgatctcggctataccaaggccgtgtcagtttttctgtcccgcctctgcacctataagggctttctgcctcagggttcgccaaccagcgggtccatatcaaacttagttctaaggggagttgacgaggccctcctgactttctgtacagagagaaagattcgctacactagatacgccgacgacatgtgcttcagcggcacaaacatagctgcacctgacctaatcgaatttgtacgtaagaatctcggagagctggggctgaagctgaataacgacaagatgcgcatactcaaacaatctcacaggcagatcgtcacaggcattgtggtgaacaaaagactggcagtgccgcggttgagacggcagagacttcggcaagagatctactacctcaagaaattcggattcgtgtcccatgctatgaataccgatgactccgaccctgttgccctgcttcgccggttgattggggagtgcgcattccttatgcacattcattcaaaggacgtggtggacataagagatattgaatttctgaaagctctgctgcgagaggaactggcccgccagaggcattggacgaatggcgatgaggatcttttttga

SEQ ID NO: 9826 - RNA, 1029 nt, synthetic construct
  source 1..1029: mol_type = other RNA
atgaattggagtgaatacgaggccgccatcagaagggcatgccgtgagatacacggcatcccccccgataggacacgcttactgctcgagcgggccagacgcctctacgaccaggagctgcctgtgatccttgaccaaaagaacctcgcgtggttcctggggtttgatatctcactcgtcatgtgcattgcaaatcgcccccacaaatactaccgatgtttccgaattccaaaaagaaacggcggcttccgagaacttcacgaaccactgcctaccttgaaggagatgcagcgcgtcattcttgacctgattctcgcaagactgccagtggaccccgccgctaaggcttatcagccagggtcctctgtgaaagacaacgctaatttccatacaaggcagcctctgctgcttaagctcgatgtgagtgacttcttcgggagcctgcgggaatatcaggtttaccaagttttccacggtgtcggatatcaccctcaggtggccaccttactggctaagttgacttgtctgaatggaagcctgccccagggggctccgacttcaccaacattgagcaacctgatttttagagaagctgaccaacgcatcttccatttttgccgacaggccaacatacgctatacccgttatgctgatgatctgactttttccggagactttaagcccgggttggtgatccggagagtggcctctgttattgaaaccttgggccttcggcttaatcctgagaaaaacagggtgatacggcgtcacaggaggcaggaggtaaccggagtcatggtaaataatggactaagagcagcacggagccggaggatgcatctccgccagcaactgtattacctatctaggtttggtctagcggaccaggccgcgaaacatggcacgaagacgcacctgtggatcaaccatttactcggcctcgccggctacatccggtttctggatccgtccgatagggaggccgccagagctattgcaatgctgaaaactttgcgaggttcgacatga

SEQ ID NO: 9827 - RNA, 1056 nt, synthetic construct
  source 1..1056: mol_type = other RNA
atgaccgcccactccttacagagccttcctgactttaacgagtacagtgcaagattcacagaggccttaattagcagggacggtgaggactacgatccctcctacttgtcacggtgcctaagctatgcgaaaggcctcctcgagcgtcgactcccggtgattttcgacagggaacacctctgcgccctgaccggctactcttctcggtttattgagagcgctgtcggctcacctcatttattctaccggaatttcgagattccaaaaaaaagcggcgggtttagggaaatatccgaacctctgccaagcctgaaggatgtccagcgctggatttatcaaaaccttttgctccgtatccccgtttcagtggctgcaaaggcttttgtgccaggcaagaagctgagagacggcgtaagatttcacgtgggacagaagtttgtgatccgggttgatatcgctgatttcttcccctccatcacgagagggagggtcttcggattgtttaggtccctggggtatagttccgaagtctccggggacctcgcatcactgtgttgcgtgtgtgactgtcttccacaagggggcgtgtgctctccttacctgagcaatatcattatgcgcagtgccgatcgccgcctgcttgcctatgcaagggagaatagcttgcgttacacccgatacgcagatgattttacagtgtccggccagaagttctctaaatctataatcgaagaggtaatgtctgtgataaaatcagaggggttcactgtgaaccagaagaaaactagagtctctaggtcgggaggtcgccaggtagttctgggacacgtggtgaacggtaaggttaacgcccccagggaatatcggagagagctgcgaaaggttgcgtactacgtcgatcgatttggactggataaccatctcgcctatctgaatgaaagacggagcagtgcctcggactattatctgggaaaggctagtttcgtgctatcagctaatcatcgggaccgcgacgccctggatcttaaaagaatcttgctggacgaagtcgagtga

SEQ ID NO: 9828 - RNA, 942 nt, synthetic construct
  source 1..942: mol_type = other RNA
atgaaatactccaaaaagttgctggataaggggctgccagtgatcttcaatagggagcatctgtgcgccctgactggctacacccctcactttgtggaaagtgcagtgggtagcccgcatctattctatcggcacttcaacgtgcccaaaaaagcaggcggggtgaggctcatctctgaaccattgccttctctgaaggacgtgcaaagatggatatatgaaaatatcctgctacgggttcaggtgagcgtagctgcgaaggcttacgtgccaggaaggaagcttcgcgatggcgcgcgctttcatgtcggccagaagttcgtcgtacgagtggatatttccgattttttcccttctattactcggaagagggtctttggcctgtttagggccatgggttattcaccctcagtttcagcagacttgagcaacctttgttgtagtgaggagtgcttacctcaggggggcgtttgctccgcctatctgagtaacatcattctccgaagcgctgacgcccgtctgctcaagtatgcccgagcacgcggcctcagatacacgagatacgctgacgactttaccatatctggagaggccttctccccatcgattctgaatgacatccagtgggtaatccggagcgagggattcgaaattaaccccaaaaagacagctgtcatgagagctgggggacggcagatggtcgttggtcacgtggttaattcccgggtcaacgcccccagagaatacagaaggggtttacgccaagccgcacactacatcgagaaatttggccttgacaatcacctggcaagactgggcgaaacacgtggatccgctcgcgagtactatttgggaaaggtgagcttcgccctcagcgcgaaccgcagtgatagggatgccctgaaactctcagaggtgctttcggtcggggggtctgagtga

SEQ ID NO: 9829 - RNA, 1065 nt, synthetic construct
  source 1..1065: mol_type = other RNA
atgaacgcccactcactccatgcactcccctccttcgaagagtataagaaactgtttgtggagcgctatgttatgcgctatggaaacggaagcgacgacggtttcttggaacggtgtctggagtattcaaagaatctgctgagcaacgggttaccagtaatattttcaagacagcacttgtgcgctctgcttggctacgaggagggctacattgatgcagtggccaatagcccacacctgtactaccgcgagttcgaaataccgaaaaggagcggcgagaagcgactaatttcggaacctctcccttccctgaaagaggtccagcggtggatctacaaggagatcctgctaagggtgcctgtgtcctccgccgctaaggcattcgttccccggcggaaagttagagatgcggcacggtttcacgctcggcaaaaacacgtccttaagatcgatattgcagatttcttcccctctatcacaagagacagggtgtttggaatatttcgcctcatcggttacagttctgaagtgtcatccacgctcgcgcgcctttgctgcgtgaatgagagcttacctcagggaggtgtatgtagtgcttatctgtccaatgtggtcctgcgttctctggatggggatatcctgaaatactgtcgggggagaagcttacgatatacaagatacgccgacgacttcatcttcagtggagactcaatcgattacggttttgtcaagttcatttcgagccttattgtgtctcatggctttaacgtaaaccccaaaaagactaccgtgatgggcagggcctgtagacaagttgtggtcggccatgtcgtgaatgatagggtaaacgctccaagagaatatcgacgccgtctgagacagattgcctactttatagccaagcacggcatggactcccatctgagccatatcagtgagaataggtctggggcgcgggaacactatttggggcgagctagttttgtgatctctgccaatccaagggaccgcgacgccctcttcctccgtaacgttttgacctgcaggatggtcgacattgaatga

SEQ ID NO: 9830 - RNA, 1059 nt, synthetic construct
  source 1..1059: mol_type = other RNA
atgatttcctctatccgccacgtgaaacaatcaagcaactatgaaaccgagtggagacgctacgcagcagcctttctgagtgccgctaaggccaagaaactgtcccaagatgatattgatgcctgtctacagtatgccaagcctcttactctcggcggattcccggtgatatacgacacagaccatttttgcgggcttgtagggtataccccccattacgtcctgggtgccatcaagtccacagatcggtactaccgacagttctcaattaagaaaaagagcgggggggacaggactatcctggaacctttaccctccttaaaggaaatacaacattggatccttcgcaacgtgctagagcgggtggccatccacagagccgcgaaagcgtttcagaagggcacgtccatccgtgacaatgcgagatttcacaggggacaggcttgtgtactgaccattgacatcaaagatttcttcccttcaattgggatcaatcgcgttttttcagtgtatcacaggatcggatactctaagcaaattagtagtttgttggcagacctgagctgttttgagctgagcctgccacagggtgctcccacaagcccatatatcagcaacctgatatgcagaagtctggatgaaaggttcttcgcgtacgcacgatccgctaaactgagatatacacgttacgctgatgacctcaccttttctggcgctgacattggaagttcttttgtctccaacgcctacgagatcattcgggagtacggcttcgagccaaacctcagcaagacccgcctcttgcggcagcaccagaaacaaatggtgacgggtgtggttgttaattctaagcttcaggcagacagagctttacgcaggcagataaggcagtacgcctattatatcgaaagattcggcctggagggacatgcagctgccacttctgtccagaggcgaaatttcgaacggcacttgatgggcctggcacagttcgtctgctcgctcaacccctatgatcgtgacgcccggaatctgatagagctcctcaaaattgattga

SEQ ID NO: 9831 - RNA, 1035 nt, synthetic construct
  source 1..1035: mol_type = other RNA
atgaacgctgacgagaaggaaactgaatggcgcatttatagtgcctccttcttcgaagaggccttggacgtcgggctcactgctaatgagattgagatttgtttggcctacgcacagcccatcttcgaaagaggacttcccgtgatctacgacaacgaccacctgtcaaacttggtcggctacaaaatcaagtacatacagagagccgcaaaagccccagtgaatttctacagaaacttcaccatcagcaagcggtctggaaaaccacggaccatctctgagccgctcccttcactgaaggaaatccagctgtgggtgctgcgtaaccttctggataaaatgccagtgcatcctgccgcgaaagcgtttgtggccggtcgctcgattaagaataatgctcgctttcaccggggtcaaaggcgcgtcctgacagttgatgtcaaggacttcttcccaagcatatcttccgatcgggtaaaagctatttttgtaaaggctggctataattcccggattagttccctgctcgctaacctgtgctgcctaaacggcaagattccccaaggcagtcccacgagccctgccattagtaacatcgtctgtctggatatggacgaggagttttttcagtatgcccgttcaaggaaactgcggtatacacgctatgcagacgatatgacatttagcggcgatgtgattagacatagcgacatcaagcacatctacaggataatgcgaagctatcactttgagcctaacttagaaaagacccggctgatgaggccgcatcagagacagcagattaccggaataatagtgaataaccacatgcaggtttccagagaataccgaagggagcttcgtcaaaacgcatacttcatcgggaagtttgggatcgaggagcacgccgtggttaatgagatcactcatatcaggttccgagatcaccttctcggaagagcgaatcatgctctccacgtgaattcttcagaccgcgatgcaatccgactaaaagaagcattaaaaaggttctga

SEQ ID NO: 9832 - RNA, 1035 nt, synthetic construct
  source 1..1035: mol_type = other RNA
atgcaagatgcttccaccgccccctcctttgaggagtattccgccatcttccggtctaccgctggggcagacgcattacagcctgagtacgtggagcgttgcctccagtacgccaggaaacacctccaggatgggcgggccgtggtatatagtgctaatcatctgtcatcacttgtgggttatgacatcagctatctgtatggggtcgcgaattctggaggaaactactaccgcacctttagtgttccaaaaaaatcgggcggaaagaggaggatctccgagcccctgccctctctcaaggaaatccagcgatggattcttacatacatcctgagccctgttcaggttcacacgcacgtcaagtcctttaggatgggctacgggctccgcgctaacgccaggtttcatagagctcagaagattgtgttgcgtctggacgtactagatttcttcggctcaataagagtgaaacgcgtggccgacttcttcctgaagctcggatacgcgaaaccagtcgcaacactcctggctggagtttgtacgctcaacgggaaactgcctcaaggggcacctacaagcccggccttgtctaatcttgtgccctggccggtggatgtaagattgtcaacttttgcccgcaatgagggaattcggtacactagatacgcggatgatatgaccttcagcggcgaattcaaacctggtaaggtaatatctatggccagccgggtgctgagggagaacggctttcagctaaatgtcaagaagacaaacgtcatgggtgaacaccagcgccagctggttaccggcgtcgtggtgaacgagaaactgcaagtgccaagaggggtccgacggggtctgaggaaggaagtctactatatcgaaaagttcggcctgactgaacatgtgcgacggatgggcgtgagcgacccaaagtatgtgagtagacttcgcggaatggctgcacacattttagcagttaaccccaatgacgaggaagctaaaaatgccttaagatttctgggcagtttgtga

SEQ ID NO: 9833 - RNA, 1065 nt, synthetic construct
  source 1..1065: mol_type = other RNA
atgcgaacgcatcgagatcttgcttcttcttgggctgcctacgaggcagccttcatcatagaagccaggagacgggggtattcagatgacgacgtccgcacatgtctatcctatgccaagaagctgcacctgagtaacctccccgtgatttatgatcaggcccatttcagcgaccgagtgggatatgatattagctacatccggcgggcaagcaacgaccctgaacacttttaccgcacctttaacgtgcccaagaaaagcggcggggtccgtcaaatcaatgagccactgccctcgctgaaagagatccagcggtggattctcgacaatattctgggcgcaatgtccgtgaacccatgcgccaaggctttcgtagtgggaagagatgtgagagacaatgcgaggtttcaccgcaatcagaggatagtaataaacgtcgacgtgaaggactttttccccagtatcactcatcgtcagattcgcatgatatttcttaaagccggctattccccagaggtaggagagctacttacacaactgtgttgtttggacggggtattaccgcagggagccccgacttctccttatatctcaaatctcgtgtgcagacctctggatgagaggctgttcggttacgcgaagaagaacggtttgcgctacaccaggtactcagacgatatttccgttagcggcgatatggaacccgctgaagtccttcagttcgttaaaaaagtgtgccgggagcacggtttcaagatccaccctgacaagatcagggtgttaggaccagggagacagaaaagggtgaccggcattgtcgttaataaacatttgcaggtcccacgcaaaaagcgtagggttctcagacagagtgtgtactacatcaagaaattcgggctggatgaacacctgtctaagacaaaaaacaatcggcggaactttctcgatcatttgatgggccaagttaactacgtcctgtttgtgaaccctaaggaccgagaggctcaagattggctcagacagctgagagaaattaagaatggcgcaatcgactatcgcgattga

SEQ ID NO: 9834 - RNA, 1065 nt, synthetic construct
  source 1..1065: mol_type = other RNA
atgaattcactctacacccccgagtacttcgtgaaggttgctgagcactgcagcaatgccggttttgcagcagacgccatcgaagatgtgctggtgtatgcgattcagattgccaatcaaggcctgccaataatatacgatgatcaacacttcagtcaacttgtgggctatgacttgcagtatatctacggggttacaaacgaccaaagcaagttctataaatcctttacgaagaagatgaggagcgggaaaaagagggaaatcgaccagccatacccctctctaatggagatccagtactggatactccacaacatactggaaaaaatcgagtgctctccttacgctaaggcgtatattaaaggtcggacactaaaggataatgcccgctatcacgtcggcaagaacttcatcgtcaaggtggacattaagaactttttcccctcgattaagacgggctccgtgtacaagctcttttacgattgcggatatactaagcagcttgctaccttattttctagagtcctgactttgaatgggcatctccctcagggggctcccaccagtccagctatctccaatctggtctgtcggtccctggatgaggtactgtcaaccattgcacacgaccgaaaactgtcatacacacgctatgccgatgacatcgcctttagcgccaacgagtaccctaaattcctgattagagagattcgctcatgtatgcgagatcatggattcgagctcaacgaaaccaaaacaagggttatgaggcagagcggcagacagcaaatcacaggcatcgtggtgaacaaaaaaatgaatgtatccaaggaacgtcggaggcgtatcagacaggaactgtactatatcgagaaatatggaatcgaagaccatatacgctatattaatgagactcggaaaaacaccatcgcacatcttgccggaagcttgtcctacgcaatttggattcagccgagatctgccgaactgaagaaatacagtaagatgttggctactttacacaaggaccttgagggtgaagacgatatccagactgagcagtga

SEQ ID NO: 9835 - RNA, 1044 nt, synthetic construct
  source 1..1044: mol_type = other RNA
atgactacattggacctaccttacgttactgatcgctataaggaaatcgccctacaatgcgggctgagcagtaaagacatcctttccatagagcgatacgcccagaaactcgaagcgaacggtctgcccgttattttcgacgagaaacattttagcgcgttagtgggctacgatatatccctcctgtatgcaatttcaaacgaccagagaaagttttacagatcttttaacatccccaagcgcaatgggaagcttaggcagattgacgagccacttcccacgctgaaggagatccagcgatatattctcgacaatatcctgtctaacgttgagattagcaaagcctccaaggcatttagtaggcattccgacattaagaaaaatgccaggattcacatcagacagcctgagatcttgaaggtggatataaaagatttcttcccatctgtgaacatatcatcagtgtataaggccttgtatgctctgggctacaccgatagcctcgctatgctgtttgcacaaatctgttgtttggacaagagtctcccgcaaggcgccccaacatcgcctgctctggctaatatcgtctgcagggacctggatcatgacttacttaaatattgcacggataggaacctgaggtacacccggtacgcagacgatataaccatttccggggagcgtatcaaaaaggagactatcaccgaagtgcgatttatgatcaagagcttcaaattcaagctcaatgaagagaagacctctattatgagatcaggcagccggaaggttgtgacaggaatcatcgtgaacactcggatgcaggcccccagagaaacacgccgggaattccggaagaacgtatttttcattcgcaaattcggtgtggatggccacattagtcagatagaggaggatcgtaataattacctgcggcacatcattggagtcggagaatttatcctgtgggtcgataataaaaacaaggaagtcgtgagcgacctgaacttcctcaaacgcttactgaaatccgagtctgtcgtatga

SEQ ID NO: 9836 - RNA, 1122 nt, synthetic construct
  source 1..1122: mol_type = other RNA
atgaaacgcaaataccgtcatgattggacggcctatgcagctaggtttaagcgcgcagctaagtctatcaacaaagacgacgaatatatcgccaattgtctgagctacgccaaaaagctctatgagaagaatctgcccgtagtctactctcaagagcacttttccttcttatgcggctatgagtataactatattttgagtgcatgcaactccgaaaaatacttttaccggaagatcgtcattaagaagaagaacggagggaatcggatcctcaacgagccattgcctagcctgaaggatatccagcgatgggtggttgagaacatcttggagaaagtggaagttcatccagccgccaaggcctatgtgcctaaaaagtctatcaaggataacgccagatttcatgtcaatcagaacgtggtgatatcagtggatattaaagatttcttcccatctatccacatatcgagggtctataacattttctcatccttaggttacagcgctgcagtgagtaaaatgctcgcggaaatctgctgttataagaattgcttgccccagggggctcccacaagcccttacctgagtaatatcgtgatgcatgaccttgatgatgaccttttcgcgtacgcccgcaggaatggcctgagatacacccggtacgccgatgatataacattcagcggcgatattaaaccttccaaactgatcgcaaccctataccagctcattactgagtacgggtttaaactgaataaacagaagatttccgtgatgagacgtggcgctaggcagatagtaactggcatcgtggtcaatcagaagatgcagtttcaacgggttagacgaaagaagctccggcaagacgtttactatattaacaaatacgggctgaacagtcactgtattcgcgaaggaattaacaagagaaattatctaagccacctcatcggagtagctaactctattctgttcataaatccgaatgacaaagacgcgcaggacgcctaccagatcatcattgaccttcttaaggatgagtcaaagctggacggacaaggtcgcctggacctgcgagtgtccgtcgaagacagcaggaccgagtcacccaagacacactga

SEQ ID NO: 9837 - RNA, 999 nt, synthetic construct
  source 1..999: mol_type = other RNA
atgatctccggtattacagttgagaggatcgccgaggaaacaggtctgaatcgccgattcctcctgctcctgtccaacaacattccagactactatcggatttaccgcattcccaaaaaaaatgggaactttcgcacaatagaggccccggcttcggtcctcaagcgaattcaacagtatatcctgtggaccatcttaccccggcagatcccgtgcacccctgagaaactggcagaaaccgctgaaatcctcaagggaaatgggatctctttccatagaagcaatcttgcaaggatgctgagtgccgccaccgcattcgagcctcggtcctcaattaagaagaatgctcaggagcactgcggcaagcccgtggttgtgagcctggacgtaaagaacttctttcccagcttgaaatatgacttggtgcgttcattatttcagcgcatcgtgcacgaggatggtgtggcggttatgctgtcaaagttttgtacgcttaacggccacctaccacagggagctattacttctccacatctctctaacctactcttgcacgacttcgacatcaaactgcgacagtactgtctcgcccacaaactggccttcacacggtatgccgatgaccttacttttagtggagatccaggaaatgaggagattactgggcttatcagatacgtgaaacaagaactgggcaaattgggccttaggctgaaccatgagaaaatcagaatacaacgtcaggggatgcgtcaggaggtcaccggcgtggtcgtaaacgcgaagactagcgcacctcgcgaagtgagaagaaggctgaggcaacagatgtactacctgaacaagcactgggaaagagaatggaggaagttggatgagcactccctgaatgtcttactcggccaggctaatttcatatgggatatggaccgcgataatcctgaatttacggaatatcggcggcagctgctagagataaagcatttctttcataactga

SEQ ID NO: 9838 - RNA, 954 nt, synthetic construct
  source 1..954: mol_type = other RNA
atgaattctaagttcttatatctccttgggaaccacatcccagatcactatagaatttaccggatccctaaaaagaatggtaactttcggaccatcgaggcacccgctccgattctcaagctgatccagcggtacatactggtgagggtcttgcccgttaggctcccgtggggtgagtccaggttacgtgagactgaggctagattgcgcgagaacggcatcagattcaggcccggcgagatacccagaatgctatccgcagcgagggccttcgaacgcggatgtagcatcgggaggaacgccgcagcccattgtgggaaacctattgtcgtaagccttgacgtcaagaacttcttcccatcacttaaatatggccctgtccgagctattttccaggagttggctgaggatgatgccagtgctgttatgctggccaagttttgcaccctgaatggacatctgccacaaggcgctgtgacgtccccccacctgtctaacctgctcatgcgcgactttgacgcggcccttgccgagtattctctgctccatggcttggcctacacccgctacgcagatgacctgacattttcaggagatcctagcaacgaggagatcactgaacttattagacgctgccggtcggaattagcgacactgggactgcggctgaaccgtgacaagatacggatccaacgaaaaggtatgagacaggaagttacaggcgtggtggtgaatgcaaaagtaagcgcccctcgcaagattcgcagagaactgagacagcgaatgtattacctcaataagcattgggagactgagtggcgtaaactggatgaacacagtctaaacgtgttgctcgggaaggcaaatttcatctgggacctaaatcggaacgacccagaagtggccgaatacaggaggcagctcctggaaattcgacggttttttcacaattga

SEQ ID NO: 9839 - RNA, 1362 nt, synthetic construct
  source 1..1362: mol_type = other RNA
atgaacggggatggggagtccctctccctgacagggagttgccggaaaggtatgtctggcaaacagatgtttacacgcatcccctgcgctcctctggctagaactagcacacccatcatttgtgtaatatccccgtggaattttttaggaggacatactttgagatgcgctcaggttcggagcgcggctgtgaatagtaagagtctgtgtcggaaggcttctgaatatctgttccgcgccctctttgcgaagtttgtcttctctgacaagaccgccgtaagcggttttttacgggtcttcatgaaacagaacacattcacaattcagaaaatggcagaagacttaggcataaatgtgaagttcctatacctcctcagcaaccgcacccaggaattttacaagatttaccggatcccaaagaaaaacgggaaattcagaaccattgaagcaccatgcgctatcctgaagagaatccaggagtacattctgcgtttcgtgctgcctgataagatttcgttggggggtacgagatgtaccaaggccctgcagtcccttcggcgacaggatccagaagctgacgttacccgcaacgagatcacgggccttatgtcagcggcgactgcctttgaaccggggacatctattaagggcaatgctgaaaaccattgtggccgaccagtggtgatagccctagacgtgaaggattttttccctagccttaagtattcccgggtgctcgccctgtttcgcagatatactgaaactgagaacgccgctgtcatgctggcaaaactgtgtacactttacggccacctgccacaaggcgccgtgactagtcctcacatctcaaacctccttctgcacgatttggatttcaccctcaaactctatgccctggaccataatcttgagtttacccgatacgcagacgatctcacgttcagcggtaatcctgacaatggagagatctccggactcatccagatttgcaggcaggaactgcgaaagtctggactgcgcttaaacaatgataaaatccggattatgcgtaaaggcatgcgccaggaagttaccggaatcgtcgtcaactcaaagatgaacgcacccagggaggacagaaggcacctgaggcaacagatgtactatctaaataagcactgggagcacgagtggaggaagctggacgagcattctttgaatgtgttgttgggcaaagccaacttcatctgggatcttaacagagagaatcccgaaattgccgagtataggaggcaactgctggagataaaaaggtcgttccaacgtgaggccaagaaagcaatctgctcagcaccccaagacagcgcagagcaggccaattga

SEQ ID NO: 9840 - RNA, 954 nt, synthetic construct
  source 1..954: mol_type = other RNA
atgaagatggcaaccttcctgctgacaatgtactgtaaaattcccaagactctgtcggagcttacgcagtgcctggggtctaccactgagtttctttattggctgtccaaccacatccaggagcagtacactatctttcagatccctaaaaagaatggaaaaacacgcacaatagaagcgccaagccaactgctaaaaaagatccaacggaggatattaagcaagatcctcttccagagagccgaacgcagcgcaatggcctttgagaagcgacgcaacattcggaaaaatgcctccgctcatctgggcgcagccgtggttctctgtatggacgtgaaggattttttcccgtcactcaaattctctcaggtcacagattacttggagtccctcggcatgcaaaggaacgtgtcagtgttagtagctaaaatctgtaccctacagggccacttgccacagggggctgttactagcccccatctcagtaatctgctattggcacctctggacaaggcgatcagaaacttctgcaaagtcaaaaagtaccactttaccagatacgctgatgacttaaccattagtggtaagatgaatgacgaagacataagggaggccattgccgtctgcaagaaaaacttcatgacaatcggattgaagctgaatcctgataagacccatgtgatgcggaacgggaatcggaaaatggtgacaggtattactgtcaaccaaaagctgtcagccccaaagtctctccgaaaaaggttgcgccagcggatgtattatctgaatcacttctgggagaaggactggcacagactgacggaagaagaactcaacaatcttcttggacttgtaaatttcgtgtggtccattgatagagagaaccaggaattttctcagtatcgtacccagctgctggagattaagcgtttttggaacagtgttcccaggtga

SEQ ID NO: 9841 - RNA, 945 nt, synthetic construct
  source 1..945: mol_type = other RNA
atgattaatgggaagctgagcgaaaaactcacatccgttaatatgttagcccggaagctgggtctgaccgtcaagcagctgttttttatagtgtacaacctcgagaagttctacactgtgtatcaaattcccaagaagaacggaaaattccgcacgattgaggctccagaccctttattgaaaaagatacagggacggatcttgcaaaaactggtgagtagacacaccagcaaaacagctaccgccttcgaaaagaaacgaaacatcattcagaatgcgcagattcacctcaatcaaccagtcatcgttggcctggacgtgaaagacttctttccttcactgaaattcgagctcgtgtggaagtatttccgcgaccagaacattgcccgggaacccgccagactcatcgcaacactctgtacgtttaaagggcatctacctcagggggctgtcacttctccgttccttgccaataggttgctgcatgacttcgatgaagtcatgtcccagcattgcagacaggtaaaggtcaattatagtcgatacgccgatgacatcacactcagcggcaacatttctgatgcacttaaggagaaattgatctccttcgcaagggaaggcttatacttgtacggcctgcagctaaacaacgaaaagatccgtatcctgcgtaggaataatagacaagaggttactggaatcgtggtaaatgagaagctccaggctccccgcgaacttaggcggattctgaggcagaagatctattaccttaacagattttgggagaacgattggcaaaaacttaccgagaatgatctagacaagctgctgggtcaggtgaactttgtgtggtcgatagataagaccaactctgagtttaccgagtatcgcaaacagctgctggaaataaagcactactttactctgtcaacaaaggagaaatga

SEQ ID NO: 9842 - RNA, 987 nt, synthetic construct
  source 1..987: mol_type = other RNA
atgggcggccctctgctgtcatgtgctttctcactcttcttcgtcggggggtctgtcatggtcaggtttccagatgggagtttgagcatcgcaacagtggaagccatcgccgacgttctgcaggtgagcccgaagtttctgtattatcttagcaacaacgttggtaaacactacagaattaccaagatcccaaaaaagaatgggaagttcaggaccattgaggcccccgactcttacctgaagcacattcagcgaatgattctggataacctgctcccacagtcagtcggagaaattgccaccgcgtttgagcctggcgtgggactgatggataatgttgtgcagcacgttggaaatcctgttgtgctcgcactcgacctcaaagatttcttcccatcgttaaggctccacagaatcgttagagtgctgcgcgagcttgacttccctcgagccagcgctgtattattggctaaactttgcacgctcaacggccatctaccgcagggagcccccactagtccccatctggcaaacctggctatgagaacttttgatgacagactttccctactgtgcaggcaggagaatctggcggtgaccaggtacgccgatgacataacaattagtggcaatatagaccgacattgtgcagaaagcctcatcgcctcctgccgcgtgatgctgaaggaaataggtctgcggatcaattaccgtaagcttcgtattctgaggcaaaacgcacggcaggaagtgactggtgtggtcgtcaacgagaagccatccgtacctcggcacatccggcgcgagttgcgaaaaaagatgtactatttacggcgccatggcgttgtggggtacgaacccgtgacattggaggctctacggtctttgcttggatccgtgatgtttgtgaattatgtagatcccgacaactttgagttccgccaatatgccgaggaactgaaagtcagaatcaaagagtgtgcttga

SEQ ID NO: 9843 - RNA, 921 nt, synthetic construct
  source 1..921: mol_type = other RNA
atggaaaccctacccataattaggacggtggatgagcttgccgagctgctgtgcacagacgcaaggttgctgtatgctatctcaaatgagactcctgcttggtataagtgttttcagatcccaaaaaacaacggttctatgcgcaacatcgaagcccctcgcccctatctcaagacaatacagcgcagaatccaaaaaaaaattcttagctgcttcaccgtgcacgattgtgccaccgcttttctccccggcaaaaatattcgacgcaatgccctgttccatgtgaataagtccgtggtcctgaattgcgatatcaagaatttcttcccaagtcttaagtcccgtgccgtttttgagttctttaggcggaggaccgggtacgaacctgacgtctgcatgatgctgtcacggttatgtacattatatggccatttgccacagggagcaccgtcgtcacccatgctctctaatctgctcatgtttgagattgacgaaaccatatgccaatggtgtgcgaagcactacctgtcctactccagatacgccgatgacatgacgttcagtggtgaaatcgatgtacgagtgcaggcagacatactgcagatggtgaagcggaacctgaccctccttcacttgaagctgaacatcgctaagactaaagtgtatcgttctaatcgcagacagctcgtcacaggactggttgtaaacgagtacgtcggggttcctagagaaaaaattcgggagttcaggacttggctgtattatactgagcttgacattatcaacgagaacttttactacgacagcgatgagatcgaaagcagactcggcctgttgaacttctactacagcatcaactgtaatgagaacttattgcggtggcgggacagactgctagaaattaggcgaatgtacagctga

SEQ ID NO: 9844 - RNA, 993 nt, synthetic construct
  source 1..993: mol_type = other RNA
atgttcgagaaggtccactgggagtactctgagtttctgcccgtgctgccaaccgtcagagacttagctgggtgccttgatgccgacccacggctcctgtaccgcattagcaatcactccgccgagttttatacaatacataccatccctaaacgcaatggggggtgtcggacaattgaagcccctcacccaattctaaagcggatacagcaacgaattctgagaaaaatcttgatgcaggtcagcacgcaccctgccgcaactgcattcgaacccggcagatccatccgggacaatgcaatcagacatgtgggccggcctgtggtaatctcgctggatatcaggaacttcttccccagcttaaaggctggcgttgtatacgcgttttttaggaaactgggctacgacgttcccgtcgccgtgctcttgacccgactgtgcaccttatacggtcatctgtctcaaggtgcgccaacaagcccccgattgagtaacctgctattgcttccggtggattgtggcctggccgcctggattgggaccaagcctgtcgtgtatacaaggtacgccgatgacctgacgctctccggagccctagagcgcgaagatgtgtcagaagctataggagtgtgcagggctgcactggctcgcatgggccttaggctcaactcccgtaaaactaaagtgagaaggcgcggaagtcgtcagacagtgactgggctggttgttaacgaatctgtgagggtccccagagagactaagcgagcactcagacagttcatgtattatttggattgcttcggatgggagtcatgtcgcgaacacttcggaccgggcgacgagatgttgcttgaccgggtcatcggtttcgtgaattttatgtgggacatggataagaccgatctggttctgagggagtggcttgaccggctcctcctgctgaagctccatcccgaacaggtacctccaccagcgtatcgtgcttttcagtga

SEQ ID NO: 9845 - RNA, 966 nt, synthetic construct
  source 1..966: mol_type = other RNA
atggacgccgaggagactgcgagtggccttccggagcttccagacgtggaagctctgtcagaactgctgcagatagcgccgaagtggctatacagaatatccaaccacacacccaggttctaccgagtttatgctattcccaaaaggaatgggaaattccgaatcatagaggcccctagacccttgctcaagcgcttgcagagacgcattctcacttccttgctgaatcctgtggaggcctcaccttacgccaccgccttcgagaggggtaggagcatcgcggacaacgcaagatttcacctcaaccagccagtcgtcttgaaactggacattagaaacttctttccttccctgaagtctccccctgtgtatagacttttttttgaactgggacatccaccgccagtggctgcactactcactcggctgtgttgtttatgcggccacctcccacaaggggcaccaaccagtcctcgcctcgctaatctgcttctccgccccgccgattataggatcgccgcctggattgggagacgccccattcagtttacccgttacgctgatgatattaccctgagcggagattttggccccgaacacattgccgaggcaatccaggtttgcagacacgaactgggccggctaggacttcgacttaataggggcaagattcgcatagagcgacggtgtcggcgccaaacggtcacaggattgacagtgaatgagacactgcacgcccctcgacaaatgatcaggaagctcaggcaggagatgttctacatccggaaatatggctgggaagatcggcccgaaagcgagctgcatcggctgatcggtatcgctaacttcatccgtgatgtagacccaggtgacgccgcatgcaccgcacatttagaaaaactgcatgctatcctgtggaacaggagacagaagcagctgtctgagcagttccgtcgggggttatga

SEQ ID NO: 9846 - RNA, 4275 nt, synthetic construct
  source 1..4275: mol_type = other RNA
atgaaagaaaggatcagtcctgaggtgctggaaaggcaggttctcgacgctagcgtctttgaagacttgtttgccttcctgtatcttcttgacatagagtctcccctggatgagaggtattacctgcagcacgtgattcctagatctgatggaactaagagagttctgtacgagccaaaacccgtgcttaaggccctccagcaaaaactgttacaagtcctttacgacgtgctcgagaagcctcagccttatacggagtactaccggtttcagcagaaatacctcttatcaccttgcgccacagcgtaccgacccaagatgagtgtgatccaaaatgccaattttcaccagggcaatgaagtcgtgctgaaggtggacattcatgacttttttgggtctattcccgccgccaaaatgaaatccacatgggtcgaactgctctatttctgctcaaatcgcctgatacagtctggactcttggtgcatcgaatgaagcgagagtttgtagcccaggtgatcaacactcttgccgataagatcatatatatcacatccctcaatggtgctttgccccagggatctccaacatccggggcaattgcaaacctatacatggttcagcttgatcggaagatactgcactacagcgtgcgcaacagactcaattattcaaggtacagtgacgacatgactttctctggcgaggctgaggatttgaagaccggtaagatactccatttcctgaacggattacttgggagaaatggccttcggctgaagagatcgaaaacacaggttctccggaagcataagaggcagacagtcaccggaatcgtggtgaacgccagcaaaaatgcggggcgcacctatcagcgttccgtaaggcagtctatgcactacttcaaaaagtttggtaaagagcacgctttgagaacgcacaggaccctggatgcctttctgcgtgaaatcacaggacaggtcgcatggatcctccaagtacagaaatccaataccgagttcctgagatacaaggctgagcttaacattattagccggttccatcggcagggaaagcccgtggccgaagctatggactatttacgcaatttggcccagcaggcggaacagtggaaggcgaacgaaactgtggtgatcggcgggctggagtggaagaaggaaagtgaagtttatgaaggggaagacatggatggtatatatacctttcagcgcaggggacaaaagcgctcattctttaccaggaaagccctggagaagtatgttaataatcaccccgaatggcgtctacccactctgcacgaatacgagagatacttcgatgagactcgctaccatgaccgaatccagctcggactgacgctgccgtccgatcctaggtataacggcattgtgaacggcacagagtttctgcattttaatagggtcggcgcctattggacctgcgatcttagacccagaatgacactacggatggccaaaaaccgcctcggtagaaaagtcctgtgtgtagccgcaaagaactggccatttcagcatcacctggcgaaaatccgatgcgacttaagctacgtgcgccacgatcacgtgatggacctccgcgtacccgttaacgttccaggcaccatggagtattccagcagctctgacgacacccaggtcctcctgccagaagaagccttcagtgttaaactcgtgagggagatcaggcccaacgagcccatgaccaattttcaggggatggacttcgcccttcggaagttgtctaatagtcggttcagcacaaattttaaagggctgcaactcaccgagatcccaaaagaggtgctggcctcatggcagagttcttccatgctgtttgcaaacaaccagattgaacacttcgacttacgtaatgtccctccagtcaaacttctaaacctcgagaataatagactgaagggttttgacttctccgcgctgcacccgggccttagacaccttctgctgaaaggtaatcctgggttgaagggagtggaaattccctggattcagctgatgcgacagcttcatgaactttcactggatgacttacctgaccttgtcggcactatgcctttggagtccatctacctgcaagcattaggaggggaggtctggactatcctagaaaacgagcaggaactggacgctctcattggtcaacagaaaccggtttcccacctgttggtacgctacagggttggcattgatacgctggatagccggaccctatttgagaagctgaacagaatcgccccaaagcatctgtacgtttgcttcgagcctcaagacgagggactgcgtcggcgactcgatcgtctcaagtatatgaccgcatcatgggaaaaagagatcgaagagctggatgggtacataaagaatctctccttgagaaaggatatcgaaactagggtgaccctgtttccgcaacacttagacaacaatcggatcaagcacctgatgatcgacttcagctggctcccaaacctctgcttcgaaggcgattttagaattaagcctgatagttaccacctactacaccctggaatccccactttgctacttccagcaataagtcagcggttccaccggccaacagtgttgatgaaaatcatcggcaataagattgtgccaacccagcacgaattcccggaagctgtgagtctggacgtgtgttatcccctggctaaaaagcatcgcaaaatccggctctctaacctccatactttagtgcccatgcaccaggagcatgtcggggacctggtactagtgttaagcgaggatgccggcaaacaactggagcaaggccgcatcgaggaggtctatccccgggcatacgaactcagaagcggttcgcaattttggcatgacgtaatggcccatagcaagagtgaaaagacgacatttaggcagcggattagctctatccctctgctcggcctatctatgcagtttgacgtttatagcttgtctctaccaattgagagcgtgccaaaaattaaccgctttggagtgctgaatctgactgaagtgggcgagaacaacactatgacttacaatgataccgatcttaagcagtttctcgagagatcctcgcctagcacagagtttgcatatctgtccattttcgctcacaaaaccccggctattttacagttggtgcgggattcgaagcgcaaacgcaacgccgacctgccatatgtcatccgcaaaaatatctacgctaccgagccactggaacgctcacagacgattgacgctctcagagcaggagagctattagctatatctctgtccaagcctaatcgacgggaccgtgagatcatgctcgcagcggtcgaggccaacccctttgcaatggcctttgcccataaagcgcttaagcaagacgctggctttattctggctgcaatgaacatttcgttgcggaccttggttttcctgtctaaagatctgttcaagtccaggaaccatcctaatagcgcactgcaacaggtgttgaaagctttgatggaaaggtacaatccggaagatttcaacttcatcgtaggaagactcagccgacatataaacatcgagaaagaaccagtgtacaggttcgtcctggagcccaagcccctggattcaagcgccgtgctgatgtcattcgagcaggagaagaagatccttaacaacagattctgtcagcgcagtgggatgtacaaaccaattcgtaactacttcttcaaagaagctgaaaggcggggcttcattaatgtcaatgggtacttcaacgatatattcaaggctctgtcacagaacacctccgtccgattcttggacctgtcattcgccggcggtagaaccttgtacgctctcgatcgactgggtgatatccctggcctgaggaagctgaagctgactgaatgtaagttcatcaatagtctccctgggttgaagacactggaggtgctgaacatcaaccgaacatccaatttctggtcatatcacgacggcaagacaatgcatcaatccctgcccaaccttaaaaggttagaagcaaagtacattcacattagcatgcaggagattgaggatctgatggtgcaccacccatgtctcgagtatcttgccatcagcgttacatatgatgacgagttggcagagataaatgctataattgagaaggtgtctgcccaaggaaaagtaatagaaattgtgctggacaaatccgaatatatcggggagctccccttttga

SEQ ID NO: 9847 - RNA, 4254 nt, synthetic construct
  source 1..4254: mol_type = other RNA
atgatcgatcagaataatcagatcgtccagatttccgtaaatgacttcctgaagacagactttaatgttacacgtctgaagttcaatgctttgaagctgcttcatgagttggaactgtcagaggagctcagtgaggagtgctacatcaaacatgtcatccctaagcacgatgggacaaaaagaatattgtacgagccaaaacctttgctaaaagagattcaaaagcagttgctgaacctgttatacacacttaagaagcatagagactatcctgtgttgtctcggaacattaagtacaagtaccttccaacccggagcagcacagcatacctgaaaggctcgtctgtagtgaagaacgctaattttcacattgggaaagatgtggtggtgaagcttgatatctcaaacttcttcaacagcatcccaaaaaacaaaatagaactgttctggttcgatatccttaatctgaaggtcaagtacttgattcaccttggcataattgagaaggatgaaaccgaagacaaaaagcagctgattatatccggcctggcgaagaaggtactgagcagtacaaccttgaatggatttttaccccagggttctcccacaagcggctacatcgctaactcatatctggtcagttttgacaagaagatgctcgagttttgcgtaaacaaaagtttatgctacagcaggtacagcgacgatatcacagtgagcggcagcaactccgagcttgtcagtaaacaggtcataaagtttgttcagcaccagctatataagaagagcctcaagttgaagaagagcaagactaaagtcctgaaaagacacaagcggcagactgttactgggattgtggtaaatgaaaagagaagtgccgggagagcgttcaagagggggctgagaatgcagatgtactatctcaagaaattcggcctggatcatgtgagccggactcattccaatatcaattcattcctcctggagcttgcaggcaaggtgaattgggtgctgcaggtgaacaaagtggatccagaattcaagcgctacaaaggagagttgagcattattaagaggttcctggccctgggtaaaaccgtgggcgatgctaccaactacattagtgagctggaaaacaaggacttcaagatcaagaacaattccgtctttatagctggactgttctggcggatttccgatgacgatacccagacggattacccttccatagatcgaaaaaacaaatcggtgcaactattcactgaggaaagcatcgagttagctctgaaaaacaatcctggctggaggctccccaccatggacgagttcaacaatttcatcaaggaaactaacttcgaagatcgcagggttctgggaatccgatacccctttgacccccatttcaacggtctagcggatgagaatgggtatcgctattataaccgcgtgggactgtattggacgagtgacctggctcatctgtctaaagagaggtccactaaaggaagaattgctcgtaaagccatctgtttcctgagctttgaccagagaattaagaagaagatcaaccataacaccgcgtgctatatttcaagtaagacattctccctgagcgtaaacaaaaaacaaaagttcgagcttacgaacaatcggtccatcgactactatctgaatccgccactgaatgaggactttcaggcaattgttggagcctgttccattcgattggttatgtcagaagaaatgaccaaaaaacccatgatatctaagaccctctgggactccatccaactatctaaattttcagtggacctgtctaacttgaacttcgaggaatttagtttctccctcaagaatgttaatgcctcttctatactgctctacaacaacaatctcaaacacgtgaacctgacggaaattgcacctgtgaagcgcatcgacctacgaaataataagcttgagtccatcaagcttaacaatctccccaagggcgtgaagcatattaggctcgaagagaataaagaccttaagctgctcgacatcccttggaagagactattacagtccagccacgaactcacggccgaccagttgatttttgagcgtcagaaatcgcttggggaaatatacctgagcgctctagggggcgagtcttggaggactgtctcctcagatcatgagttgaacgagctgatcgattcaaaaaacgccgtggaattcctcaaggtaagattcgaaatcgggaccaataagatcgacagtaaagagctgtttaacaggttgagcaaacttgaagccatccacctgtttatagaattcgagactaaccacgagcaaatcaatcaattgatccaccgtttgaaaatgtcttttggctcaattaccccgctcaatgaacaccttaacagcctggaacgcgataacaaccaccaggagaacatctttctcaagcagtacgtgtttaatgctagcgatttgaagaatatccacctgaagtcactgatcattgattttagctggatccccaacataaagttcatcggagactttcatgttaagcccgacttatatcacctactgcatccaggaactagttttacctcactgccggcaacctctgtcgagtttcaccgccctaatattctggtcaaagtcttaggcgagaagcgcataggcaatgaacagacctacctccacgtaacctatccttttgactcaatcgaggaaaggcaccagaatatccagacaatcatcccaaagaatcagattttcatcgacgaactcattttggtgttatctaacgaaaatgagaaggagttgaaaaaaggacagattgaggaacactttcccaaactatacgcaattaatagatacaacagcaaaccacatgcatcaaagttaactaccaacctcatctattccaaacgcgtttctggtttccctctgctgggattcgcccttcagtttgatgtgcacaaactttccgtgcctctcgaatcgttctacaagaaggacaaattactgtttaacccagagcgtttcaagcgggagaaggggccaatcatggattggaccgaggttaatttcaaccaaaagattcactcggaaaaaaaaactcgcctcggaaaggaaaaccttctcagtgatctggacattttttcacacaagaaggaatcgaaaccgcctactataccaccctccgatgacaggcccctcaaccgaccttatatcataaaacacggggtgttcgccaaacataaactgtacagcgcctctgataacagtcggaacaaagtcatgactatgctcgccagcggcgaaatcgccgctaagcacctccccagtaagctgaagaatgatgaggaggtgatgttaatcgccataaagcggaacccttattccatggtctttgcgagtaaaaggttgaaagaaaaccctgcctttctgctgaaagcatgtaagatctccgcccgaaccctcgtgtttctgccaaagaaactggccaccaaacaagtgaaatctgacagcatctttaaccagctcattgactatctcctgtcttttctgacaccggcagaattccatttcgttatccacaaattaggtacacatatttcccagagtgacggcgagtaccggtattttacatgtgaggagacagccctggaaaaatcacatgtgatctcatcattcgagtccgaagtgttttaccaggaatctaccacaagagcagggatgcccaatattataaggaaaactttcctatccgaggcaacaaaacagggtatattcaattctaacgggtactataactccttggagctcgccaagcaaaacaaggagaactgtcgatatctggatctctctttctctggctaccaccatgacctaacggctctggaatctttcaagaacttaaagacactgaatctcagttataccagcgtcaattgcaaactcccaaacattccatccttagagaatctgtttgttgataatacccggaattttttcagctacaatacgcccactctgctgaatccgatattccccaatctgaagattatttatgcccgggaaacgggttatctcagcctgaaagagattacttctctgctgaatcttcttaccaagatcgagattatcgaccttagaccatacttttatatcaacgagaaggagatccttgctctccagcaacaactgattcaacagggtcgcacactggagattcccatcaaaacacccaagtga

SEQ ID NO: 9848 - RNA, 3696 nt, synthetic construct
  source 1..3696: mol_type = other RNA
atgaataatagcgaattgacccacaggtccttcacggcagattttcttaaatccgacaagatcgaatacactttcaacgcgttaagactcattcatgacctcactctcccagagcattttgacgaaagctactacaacaagcatgtcatacccaagtctgatggatcaagcagggtgctcttcgagccgaagccggtcctgaaggagatccaacaccagttgcttgaatttttcaacagcatcctcgagcaggtgcctagaggctatcgccagaaagaccggattcgcaaaaagtacctgccttcatcctgcgccaccgcatacaggaagggcaagaacgtcgtcactaacgccaactttcatatcggaaatgaagcattgctgaaagcagacatcgagaacttctttgatagtatcgacgtctccgaaatgtcctctatgttcatggacttcctgtacattaagtccgggtacttatctctaattggtatcctcgatgagaattggtctgacatcgagaaagctaaagtgcggctgagcctggccaaaaaaatcgttaccgtaagtagtctgaacgggggtcttccacagggctccccaacaagtggcattttagcgaatttctatctggccaagtttgaccggaaatttcttaactattgtatccgtcacaagctcaactacagcaggtactcggacgatctgaccgtcagtgggaatcaaaaggacctggctcccggagctttgcttcaccagatgaataaactgctcaaaccactgaagctaaggcttaagaagagtaagacaaagatactgcgacgtaacaagcggcaggttgtcaccggcattgtccttaacgaaaaacgaagcgcgggccgcctcctaaagagaagcttgcggcaagagatttactatctcaaaaaattcggagagtcacacgtttcaaagcatagcagtagtaccaagaagtacctgcgggagctgtctggtaaggtttcttgggttcttcaggtccaatctgcagacaatgagttcaggcgctatagtggcgagctgcagataattagcagaatggtaaggtcagggaagacccttgctgatgctgcaagttatatccaattcctggagaataaagctaaggagctcaaggggcctgagccattaatggtctgtggcctggagtggcgtaagaatgatctcttctatgcccgtgacctgtacaatttgtttgaaagagagatgtatgctgggagagtgggagggaacaaagaggaacccggactggtattcaccagaaggggcgtcgaaaaaaagctgtatacagaagagatgatgcttagagtagtaagcaggctcattaagtggcgtctccctaccagcgaggactttgctgactatattcgggaaactttttacgaggaccgagcccttctgggtctgagagtgccaagcgacccgcagtataacggaatcgccgagaaccatggcttgtgcttttataacaaaatgggtgcatactggacagcagatatggtgcatgttaaagatcctaagagttccgtgcgagctaaggtgggacgaggagtgttctacgtgaaatcccgccattggtccaccaagaatcgcctcgatctttttgggggggagtggatgagtaaaacaactgggatcaagccagtgaacgctgtctactacttcttggaccagcgctttcacaagaatctggcgacgaatgtgcccatcaaggataggccatgggttgagtctactcagctggcctgtagcataagactggtccgcacccagtccatagagtgggaagcgcaccatattagcgataaattttggcaaagcgtgtcatccacacggttttcctcagatttaagtgggaagcacatttcttcagtgcccacaacatatctgaagaattggaacagcagttctctgctgctagcccgcaacaaactggatcagttcgacctgacagcttgtcctcctgtgaaaagaatagatttgtcgggcaataaactgaagcacttcgacttttcgtctctccccaagggccttagacacttattaattgatgatatggacgccctcgagggagctaagctcccctgggacaagctcttttcttcccttcatgagttaactatcaagaaccctcacgatgaaccccaactgaccgatattagcgaactgtacgccctaggttttgggtactcagattgcgtcgaggtgacctcagacgaagagctacaggcattaatccagaacggcgagaaaataaagttcctcaaagtgaaggtgctgctgggctcgggtgcaatctccaatgagggcctgtttgggttgataaaccaaatcgctcctctcacggtcttgattactttcttgtgcttggaccagggccttcagcagactctggatcggctaaaaatggcatccggcaacattcagccttacatggaggagctcgaggcttatctccagactgtttattctacgagcctggaagagtacaactggctgcacaagccactcgttctgaatccggatcagttaaattctaacagaatcaggcacctgattctcgacttatcatggttccccaatatcgtttttaacggggacttcggcattaagcctgacctctatcatatactgcatcccggggtggactcattacagctgccttccacctctacggaatttcatcgccccgggatcctgatgaaaattctggccgattcttatcagcctgtgccacaggaatatccctttattgtaacctatcagcctctgaatcgatggaataagcgagtggccaaaaaacacatgttgaccttgttgcccgccaatcaaaaccacgtgtcagagattgtcatcgtggtggccggaaaaagtgccaaagaatttcagatcggccgtatcaatgttaattttccgagagccgcccacgtgatgtttgaaaaggagttcctgttctacttcacccgggagaaatacagcttcactgtgtcgcgaaaaacatttgaattcccactcctcgggtatagcaggcggtttgatgtgcacaagttgaacttcccacccgaatcaatctttaggaacggtcgctggtctagccttatatcagacgtgcttgaacaagactccgagcacgaatccgccgtgcattggctagacttctattcccagaatatgggatacttcgaaggcggcgaacctaataataacgtgccccacaaaagctttaacaacaacttcgaattcgcgatattcccggcctttaaggatccagatttcagccgcctgaactcacggaatctcgagaaatttggatttccatactccgtgaaagacggagttaggttctccggcgtggattacagaagcctgtctcgggaagagctacttacaggtctgaatagcggtgaactcaatccaaagtacctgccctccaaatataaaaaggatgctgagctaatgctggctgccatcaggttcaacagttttgcctttctgtacgcacataaaggtctgaaaggagactctgatttcgtaatcaaggcaatgcaaatctctctgcgggtactggtcttcttgacaaaggacacattcaagaaccgcctgcaccctaatggattgctgcagcagatcttctcgattctttccgccaagttctctccctga

SEQ ID NO: 9849 - RNA, 4359 nt, synthetic construct
  source 1..4359: mol_type = other RNA
atgagagtgaggagggttagtcaggttagcctggtaaattatcaggacctggggaaagaagttctatcatttgataacatccccaacttacctacctttaatgctctctgtctggtgcaccaattggagattgacggcccactgacagaggagttctatacgaagcacaccattaagaaacagaacggaaagctgcgcatattacatgaaccaaaacctgtgctcaaggaagtgcaaggacaactactgcagttcatatacaccaacgagaacaaggagtggaaaaatcgtagataccctaggaaagtgaacaaattcatcctgagagactgtgcagtggcataccgacccggaatttccgtggtacgcaatgccaattttcatgtcgcaaacgagttagtgatgaaactcgatatcaaggacttctttgggagcgtcaagaccgataagttgttgcccttttggctcaatttactgtccaccaaaagccactatctctatcagctggggatattggccagggaactgtcgcaggaggagaagctggtcgagctgacgaaacttagtaagaaactcgtgaacgtcatctctctcaacggattcttgccacaaggctcccccacaagtggaatcctggccaatcattacctagtgcggttcgataaattcttcctggactattgcattagaaatggactgaattactcacggtattcagatgatatcaccgtcagcggatcaaaagataagttaaagccacaggcggtcttggggactataaaccgattgattaagctcgagcagctacagctcaacaggaccaaaacacgtgtgctccgcaaacaccagcgtcaaatagtgacaggcgtggtagtgaacgaaaagaagtcagtgccaaaaaccctgaagcgggggttgcgccagcagatgtattacctcaaaaaattcggcgaggaacatattgaaaagttgaaaaccacccgccctaagtaccttcagaagattaagggagagattagctgggttctgtcagtagagaaagccaatgccgagttccaccgctactttggagagctgagcattattattcggttctgcgaagcgaataagaagattacagaagcagtggattacatagagtctgttgaagcgctcgcagctaagctcaatacccaggagtttacaatcattggcgacgtcgaatggaagaaagaggacgagctcgctgtcgaacagtcagggactgccactgaggggctggtgcagttgagtaagtggggcaaaaacaggacactctacactgaagcctcaatgatagagatcgtttctaagctgaatgatggatggcgtctccccagtaccgacgagtttgaactctaccttaaggagactctgtacgaggaccgccaacggctgggcctgagaatcccaatggatccccagtataacggcttttttaacagcattacgcatgctagagcgttcaacaaggtggctgcttattggacctcttccatgacccatctccctcatatgtctcagagtaataccaggctggggagaaacgtgttcctgttccttccaaaaaaaggggggtataaagcctctctgaatagacggtttaagaaatgtagccggacttcagggtatattcccgtcaatgatttcctgtccctaagtggaacagtttcagatggagatggccacttttatcctaggctgttttctctctatcgcaaaactcagacgtattcatctgctttcagcctcaggctggtgcgctctctgaatatcgaggccaagctaaaaacaatcgatctgtccgtgcatttttggaattccgtgtccacggcgaagcacagtaccgacctgggtaatcttggcattgcaagtgtcccgagcaatgtgctgatcaattggcagtcttccagcattctgctcgccaataacaaactgaccagtatcgacctggagcagctggctcctgtaaatagaatcgacttaagcaacaatgagctcgagaatttcgacgtgaaccttttgccgtcgtccgttaagcatctgatcctgcaccagaacaccaaactcgttgatatggttgttccaatcaagaaacttatcccccgcctacatgaatttacccttgacgctccagagctccctaccctggacttcagcgaattgtacgaaaatgctctagaacttatgttctatcggtgcgattccgatgaagaactagaccagctcatacaacagcagatcactgtggttgcactgcaggtgactgtccagatcggttccaacaagattgaaagtaccaggctgtttgaaagattgaatcaggtaaagggtttagagacactcagtatcctgtttgagccctttcatgaagacctcagaaatcgtctcacaattttgaagaacgctgaggtgtttcacctgagctctttgctggaacttaacgaattcgtagggttagaccagagccaatctgaactcttcgttgaccctatcgatgccgagcttctttcaaaaaagcacgtgttttatcctgaacaccttcagagcaactgtatacactctctcattattgacttttcttggttacctaacctggtctttaatgggaacttcaacgtcaaacccgaaaagtatcacctgctccaccctggcatccaggtcacagatttgccagctacaagtgaatcctatcaccggcccaatctgcttctcaaaatcatcggcgtacggggagcttgcccgtctgactacttctcaaacggtcagtttcagaacctgactatattttacccgttaaacagtctgttgttcgagcaggagacaaatgtgctgtttgacatcttacccactaagcaatttcacgtggagaatttcgtgctggtctgcgccaacaatgaaaaaagatcagtgagacggggcaatgttttgagcttatttcccggttccaaggccttcaagggagtagcccagagccaggggcgatcttataacaaaatcgtgggccttgggaaatcaaagaccttcttcaatttcccacttgtgggctacagcctgaaatacgatgtttacaagttgtccgtcccttttaggactatgttccgggtggtcagtgagtacaggaactcactggtgctaaacgaagagacaggtctactgaagcgcatgtccgagggcagaacggaatttagcgtattccactctagtacaaagtacgacctctctcagatgaaccaactaaatcggatatcgatcttccccatgctatatgacgacgccgccaagcggctgcaagttctcccatccatcctgcgcaagaagtacgtgatcaagaggaagcaacacgcgaatgatcctatgataggttcgctgaaccgcgaagatttactggcaaacctgaaacaaggcgcaatcgacccctttaagctctcccgacgaatgttcaaggatgaagagattatgctggctgccatttatggtaaccctttcagcttcattctggcacatccctccctaaagcttaacagcagctttgtccttgcggccctggagcgttctctgagaatcctggtgttcctgaaccagactatccgagaggagaaaagacgaaagaacgccgtgctgccagcagtggccaattacctgacagaaaagtacgcagctcaagacctttactatatcctcaatcaaatctacaggcgagtctcctatgatactaagggcatgtatacctttgtgcatgagggtaacgagcactccaagctgtctgacctgcagtctattgaacaggagttgttcacatttttcctgggcaaccgagccggaatgtccgtaaagtactacgactactttgtgaaatacgcaatcgagaagaagtactttaatgccaacggcttctacatgagccttaatatcagcgacgaagccgcattggattgtgtctgtttggacttatcgtatttgaaattgtcccagccgctgactctgccaagtatgcccaatcttaaaacccttaaactgagctttacgcggtttttcaatattgccaatgtccctctttttccatcctgtgaagagttatacttcgatggtctgaacgcttcgaacctgggcgatatcaacatcttctgcagcaagtttccgaagctcaaaaaattgtatgcccgctgctcaaattttctcatgcccgagcatttcaagactattattgagcactgcctcgagcttaacttcatcgatgtctctcatttcaacgaattcgactccatggggaaagagctgagggagctttgcaaaaaactggacaggactatagagatacgggaggatattaagaaatga

SEQ ID NO: 9850 - RNA, 1227 nt, synthetic construct
  source 1..1227: mol_type = other RNA
atggggacgtattgctcccccaccacacgcgctcaagtgagagcacagctcgtagcgaccctgtggcccgcagataaatttttcatcagagagaatctcgaccagaacattaaagcctcatttaatgtggttggaaaggcagcccccaaaatgacggccaatagcgaagagctccttcggctggtaggcgccacatacaagtcccagaagaagatttcccagtacaaaaactatatcaacactcttaccaaccggggtctgcctgtcatattttcttttaggcacctggcagatgttttgggcgtcgctcccgcaaccctacacacaatgagcttccgcacagatctgtactacaagcgattcgacatccctaaaagaagtgggggaattcggaaaatctctgccccacacgagacactggccgcgatccaacggtggatcctcgaaaatataatctccagggcctatcagattatttcaccgagtgtggtgggatacgtcaagaataaatccatcaaggaccacgtgaccgtacatgctcagtcgaagcagcttgtgaaattcgatttaaaggacttcttcccaagcatttctgtggagaacgttaagcacatatttagtgagattggctattcccattctgtgagcaggactctcgccgccttagtgacactggagggcggtctgcctcaaggcgctagcacctcacctgctatcagtaacgtttttatgcagtcgttcgataacgcaatgacgactttctgtgacgaaaagtgtttcctgtacactcgctatgccgatgatattgtcgtctccggagagagcggtgtgaccgaatcactctttgacctcaaggctaagttcagtgaatttgggttaactcttaatcatggcaagacaagggtgtacgctgatctacagagggttaaatttgtgaccggtcttatactctgcgacggcaacgtgcgtttgcctaaaagcatgcgcagacggatccgcgtccaatgccatctgttcctgacacagttggaacggatgactgggctgggaccaaccgaggacaatgtttcagtaccatcttcttggcgatcccgtgaaagagtgtttgacccaacttttcccgagagagtcttggggaaactaaactattggttgttcattgagccggacaacgcttacgcgaataggatgaaggccagcatcctggagcgactggaagcactgtga

SEQ ID NO: 9851 - RNA, 1077 nt, synthetic construct
  source 1..1077: mol_type = other RNA
atgctctcaaatgctgatctgctcgagcttgtcaaggcaaaatacaagacagagaagaagataaacctctacgcagagtacatcagtaaactggaagaacggagtgtcccagtgattttttctttctatcacttcagcgatatcctcggaatctccccaaagacccttagggctatgagtttcgacactcacctgttttacaagtcctttgagatccccaagcgctctggaggcatcagaaacatctatgccccttacccttcgcttgaaagcgtgcaacgctggatcttaacgaacattctcgagaaggcgttttgtgattttctacccatggtcgtcgggtaccagaagaacaaatctataaaagaccacgtgtctcctcatgcctctagtgagtgcatcctcaaatttgatctgaaaaacttcttcccttctatcctgttcgaccacgtgtatctcattttcaagaatatagggtactgtcattcagttagcaaaattttgagcagtctggtgacctttaatggctccttgccgcagggcgcctcaactagcccctgcttgtcaaacatttacatgaagatctttgacgcagaactgaccctttattgtgagcagaaaggttttttttgcacacgctatgctgacgatatagccgtgagcggcggggtggagctcattaactgcttaaagtccatcaaaaagctgttcaatgataatggactgtccctaaaccatgccaagaccaaggtgtacgaccgtgccaaggaagtgaggttcttaacaggcttggttgtcaacaaaggtgtagtacgaattcccaaagaaatgagaagacggatccgagcgcagtgtcacctgttcattaaggagatagactgcttggtttccaatctgcccaggccagaatataaactgccatccgagtcatggaaaaataaggaactggtgttcgacccaatttttccggagcggattctggggaaactaaacttctggcttttcattgaacctgacgataagtatgctctgagcatgaagaagatgatcgaggagaaactgaatgaaatcgtttga

SEQ ID NO: 9852 - RNA, 1053 nt, synthetic construct
  source 1..1053: mol_type = other RNA
atgctagaaataaacgaagagatctatgaacatctcagttctcatatggaactcgatcagagagacgatctgctgaagctcatccagaagttcgatgacatgcagatcccagcaattataactttcgacatttttgcaaggaccgtgaatatcaataagaaaagcttggccgctatgtgctacggagccgagaaattctatcgtacctttaaaattcccaagcggtctggtggcatgaggcagatagattccccgtttcctagtctgtctctggtgcagaaatggatttccaacaatatcctggagaagcttgacatcgacaacgagtcggcttgtgcgtacatcaaagagaaatccatcaaaaatcacgtcgaaaagcacatcgatagcgcattcattctgaagatcgacctacaggattactatcccacgatttcaacaagagacatcatttacactttctccgagattggataccccgtcaacattagtacctcaatcgcccacatacttagcctaaacggcggtctgccacaaggcgccccttcatcgcctttactgtccaatattatcacattggggctggatgttaaaatcaaggagtattgccagaagaacaacttcttatactctcgatatgctgacgatctggccataagtggcgagaatatcagcgaagataatatactggagatctacagactcatttcaagtgaagggttcatagttaatacctccaaatcaaagctctatacacccaaacagccagtacgccaccttacaggactcattattaacaatgggaagatccgaattccgaaacagacccggaaaatggtgcggcaaaagcttttttacatccgcaactactatttgtccgacttggagtcttctagcaaccataacctgtttagccttcacgaccctctgttgctcgagagggtgctgggctacctgaatttttggctgtggattgagccagacagcgaattcgctactgtgtctatccaagagatcaagtccattaagaccaagctcttagaaagcatctga

SEQ ID NO: 9853 - RNA, 1029 nt, synthetic construct
  source 1..1029: mol_type = other RNA
atgaattgggaggagtataagagcaaattccaggatcaggcgattatcgtgggtttgcctctcggggacgtggaagaatgtctgtcttacgcctttggtctgtacgaacgcggccttccagttatttatgaccaggcccatctttcatatcttgtcggctacgacgtgaaatttatcctgaaagcttccaactccaatgggccgttctatcggacctacgagatacctaaaagaaacggaggattgcggataattgatgaacccctgcctactctgaagtcgattcagagatggatcctggacgaaattctcagccaagttgagattagcgaacacgcacatgccttcgctaagaattgctccatcgtaaaaaacgctaggccccacctggcttcaaagaagattcttagcctggacattgagaacttcttcggtactatagactttccccgagtgtatagcctcttcacacggctcggctacaatagtgtggtggccactaccctcagtcacctggtaaccatcaggggcgtactgccacagggagcacctacatccccagcgatcagtaacattgtgacgttaaaaatggatagaaggttcagtggatacgccaagaaattaaagctggagtatacaaggtacgccgacgatatcactttttctggtgagtttaccagcgggaccgtgatttcttttgctaggcgcgtcgtggaggaggagggctttaagctcaatgaggcaaagacaagatccatgggccgccaccaagcacaggaaatcacaggaatcatcactaacgtgaagctacaagtccccagacaaacccgccgaaagctccgtcagatagcataccatatctctacatacgggctagatgatcatttgcggatgacgggcgaattacgtgtcaactatatctcacacatcttggggctggcctcccatgtgctgcacgctaatccacaggataaagacgccatgttcctgaaatctgtcgtttgcgttaatcagaccgactcattctga

SEQ ID NO: 9854 - RNA, 1092 nt, synthetic construct
  source 1..1092: mol_type = other RNA
atggactttcctcgtgactcttttatcaaggagatcaacagcgccagaccagagtacaagaaagcagtgctcgattatgcagacaatctgttgtcgaagaacctacccgtcatcttcagtttaaaccattttgcggagctgttcggaatcgatattaatgaactcaggttcatgctcaacaacatagatgaattctatgcctactacttgataaagaagaagcacggagggaaaagacgcattgtgtctccctataggaaccttaagcgcattcaagagtggattttgcatgagattctggacaagatacaggtccatccccagtgtaagggctttgttcgtggcagcagtacactgcagaatgccaaaccgcacatcggacagcagtacattcggaaatttgatcttaaggactttttcgagtcaatcaccatcgatcggatatatggtatattccattcaatcggttacagtcccgctgtcagctatgatctcgccaccatttgcacgctgaaactatccgactataaatacgtgtctatgtccagactgcagaagaattggtttggttacctgtactccaaggagaagccagtgttggcccaaggggcaccaacatcacctgcactcgccaatattgcttgtcgaaggcttgacgctaggttttggaagtacgcactgagcaacaatgtacagtatacccggtacgctgacgatctgacattctctagtgaacagattagatccctcccaaacacagctttcgtaaacaaagttattcaagaagaggggctgactttaaattatagcaaaactgggacctacgggagatgctcacgccagatggttaccggcatcctcatcgacggcgaaaagcctagggtgcctcagaaatttaaacgacaaatttatcgccatctgcacttctgcaaaaagttcggcgctaaaaatcacttcgaacacatcatgccccagcacactaacgcccggcagtggctttatggcaaaatcatgtacgtgtacagcatcgaaccggaggaagccaaaaagatgctgaagctggcggagtccttagagtggggaatcatgtga

SEQ ID NO: 9855 - RNA, 1092 nt, synthetic construct
  source 1..1092: mol_type = other RNA
atggatttcagccgagacagcttactgaaggaattggagaacaccaatgtggaatataagaaggtaattatcgagtacacggacaatctgctaaaaaaggatctccccgttatctacagcttgaaccattttgcaggtattctgggtcttgatctgtccgagttgaaaaccatcatacataacattgatgggtactatgcgtactatttgatcaagaagaagcatggcggaaagcgccggatagtgactccatataggaacctcaagatgatccaaacctggatactgcatgagattctgaacaagatccccgtccactcccagtgcaaagggttcgtgaaaggctcgaacactctccagaatgctaagccccacatctcaaagcagtacattcgcaatttcgatcttaaggactttttcgagtctatcaccattgaccgggtatatggcgtttttctgtctctaggttactcaaccgcggtcagttttgacctcgcctcactgtgtactctgaagattagcgactacaagttcgagaacctatccagatacaagaaaaactacttccgctacctgcatgtgaaacctcaggccgtgctcgcccaaggagcaccaactagtccagctctcgccaacttaatctgtagacacctggacgagaggttctggaaattttcacttagcagggggatacagtatacccgatatgcagacgacctcacattcagttctaatcagctggaacttttgccgaatacaagcttcgtgaataaaatcgtcaacgaagaaggactgcagcttaactatcagaaaattggaacatacggaaaaagttctagacaaatggtgacaggcatcctgattaatggcgagtcccctaaactgccccagaaatttaagcggcaaatttaccgtcaccttcacttttgcaaaaaatttgggacgtacagccacttcaatcacatcatgcctaattatgctcacgccaggcagtggctgtatggcaagatcatgtatgttaactccatagagcctgatgaagctaaaaagatgctctctatcgccaattccttagattgggggctcctgtga

SEQ ID NO: 9856 - RNA, 966 nt, synthetic construct
  source 1..966: mol_type = other RNA
atggctggtatagtgtctgtcgaatactctgagctcatctcgatcaaagatcacatcgatgggtactatgcctactttaccatcaagaagaaacactcatccaaacgcagacgtatcgtggtgccctatcaaaatttaaaatgcattcagaggtggattctacacgagattctggataaaattcccgtgcatcctcagagcaagggctttgttaaggggggaagcactttccagaatgcctcccctcacgttgggatgtccttcattcgcaagtttgacttcaaggacttcttcgagagcataaccgtccagagggtgtatggcatcttcttagaaatcggctatagtcccgcagtaagtcacgacctggccacgttgtgcacattgaaacttaaggaagagaagtaccagagtctgagaggttacaaacagagctgtttccgatacctgtataataaacccaaagcagtgctggctcaaggagctccgacctcaccagcacttgctaacctgatttgccgcggccttgacagcaggctggccaaatttgcagatctgaatggcattcactatacccggtacgccgacgatctcactttctcagcgaacgagctggagaagctcccaacacagtccttcctgaagaaaatagtggaggaagagtccttgaagctcaactactctaagacaggaacttacgggcctgagagcagacagatggtaaccggtatcctcattgatggcgaaaagcctcgagttccacaaaaatttaagaggcagatttatcggcatttgcatttttgtgaaaagtatgggacacaggcccactttgaccatgtcatgccaggatactctcatgcgcggcaatggctgtatggcaagatactttacgtctactcaatcgaaccggagatcgccaaagacatgatcgccaaggctaacgcactggactggggactcctatga

SEQ ID NO: 9857 - RNA, 1095 nt, synthetic construct
  source 1..1095: mol_type = other RNA
atggagttcccgagagactccttcatacagcaactgaacgggtgtacacctgaatatcggtcagctatcattcaatacactgacaatctgcttgccaagaaactgcctgtgatttttagtctgaagcacttcgctgggattgtcggaatggatgaaggtgaaataaggaggatcttggatcatactgacggatactacgcgtactacaccatccagaagaagcactcaaagaaacgtagaagaatcgtggtcccatatcaaaacctaaagcggatacagagatggatcttgcaagagatccttgataaggttgcagtacatcgccaggcaaaggggttcgtgaaaggtggtaataccttacagaacgcactccctcacctgggcaaaaaatacctgcggaaattcgacttcaaggactttttcgagagcatttcggccgaaagggtgtacggactgttttatgagctgggctactctccagcagtctctcacgatctggccgctctctgcacattgaaactctccgattacaagtatattagtttgaagggctacaagcagcgctgttttaagtatctgtatgacatgaacaaggcggttctagctcagggggctcccacatctcccgctatagcaaatctgatctgccgcggactagatggacgctttgccaaatatgccgatcttaatggaatccagtacacgcgttacgccgatgacctcaccttttcagccgattccctggaccttttaccgtcttttggcttcgttaacaaggtggtccgggaggaggccctcaaattaaactatagtaaaaccggtacctacgggccagagagccgacaaatggtaactgggatcctcatcaatggggttaagcccagggtgcctcagaactttaagagacagatctacaggcatctgcatttctgcgaaaaatatggcgcgcaggagcatttcagccacgtgatgccaggctatagccacgcccgacagtggttgtacggcaagattctgtatgtgtatgccattgagcccgaagtcggcaaagacatgctcgtgaaagcaaattcccttgactggggcctgatttga

SEQ ID NO: 9858 - RNA, 1092 nt, synthetic construct
  source 1..1092: mol_type = other RNA
atggaatttccccgagactcgtttttgtcccttattaaggatagcccagatgagtacaaaaaggccaccactgagtatgccgatcggttgctttccaagggccttccagttatcttcagtctgaaacatctaggtgtgctgttgaatgtcgagtatagggatatgtgtatgctggtacacttccccgatggctattacgcatactttctcatcaagaagaaaaaaggcggatatagacgcatcgtggtgccttatgacaatttaaagcacatacagagatggatccttcacaatattctctctaaaatccctgtccataagcagtgcgtaggtttcatgaaaggaaaaaatacgctcgacaacgcgaaggcgcacgtgggcaagaagtacattcggaaattcgactttaaaaacttcttcgaaagcatcaacgcacgccaggtatattatgtgtttcggaacgtggggtactcaccgagcgttagcaggtgcctcgcatctctctgtacactgaagatcgaggataataagtacgattacctccccccctacaaaaaaatatggttcaaggacctgcatgacactacaattgccgtgctgcctcaaggggctcctacttccccggctctggccaacattatctgtaacaatctggataaacgctttttcagctacgctttcaagaaaaacttaacatacacgcgatacgccgacgatgtgaccttctcctgcgacgacccctcactcctgccaaacgtctctttcgtcaagaaggttgttgagagtgaagggttatcattgaacgagaaaaagaccggtacctacgggcaagacagtagacagatggtcaccgggatactgattgatggcgaaaaagcacatgtgccccagaagtttaagcgtgaaatctatagacacctacacttttgcaagaagtatggcacacacgaacattttaggcatatcgccccagacaagtctaatccaagggcctggatatatggaaagattcactacgtgaatgctattgagcctgaagaggctaaaaaaatgtttgcactggccgacgagctggattggggaatcctgtga

SEQ ID NO: 9859 - RNA, 1104 nt, synthetic construct
  source 1..1104: mol_type = other RNA
atgaccatggagtttcctcggaacgacttcattacaaaagccaaaaaagcgggccattctgctgatttcatcaaggccactcttcgctatgccgatagtctggatgagaagggcctccccgtgatcttcgatcgaaaccatctggcctttctcctgatgatggatattcaagaacttctgtgctttgtgcgggaatcctcctgcttttacaaatacttcgccatcaaaaagaagcgcggagggctgaggaggattatagccccatacagcaacctccgcaaaatccaggtgtggataaaagagtgcattttggacaagatcgagcagccctattacgtgaccgcatttgcaaagaatcgtaacacgctgaagaatgctcgcatacatgaggacaagaaatacattctaaagtttgacatcgcagacttcttcgaaagtatctgtttcaaacaagtgaactctgctttttgcaatatgggctatctgcccgaagtttcgtcctgtctcgctagactttgcactagcaaaatcgacgaatacaagtattctcagttggaggagcaaaaggatattcaggccttatttgacgacctgaaaaccaagaatgaggcattcttaatccagggagctccaactagccctgctcttgcaaacattgtgtgttacagaatggatcgacggattataggactctcaaagggaataaagttcaactactccagatacgccgacgacatgaccttcagcgccgatcgtctgtcagacctccccaaggtcgggatgattagacgcattgtcgaatcagaggggtttcacttaaatgaccagaagacacagctgctacacgtcgggaaaaggcagatcgtaacaggtctgttggttgatggccacgtgcgggtaccaggcaggtataagaaagatatttggagacacatccatttctgtttgaagtatgggggccgggatcacttcaatcgaatcgcgccgggactggcgtatggcaaagagtggatcgagggtaggatcaggtatgtccacagtgtggagcctgacgtcgccaagaagatgtgggttgaatttgaaaaaatcgattggggttactga

SEQ ID NO: 9860 - RNA, 1098 nt, synthetic construct
  source 1..1098: mol_type = other RNA
atgggatttcctagaaatgactatctcaccgctgctaaggataagaaacattctgacgaattcatctccgagacactctcctatgctgatgggctggattccaagggcctcccggtgatatttgaccagcaacatctgagttacctgctgtgtatggaacacagaaacctcagacaactcgtcaaaagcgccagttcctactataagtacttcgctatcaagaagcgcaggggtggccttagacggattatgagcccctatagcgagttgagggatgtacagatatggatcaaggagaacatccttgacaaaatagaactgccaaattgtgtcaaggcctttgtgaaaggacgaaatatcatggagaatgccaaaatgcacgagggcaggaagtacattttgaaggtagacattaccaatttcttcgaatctatcggcgttcggcaggtgtacgtcgccttcagaaagatgggatatgaccgctcagtcgcagcatggttggcgaacctgtgcactgccaaaattgaagattacaagtacgagcagctggaagatcaggaagagatccagaaattgttcaacgatctgtaccacaaaagcgaaccatttctagtccaaggcgcccccacttcgccaggtttagcaaacataatttgcaaccgaatggataagaggatgatgggacttgccaacaaacatggatttacgtacagtcgttacgcagacgacatgaccttttcagctgataaaaaggacaggctgcctaaagtttcaatgatccgcaaaattgtggagacagagggttttcaccttaacgaggagaagatcgaattactccatgagggaaatcgacagatcgtgactgggttactggttgataatcacgtgcgggtgcccgggcgttataagaaggacatcaaacggcacattcatttctgcctgaaatatggcgggcgcgaacactttcaccggatagcacccgggaaagccttcggcaaggagtggctagcgggcaggatccgctacattcattctgtggaacctgagacagccaagaagctgtgggctgagttcgagagaattgactgggggtattga

SEQ ID NO: 9861 - RNA, 1098 nt, synthetic construct
  source 1..1098: mol_type = other RNA
atgggcttcccgcgaaatgacttcatcacagaggcgaccctccagggacgttcccagcagttcataaccgaggctttgcgctatgctgacgtcttggacgggaaggggctccccgtgatctttgataccagccacctagcctttatgcttaatatgtcccaccgagacttagtgcacattgctttcatggccagcgtcttctataagtacttcgcgataaaaaaacggagcggggggtatcgcagaattatggcaccatacatgcacctccgacagattcaggtgtggatcaacaaaaatatcctttctaaggtgcaacagcctgaatacgtcacagccttcgtaaaggggcggaatactcagatgaacgctaaaatgcatgaaaatcgtgcatacgtgctgaaggtggatctgtcgaacttttttgaatctattaacgtacggcgggtttgcgctgcctttatgtggatgggctatgaatcatccgtggcctcatgtctggcaaagttgtgcacagccaagatcgatgattacaaatatgatatgctcgaagagcagcctgaaatccagacgctgtttgatgagctgatgcaaaggcacgaaccattcctaatacagggagcgcccacctcacccgcattagccaatattgtttgcggtagactggacaaaaggatgaagcggctgagtcaagagatgggattcaactacagtagatatgcagacgacatgactttttctgccgacgaccgcgcaatgctccctaaaataaggctgatcaggaagatcgtgaaggaggaaggatttaccctgaacgagaaaaagacagagctggtccatcaaggtaacaagcagatggtgactggtctgcttgttgatggcagagtacgtgttcccggcagctacaagcgcgatattatgcgccatatccatttttgtcagaaatacggaggcaggggccacttcgatagagtgatgcatggcaaggcttatgggagggagtggcttgagggaagaattcggtacgtgtattccgtcgaaccagaggccgccaagaaaatgtgggctgagttcgagaaaatcgactggggctactga

SEQ ID NO: 9862 - RNA, 1089 nt, synthetic construct
  source 1..1089: mol_type = other RNA
atgaattttccccgcaatctattcattgagaatgccaacgcagaaaaacggtctgcagaatatctgacaaagaccctcaactatatcgatagattgagcgcccaaaatctccccgttatattctccactaaacacctcgcacagctgctaaatatcgaatatcacgagctgaataacatcattgagaatcgcacatacttctacacctattatctcatcaagaaaaggacgaagggacatcgacgaatcatagccccatattcaaacataagcgaagttcaaaactggattaagaacaacatcctggacaacttaacgaccaacataaattctacagcttaccagaaaggcaactccatctccaacaacgctaagatccacgagaacaatcaagtgatcttcaatattgacctggaaaacttctttgaaaccattactgagagaaggatttacggggtttttaaatccatcggctataccaagaatgtagccattgaccttgcgaaaatctgtaccaccatcatcagtcaggaaaagtttgatgacttaaatgacgatgtgaaaacacattttgaggactacattaagctgaatgagtgcgtgctgcctcagggcgcttgcactagccctacattgagcaacctgatttgtagaaaactcgatattaggctttcaaagcttgccaataagttgggtatccagtacagtcggtacgctgatgacattacattttcgggatcactggagaaactgccgaacattaaactcttgaagaagatcattgaggaagaaaagttcaaggtcaatgacaataaggtaaagctgctgaaaaaggggaacagacagatggtgactgggttactggtcgatggaaaagtccgtgtgccacagaaatacaaaaaggaaatttttcgccatctcaggttctgcgagaaattcggtggctttactcacttcaacaagataaaccctgagaaatcttttcggaaggagtggctgcacggcaagatctgtttcgtgcatagcgtggagcccgagatagccaaaatcatgttccagaagcttaaggatatcaattgggaaaaatga

SEQ ID NO: 9863 - RNA, 1089 nt, synthetic construct
  source 1..1089: mol_type = other RNA
atggacttcccacggaacctgtacattgaaaccgctaataatgaaggccactcacctgaatttctgacctccaccttgggatatatagacaatctgacgtccaaaaacctccccgtcatattttccctgaagcatttctcgctcctgattgggatggaactgtcagatgtgatcaagatcattcataatcggaattactactacagtttctatctgatcaagaagaaaaagggtggctatcgtaggatcgtcgccccgtttaaaaagttaaaactgatgcagtcttggattaaggaaaatatcctggataagctagaggtgtcacagcacgcaactggctttatcaagggacgatccattctgaataacgcgaaatctcacgagaacaacgatgtgatcttgaatctggacctttccaatttcttcgaaacaattgttgagagacgggtctacggtatcttcagttctctgggttacagcaaaaacttagcagttgagtttgcgaagatctgcactgcccagatgcctaaagagaagtatgatgagatagatcccgaaaagcaggagtattttaacaaactctacaggttgaaggagtctgtgctcgtgcaaggagcacccacttctccaacactaagcaaccttatttgtaggagattagatctgagactaagcatgctggccaacaagctcggacttatatacagtcgctatgctgacgacattacctttagcggcaaagcaagcaacctgccctccatcgaactgcttaagaagatcattgaggacgagaatttcgagattaactgggaaaaagtggggaaatacaaaaaggggcagcgacagatggtgacaggccttctcatcgacgggaaagttagggtaccaaaaagctttaagaaggagatctatagacatttgcacttctgtagtaagtatggcgctttctcacacttccaacgcatttgccctgacaaagcctaccgcaaagagtggttgctcgggaagatctactttgtatatgccatagaacctgaggaagctaagaaaatgctcaagatagccaacgccatcaattgggagatttga

SEQ ID NO: 9864 - RNA, 1089 nt, synthetic construct
  source 1..1089: mol_type = other RNA
atggactttccccgcaatatctacatcgaagctgcaaaaaacgaaggccacacctccacattccttgagaatactctctcttatatagacaacctcagaagcaaaaacctgccagtcatcttcagtcttaagcacttcagcattcttattggcatggaactgtctgacgttattaagatcatccagaaccgtaacaactactactcctattacctgatcaaaaagaagaagggaggacttagaagaattgttgccccgtataaggacctaaaattcatgcaaagctggataaaggaaaatattctggacaacctggaggtgcaccagcttgcaacaggcttcatcaaaaagaagagcatcctgaacaatgcgaagaatcatgagaattccgatgtgattttgaatttggatctccgcaactttttcgaaacaatcaacgagaaaagggtatacgggatcttcagttctctgggatactccgccaatctgtgcgttgagtttgccaaaatctgtactgcccagattcctgaggacaaatatgagatcatgtcaagcgaagagcaggagtattttgaggaactgtacaacttaaaggagagtgtgctggtgcagggagctcctacgtctcccatcctgtcaaatctggtctgtagaaggttggatttgaggctgtccaagttagcaaacaagttagtggtgaattattcaaggtatgccgacgatatcaccttttcgggcgatcggaataatctgccaaacataggcattctcaagaagatcattgaagacgagaacctcaagataaattgggataaagtcggtaaatacaagcgaggtcaacgccagatcgtcaccggcctgctaattgatgggaaagtgcgggtacccaagaaatttaagaaggagatataccggcacttgcatttttgcagcaaatacggggcttatagtcatttcaagcgaatctgcccagaaaagtcatacgggaaagaatggctactcggtaaaatttatttcgtgtactccattgagcctgaggaggctaaaaaaatgctcaagatcgccaactctataaattgggaaatttga

SEQ ID NO: 9865 - RNA, 1089 nt, synthetic construct
  source 1..1089: mol_type = other RNA
atgaattttccgaggaatacctatttggagttggcgaacacctcaggaaagtcgccagaattcatcgaatcaactctgaattatgccgataacctaatccactacaatctccccgtcattttcagcctcaagcacttttcacagattataggagttgactttcatcagctgctgaacgttatcgaaaatcggggacactactacagttactatttgatcaagaaacgaaagggcggatataggagaattattgctcctcacaagaacatacgctacctgcaagactggattaagatcaacatcttggataaggtgaagatccactcatccgctactggctttactaaagggaagtctatcctcgataatgcaaaatctcatctggattctgaagtacttctgaacatcgaccttgaaaactttttcgagagtattaccgagaagcggatttatggcgtgttcaagtggctcggttatcacaagaaccttgctatagagtttgccaaaatttgcacggtgaagatgcccgaagagaaattcgacaatctaaacgatatcagccaagaatactttttcgactactacctgttaaaagaagccgtcctcgtgcagggcgcacctacaagtccctctctgtccaacataatttgcattaagctggacaatcgttttaataagctcgcgaataaacgcgggatatcctattccaggtatgctgacgacatcacattcagcggtaacaaggatagtctccctagctacaacttagtgaagaagattatcgaaagcgagaatctgaaaattaactggacaaaagtgggccgatacaagaaggggcagaaacaggtggttaccggcttacttgtcaacgagaatatccgggtgcccaaaaaattcaaaaaggaggtcctgcgccatctgttcttctgtgaaaaatatggtgcagcctctcatttcaacagaatcgccccagataagtcctttagaaaagagtggctgattgggaaaatcctgtacatcaattccatcgagccagaggtagccaaaagcatgtttgagaggatcaagaaaataagctgggagatttga

SEQ ID NO: 9866 - RNA, 1089 nt, synthetic construct
  source 1..1089: mol_type = other RNA
atgaattttccgcgtaatctctataaacaagaggccatccgcttgaaacgctcagcaccatttattacatccacgctgaactacatcgacaatcttattagctgcaacttaccagtgattttctccaggcaacatttggcgattctcaccggtatgagcaggtatgatatggataagatactagaaaaccgggagtactactataagtactacctgataaagaagaagcgggggggatttcggcggataattgctccttataagcagcttaaagagctgcagaggtggatcaaggaaaatatcattgaccaggttgacatcaaccagtttgcaactgggttcgttaaagacaagagcatttatcacaatgcgaaaatccacgaggacgccaacgtgatcctgaacattgacctcaagaatttctttgagagcatcacagaaaagcgggtgtacgggctattcaaatcgctgggttatgcccataacctcgccgtggatctggctaaaatttgcacatcacccatctgtgacgaaaagttagatgaactggacgagtcagctctgccttactttcaggacatacaaatgcagttcgaatctattctgatccaaggcagcccaagttctcccgccatctctaatctgatatgtcgcagacttgataggcgcttgtccaagcttgccaactctaccggcgctaattattcccgttacgcagatgacataaccttcagtggaagtgaggataacatccccaaagtcagtctcatcaaaagaatcattgagggcgaaggcttctcaattaactgggagaaggtgaagcgacacaaaaagggacagcgacagatcgtaactggactgttggtagataatgaaatcagagtccccaagaagtacaagaaagacatatataggcacctccacttctgcgagaaatggggttcccgatctcattttgaaaaaattaaccctgggaaggggtacggcaaacagtggctgctgggcagaatcatgtacgtgaatagcattgagcctaccgaggcaaagaaaatgatggccttagtcaagcagatcgattgggatagatga

SEQ ID NO: 9867 - RNA, 1053 nt, synthetic construct
  source 1..1053: mol_type = other RNA
atggcttttttgcgctcattattcatcaacgaagcaaagaagaaaggtaggagcgaagagttcttgaagactacccttgaatacgctgattttctggacggcaaaggcctccccgttattttctctcctctccatttctccttgctggtgcagacagattatcattatctgaaacacctcataagtgtgaggtctgacttttacgccaactattatatcagaaaacggcgagggggcaagagaaagatctccgtgccctttgtccccctgcgcattgttcagaagtacattaacgactttatcctgaacaaggtggatgtacaccctaaggcgttcgcttttgtacgtaacaagtccatcgtcgataatgccaaagtgcatgtgaatcaagagtggatccttaacattgacattaaggacttcttcacgagtatcggagtagacaaggtgtataccacattccgctcattaggatacgtcgacaatctgtgctacgattttgcaaagctatgtactgccaaactggaagcaaagagcaagagagaattcctgccccagggggcccctacctcacctaatctctcgaacatcataatgaggaatgtggataggagattcgagaacttcagcattaaaaacgacatctgctacagcaggtacgccgatgacatcaccttctcagggaagaagtccaagctaccaaaaatctccttcctccgtaaggtttttaaagaggagggtttccaactgaatgagaagaaaacacagtattacggcccgaatagcaaccgacggtttgtcaccgggttgatagttaaagacgacgtgaaaatcccaaatcggtttatcaactctacttctcgccagatatatatgtgtgagaaacacggcgtggataaccacattgactggctgaagaaaaaccacggaattacaggcaattattactacgagtggctgatgggaaaaattgcctttattaatatggtggaaccaagtgaggctaagtttctttacgatcgggtcaatcggatagattggggtcttaaatga

SEQ ID NO: 9868 - RNA, 1095 nt, synthetic construct
  source 1..1095: mol_type = other RNA
atgagctccccacgcaatctgataatacaagaggcagaggaaacacaccattcaaaggagtatctcaatgacatcctggcttactacgataagctttataatcagggactgcccgtgatctatagtatccatcacctctgcttacttatgggggatctggacaaaaaggtacccaagattattacttcccgaaacagcaactacgcaacctttaaaattaaaaagaggagcggcggcaagcgggaaatatccgccccgtttgtgcccttgagaaacatccagcaatggatatatcagaatatcctgagcaaggttcctattcaccctagtgcctacggctttgtgaagcacaagtcaatcatggacaacgccaaggtgcacgtgaatcaggatttcatactgaacattgacctgctcgatttcttcacctcaattccagaaaaacgcgtctatggaattttcaagtctctaggataccaccctaatctggcagtctacctcgccaaagcgtgtactaaaaaccttgtgaaagagatcgatatcgaggtcctggattggctgaatcaagccccgttccatcagaataattcagtactaccacagggcgctcccacatctcctcagctctccaacttagtttgtaggagattggacaaaaggctgaataactacgctgtcaagaacggttgcaaatatagccgatatgccgacgatatcactttctcgggtagcgaagttaacaacatcaagttgggtgtgatttttcggattatcaacgacgagcagtttaacgtgaatctggacaaagttaagttctttcacaagtcctctaatcgcaagatcatcacagggttaatcgtgtctgacaagattaggatcccaaaaaaattcaaacgggaaatcgctagacatctccactttacaaccatgaatggaacccagaaccacattcaacatctcagacagtaccataacttcgacaaggtcaattatcgtgattggctttacgggaaaatctgctacattaagatgattgagcccgattttgggctgaaattgatgacgaagttcaagagtatagactggggcatctga

SEQ ID NO: 9869 - RNA, 1095 nt, synthetic construct
  source 1..1095: mol_type = other RNA
atgacattcaacaaagatttgttcatcaaggtttcccgcctgcggaaccattctaacgaatttataaaagagacggtggactatgcaaataatttgctggagaaagatcttccagtaatcttctctctgaaacactttagcctcctggctaacgtggattacgacgaacttgtgaagattattaacatcaggagtagcctgtacaagttctatcagataaagaagaagaacggaaaagggtttcgacaaatagtggttccctataacaacctacgctgtatacaggactacattaaaaccgagatcttggacaaagtccagatacatgataatgcaaccggctttgtgaaaggcaagagcatatacgataatgccaaaaaacactcaaaccagcaggaaatcctgaacattgatctcttcaagttcttcgacagtattacggagaggcggatctacggaatttttaagagcctaggctatgcgaaaaatctggcgctggattttgccaaactgaccactgttgccctcccagaagaatatctgagctctttcaagtttgatgaaagacgcttatacgacgagattgtccgaaagggggagtgcgtgttaccccagggtgcacctacatcccccatcctgtcaaatctcatcaccagaagactagatctgcggatgtctagcctcgctgacaagctcaaggtaaattattccaggtatgccgacgacttaactttctccggtaactatgggactgtgcctacattcacattgctggacaagatcatcaatgatgagggattccgtattaattggtccaaggctaaaatttcgaagaaaggcagacttcaaatggtcaccggccttactgtcagtaatgatatccacgttcacaggaaatttaagaaggaggtgaagaaacatatctacggatgcctgaactttggcgtcaataatcatctggcccacattcagaaggacgacattgggtactacaaagaatggttggccggtaagatctactttatttactcagtggagccggactatgctaagaaactccttgacgattacaacaagatcatctggcctctctga

SEQ ID NO: 9870 - RNA, 1095 nt, synthetic construct
  source 1..1095: mol_type = other RNA
atgccttttagccaggatgaatatatagccaccgccaagtcccacggacacagccaggagtttatcgatataacagttgcctacgcccagaacctggtggctaaaaatctcccagtaatctttacaaccgaacatttgtcctcaattttggacatgcctattcttgagctcaagaccattattaaccaccgatcctccttctacaagttctatcagataaagaagagaaacggaaacggctttcgccaaatcgtgagcccatacaacaacttacgagtcatccagcagtacataaatgaggagatcctgtcgaaaatcccccttcacgagtctgcaactgggttcaccaaggggaagtctatcctcaataatgctgtgccccataaaaataagaaggccatcttgaacctcgacttgctcaagttttttgacagcatttgtgaaagaagagtgtatggtatcttcaagtctcttggctatgcgaaaaatctaagcattgacctggccaaactcactactgtggagctgccagaagattacctgaaaaccttcgaggaaaaggaactcaagtcatacagggaactcgtgcccaaggacagttgcgtcctgccccaaggcgcacctacgtcaccaacactgagtaatattatcctgcgccggctggattttaggctgtccaaacttgcagagaaattaaaggttgactatagccgttacgctgacgatattacattctcaggagatctggagaatctgccgaagattaagctgcttcggtctatcatacgcgatgaaggcctgaacataaactggaaaaaagtcgggatctacaaaaagggccggaagcagctggtgactggtctgacagttagtaatgacgtccatattcacagagatttcaaaaaggaggtgaaaaaacacatctatgcttgctgtaatttcggggtcgaaacgcatctaaggtttatggaattggagaatacccatctatacaaagagtggttactgggaaaaatctactatatcaacagtatcgagcctgagactgcgaaaaagatgatgaacgacttcaacaagattgtatggaccatttga

SEQ ID NO: 9871 - RNA, 1095 nt, synthetic construct
  source 1..1095: mol_type = other RNA
atggccttcccgttcagtgagaagagcacttctgagcccgttaatcattctgatgagtttctgaccgacatcaacaattatggcgacaacctcaaaaaaaacaagctccctgtgatctataccctctaccacctgtgccagatggccgaagtccccgtgaaggaaattctccgtgtgtgtgagagcacacgcatcgagcactacaaacgcttcaaaatccgaaagaaaagaggggggtttcgggtgatacaaaccccttctgactccctgaagtacctgcagaggtggattctggttaatatcctgaatgagctggatagccacgaaaggtgctttggtttcgagaaaaaatcctccatattgaagaatgcttccgtacatcttaatcagcccgccatcttgaagctggatctgcaaaggttttacgactcgattaatgagaaacggatctatggcgttatccagagttttgggtaccacagcaatcttagtgtctacatggcaaaactgctgacagtcctacctaacgattattttttcgagtccttcaagaaaactgaaagcaatctgaagaacaagctacagaagctcaatcagggagtattatcccagggcgcccctacaagcccaaaaatttcaaacctcgtgtgccgcaggcttgaccagagaatgtatgagcttgctattaagaatgggctgaactactcacgatatgcagatgatattactttctctggcaacattgaagtcttgagaaaggtaaagaaagccgcgtactatatcattaacgacgaaaagttcttcgtgaattacggtaaaaccaagttcataaaggcaggcggaaaatttttggtgacaggcctgaacattgaaaatggttcagtgaccgtgccaaagaaaaaaaaaatggagatcgaacaccatttgtaccattgtcttaacaacggagtgatcaaccatttaaagacgtctaagatgccacaacggaattttaaggactggttactcggaaatattgcttttgtgcactcaatagagaaaaacgttgctaaggtctatttcgaacagtttaacaagatcaactggcccatctga

SEQ ID NO: 9872 - RNA, 1056 nt, synthetic construct
  source 1..1056: mol_type = other RNA
atggaccacagccaggaatttctttccgatatcaaggaataccgggagagactcgatgagaaggggcttcccttggtgttttccatccaccacttatgcttactagccggtgtatcagtaaccgagattttagaaatctgtaaaagtgaccgcatacgctattataagcgcttcaaattgaagaagaagcgaggcggctttcgtgtcatacagacacccgaaaatacactcaagtttctgcacaggtggatcctcaagaacattctgaatcgggttgagtctcacgagaaatgtttcggcttcgacaaggagtcatctattgtcaagaacgcctcagcgcatctcggtcagccagccatcctgaaaatcgatctacaaaggttctatgattccatcaacgaaaagagaatctacggcgtgatccttagctttggttatcatccaaatctcgcagtctatatggctaaattgctgaccgtccggcctgacagttattttctatccacctttaagaagaaggaatcttcactgaaagacaaactggagatgctcaacgagggagttctgagccagggagcaccgacaagccctaaactggctaatttggtctgcagaaggctggacgagcgtttgaataaacttgcactgaagaatcagctgaattactctaggtacgctgacgacattacctttagtggaaacctggtgcagctcgagaaaatcaaaaagacggtgtacttcattgtgcgggatgaaaacttttacgtgaattactccaagactagattcattaagagcgggggaaactttttcgtaactggcctgagtatcaaagatggcgtcgtgaaggttcccgggaagaaaaagaaagagattgaacaccatctgtaccattgcctgaaaaatggagtgattaatcatctcaagagcgccggggtgtcgcaacgaaacttcaaagattggctgcttgggaacatagctttcgttcacgccgtggaaaaagacgtggccaaagattatttcgagcagttcaacaagattaactggcctatatga

SEQ ID NO: 9873 - RNA, 1098 nt, synthetic construct
  source 1..1098: mol_type = other RNA
atgacctatcctttttatcatataaagcgcaatcaggaaccgattgtgcactcatccgagtttaaccaggacatcaagatttactcagatctgttggccaagaaagggctccctgtcatttatagcgttccacacttatgcctgcttgcgggggttcatatcgagcgtatcctgactattaccaaatctaaccgaatcgaatcgtacaagagatttaagctcaagaagaagagagggggctttcgggtgatacaaactccaaacgatgagcttaagtatctgcagcgctggatcctcaagaatatactagaaaaagtgcccagccatccctcttgtaagggcttcgacaaaaacactagtatcaaacacaacgctgacacacacctcaagtccgaagccctactgaaactggacctgctgcgattttacgactccatcaatgaaaggaggattttcggcattttcaagagcctgggctatcatcctaacctcgctgtttcattagcaaaaatatgtaccatcgtcccagatgagatgtttatcagtagttttcgcaagaaggagactgaacttaaggagtatattgtaagcaagaatgagggtatcttggcacaaggatctcccacgagtcccaaactttctaacctgatcaccatcaatttagataaaaggctggccggtttggctaacaagaatggactgaattacagccggtacgccgatgatctcaccttttccgggaacttcaaacagctgcaaaaggtaaagaaggtcgtgtatcggataatcagagaagaatctctgttccccaactacagcaaaacaaagttcattaaactcgggggaaagttcctggtcacaggacttaacattcagaataatgtgtccacagtgccaaaaaaaaagaaaaaggaaatcgagcaccacttgttccattgcattgaaaatggcgtggagaatcacatcaaaacggcaaagattaacaacaggaactttaaagactggttgtacggcaatatttgcttcgtgttctcaatcgaggagaaaaaaggtatccagtacttcaaggagtttgagaaaatacagtggcctatttga

SEQ ID NO: 9874 - RNA, 1083 nt, synthetic construct
  source 1..1083: mol_type = other RNA
atgacatccccattaaataaaacattggagaatcacagtgcggagtatcagaatgaaattaaggcctatcagcacgtcctcgagaaaaatggtttgccagtcatttatagtctcaatcatctgtgcttaatggctggcgtgaatctggagcacattaagaactgttgtataagcaaccggcaggagaactacaagcgcttcaaactgaagaagaagagaggaggcttccgggtaatccagacaccccaggacgaactaaaatatctgcaaaggtggatcctcgagaacatcctgaacaaaaagaattctcacaatgcttgtaaggggtttgacccagacacctcgattaaactcaatgccgaaaaacacttaaagcaagagggtattctgaagatcgacctgcttagattctacgatagcatcaacgaaaagagggtctatgggctttttaagtccctgggatatcacccaaacttgtccgtcagcctcgcaaaaatctgcactatagtgcccgacaacacctttctgagttcttttaagcagaaagagcagcacctgaagcagaaaataaagcaggatggcttgggagtggttcctcaaggcgccccgtcatctcctaaaatttccaatctcatcacgatctctctggataaccggcttcagaatctggcagataagcataatctaaactacactcgatacgctgacgatcttactttttccggcaccattgaaacgctctcaaaaataaagaaagtggtgtaccgtatcattagggaagagaacctgtaccccaactacagcaagaccaagatccttaaacgcggtaacccttttttcgtaactggactaagcgtgcataatgacacagtgactgttcccaagaaaaaaaagctggaaatcgagcaccatctgcatcactgcattaaaaatggcgtgcaaaatcatctcacaacctcaaagatcaccaacagaaacttcaaggattggctgttggggaacatagccttcgttaatggggtcgagaaagaactgggaaagaaatacttcaagcagttcaacgagattcagtggcctatctga

SEQ ID NO: 9875 - RNA, 1095 nt, synthetic construct
  source 1..1095: mol_type = other RNA
atgacaagtccccttgataatatctccgaggaaacgcctccaatccatagcgttgagtttctggctgatattatggcatacgacctcaaattgaactcaaagaatctgccagttatttactccttgcaacatctatgtctgctggctggagtcaacatcaagaatattactaaggtctgcaacagcaccagaatttctgagtacaagcgctttaagctgaggaaaaaaagagggggctttagagtaatccagacgccgactgacgagcttaagtatctccagaaatggatactggtgaatatcctggaaaaggtgccttcccactcttcgtgtaagggatttgacaaaacactgtccatcaagttgaatgcagaggtgcacttgaacaaagagagtattctcaaaatcgacttgctgaggttctatgattcaataaacgagaaacgcatctatggcgtctttaagtatataggataccaccctgatctagccgtgagcctagccaagatttgcaccatcgttcctgataacaagttcctctcttcctttaagaagaaggaattagacctgaagtgtatcatcataaagaaaacagaggggttacttccccagggggctccgtctagccccaaactctccaacctgattagcatctctctggataacaggctgagcaaactcgcgctcaaaaacgaactggggtacagtcgatatgcagacgatcttaccttttctggctcacttgaaaccctgaaaaaggtcaagagtacaatctatcgtatcgtggaagacgagaatctgttcgttaactacagcaagactaaactcctgatcaaaggaaatcccttcttcgtcaccggcctgtcggtaaataatgaccacgtgaccattccaaaaaaacggaaaatcgacatagagcatcacttatttcactgcattaagaacggtgtggaggcccatattacacggtgcgaaattaagaacaaaaatttcaaggactggcttttgggtaatattgccttcgtgtactcagtggaaaaggagctcggcgaaaagtacttcactgatttcaacaagattcagtggccaatatga

SEQ ID NO: 9876 - RNA, 1104 nt, synthetic construct
  source 1..1104: mol_type = other RNA
atgacaattcctagcatcattaaaaacagcatccccaaagaaataccagctccgcccagccccgaatttttgaacgacatagctcaatacagagcacacttaattgaccagggactgcctgtgatttattccgtgcaccacctgggcctgatcagtaagttcaacatcaacaacatgattcacctctgtaacatgccccgggacggcttttacaagaggtttaagatgaagaagaagaaagggggttatcgcgtaattcagaccccctcaagcgagttgaagtacttgcagcggtggatcttaaaaaatatactcgagaatcgtccttcccatgaatgctgcaagggctttgacctcaaagcctcaataaagaataatgccgaatcccacctgaacaaagaggccattctgaagatcgatttccttagatttttcgactccatcaacgagaaacagatatatagaatcttcaagggcatgggataccatggaaacgtcgcttttgcactagctaaaatctgttccgtagtgccagataagatgtttttcaagtcgttcaagaagaacgaaaagcacctgaaaaaggttgtgctggaacacgatggagggatcctgccacaaggcgccccaacatcccctaaattgtctaatctattctgcctgtctctggatcatcgccttacacttctcgcaagcaaaaataacctgtcatacactaggtatgcggacgatttgacattttcaggtgattatgagactctgatctctgtgaagaaaaccatctacaaaatcatcaaggacgagaaactgttcgtcaatatgggcaaaactaagattcttaaacggggtagtctctttttcgtcaccggcctcagcgttaacaataaaaaggtgaccattcctaggaagaaaaagaaggatattgaacatcatctccaccattgtatcaaaaatggggttgagaatcacatgcagaagagtaatatcacgaatcgaaactttaaggactggttattcgggaacatagcctttgtctactctgtggagaaagagctgggggccgagtatttcaagattttcggatctattcagtggccgatttga

SEQ ID NO: 9877 - RNA, 1101 nt, synthetic construct
  source 1..1101: mol_type = other RNA
atgacgtttccgtttaataagctgatccccatttctaatgaagagattgttcatagcgaagagttttatgaggagatccgcaaatacggctcattcttgagcgacaagaaactaccaataatttacagtttgccacacttatgtctcctctctggtgtgaacattaacaacattaagaaactctgcggctccaatcgtatagacgattacaaaaggtttaagctgaaaaagaggcggggaggattccgggttatacaaactcccaacgaagagttaaaatatctgcagagatggatcctgttcaatattctagacaagataactgtacacgatagctgcaccgggttcgaaaaagaaaagtctatcaaacagaacgctgagatacatcttaaaagtgaggccgtgttaaagatcgatctgatgaggttcttcgacacaatcaacgaaaagcgaatctatgggttgtttaagaatttcggctatcacaaaaacctcgccgtatcttttgctaagatatgcactatcgaacccaatgagaagttcatgaaatcgttcaaaaagaacgagatcggtatcaagaacttcatcattgaaaacgaagagggaattcttccccagggctcccctaccagccctaagctttcaaaccttgtcgcgtttaagctggataaaagactgtacggtctggcactcaagtccaaactgaattacagtcgttatgccgacgatatcaccttttccgggaatctggacaccttgaagaagatcaagagcattatttacaagatcatcaacgaggaacggttcttcgtgaatcacagcaagacaaagctcctgatcagaggcaatccatttttcgtgacaggactgtcagtgaacaacaattacgtcacaattcctaagaaacgcaaaatcgatatagagcatcatctctttcactgtcttgagaatggagttgaggagcacatgaagatctgtgagattaagaaacgcaactttaaagactggctgttggggaatattgcatttgtgtactccgtcgaaaaagaactgggccaaaaatatttcgactcgttcaataagatccagtggcctatttga

SEQ ID NO: 9878 - RNA, 1098 nt, synthetic construct
  source 1..1098: mol_type = other RNA
atgacctattccctggacatctacaaaaaacgcgccgccgagctcaaacggagcgaggaatttattaaggaaacaagcgagtatatcgagctcatttctaaaaaggggtttcctcccattttcagtctgccccacctgtgcctgactagctccgtgtcaataaagaacaccatcactatctgtgaatcaaaccgaagagttttttacaaacgattcaagctgaagaagaaaaaaggtggatatcgcgttattcaaactccagtttccgagctgaaatttctacagaggtggatcctagacaacatacttgaaaagatcccttcccatcacagctgcaaaggcttcgacaaaaacacgagcattattaagaacgcagagtgtcatctgaatagtgagtgtatcctcaagatcgacttacttcggtttttcgattctatcaacgagaaaaggatttacgggattttcaagagtttgggctacaaggaaaatttatgcgtcagtttcgctaaaatctgcacgatcgaacacgaagagaagttctacgattcttttgaaaagtctgagcaaaaactcaagagctatcttaccaataagaaagagggagtcctgccccagggagcaccatcttctcctaaactggctaatctgatcctgcggaggctcgatcatcgtctcagcaagctttgtgagaagcggaaaataaactattcaagatacgcggatgatttgacattttcaggcaattccatcgaattgcagattatcaaaaagatcgtgtacaagatcatccacaacgagaatttattcgtaaacttctcgaagaccaagtttctcaagagaggtagtcccttttttgtcaccgggctgtccgtacacaattccgaggtgaaggtgattaggagaaaaaaaaaagaagtggagcaccatcttttccactgtctgaagaacggcgtgatgggacatttgacaaaggccaagattacaaatcgcaatttcaaagattggctgttcgggaacatatgctttatatactcagtcgaaccgattataggccaggagtatttcgacaagtttaataaggtggactggccaatttga

SEQ ID NO: 9879 - RNA, 1098 nt, synthetic construct
  source 1..1098: mol_type = other RNA
atgacttttctgctcgataagtataaggaacatgcccttgcgagtaaccattcgaatgagttcatctccgagacaatccagtatgctaacttcctgtcttccaagaacctgcctgttctattcagtttaccacatttatgtctggctagcgcagtgagcataaaaaacaccctggagatatgcaactcatcccgcatagaatactacaagcgcttcaaaattaagaagcggaggggaggttaccggacgattcagacgccaacaaatgaactcaagtatctgcagaaatggatcctgaggaacattttggaaaaatttccgagtcataagagctgcactggctttgacaagctgtcatctatcaagaagaatgcagaaatacacctcaatgccgagtgcattctgaaaattgatctgttgcggttttttgacagtattaatgagaggagaatctacgggatctttaaatcattcgggtatcagaataacctgtgcgttagcctagcaaagatttgcacagtgaaacaaaatgaaaccttctacaacaccttcaagaagaatgaagacaatcttaagcaatacttgctttctaaagacgaggggatcttacctcagggagcccctacaagcccaaagctggccaaccttatcctgagaaatctggataaacggcttgaacgtttgtgttctaagtataatgtgaactactcccgatatgctgacgacctgaccttctccggcaaaaaggagaatttgctgtacctcaaaaagatcatctacaagatcatctactccgagaacttatttgtgaacattgggaagaccaaatttatagtccgaggcaacccctatctcgtaactggactctctgtacacaatgaggaagtgaaggtgattagacgcaaaaaaaaagagattgagcaccacctctatcactgtattaagaacggagtcattctccacctcatcaaaagcaatatcggcaacaggaattttaaagattggctgttcggcaatatctgttttgtctattcaatcgagcccaaggttggtcagaactacttcaacgatttcaacaaaatagagtggcccctatga

SEQ ID NO: 9880 - RNA, 1098 nt, synthetic construct
  source 1..1098: mol_type = other RNA
atgacttttcccctagacaatttcattacaaaggcaaagttccaaagacactccgatgagttcatcgacgatgccaaaaactacatacagaaactcgagaaagctgagcttccgattctgtttagcattttccacttgtgcctttccgcgaaaattagtatcaagctgatcctagccctctgtcggtcagatcgcattcattactataaacggttcaaaattgccaagaagcgcggtggatataggatcattctcagccctaataacgaacttaaatacttgcagaagtggatccttattaatatcctggagaaaataccttcacataaaagctgtcagggtttcgacaagaacaagagcattaaaaagaacgctgaaatccatattgggtcggagtgcatcctgaagattgacctgctgcgtttttatgattccataaacgagaaacgagtgtacggcattttcaagagtttagggtaccataagaatctcgccgtatctatggctaagatctgcacggttgaggtgaaagagaattttctgaaggcatttacaaagaacgaatccgacctcaaaaataaaatatcctctcagaaggaaggcatcttaccccagggcgctccaagtagcccaaaactttctaatttgatcctgcggaggctggaccaaaggttacattgcctggccaaaaagaacgggattaactattctagatacgcagatgatctcaccttctcaggcaaggaggagaagctgaaagagttgaagaagatcatatacatgatcatcaaggacgaaaacttcttcataaactatggaaagaccaactttctgaaaagaggcaatcgcttttttgtcaccgggctcagcgttcacaatgagaaagtcactgtgccaaagaagtttaaaagtaacatcgaacaccacctgtatcactgcataaagaatggagtgatcgcccacacaaaaaagaacggtattgaaaaccgaaacttcaaagattggctgctgggatgtatctgttttatcaattcagtggaacccgagttgggcgaagacttctttgaaaagttcaacgagatcaattggcctatttga

SEQ ID NO: 9881 - RNA, 1098 nt, synthetic construct
  source 1..1098: mol_type = other RNA
atgacataccccctcgatgtgtttttcgaatatgccaaagagatggaccattctccacagttcactgaggaagtggagaagtatgtcagctcactcctcaataggaatttacccgtgttcttttcgcttccacacctggctctggctgccagcttctctatcaaccacgttgagcgtatagtgaaatctaaccggcgcgactactataagagatttaaattggccaagcgccgaggtggtttccgaatcattcagacccctgaccaggaactaaagtatctgcaaaagtggatccttcttaatatactgaacaaggtcaattctcaccctgcatgcaaaggattcgaccccaaaagttcaatcattctgaacgcccaagaccacctgaataaggaggccattttgaagatcgacttgttaaggttcttcgattccatcaacgaaaaacggatttacggggtctttaaagggttgggctaccatccaaatctggctgtgtccctggcaaaactctgtacactgaaaccggacaacaccttttttattgcgttcaagaagaacgaactcatgctgaaagagcttatcaagaagagagatgagggcattcttccccagggtgcccctactagtccaaagctgagcaatctcatcgcacggaatctcgacattaggctcgataaactatgcaagaaacacggcatatcatatacaaggtacgctgatgacctgacctttagcggagaaaaaacgaagttgatgctgctgaagaaagtggtgtataaaatcgtgaagacggaaggcttctacataaactacgggaagactaagttcctgacccgcggcaacaaatattttgtcaccggattgtccgtacacaataagacactgaaggttccgagaaaaaaaaagctggatatcgagcatcatctccaccattgtctaaagaatggggttcacgtgcatatgattaaatccaagatcaagaaccggaactttaaagattggctgttaggcagtatctgctttgtctggagcgttgagcaggagcttggacagaagtacttcgatgaatacaacaagattgagtggcctgtatga

SEQ ID NO: 9882 - RNA, 1098 nt, synthetic construct
  source 1..1098: mol_type = other RNA
atgacctttcccctggatgactttctgattaaggcccaggctgccgggcactccgacaaatttatagcagagacgacagcatatattcacaagctatctaaggacaatctcccagtacttttctcacttgagcattttgccctggaggcccaggtgaatatcggacgattaggtatgattgtccggtccgaccgtaccttttactataacaagttcaagctcaagaagcgcaatggaggcttcaggactatccagattcccaatagcgatctcaaatacttgcagaagtggctactgatcaatattctgaacaagataacctctaacgccgcgtgcaaaggctttgatcctggaacaagtattaaaggaaatgccgaaatccatctgaataagcaggctattctgaaaatagatttgctacgcttctacgattccataaatgaaaagagaatctacgggatctttaagtcaattggctatcacgctaaccttgccgtgtatttagcaaaagcttgcaccatcaagccagataacacgttcttcattgcgtttaaaaagaatgagctgctgctgaaacaggtgattgaaaaacgagatgacggcgtgttgccccaaggtgcacctacatctccaaagctgtcaaacctgatcgccagaagtcttgataagagacttcagggactctgtgacaagcacgacgttaattactcgaggtacgcagacgatttgacattcagcggtgacaaggctactttggccaaaatccagaagattatctatagcatcgtggagaaagaggggttcttcataaattacggtaagaccaaaatgctggttcggggcaacaaatatttcgtaactgggctgagcgtccacaacaacgctgtcaaggtgcctaagaagcaaaagaaagaaatcgaacaccatctgtatcactgtcttaagaacggagtgcatctccatatactcaaaagcggcctcaaaaaaaggaacttcaaagactggctcttagggagtatctgctttgttaactccattgagcaaaacctgggctctaaatacttcgagctgtttcagcggatcgaatggccgatctga

SEQ ID NO: 9883 - RNA, 1095 nt, synthetic construct
  source 1..1095: mol_type = other RNA
atggattatccccttgacgatgtgcttgaggccgccagagacgagggccacacaacattgttcgtggcggatatagaagcatatgtaaaatacctcaccgcacggcaactgcccgtgatatacagcctggctcatctggccatctctatgggcatgaacatcgatatgatggtgaggttagcagagagcaatagaagggactattacaaaagattcaagctgcagaaaagggccggcggatttcgaaccattcagtcgcctgacaatccactgcgttacattcagaggtggatcctcgctaacattctcaataaaattcctagtcacccggcttgcctgggattcgacccaacaacctcaattctgaagaacgctacggtccacgtcaaccagaaggcgatcctcaagattgatctgttgagattctttgacagcatcaatgagaaacgcgtgtacggtatattcaagagtattggctttcaccccaacttgtctgtgtctctggccaaactttgcaccatcgttcatggcaaaaattttttttccgagtttcgcgagcatgaagtggaaatcagagataggattataagtgacagcactgggattctaccccagggggggccgacttctccaaagctagccaacctggtcgctcgccgcctcgattccagactccagggtctgtgtgagaaaaacggtctgaagtactcccggtatgccgacgatttaactttatcaggggacaaagatatcctcgaacgggtccggaaaaccgtgtacaagatcattcgagacgaaggattctttccaaatttgagcaagacgcggcttctgctgcgcggtcagaaattcatggttactgggctggacatatcaaacgaaaagccccgggtatcccgaaagaagaagaaagaaatcgagcatcacctttatcactgccagaagggagttcaacgtcacatccaaaaggcaaagatcacacagaggaattataaggattggctactgggcagcatttgtttcgtccatggaatcgaaccttcagtgggcaaattgtacttttccgagttcgctaagatcgagtggcctctctga

SEQ ID NO: 9884 - RNA, 1110 nt, synthetic construct
  source 1..1110: mol_type = other RNA
atgaacggggattttcccaggaatgactttatacaccaagctaaagccgagggacactccaaggagttcattcaatctactaccgaatatgccgaaaagctggaaaacctaggcctgcctgtcctttattcgctcaagcacctggcactcaccttggatatcccctatattcagctgcgagagattatcaggaatcgtcggaagtactacggtttatttaagatctccaaaaaggtcaagggttatcgggagatcagatgcccccagaacacgctgaaggatattcagcactggattctgtattcaattctggcgaaagtcagaacgcacaagagttgcatcgggttcaaaaaaggggactccatcaaaaaaaatgccacaatacaccttggtcagccagctatactgaagctggacttatactgctttttcgacatggtaacagaaaagcaggtgtacaatgtattcaaaagcctaggctatcatccaaatctcgcagtcgatctggcaaaattgtgtacagtgcctgaaactggcgagtacgtgaagaagctgtatcaggacacctgtcccactaactttatataccatgataaccccttcttgccgcagggcgcgccatcaagtcctgctttggccaacctcgtcctctaccatctggatgtgcgacttaaagggcttgccgactttctgggtattcaatacacacggtatgctgatgacatcaccttctccggagaggatgatagactgcctaaaatcagcctgattgacaagatagtgagggacgaaggattctacctcaatcactctaagattttgttgcgcaaaaagggccagcagcaaaaagtgaccggcctaatcgtttcaggaactagcttacgcgttcctcggaagtacaagagagacatctggaaacatcttcttttcctgaagaaaaggggcgtgaaggagcatctcgaatacatcaagaacaagaacggatctaacaagagtgcctatcgcgattggctgctcgggaaaatcatgttcgttaaaagcattgagccgaccgtggggaataagatgctctttgagtttaatcagatcaaatggccattctacgactga

SEQ ID NO: 9885 - RNA, 1098 nt, synthetic construct
  source 1..1098: mol_type = other RNA
atgaataacatctttccacgggatgcctttgagaaggtggccgaagctcgaggccattcaaaagagttcatcttatctgcactggaatacgcagacaagctgattaaaagtgagctgcccgtcttattttcaaccaagcatttttgcgaggtgattgatataacgtatggagaattgaagaagatcatcctgaatcgcacaaatcaatacggcaatttcaagatccgtaaaaagtccggtggttttcgggaaatccgctctccaaaggagaagctaaagaacattcagaaatggatactcaacaacattctgagcaaggtgagccctcatggcagctgcattggatttaaaaagggggactccattataaagaacgctttacctcacctcggtaaagaagccattttgaaattcgacctgttccatttcttcgacacagtcaccgagaagagggtgtattccatcttcaaatctctcggctatcacagtaacttggcggtagaccttgcaaagctttgtaccgttccgagcttcccaagccacaagaagaagtttctggagaacttcaacataagcgacaatcccttcccttttgattcgtttcttccacagggagcgcctacctcccccgcactagctaatctggtggctgggcacatggataaaagatttaaaggacttgccgattttctggggcttgactacagtagatacgccgatgatctgactttctcaggcaattacgaatgtttgccgaatgtcaacttcgtgaagaagattatcctggaagagggcttttatatcaacgaaagtaaaacgtgcctcaggcgggaaggacagcagcgcaaagtgactggaattatcgtctctggtgacacatccaaggttcccaaggcctacaaaaaagacatctggaagcacctgtacttcctcaataagtttggggtaaaaaaacacctccgaaacatcaaaaacaataagtcctcattccaggattggctgctggggaggataatgttcgttaggtctgtcgagttcgaggagggcaatagaatgctctacaaatataaccaagtgaattggcccttttatgagtga

SEQ ID NO: 9886 - RNA, 1134 nt, synthetic construct
  source 1..1134: mol_type = other RNA
atgaactgcgagtttcctcgcaacgacttcgtgaaggaagcaataaaacaaggccacagccaggagtttattaatgaatgcctcctttatgctgataatctcacttataaaggtctgcctgtgatcttttctactaaacatttctgtgaactgctggatatttccttcaagcagttgaattacattctagataacagggaggatttctacggaacatttaacctgaggaagaaacgaggcgggtatagaaggatacagtatccgctgcccattctgaaaaatatccagagatggatcctcgattacattcttacgagggttccactgcattcatcctgtaagggcttccgccgtggggagagcattttgactaatgccactccccacctgacaaagaagacgattcttcatctggacatcgaagactacttcgggagcatcactcagaaacaggtctttaacgtgttcagtaaattgggctataataagtcgctcgcccacgacctctccaagctttgcaccatacacaaggttgagatcgagaagacaatagagacagactcattcctcgccacagaacaaaaggagtttctggagagcatcaaacggtacagccagaaaaagattgacttcatcttaccccaaggtgctcctacctctcctacccttgccaacttggtcagcgtaaagttagacaaacggctcttttcactggcagaaaagctgggcgtaacctacacccggtacgctgatgacctaacattttccaccgataccgagatactgccaagactggccattatcaagaaaattctgagtgaggaaggtttccagctgaacaaatctaaaacagcaacccggaagcaggggcagcgccagatcgtgaccggattgctcgtgagtggcgaaaaggccaaggtgcccaaaaaatataaacaggacatcctgaagcacttattttacgctgataagtatggaccaaaggaccattctatggaaatccagaaaaatccagcgactttccaagaatggctgcttgggcgaattatgtttgtcagatccatcgagctagaaacgggaaacatgatgctcgagaagtacaatcaaatcgagtggggattcaacttgaagtga

SEQ ID NO: 9887 - RNA, 1053 nt, synthetic construct
  source 1..1053: mol_type = other RNA
atggacatccgtttccctagagatgcttttgttcaggaggcccagaatcaagggcggtcgcagctgttcatcgaggaatgcctcttgtacgcagatggtcttcaatacaagaacctcccggtgatcttctcaaccaagcatctgtccctgttgttagaattggagtacaaggagctgaacaacattatcctaaattcctaccggtattataagaccttctccatcgccaaaaaacgcggcggcgaaaggcaaattaagtgccctaaccacattctgaagagtcttcagcgatggattctcaataacatcctcataaatgtgcgggtcagttctgcttgcaaaggcttccgtaaaggagagtcaatcatcacaaatgcagatacacacctgggttgtcaggccattcttagagtggatctggagaacttctttgatacgattactgagaaccaggtgagaaagtctttcattaggataggctactcaactaacctgagcgtagacctggccaagctgtgtgtcactagccgattggacagcactaccggggaatatgtcagttctctgccacaaggcgctcccacctcccctatgctcgcgaatatagtggcctatcgcctcgacaaaaggctgagtagcctggccaataagcttggagtgcgatacagccgctatgccgacgacttagttttttcaggtaatactacccagctgcccaagatagaactcttgaagaagatcattacagaagaagggctgaagatcaataaccagaaaacgctgctaaggcgggaaggccagaagagaatggttacaggaatcatcgtgtccggggacaaactccgcgtacccaaaaagtacaagaaggatatttggaaacaccttcattatgctcttctctatgggcccgatggacatacctctagaatcaaagtcaacccagcgacatttaaagagtggctattaggacggataatgtacgtcaggagcgtggagaaagacgcagcagaggacatgctgaaagtgtttaacgagatttcttggggcttttga

SEQ ID NO: 9888 - RNA, 1035 nt, synthetic construct
  source 1..1035: mol_type = other RNA
atgaatttcccgcgcaatgactttgagaagtacgcccgtgatgagggaaaatcccagcaatttatagatgcgactctgtcatacgtagataaattgaatagcatgcagctgcccgtcatattcagcattaagcatctggccctcacactcgactacccctacaataaaatattggacatcgcaaaccactctgaaaagtactacaagagtttcaagatacggaaaaaacggaatccgcaacagttcagaagaatcctggcacccaacccagacctgaaagtgattcaacggtggatttacaataacatcctgaagaacatcgagcccgatgagtccagcgtgggcttttcccaggggtgtagtattcagaaggccgcagctatgcacactaatcaagaggtggtgctgcgagttgacctgagtaactttttcgagaacatcacccagaagcaggtttactatgtgttcaggaaccttggttaccacaagaacctcgccgtcgaccttgctaagttgacaacgatttataccaaggaaggttcatatttaccacagggcgcacccacatcacctgcgttaagcaatcttgtcgtgagaaaaatggacaagaggctcaggtgcctgtctgaaaaactcggagtgaactatacccgctatgccgatgacctaataatttctggcaataagaaggacatccctcggttgggcctaattaaacagatcatcaaggaggaaggtttcaagctgaactccgagaaaaccgccatccagcgcgctggcaataaacagcttgttttagggctcactgtaaccaacggagtccatgtgcctaaagacttcaagaaagaaatttggacacatctgaggtattgcaaaaaatatgggccaatcgatcacctgcgatacattaataagtcggataagggggcctttaaagattggctctttggcaagatcagctttgttaagtctgtcgaacctgctgtgggagaaaagatgatgaatctgttcaacgagatcaactggccactgtga

SEQ ID NO: 9889 - RNA, 1035 nt, synthetic construct
  source 1..1035: mol_type = other RNA
atgaactttcctagggacgtctttgaacaacaggcacgcaaggagggaaagtcagacagctatataaagtccgccttggtttatatcgatcgactgaacagcatggagatacccgtgatatttagtctgaagcacctcgcactgatactggacttcccttataagaagatcagcgacatggccaacaaccctaatacatactactcgacgtttaagatccgcaaaaagagaggaggcttccgggagattcaagcccctcagcccgaaatgaaaattattcagaagtggatctaccagaccattctcaaagaaattcggactgattcttcttgcatgggatattcaaaagggagctccattagggaaaacgccaatgtacacaagaaccaggaagtaatccttagagtggacatttacaagttcttcgagaatatctctttcaagcagatctactatgtgtttaaaagtctaggttacaccaagtacgtggctatcgatctagcgaaactcaccaccgtcaaaagcgaaggctctaatgtgaggtatctgccacagggagcaccgacatccccagctctgtccaatcttgttgtgcgaaaactggacaaacgcctcagaagtttatcaaataagttgcaggtgaactatacacgttacgcagatgatctgatttttagtggcgagaaaggttgtcttccgcagataggcctcgttaccaaaattattaaagacgagggcttcaaaatcaaccccaataaaactgccatccaaaaaaaggggaaccggcaaatcgtgctgggcctgtccgtcactaacggagtccacatcccaaagaaatacaagaaggagatatggacacatcttaagtattgcaaaaagtttggtcccattaagcatttggagaacattggggagtctaataaggcggcctacaaggattggttattcgggaagatctgttacgtgaaaagcatcgaacatgaggtcgggaaaaagatgatggctgctttcaatgacatctcatggccactgtga

SEQ ID NO: 9890 - RNA, 1041 nt, synthetic construct
  source 1..1041: mol_type = other RNA
atgtactttcatcgagatattttcgaggaaaaagcacgagagcagggcaagtcaaacgcctttattgaatcttctctcgcatatgtcgataagctaaattctatgcagttgcctgtgatatttagtctgaagcacctggctgtgacgttagatatatcctacaagaagatcagccacatgattaagttcccaaacgagtactataacaccttccgtttgcggaagaagagcggcggagttagaatcatccaggctccaaagcccgagctgaaaattattcagaaatggatctacgttcacatcctgaaaaacatcaaagtggacagctcatgtaccgggttcacggtaggctcctccacaagtaaagtcgcccgcatgcatcagaataaggaggttgtcctaaaactcgacctggaaaacttttacgacaatatcgatcgcaaccaggtatactatgtgtttaagagcattggctacaaggaccatgtggcgatcgacctcgccaaacttactactgttaatcccataaagacacagaggaacgtttttattcttccccaaggagccccttccagcccgtctttgtcgaacctggtcagcagaaacctggacaggagacttcggttgctgtcagagaaagtgaacgtcatctatacccgctatgcagatgatctgacattctccggggagaagaaaaatatgccctccttaaaactggtgacaaagattattagcgaagaggggtttcaagtgaataataagaagacctcataccagaagaaaggcaataagcagatcgtgcttggactcaccgtgtctaacgatgtacatgtccctaagaaattcaaaagggaaatctggactcacataaaatactgcaagaaatatggtcctgtgaaacacctgataaatatcaatcaagctaaccgggccagttataaggactggctgtatggaaggatttgctacgtgaagagtgtcgaactcaaagtgggtgagaagatgatggaggaattcaatctcatcgactggccattctga

SEQ ID NO: 9891 - RNA, 948 nt, synthetic construct
  source 1..948: mol_type = other RNA
atggctggcgtcgatcgcactcggctgctcaggatcacagagcagagggaccggaattatcaccggttcttgttggaaaaaagggctggaggattcagagagatccttacccccaagccgctcctgaagcggatccagagactgatctacgtgaatattctggctaccgtggaattagaccagtcctgcctgggattccgcgaaggccgatctatcaaagacaatgcccagatccatgccaaccaggatgcggtgatgaaggtggatctatatcggtttttcgacaccatttccgaaaagagagtttacggcatgtttaaaagcctgggctaccacactaatcttagtgttgattttgccaagctcaccaccctgcacccatcagagcaatattacctggagatcatgaacgacaagaatcttccagatcattaccctgatcctcattttgcccgcttaccccagggggcacctacaagtccagtgattagcaacataattgctaggaatcttgacttccgactgaggaagctagccgagaaactgggggtcaactattctagatacgcagacgatattaccttcagtggggtgcttactaagctccccaaaatacacttgataaacgacattgtccgaagcgaaggcttctttataaacggatcaaagatctcactccgcaagaaaggaacaaaacagttagtaactggcctcacggtttcgaacggtgtgcatgtacccaaaaagtataaacaagagacgtggaggcacctgtactattccaagaaatacggtgccaaggatcatctgcgtcgtatcggcaaaacaggtattagcgggttcgaggaatggctgctcggtcgcatccactttattagatccatcgagcctgaagtcggggacgcaatgctggagaagtatgaggtgattgactggtctttgatctga

SEQ ID NO: 9892 - RNA, 1101 nt, synthetic construct
  source 1..1101: mol_type = other RNA
atgtccacaaacatcccacgtgacgaatttgtcttagtcagcaaggaatctggacactccaaagagttcatttcaaaggcactgtcgtacattaatacgctggagaataagaacatgccagtgatctttagtatcaagcacctttcacagattctcaacctcaactattcgttggttctcgatattattaagacccgggaacaatattaccgggggtttaaactcaaaaaacgaagaggggggtttcgatatgtccaaagccccaacagcaacttgagagagatccagacttggatacacaataatatcctgctgaacgtgcccattcacgaaaattgcttctctttcatcaaacagaagtctatacgggataatgcctccctgcacgctaatgccgaggccattcttaagctggacctgtacagatactttgagtctatcgatcagcgcaaaatctacaaagtcttcctggactttggctacacaaaaaacgtggccatcgacctgagcaagctgaccacaattctgcccaatcagtattacgaggacataatatcaaaggataagctaactcctgagaagtttgtgttgtcaaagcacggtttcctgcctcagggaagcccgaccagccctatcctgtccaatatcgtggctgaaaaattagacattaggctaaacggtttagctaaggcgttgaatgtaaaatactccagatacgcagacgatatcaccttctctggcaaaagggataagctcccaaaagtaagcttcgtggaaaagattctgaatgaagaggggttctatctaaacaacaagaaaacaaagctccgggtgaaaggacagaggcaaattgtgactggactgtctattagtaatggtgttcatatccctaagcattataagcgcaaaataaggcagcatctttattactgcaaggttcttggccccaaacgccatctccagaacattaacctggaaaagagtaacttcaaagactggttgtacggcagtatctgttatatccgttccatagagaagaacctcggcgataaaatgctggaggattttgacaagatcaattggcttttctactatgactga

SEQ ID NO: 9893 - RNA, 1209 nt, synthetic construct
  source 1..1209: mol_type = other RNA
atgacgctgccgctgaagcacatactgaagaacatcaaattcaacattcaggagagggtaacagccacaatgagctttccatttaatcagtttgctttggaggcaaaggaacagaataaaagtcaggagtttatcgatgcatgtctggcctacgcgagcaacttatccgagcagggctatcccgtgaccttctctattgaacaccttgccatgcaaatcggtgtgcaatcagattatttgcggaatctcatcggcgatggcaaacgagacatcacttacgattacgaacacaaatacaaacggtacaactactttaagctgaagaagcgggatgggaactttcgtgaaatcatgtcgcccgcgaaagacctcaaattcattcaaaaatggatcctcgtgaatattctgtctaagtacagactggccgagtcttgcaagggatttcggaagagaatttcaatctacgacaacgcaaaggtgcacgagaattccgagatcatcctgaaggtcgaccttctcaagttttatgacaccattaccgaaaagcgcgtctacggactattcaaatctcttggctatgcaactaacttatctttcagcttggccaagattaccactgccaaacacagaaaaaattattggagggatttcaacaacagctccaaagaaattctatctgagttggtacagactaagcctgctatcctgcctcaggggagtccaacatcccctatgataagcaatatcctggctacaaagatggactatcgatttgagggaatggccaaaaaacagaatttcagatattcgaggtacgccgacgacctgaccttctccattacgaaagagggaagcttaccctcccttaacgtgatatcaaagattatcacccaggagggttttttcatcaatcacaagaagactcagtatctcaaaaagggttgcaagcagtatgttactggcctgacaaccaccaatgggataaacgttaataagaaataccgcaagcaaattagtgagcatatttacttttgccgcaagtacggcgttaagtcacatctcgctaggcgtaagaaagatttcccaaactcaaattcccttagcttccataactggttgtatgggcatctgtgtttcatcaatagcgtcaacagtaaagctagtaaaacactgctcgaagaattcaataagataaactggtccgtgtga

SEQ ID NO: 9894 - RNA, 1137 nt, synthetic construct
  source 1..1137: mol_type = other RNA
atgtcctttagtttcaaacagttcgaaatagaagccaagaagcaagagaaatcgcaagaatttatagacgcatgcttggtgtacgccaaaaaactgacccagaatgactatccggttacttttagcttagaacacctggcgatgcaaattggtatacagtctgattacttacggaacctgatcggggatgacaaaaatgggattacaaacaactacgagcacaaatataagcgatacaactacttcaagcttaagaagaggcacggaggttttcgagagattatgagccccgctaaggacttgaagtttattcagaaatggatcctggtgaacatcctctccaaatacaagctcgccgattcttgtaaagggttccgtaagggaatctctattttccacaatgcaaatgtccacgagaattcagaattgatccttaaagttgacctgctaaagttctacgatactatcactgaaaagagggtgtacggcgtattcaagagcttggggtatgcgaagaatctcagttatagccttgccaaaatcaccaccgcaaaacatcgggacaaatactggcgcaatttcgatgatgacagcaaggagcggctcaaggaactggtaatggctaaacctccaattttaccacagggcgctcccacttcacctatgctatcaaatatcctggccaccaagatggactatagatttgaggcacttagtaagacacagaattgtagatacagcaggtatgccgatgatatgactttttccatcaccaaagagggaaaactgcccagtctgaaactcattacgaagataatatctgacgagggctttttcatcaacgacaaaaagacacgctatatgaaaaaagggtgtaagcagtacgtcacaggactgaccaccacaaacggtacgaacgtgtccaagaaatatagaaaggaaatctccgagcatatctattattgccgcaagcacggcgtggacggacatctggagaggagagtcgatttctcaggctacaacaacattaagtttcataattggctgtacggccatctgtgctttattaagagcgtgaatgaggaggcttctaaaaagatgctcgattccttcaacaagattaactggtatatctga

SEQ ID NO: 9895 - RNA, 1140 nt, synthetic construct
  source 1..1140: mol_type = other RNA
atgtcatttccattcaaacagttcgaggaacaggcgagaaaacaagagaagtcccaggagtacatcgatttttgtcttgcctacgctcgtaaacttagcgaaaacgggtatcccgtcactttttctctagaacacttggccatgcagattggagtccagtctgactaccttcgaaacctgattggagatgacaagaataacatcgaatacaactatgagctcaaatataagcggtacaactacttcaaactgaagaagcgagacggcggtttccgcgaaatcatggcacctgcaaaagacctgaagttcattcaaaagtggattctcgtgaatattctgagtaagttcaagctggccgattcttgtaaaggttttcgccagggcgttagtatctacgacaatgccaaggtgcacgaaaatagcgagattatcttaaaggtggacctcctgaagttttacgataccatcaccgaaaaacgggcctatcgggcattcaggctgattggctatgtgaagaacctgagctatagcttagctaagattaccaccgcgaagcatcgggactcttattggagaaatttcgacgatatctccaaagagacactgaaagagttaatcattgtgaaacctcctattttgccgcagggggctcccacatcacccatgataagtaacatcttggctactaagatggattatcgtttcgatgccctcgctaaaaaacaaaactgcaggtatagcaggtacgcagatgaccttacattttccatcactaaggagggaaaattgccaagtctgaaactgatcacgaagattatcactgacgaaggctttttcataaacgacaaaaaaacgcgctttatgaaaaagggctgcaagcagtacgtaaccgggctaacaacaaccaacggtatcaatgtatccaaaaagtacagaaaggagatatacgagcatatctactattgcaggaagtacggggtttcgtctcacctcagcaaaagagaggaagagttctcaggctttaattccataaagttccacaattggctgtatggacatctgtgtttcataaagtccgtgaataaagccgcctcaaacaagatgctcgaggattttaataagatcgattggtttgtctga

SEQ ID NO: 9896 - RNA, 1140 nt, synthetic construct
  source 1..1140: mol_type = other RNA
atgtcctttccttttgaacagtttattatccaggctcgagagcagaacaagtcacttgaatttatcgacgcgtgcctaagctatgggaaagccctcgaagaaaaggagctccccgtgattttcagcctggagcatctagcaattcagatagggatccagtccgtgtatctgcgcaatctcatcggagacggaaagtgggacataaattatgaatacgagcacaagtacaagcggtacaactacttcaaattgaaaaaacgtgacgggaaatttagggaaataatggcacccgctaaagatcttaagtacattcagaagtggatccttgtgaatatactcagtaaatacgtgctggccgacagctgtaaaggcttcaggaagggcatttctatcaaggataacgcgaaagtgcacgaaaatagtgaggttatcctgaaggtagatctgttaaagttctatgacactatcaccgagaagcgcgtgtgttctgtttttaaaagcttaggctacgtgtcaaacctggcctactcctttgcaaaaataactacggcaaaacatagagagtcctactggaaagactttgatgagaatagcaaggagattttgaacgagttggtcgacaataaacctccaatcttgccacaaggcgcccctacatctccggccatctcaaacatcctggccactaagatggattacagattcgaagccctgagcaggaaacttaattttagatactcccggtatgctgatgatctgacattctcgattaagaacggcggcaaattaccatctctcaagctcattaccactatcatatccgacgagggattcttcattaactcaaagaagacgaagtatatgaagcgaggttgtaaacaatatgtaaccgggctgacaacctcgaatggtaccaacgtcagtaaagaatatcgcaaaaccattacagaacacatctactattgccggaaatatggagttaactctcacctggagagaaggaaggaagagtttcccaagtacaataatatcaagttccacaactggctgtatggtcatatgtgcttcattaagagtattaacgagaaggctagcaagaagatgctggaggatttcaataaaatcaactggtacgtctga

SEQ ID NO: 9897 - RNA, 1140 nt, synthetic construct
  source 1..1140: mol_type = other RNA
atgtcctttccattcgaacaattcattattgagtctaaggagcagaataaatcgcaggagtttattgatgcatgtctgacatacggaaagaaattggatgacaaggagtttcccgtgattttttcccttgagcatttagccatgcacatggccatccagtccgactacctgagaattctgataggcgacgacaaaaaaaacctagtgtatggttccgaatataagtatgagcgatacaactacttcaaattaaagaagcgagatggaaaattcagggaaataatgagccccagcaaggacctgaaatatatccagaagtggattctagtcaacatcgtaagtaagtatgtgctcgctgacagttgtaaaggctttaggaagaatatcttcattgcccacaatgccaaggtccacgaaaatagcgaggtgattctgaaagtggacctcttgaagttctacgacaccatcacagagaaacgcgtctatggactctttaaatcactgggctacataaataatctggcttattctttcgcgaaaattactactgccaaacatagagacagttattggaacgatttcgatgaaaattccaaggaaatcctcaaggagttaattgagaacaagcctcctatactccctcagggggctcccaccagtccaatgatatcaaacattcttgccaccaaaatggattatcggtttgaggcactggctcgcaagctgaactgcaactacagcagatacgcagatgaccttaccttttctattaaacgtgagggtaaattgccatctctcaagctgatcactaaaatcatctcaaacgaaggcttcttcatcaatgataagaaaaccaagtacatgaagaaggggtgtaaacaatatgttacagggctgaccacgactaacgggacaaatgttagcaagggataccggaaaacaattacggaacatatatactactgcaggaagtacggcgtgaattctcacttggaaaagcggatcaaagactttccgaagtataacaacatcaaattccacaattggctgtacggccatatgtgctttatcaagagcatcaatgagaacgcgtcaaagaagatgcttgaagatttcaacaagatcaattggtacatctga

SEQ ID NO: 9898 - RNA, 1140 nt, synthetic construct
  source 1..1140: mol_type = other RNA
atgtcctttccctttaaagagttcactgaaaaagccaaagaagaaaaccgaagtcaggaattcattaatgcctgtatacagtacgctaagaagctgtcatctaaaaagctcccagtgattttctccctagagcacctagcaatgttaatgggggtggagtctaactatttgcgtacgctcatcgacgacggaaaaaacgacttcgtttattcgtacgaacacaagtacaaaaggtacaactactttaagcttaagaagcgcgatggaggctttagagagatcatgagtcctgccaaggacctgaaatttatacagaaatggatcctggtgaatattctcaataagtataagcttcgcaactcctgtaaaggtttccggaaggaaataagcatctaccataatgctgaagtgcaccagaactctgaaactatcttgaaggtagatctcctgaagttctatgatacgatcaccgagaagcgggtttatggtttgtttaagtctttgggctatgcgaataacctggcctatagttttgcagagctcaccactgcaaaacacagagactactattggcgaagtttcgacgcaaattccaaaaaagtcctgaatactctgtacaatcatagaccacccatcctgcctcaaggcgccccgacaagccccatgatttctaatattctggccgccaaaatggacgtacggttcgagaaattagctgagaaactgaactgcaactattccagatacgcggatgatctgacatttagcatcaaaaacgagggcaaactgcctagccttaagctcatctataagataatcagcgacgagggattctttgtcaacgagaaaaaaaccaagtacatgaagaaggggtgcaaacaatacgtgaccggtctgacaaccacaaacggagtcaacgtgagcaaagcttatcgcaagtcaattaaggaacacatatactactcaaggaagttaggggtgaagaagcatcttaaaaataggaacgaagagttcggcggctacaataatattcagtttcacaattggctgcttgggcatctctgcttcatcaagtcagttaatcaggaggcctacaagaagatgattaaggatttcaacaagatcaactggtatatttga

SEQ ID NO: 9899 - RNA, 1140 nt, synthetic construct
  source 1..1140: mol_type = other RNA
atgtccttcccgtttgaaaagtttatcatcaaggcacgcgagcacaataagtctgaggagttcattaacgcttgcttggtctacggaaaaaacttagtcgagaagaagttgcctgtaattttctccctggaacatctgtctatccagattggggtcaagagtgactaccttagaaatttggtgggcgacggaaaaaacgacatcatttacaactacgaacacaaatacaagcggtataattacttcaagctgaagaaacggaacggcacctttagagaaataatggccccagctaaagatctcaagtacatccagaagtggatcctcgtgaacgtgcttgaaaattatcccctggccgagtcctgtaaaggctttcggaagaaagtcagcatatatgataatgctaaggtgcacgaaaacgcggaggtgatcctcaaaatcgacctcttaaaattctacgacaccatcaccgaacgaagggtttatggaatttttaaaagcatgggttacgtggagaatctggcatttactctggccaagataaccacagcgagacaccgggagtcatattggattgattttgaccgtaatagccaagagatactatccaagctgcttaaggaaaagcccagcattttaccacagggcgcccctactagccccatgcttgccaacatcattgctaccaaattggattaccgctttgaagcactagcaaggaagattaacttcaactacagtaggtacgccgacgatctgactttttccatacaaaagaaaggtaaactcccccctctgaagctcattaataaaatcatctcagaggaggggtttttcgtgaatacagagaaaacgaagtatatgaagaagggatcaaaacagtatgtaactggcctgaccacaacgaatggggtgaacgtgtcaaaaaaatacagaaaggaaatctctgagcatattttctattgcaggaaatatggtgtcgtttcgcatctgaagcgacgcgagaatgaattcccaaaatataacagcatgaacttccacgattggctctatgggcatctgtgtttcattaagagtatcaatgagacagcctctaagaacatgctggaggacttcaacaaaatcaattggtttgtttga

SEQ ID NO: 9900 - RNA, 1146 nt, synthetic construct
  source 1..1146: mol_type = other RNA
atgagcttcccctttaaggaatttatctcaaaagctaaggaggagaacagatctcaggaattcattgaggccaccatcagctatgcggacaagctcgataagaataattttccggtcatcttttctgtcgagcatttagctatgctgatggggatacaatcatcctattttcgtcacctgatcggtgaacccaaaaaacatcactaccaggacgaacctcataagatcttccgctacaactattttaagctcaagaaaaagcgggagggctaccgcgaaataatgagtccatcgaaagacctcaaattcatacaaaaatggatcctcgtgaacatcctcgagaagaaaaacctacagaattcctgcaagggcttcaggaagggcatcagcatcaaagacaacgccatgccccacgagaacagcgacctcattctgaagatcgacctgcttaagttttacgatacgatcaccgaaaatagagtgttcggtgtgtttgcggacatgggctataggaagaacctggcagtgtctctagctaaaataaccacagcaccccacagattccagtattggaagaatattccaaaggccgagctggatatcatgggctataaacacaacaacttcccaagtattctgcctcagggcgcccctacatcaccgatgttggccaacattgttgcatccaagctggatttgcgctttgaaaaattgtcagagaagatgggattcaattacactcggtacgctgatgatctgactttcagtattaaagggaatcagcggctgccaaacttgaagctgattcgaaagattatttccgacgagaactttttcatcaacgagactaaggtcaaatatcttcggaaggggggaaaacaatacgttacaggattaaccaccgcaaatggaatcaatgtgtctaagaagtacaggcaggagattgattcccacatatactactgtagaaaatacggggtgaaagggcaccttagctggataggtgaagaaaatgagaaaagccagcgagtattaccctttcatgattggctgtatggacatatctgcttcatcaagtctattaatcctaaagccgccgaaaaactgctcaaggacttttccaggattgattggcttttcgactga

SEQ ID NO: 9901 - RNA, 1152 nt, synthetic construct
  source 1..1152: mol_type = other RNA
atgaaaccgtttccttttgagcagtttattacgaacgcaataaaagaggatagaagtaacgacttcattgaggaatgcctcagatatgcatacaaactggaagtcaagaactatccagtgcttttttccattcaacacctcgctatggcaatgggcgtcaagtcccagtttctgctggcgttaattggagaagataaacgcaacattttcgattatctgactgacaatagagctaccattaagcactacaatcacttcttcatcaaaaagaagaggggcaactatagggaaatcatggccccacacaaagatttgaagtacatccaaaagtggcttctgttcaatattttgagcaagttccccctggctgagtcctgtaagggtttccggtccgggatttctatctacgataatgcctctcttcacaacaatgcgaaaataatccttaaagtggatctcctcaagttctacgatacgattacagagaagcgcgtgtacggtgtgttcgccaaaatggggtacgctaagaatctagcctattctctggcaaaactgtgtactgccaagcaccatgagaaatattggtcggactttaacttaaatgacaaggaggtcctgagctactacctggagtttaagcccccaatcttaccccagggagcccctagcagtcctacactagctaatatagtggccacaaatatggacaaaaggtttgaagggctgtcaaaaaagttgaagtttagctacagtcgatatgccgatgatctgactttctcaatcaaagacatcgggacactcccttctttggacttgatccgaaagatcataaacgaggagaacttctatatcaatgaagacaagatcacctatatgcatagaggctccaaacagtatgtaactggcctcaccgtaaccaatggagttcacaccagcaagaaatatcgtaagaaaattgctcggcatatttacttttgcaggcggtacggcgttgaaaaccatctgatcaagaacatcgatcatttcccaaattacaacatcctcaagtttcacgactggctatacggacatatctgcttcattaattcagtggacaaggaagcatcaaagcgcctgctgaacgactttaacaaaataatatggcccctttga

SEQ ID NO: 9902 - RNA, 1149 nt, synthetic construct
  source 1..1149: mol_type = other RNA
atgaaatccttcccatttgagcagttcatcaagaacgccaattcagaaggtcggactcaaaatttcatcgaggcgtgcgtgcagtacgctcacaatctagaagatagggactatcccgtgttttttagtattcagcatctggcaatggccatcggaattcagagcgactttttgaccgctttaattggcgagaacgaaaacagtcggtatttgtacgaaaacgagggtgtcaaactcaagaagtacaaccacttcttcataaaaaagaagcgagggagttatagggagatcatggccccccataaagacttgaaatacatccaaaaatggctgctttttaacatcctcagcaaggttccattggctgaatcttgcaagggctttcgctctggcattagcatctatgacaatgcaagcatacattccaatgccaagataatcctcaaggtagatctgctgaagttctacgacacaatcaccgaaaagcggatttatggggtcttcgaaaaaattggatacgcaaaaaaccttgcatattccctagcaaagttatgtaccgctgagcaccacgacaaatactggtcagactttaatcagaacgataagaagatcctctcctattatctcgagttcaagcctcctatcttaccgcaaggggccccttcttcccccacacttgctaatattgtggcgaccaaaatggacaaacgatttgagggcctgggcgaaaaactgaagttcagctactctagatatgccgatgatctcacgttctcaattaatcatatagggacactgccccctctgaacctgataaggaaaatcatcgaggaagagaatttctacatcaacgaggataagattacctacatgcaccgtggaagcaagcagtacgtcactgggctgactgttacaaatggcgtgcatacgagtaaaaagtacagaaagaagatagccagacacatttacttttgtcgcaaatatggagtggagaatcacctgctgaaaaacattgagcagtttccaacctacaactctctcaaatttcacgattggctgtacggtcatatttgctatatcaatagcgtggataaggaagcctcgaagaagatgctttccgacttcaacaaaattacttggtcaatctga

SEQ ID NO: 9903 - RNA, 1149 nt, synthetic construct
  source 1..1149: mol_type = other RNA
atgtctttccccttcgagcaattcatacagaatgccagagaggagaaccgatcagaaaagttcatcgatgcctgtgtgaaatacgctgaaaaactggaaagcaacaactatccagtgatcttcgcgttgccccatctcgcaatcgtgatgggcgtgcagtcggatttcctgaaagccttgataggcgaaagtaaagatatccgctatatactgcaaagcaacgagggattcaagatcaagaaatacaaccacttcttcatcaagaaacggaacaagggatttcgtgagattatggccccccacaaagacctcaagtatattcagaagtggctcctgtttaatgtgttaagcaagtatcctctaactgactcctgcaaaggctttcggaaggggatctccattcgcgacaatgcactcgttcattccgacgccaaggttgtgctcaaggtcgacctgctgaagttttacgataccatcactgagaggagggtctttggggtctttgagaagatgggttatgccaaaaatctttcttatagcttggccaaactgtgcacggcaaagcaccacgacaaatattggctcgacttttcttacagcgacaagcagacattaaccgaactctacaaagagaggccttccattctgcctcagggcgctccatctagtccgacattagctaacattgtagcaaccaaaatggataagcgtttcgatgcgctggctaaaaagatgaatttttcctacagccggtatgcagatgatctgacctttagtatcaaagatgaaggaagacttcccaatcttaaactgatcagagagatcatatcggacgagaatttctacatcaacgagaataagatcagctatatgtataaggggtcaaagcagtacgtcacaggcctgacagtagctaacggggttcatactagtaagaggtaccgaaaggagattgaaagacacattcatttttgtcggaggtacggagtggaagaacacctttctcgcaacaagaaaaagttcccatactacaattccctaaagtttcacgattggctgtacggtcacatctgctttattcattcaatagaccgcaaagcctcagagaaactgttgaacgacttcaacaagattaattggttcatttga

SEQ ID NO: 9904 - RNA, 1149 nt, synthetic construct
  source 1..1149: mol_type = other RNA
atgaagagtttcccaatagaacaattcaaggaagtcgcgatcaaccaggggcacagtcaggagtacatcgatttctgcttaaaatacgcgaatcaacttattgacaagaactaccccgttattttcacaatcgaacacctggctgtggtgatcggagttgaatctgactacttaaggtttctggtgggtgatatcaaacacgagcagtttgagtttgacagatttgagtataaagagaagcggtacaattatttcaagttcacaaagaagcgcgggggctaccgtgaaattatggcccctcacaaggatctcaaatatattcagaagtggctcctattcaacatcttggacaagtatccctttaaaaattcatgcaaagggtttagacaggggattagcatcaaggacaatgccctgcctcatgaaaaaagcgacgtcatcttgaaagtcgatctgctgaagttctatgatactatcaccgaaaagcgaatatatggtgtgttcaagacaatgggctttcacggaaacctggccgtgtcactggccaagctctgcacagccaaacaccagtccgattattgggagaactttacggagaaggagaaacttattctctccgagtttatcaaaacctcgccatcaatacttccccaaggcgcaccctccagccctgcattggccaatatcgttgctacccgaatggacggtcggtttgatgctctttccaagaaaatgaatttctcttactccagatacgcagacgatctgacgttctcagtgaaagagaaggctgtactgccaccgctgaagctgatcagtaagattattcaggaagagggcttctacattaacgaagataaaatccagtacatgaagaggggaaataagcaattcgtgaccggactaactattgccaacggagtgcacacctctaaaaaataccgcaagcagattgctcggcatatacatttttgtaggaaatatggggtcgagaatcatttggataagaacaacaaagagttcaagggctataatattctcaactttcacgactggctgtacggccatatatgttatatcaatagcgtagacaaggaagcaagcaaaaaaatgctcaacgacttcaacaagatcacttggtctatatga

SEQ ID NO: 9905 - RNA, 1149 nt, synthetic construct
  source 1..1149: mol_type = other RNA
atgaagagttttcctattgaacagttcaaagaggctgctaaggagcaagggcactccaaggagtatatcgacctctgccttaagtatgccaaccagttgatagataaagattacccagtgatcttcacaattgagcaccttgccgtggtgattggtgtggagagcgactatctgaggtttttagttggtgacattaagtgggaagaagtggagtttgataggtttgagtacaaggagaagcgatacaagtacttcaaattcaaaaagaagcgcagcggctatcgagagattattgccccccataaggatctcaaatacattcaaaaatggctgttgttcaacatcctcaacaaatatccactcaaggagagctgtaagggttttagacagggcatatccatcaaggataatgccaaaacccacgaaaaatccgacattatactgaaggtagatctactgaaattctatgacacaatcacggagaagcgggtttacggagtctttagagccatgggatttcacgggaacctgtctgtctcactggcgaaactttgtacggccaagcaccagcccgattattgggaggccttcactgaacgtgaaaaactgattctgtcggaattagtcaaaaccaagccgtcaattctacctcaaggcgctccttcttccccagctctggcaaacatcatcgcgactaaaatggacagcaggtttgaagcactctcaaaaaagatgaacttcttctatagtcggtatgcagacgacctcaccttttccatcaaaggcgatggcatgttgccccccatcaaacttgtgctgcggataataaatgacgaagggttctacatcaatgaagacaagatccagtatatgaagaaagggacaaagcagtttgtgaccgggttaacaatcactaacggagtacataccagcaaaaaatatagaaagcagatcgcaaggcacatacatttttgccgcaagcacggagttgagaatcacctcaataagaactacaatgaattcaagggatacaacagtctgaatttctacgattggctgtacggccatatttgctacatccattctatcgatgagaagtactctaatcgcttgctgaacgacttcaataaaattaactggttcatctga

SEQ ID NO: 9906 - RNA, 1152 nt, synthetic construct
  source 1..1152: mol_type = other RNA
atgaatagcttccctatcgaacgcttcaagattctcgccaaagagcagggtcatagcgacgagtatatccgcatttgcttggagtacgcactcaagttgactgagaagaaatatcccgtgctgtttactctagaacatctggccattgcgattggcgtgaaatctagtttcctccgattactgattggcgatcttaagacagaggagaagatatccaaactgaagtaccccctcaaagaaaaacggtacaagctgttcttcatcaagaaacgcaggggtgggaagagggagataatggcccctgataaggatgtcaagtacatccaaaagtggattctattcaacatccttggcaagtatcccctgcgtgattcttgtaccgggttccgtccaaatataagcattaaggacaatgctctgatgcacgaaggagctttcaagattcttaaaatcgacctgcttaagttttacgataccattactgaggaacgagtgtacggcgtcttcaaatctatgggatatagatcaaatctggccgtatctttatccaaactctgtacctataaacacaagcctgagtactggaattctttcaactcgaaagaaaaagaactcttggcttattatgtgaaagaaatgcccgcaatcctgccacagggatgcccaagtagtcctatgctcgccaacatcatcgccagcaagatggattatagatttgaggaactgggaaagaagatgagtttctcctactcacgctacgcagacgacttgacgttttcaatcaaaggaaacggcatcttaccgaccctttcctttattaacaagataataaccgaggagaactttcacgtgaacaccgacaaaaccaggtacatgctgaaggggcagaaacagtacgtcacgggcctcacaatcactaatggggtgcacacaagcaagaagtatagaaagaaaatcgctagacacatacatttctgccggcggtttggcgtagaagttcatctgaataggatccggaaagattttctaggttactccacattgaactttcatgactggctgtatgggcacatctgttttattaatagcgttgacaaagagtactcacaaaagctgctgacagactttaacaagattaactggttcatctga

SEQ ID NO: 9907 - RNA, 1131 nt, synthetic construct
  source 1..1131: mol_type = other RNA
atggaatttccattaaacgagttcattgaacttgccaagaccaaagacaaatcccaagaatatattaactccgttatccactacgtcaagaatctggaatcaaatgacttccccattattttcacccgtcaacattgggcaagcatgatgcagatacagtccacctttattgactacttgcttaatgactatggcgaggacttcgaggatgtgttgcagagtaaatactcatgcttcactctgcgcaagagaaacggcggcgagaggctgattatggctcccaaggaggatctcaagtacctgcaaaaatggatccagttcaacatcctgaacaactacaagtttgaagactcttgtaccggattcataatcggcaaatcgattaaggataacgcaaagaaacacgagtttgccgagacgattctgaaaattgacctgctacaattcttcgacacaatcaaagtcgagcgcatctattactgcttcaaaaaaatgggctacattgggaatgtgtctcacgactttgccaatctgtgtactgtggtccatcccaaggaatattggaagaaggtggacagtgaggtgaagtctgtaattggtcagacaatcaattcctccagtagagtgctccctcagggagccccaaccagccctctgctagctaatattgtggcgtctaaaatggataaaaggtttggtggactttcaaagaagctcgggtttaattatactcggtatgcagatgatttgacatttagcatcaaaaaggggcagaagctcccgtcactgaatgttatctatcagatcatagagagcgaagggttctatgtgaacaagaagaaaacgaagtttatcaacaagggctgcgctcagtatgtaacaggattgaccatcgccaatggagtcaacgttaataaaaagtaccggaagatgatcgaaaggcacctgtacttttgtagaaaatatggggtcgataatcatctcaacaaaaacaagaagactctctttggtttcaaccgacttagcttccatgattggttatacggccacatatgctacatcaaaagcatcaacgagaattgttacaagaagctgatagaagagtacaaaaaaatcacctggacaatatga

SEQ ID NO: 9908 - RNA, 1116 nt, synthetic construct
  source 1..1116: mol_type = other RNA
atgccttttgacttcgaggaattccgaaaaattgctaaaagtaacaaccactccgaggagtatattttcgagacaattaaatacgcagagaagcttaacaagaaggacctgccggtaatcttttctaccgtgcacctagctatcgagctgaaaatcccctcgaatattctcaacagcctgctgaaatcctacaactacacgtttttcaatttgcataagagatctggaggcttccgtgagataatggtgcctaacgagaagctgaagtatgtccagaggtggatcaatttcaacattctgcagaagttgccactcgaaaaggtctgcaccggctttaggcccaactactcaatcttaaccaacgcaaatattcacgccaattcaaaaatggttctgaaagtggacctcctaagatttttcgatacaataaccgatcgccgggtttatggttatttcaagtcccttggctacctgaaaccactgagctacgatctggccaagctggtgactgccagacacaagaaaagctattgggactttgtgagcaaggataattgcccccagttggccgatatagctaattccaatagcccggttcttccccaaggggcccctacgtctcctatgctcgcgaatttactggcatcccgcatggatgaaaggtttatcattctctcccagaagctgaactttaggtatagtcggtacgctgacgacttgacttttagtattaccgaagaaggacagcttccctttacccgcgtgattaagaagataattgaagaggagggcttcttcatgaatgatagcaagactaaaatcttcagtcgagggatgaaacaatatgtgacaggccttacagtcacccatggtgtacacgtctctaaaaaagaccggaaagacatcttcatgcacctgcatttttgtaagaagctcgggccaaatgagcatttgaaaaactggtctaagaagaatggattaaacagagaaccatacggtttccaggattggctgctcggaaaaatctcgttcatctacagcatagacaaaatcatcgggactaagatgtttaaggaattcgacaagatcaattggtcatttgagaactcaaactga

SEQ ID NO: 9909 - RNA, 1134 nt, synthetic construct
  source 1..1134: mol_type = other RNA
atgcctttccctctcgaactgtttatcctggaggccgagaaacagggcaaaagtaaggaatacatcgacgtctgtgtggaatatataaagaagctggattcaaatggcttccccgtaattttttctctccatcaccttgcccaagaaattggtgtgcagtacaaatatctgaggttcctcattggagagaacgacaacaagtacgagcataagtacaagcgctataactacttctctatcaagaaaaagcgtaacgggtatagagagattatggccccatcaaaagatttgaagtacatccagaaatggatactgctgaacatcttgtacgtgtataaactagaggactgttgcaaagggtttatgcccaatcaaggcatccttaataatgctattgtgcacgagaatagcgagaaaattctcaaggttgatctgcttaaattctatgactccattaccttcgatagggtcgtccaggtgttcgaaagcgtcggctatattaaaaacctggcaattagcatcgccaagatagtgacggcctctaatagagaaagctactggaactgctttgatgaatattccaaactgaagttgagttcgatccgcaatgctaaaactccggtgcttccccagggcgctccaacatcacctatgttagcaaatatcatagcaaccaatctcgacaaaaagatcatcaacctgagtaagaagttgaactttcgatactcccgctacgctgacgatctgaccttttccgttaaaaaaaatgaaggagttctcccatactctaagctgattatcaaactgatcgagtccgagggattcttcgtgaacccctccaaaactataatcaagaagaaggggcagcgacaatatgtcacaggtctaactgtgacaagcgatgttaatctcagcaagaaatatcggaaggaaatttttaagcacctgcattactgtcggaaattcggagtgaataaccatttagagaggaacaaggactttagaaagtacaacatcattcagttccacgattggttatttgggcacatctgctataccaactcaataaacaaggacgtagcgaataagatgttcgacatttttcggaagatcaattggtctatcagtgagtga

SEQ ID NO: 9910 - RNA, 1182 nt, synthetic construct
  source 1..1182: mol_type = other RNA
atgatttattctcctgaaacatttgccattagcgcccggaaccagggtcacagtgaaccctttatcgaactgtgtctggcatacctcaataaattgaacaacaggggctatcccgtcctgttttccatccaccatctggcccaggagatcggaatacagacttcttttcttaacgagctaatcggcgatacctactatttttatgacggcgaggaaaaaattgtcgtgaggtcaaaagtcgactattttgatcaggggcggtaccgctattacaaaaagttcaaaatcaagaagcggaccgggggctaccgcgagattatggcacctcaaggcgagttaaagtacatccagaaatggatctacattaacattctgctgaagtaccaactaacagataattgcacaagctttcgtaagggaagatccatctatgataatgccaaaccacatgagcgcaagaaatacatattgaagatagatctcctcaagttctacgacaccatttcagaagaacgtatcttcgggctgttcaaagctatgggctacgttgaaaatttaagcttcgcactggcgaggatctgtaccgcgaaacactctagagacttctggaattcaatttctggagattcggctaaaatccttaagaccttgattgagaacaagcctgccatactgccccaaggcgctcctacgtcacccactttggctaatattgtggccaatcggatggacaaaagatttgtgaagctggggcagatccgagactttgaatatactagatacgcagacgacctcacttttagttccaataatttcaacagccttccgagtatcagtttcatcaaggagattgtgaaggaggagggtttcttcgtgaatcagaagaaaacgaaactgtttaaagctggtggaaaacaatatgttacagggcttacagtaaccaacggggtaaacgtgtccaaaaagtacaggaaaaacatattccagcatctgtattatgcaaagaagttcggcccacgaaatcacctcattaagtgggctaaggataataagaagaacccagacattatggcctttcaggactggctctacggacacatctgcttcataagctccatcaacaagatcgccggaaagaaaatgctgagcgagttcaacaagatcgattggactattttatga

SEQ ID NO: 9911 - RNA, 1134 nt, synthetic construct
  source 1..1134: mol_type = other RNA
atgcccttcctattcgaggagtacattgaagaggcccggaaaaaacagcggtctgaagcctttatcgaatcaaccgtgcagtacgctaagaagctcgacgacaacggcctgccggtgattttttccagagcccatttcgcttcattagttgggatgcctagccgcgaaattttcacaatcctgcactaccgcgtgacccagtatgtgcagtttagcatcaaaaagaaaaacgggggactcaggcatatcatgacaccagagaagaaactgctctacctgcagaaatggatcaataaaaacatattgcagcaggtcagcgtcctggactgttgtacggcgtttgtgcccggcactagtctcgccaccaatgcatacacgcaccgaaacgcacatagaattttaaaggtagacctcacgcgcttcttcgatactataaatgagaaaagggtctttggactctttaaatatctgggatatcacccaaacgttgcatacgatcttgcccagctgaccaccgctttcccaagctatcagtactggaagtctcagtcattgaaggatttgagacaaactgtcgagaaaatcactttttacgacgcttttctccctcaaggtgccccgactagtccacagctggccaatttgattgctaagcctctggactctaggctgctaatgctctccgagaagtttggctgcaggtattctcggtacgccgatgatctggtgttctccactaacaagcctgaaggaaagctgcccccccttcacctggtaaagcgtatcatagaaagcgagggattcctagtcaatgaagataaaaccgcatatcttaagaaggggatgaaacaatacgtgacaggcctgaccgttacccacggcttccatgtgagtaagaagcagaggcaagaaatctacaaacatctttactatgcgcgaaagtatggtcccttcgagcacttgaagcggtggacaacagataattggggtgatgagagaaaaacaccttatggcttcaaggactggctgttagggaagatctcgtttattaactccatcgaccgtaagaacgggatacgcatgcttgacgagtttaataaaattcactggggcttcgagtgcgaagacggttga

SEQ ID NO: 9912 - RNA, 1092 nt, synthetic construct
  source 1..1092: mol_type = other RNA
atgtcatttgatcgcaagctgttcattgaggaatgtaaaaatcaggagaaaagcgagcagtatattgtcaacacccttaagtacgccgacaatctggtgaacaggggttttcctgtcctgtttagcctgaagcacatggcttatgaactgggaatcaactatgaggacctcaaaacaattgaggatcaccgcgagaattattacaagcacttccacattaagaagaaaaaggggggcctacgacatctctctgtccctttcactaacctcaaattaattcagtcctggatctaccacaatatcttactccatcatcaccctactagtagtgcatacggctacatcaaaaatcgatctatcaaagagaacgccgaccaacacgtggctaaaaggtttattctcaatgtggacctgttgaagtttttcgaaacgataactgagcacaaggtcttcaaactgtttgtagaaatcggctatactaaaaccctttcttggtccctttcgaaattggtgacagtaccaataaaggaggattattatctccaactgtcacatatcgagcagaagctgttcaacaaaacattcgaacaggaatacggggtgttaccccagggtgcgccaaccagcccctctatttcaaatctggttctccgtaacctagacggaaagatggtggaactagccgagctgaagggaagtacatacacccgctacgcagacgacattaccttttcaggcaacgatattaagaatataccaaccaagacggaaatcatgcgggtcgtgatgagcgaaaatcttctgatcaactggaataagtggacactgcggaaaaagggcatgagacagaaggttaccggactgaacacaactcacgggttgtccgtgcctaagagctaccggaaagatgtgaaaaggcatatccacttttgcttgaaatacgggcccgagtcccatcaaaagaagatcggtgttgataaacagttctatagatactggcttctcggaaggatccattatattagattcatctcccccgagataggcaacaagatgttgaaggacttcaataacatacagtggccgctgtga

SEQ ID NO: 9913 - RNA, 1122 nt, synthetic construct
  source 1..1122: mol_type = other RNA
atgagcaatgaaattgtaaacagcgtgatgagctcgagcctgtataaaattgtggagcagatctctaaatctaatcacggagacgactataagaaatccctgatagaatactcacagaacctttcctctaaaaacttaccaatcattttcgatgcctaccacctggcctatagtattgggattcagccctacagaattattaatatcatcaaagaccgggaccatctgtataatacctaccgagtcaggaaaaaaaccggcggccatagatggatcatgagccctatagaagagctcaaaactatacagacctggataaagatcaacatcctggacaaaattcaaacccacaactcagccaacggctttgtaaaggagaagtctattgtgactaatgcggagaagcacatcaacaaagaaacaattctcaacattgacctgtaccgtttttttgatacaattacggaaaagcggatatatcaactgtttaagaagttaggctacactaataagctgagttacgatcttagtaggatcctgtgtgtgaatcctccaaagaagtactggaaagaattgaagaaagagaacaagctgaagaaaaagttcatcaagatgaaaccgtccatccttccccagggagctcctacatccccaattatctccaatctcctgtgtatcaagcttgatgagattctattcaagtattgcgagaagtctcacctctcatatacgcgctatgctgacgatatcacaatgtcaggggataataagaatatgcccgagttgaagaaaatcaaatcgatcatcagacataacgggttcaccgttaacataaaaaagatccgcttcatttccaaacacaagaagcagactgttaccggtattacagtgaacaatggactatttgtggacaagaaaatcatcaaagagatctctcaggaattgtactattgcataaagtatggctacaagtcccatctcgagtataagttcaagaagagcaagattaaagcaaactacaaagattggttgtacgggaagatctgctttgtctacagtgtcgagaaagaaaaaggtgagagcttcttcaagaaattcaacatgatcgactggaatatatga

SEQ ID NO: 9914 - RNA, 1122 nt, synthetic construct
  source 1..1122: mol_type = other RNA
atgtccaatgaaatcgtgaatttcattatgagcaccagtcttcacaagattgtggagcaaattaatcagagtaaccacggtaacgattacaaagagaagcttattgagtattctcagaacttatcaagcaacaacctgccgatcatatttgatgcataccatctggcctactcgatcggaatcgaaccatatagactgattaatctgattcgagatcgagatgatctgtacaatacgtataaagtgcggaagaaaagcggcggatatcgctggatcatgagtcccatggaggagctcaagatcgtgcaaacatggatcaaggtaaatatactggacaaagtcaacatccacgagtccgctaatggatttattaaagaccggagcatcgtcactaatgctaataagcacgttaagaaagagacaatccttaacattgacctgtaccggttctttgatacaatatcagaaaagagggtctaccatctatttaagaaactgggttacaccgagaagctgagctacgacttttccagattgctctgtgttaatacccctaaaaagtactggaaggagatcaaaagggaaaacaggctccgtaaaaaggtgatcagaatgaagcctagtgttctaccacagggcgcgcccacttctcctattatctctaacctcttgtgcttaaaactggaccaggtgttatacaaatactgtgagaaaagcaacttggattatactagatacgccgacgacatcaccatatctggcaacaaaaaatccatgcccaaacttaagaagatcaagtcaataattcgccagaatgggttcactgtaaacattaacaagattaggttcacaagcaaacacaaaaagcagacggtcaccggcctgacagtgaacgatggggtttatgtggataagcgcattataaaggaaattaaccaggagctgtattattgcatcaaatatggctacaagtctcatctcgaattcaagttcaaagactcaaagatcaagtccaattataaggactggctctatgggaagatatgctttgtctactccgtggaaaaggaaaaagggcagcaattgctgaagaaattcaatatgatcgactggaatatctga

SEQ ID NO: 9915 - RNA, 1095 nt, synthetic construct
  source 1..1095: mol_type = other RNA
atgagcacaagtctctacaaaacagtcgaattgataaacaactcagatcattccctcgaatataaaacccttctcattaactactctcaggaccttacctcaaagaatctgcccatcatctttgatgcctttcatttagctgtgatgattgggatccaaccttacaggataattaatttgatccgggaccgcgatgctttgtaccatacatacaagattcgtaagaaatccggtgggtacagatggattatgtccccgcagaatgacctgaaaaatatccagaactggatcaaaaccaacatcctggaaaaagtggaaatccacgagtctgctaatggctttactaaggataaatccatcattaccaacgccaatgagcacatcggaaaggagatcgttctgaatatcgatttgtaccgcttttttgacaccatcactgaaaagcgagtgtatgggctgtttaaaatgttgggatataccgagaagttaagctatgacttagccaggctgatgtgtgtgaatgcaccaaaaaagtactggaaagagatcaaaaaggagaataagcttaacaagaagatcataaagctgaaatctcctgtgctacctcaaggagcgccaacgagccccataatatccaatcttctggcaaagaacctggatattagcatattcgagtactgcaataagtcaaacctgagttatacgcggtatgccgatgacatgactattagtggggacaaaaaagatctccccaatctcaagctgattaagggcatcatcagaaaaaacggtttcacagtcaacatcaagaaaatcaagtacatttccaaccacaaaaagcagactgtcactggcattaccgtaaataacggcctgttcgttgacaaaaaaattctgaaggaagtaaaccaggagctctactattgtattaagttcggctacattaaccacctaaagttcaagtttcagaacagcaagataaaatcgaactataaagactggctgtatggaaagatttgcttcatctatagcgtggaaaataagacaggtgaggagctcttcaaaaagttcaatcttattgactggtctatctga

SEQ ID NO: 9916 - RNA, 1098 nt, synthetic construct
  source 1..1098: mol_type = other RNA
atgagctcacccctgctgcacatattggagcaggtggagaattccaaccactctactgaatataaaaggctgatcaaggactattcaatccggctggcttcgcggaatctacctattatctttgacatctaccatctgtcctatctgatagggatccagccctataggatgattaacatgattaaggatcgacactcactctataacgtctacaaaatccgcaaaaaggcaggcggctacagatggatcatgtcgcctatagacgacctgaagcgtgtgcaatattggatcaagctgaacattctggataacatcaacatttgcgacagtgcgtgcgcattcattaaaggaaaaagcatcagggataatgctcaaaagcatgtggggaaagagctcatcctgaatgttgacctctaccgattttttgacagtataaccgagaagaggatatatggagtttttaagagtctcggatacaccgagaagctctcttacgatcttgcccagcttgtaacggctcagccgcctaaagcctactggaaggagatcaaaaaggaaaaccggttcaagaaaaagcacataaagagcactcccgcaatcttgccacagggtgccccaaccagcccatcactctctaacattatcagcattaagatggacgagattttcgataagtatgcgaatgaatgtaagatttcctactctcgctatgccgacgatttgacattttctggtgaaagaggctccattatctccctgctggctgtcaaaaaaattattagacaacagggcttcaccatcaacttgaaaaagacaaaataccttcgcaatagtggaaaacagtccgtcactgggattacagtaaataatgggcttttcgtggataagagcgtgattaacatgataaaacaagagctgtactactgtctaaagtttggctacaaagcccatttaaaatacaagcaggccaaaggcgaatctatcaaaagcggatataaggaatggttattcggtaagatatgcttcatctactccatcgataagaatcggggggtgaacttctttaagatctataaccagatcaactgggacatttga

SEQ ID NO: 9917 - RNA, 918 nt, synthetic construct
  source 1..918: mol_type = other RNA
atggtgaacgataccgccaactactacaagacctttaagttgaggaagaaaacgggcggatatcggtggatatctgtcccgaacgaggaattgaaactgctgcaccgcaagctcaacctgatgatttttatgcgcattagaccaagcgaatctgtccactcattcgttaagaaaagctccattaggactaatgctgaggtgcatgtaaatgctaagacatgcctgaatgtcgatctttacaggttctatgagtccatcacagacaagcgggtgtttggatatctgtgtaaactgggttaccaccccaatgtatcgtatgtgattgcagccctagttacgatacagttacctaaagcgttctggcaggaggtgagaaaggagaataagttcagatccaagtatatacggaggaaacctaaagcccgggttctgccccaaggctctccatgctctccttttctgtcaaatcttgtcctgacacatttagacttcagaatcgagcaagcttgtaagggcctaggctttagctactcacgctacgcagacgacattactatcagtagcaaaggcgacaatttctttgcactgaccaccctcaaaaaaattattcgaagtgagggtttcaccatcaacatccagaagatatcctttcgacgttctagctcccgtattcaggtaacagggatcactgttaataacgggatctttgtgaacaagtcactctacaaaaaagtcgtgagccacctctactattgcaaaaaatatggggtgcgcgatcatctcgaaaaggtgaagcttactaacaagagtaactacaaggactggctgttgggaaacatccttttcatcaactccgtggaacccgataaagccaagaagttgttcaccgaatttaatcagatcgatttcctcctgtga

SEQ ID NO: 9918 - RNA, 1101 nt, synthetic construct
  source 1..1101: mol_type = other RNA
atgacatcaccccttgataacatcctcgacaaagccaaagccgaagagcactccccagaatatatcagtgatatcactgcatacgctaagaacctaatagacaaaaagctgcccgtgatttttagcaggacaaacctggccctgagcatcgggataccccggtcacatctcgagttcttgttagccaacagggagatgaagtacaagttctataagctgcggaaaaaacacggtggataccgttggatctcttctcctgagaaggaactcaaatacatacagggatggatcaaagtcaatattttcgacaacatcgagatacacccggccgcgtgtggcttttccaaaggtacgtccatcaaaaaaaatgcaaccgcacaccagaagcaagacttgattctgaacatcgatctgtatcgcttctttgattcaattaccgagaatcgagtgttcggaatccttaactggcttgggtatcataagaatattgctatcgacatggccaagctgctgtgctatcagcccacagataaatatttcgaagaggtggcgaaggagggaatattctccaaatccattttggaccagaaaccttcaattttacctcagggcagccctgctagtccagttattagcaacctgttaagctataagctagatgttagactctctaaaatggctagtaagctcgggattaattattctagatacgccgacgatattacctttagtggcgaaaggaagaatatggtttcgctgaacaccgtaaagaaaatcataactgaagaaggcttctacatcaacaaggacaagattaagtatctcgctcagaatcgcagacaggatgtgaccggcattgtcgtgaataagggcctgaagattaacagcaagtacaaaaaaaaggtgctcactgagatctacttttctgagaagtacggtgtaaagaatcacctgggctacttgattgaccggaagggagccgaaaaaaaggcaaattacaaagatcatctgcttgggaagatctactttatctattccgtggagccagaggtcgggaagaagatgctggagaaatacgaccaaatcaaatgggaaatctga

SEQ ID NO: 9919 - RNA, 1101 nt, synthetic construct
  source 1..1101: mol_type = other RNA
atgccctcacagctcgacaatataaagaactctctagatgaggcaaacgcttcaaaggatttcaagattgagatcatcaactatagccaaaatctcgagaaaaagggcctgcctatcatattctccctccctgacttaagttttaagattggtctgccattccatgtgattcaggaaattctgaagaataagagtaaccactacaagaccttcaagatacagaaaaaaactggggggcatcggtggatcacaagtccagacgaacaactaaagagaattcaacggtggatctacgaaaacatccttaagaatgtgcccgagcatgactgtagctttggctttgtgaacgagcgaagcatcatagacaatgccaagaagcacgttaatcaggatactattctgaacattgatctgtacagattctttgatagcatcgagcagaaaagggtggcaggcgtattcaagcacctcggctatcagcccaatttagcctattccatggccgaattgttgacagccaaaatgtcaagggcctactggaaagagattgaagatgaaaaggttctttcagacacatttatcgaggagtgcccacagattcttccgcaaggatctccggcgagtccccgtattgcgaatttcatcgcccactccctggacacaagaatggccaaactggctaaaaaactggacgtgaattattcgaggtatgctgacgatttgagcttttctggcgactataaaaaattgccttccatcaagaccttacgcaagatcatcatgaatgagggattctttctcaacgagaaaaaagtcaagtactttaaacgctcccatagacagatcgttactggagtggtggtaaacgataggatatctgtcccccgggaattcaaggaaaagctccgcaccgaactgtaccattgcattaaaaaagggccagctgctcacctgaactggcttatgagcaacaaggatttcaaaatcaagaccaattaccgagatcacctgctcgggaaagcatgtttcgtctacgcagtcgagcctgagacgggtaaggactttctggagatgtataaccagattaagtgggaactgtga

SEQ ID NO: 9920 - RNA, 1050 nt, synthetic construct
  source 1..1050: mol_type = other RNA
atgacaatgacggatacttgggagtccctcttcaaagagcgggccgtggaagagaagcactcagaggaatatatcgcccagtgtattgagtacgcaggaaaactacatgaaagaaacctcccagtcatctttgacttcgttcatttggcttactacctcggtatctattccgacaagttacggggcatcgtagctaatgcggagacacactaccgagcctacgaaattaagaaaaaaaccggaggcaccagggaaatagaagcacctgatgaaatactgaaggatgtgcaacgctggatctatgccaacattctgtgtagagacaagtccgtccagtcttgcgtgcacgggtttgtgccccgacttagcgaggccgataaggtccggggtgtgctgagcaatgctgtgccccattcaggccacgactggctgatcaatctggacttgaagaactttttccccaccgtgactctcactatggtgcgggactactacgacagccttggatatgaggaagaggttagtaagacgctgaccgcactgtgtacatacaaatctaggctcccacaaggtgcccccacttctccgatgttgagtaatattattgccaccaagatggacatagctctcttagagtactgcaagaaatacggaattacatatacccgctacgccgatgacctgactttctcggcaaatctggatgtggaggtacctcctttgaaggacttatatgcgatcgttttcaaacatggattcatcgttaacagacagaaaacaaagattcgtggccgtgggtataaaaaggaggtgacagggctgaccgtcactgaaggcgtgcacgtcccaaaaaaatatcgcaaggaggtgtggagggagctgtatttttgcaaaaaattcggcgtctacgaacattatcacaacatggggaccaataaggggctgtacaaggattggctgaggggcagaatcatgtttatccgccagatagatcctgcttgcggtaataagatgcttgaaaagtttaacgagcttaactggctagtatga

SEQ ID NO: 9921 - RNA, 1044 nt, synthetic construct
  source 1..1044: mol_type = other RNA
atgacagaaacatgggagagcctattcaaggagcaggccctcgaggaaaagcactccgacgaatacattgtgcagtgcttggaatatgccggaaaacttcatgagcggaacatgccggtcatttttgactttttgcacttggcctcctatttaaaatgcctcgctaagcagctacagggcatcgttgcaaatgtggagtcccattaccaggagtacgacatcaagaaaaaatcagggggtaagcgtcgaattgaggcacccgactacctgctcaaaaatgtgcaacggtggatctacgtaaatatcctttgtcgtgacaaaagcctgcaaaactgcgtccatggcttcgtgcccgtcttaaccgagaacgatcgcgcgaggggcatactgaccaatgcaatgcctcatagcggacacgactggatcatcaacctggatctcaagaacttttttcacgccgtgacgcttgatatggtgaaagattacttcgattctctgggctacgaggaagaggtgacaaagaccctgacagccctctgcacactcaaaagtagattaccacagggggctcccacctctccaatgctgtcaaatcttatcgctgccaaaatggataaagctatgctggaatattgtaaagaacgcgggattacttatactcggtacgcggacgacctgactttcagtgccaatcttgacgttgaaatgccacctctgaaggagttgtacgctatcgtctttaaacacggtttcatagttaatcgacagaaaaccaaggtgcgcgggcggggctataagaaggaggttacgggactgactgtcaccgatggagtgcatgtacctaagaagtacaggaaggaagtgtggagagagctgtacttctgtaagaggtttggtgtatatgaacactatcacaacatgggcactgataagggcctgtataaggactggttgagaggaagaataatgttcattaggcaaattgatcccgcatgtgggaataagatgctcgaacagttcaacgagctgaactggctggtgtga

SEQ ID NO: 9922 - RNA, 1044 nt, synthetic construct
  source 1..1044: mol_type = other RNA
atgaccgagacgtgggaaagcctgttcaaagagcgagcattggaggaagggagatcagaagagtttatttcacagtgcattgaatatgccggaaaattacacgagaagaatttacctgtgatcttcgactttgtgcacctcgcctattacctaggattctatagcgaaaagctccagggcatcgttgcaaacgtagagggtcattacaggacctatcatatccgaaagaagtccggcggtaccaggatgatcgaagctcccgacgccatgctgaaggacgttcagcactggatctatggaaacatcctctgccgggataagtccataaaagattgcgtgcacggattcgtccccgctctgactgagaaggataaagtccggggtatacttagtaatgctgcacctcactcgggccatgagtggctcattaacctggacttgaaggacttcttccatactgtcaagctggatatggtcaaagcctattttgattccctggggtatgtcgaagaagtaagtaaaactctgacggccctttgtacaatgaaatctagactaccacaaggggcaccgacctctccaatgctgagcaatctcattgccacaaagatggacgaggagatgatggcctactgtggcaaaaggggcattacttacacacgctacgctgatgacctgaccttctctgcgaactacgatgtggaaatgcccctggtgaaagagttgtatgctatcatctttaggaacgggtttatcgtgaaccggaagaaaaccaaaatcagatacagcggctataagaaggaagttacagggctcaccgtgacaaatggggtgcatgtacctaaaaagtaccgcaaagaggtgtggcgcgagctttacttttgcaagaaattcggcgtttacgagcactaccaccagatggatactgacaagggactgtacaaggcgtggcttcggggccgtattatgttcataagacagattgacccagcctgtggaaacaagatgttggaacaatttaatgagctgaattggttagtgtga

SEQ ID NO: 9923 - RNA, 1044 nt, synthetic construct
  source 1..1044: mol_type = other RNA
atgactgacacctgggagagtctgtttaaggagtgcgccgtggagaataatcataccgagaattatctgaaggagtgttttgagtatgctggtagcttgcaccagcgcaacctgcctgttatcttcgattttgtgcatctcgctatgtatttcgaatgttgcgcagaaaccctgaaagggatggttgccaatgtggaaaagcattataccgagtataagatccgcaagaagagcggcggtgacaggttgatcgaggcaccagatttcctactgaagaacatgcagagatggatttacattaacatcctgtgtaaggatctctctataaatgactgcgttcacggcttcatccccgcgtttaagaacagggataaagtaagaggaatcctcacgaacgcagccccacacgccggacacgattggcttataaatgtggacttgaagaatttcttccacaccgtggagctggacaatgtgaacaactattttcactccctgggatacgaagacgaagtcgtgaagactctgacggccctgtgtacctacaaatcacggttaccgcaaggtgctcccacatcacccatgcttagtaacattattgctagcaggatggacgaaatgatgctggaatactgcaaaaagagagggattgtctacacacgctatgccgatgacttaactttctctgcggactacgatgtgaaaattcctgcacttgaggacatctacaaaatcgtatacctcaacggctttaaagtgaaccgaatgaagactaaggtgcgttacaaaggatgtaaacaggaagtcacaggcctgaccgtaacaaatggcgtccacgtttcccagaaatacaaaaaggagatactccgggagctacatttctgcaaaaagtttggggtgtatgagcattaccaacacctcaagactacaaagggactgtataaggattggttgcggggcaaaatcatgtttgtccgacagattgatcctgcctgcgggaacaaaatgcttgaacagttcaacgaactcaattggttagtctga

SEQ ID NO: 9924 - RNA, 1041 nt, synthetic construct
  source 1..1041: mol_type = other RNA
atggaggaaacatgggagtctcttttcaagaaacaagccgttaaaaagaagcactccgatgaatacattaacgagtgtatgcagtatgccttccacctccacgagaaaaatctgcccgtaattttcgacatcaatcatctcagcgaatactggaatctcgacatcgatctgatcaaatcaattatagagtgtcccccccggtattacgctgagtacgacataagaaaaaagagtgggggtacgcgacacctgtgcgcacctcaccaagtgctgaaatacattcagcgctggatttaccacaacatccttctgaaggacataacaatcagtgagcatgtgcacggattcatccctaaggatcaatttgacagcaaaaggaccatcttgtccaatgcccaggcccatgaaaaatgcaaatggctgatcaacatggaccttaaagatttcttcaacaccataaagcaggaaagagtgaagaagtatttcctctctataggctacaccgaagacatttgtgagctgctcgccaaactatgtaccttacattataggttgccacagggcgctcctacatcgccaaccttatcaaacctaatcgcaagggagatggataaggaactggaatgcttgtgtgcaaagaatcattggtgctatacacgctatgctgacgacctgactttttccggcatttacatcgatgagacaccctctatcaacgagctggagaagatcatcattcagaatggatttctggtgaaccggcagaaaactaagtttcgactgagaggcaattgccagatggtcacggggttgactgtgactcatggtgtcttcgttcctaagaagtatcgtaaggaagtctggaaggagctctactgctgcaagaaatttaccccatacgcgcactgtcagtacaggtatccggataaagggttttataaagattggctgaagggccgcattatgttcatccggagcattgatccagcttgcggaaacaagatgttagacgcctttaatcaactcaagtgggtgctttga

SEQ ID NO: 9925 - RNA, 1041 nt, synthetic construct
  source 1..1041: mol_type = other RNA
atggaacagacctgggagtcgcttttttccgagcaggcgggaattgaaggtcacagccaacagtacattagtgaatgtctggcttatgccggaattctgcattctcacaacgtccctgtaatctttgataagtgccatttcttctctttcttccctgacatcaagaagggaaggatggagatgttcttactgaacttgtgctgctacaagaactactctatcaaaaagaaagccggtggcgtgcggatgattagcgctccctatagtgacctcaagcgagtgcagcgctgggtttatgagaacatcctacttaaggacctctactctgtgagcccctgcgcagagggctttatgcctaaggataaagacgatattcgcaatatagtgacaaacgcaagaaggcacgccaggagcaaatggctcatcaatgtcgatatccaaaacttcttcgactcaatcaaatacgattccgtatgggagtacttctcaaaattggggtacgaaaaagaagtcgccgacgttctggctaagatctgtacctaccagtttagactgccacagggtgccccaacgtccccgatgctcagcaatttgatagtgagatcaatggatgacgcgtttgtggaactggcaagtaagtgcaagtgtttttatagccgttatgccgacgatataacactgagtggcaattccgacagcatcatgccctccatgcgggatatttaccagattgtctatgctcaccactttcggcccaataagaagaaaaccaagatttcgttttcctgtgaccgacagatggtcacaggcctaactatcactgatggggttcacgttcctaaaaaatataggaaggatgtgtggaaagaactgtattgttgtaagaaattcggggtggcatctcatattgcctatcgccatcccgaccaaggcatgtacagatactggttacttggacggatcatgttcataaaatcagtggagccagagtgcggcgagaagatgctgcaggagtttaactctatcaattgggggatatga

SEQ ID NO: 9926 - RNA, 918 nt, synthetic construct
  source 1..918: mol_type = other RNA
atgaaagacacttgggagagcctctttaagaaagaagctaaaaagcagggccactctgatgccttcattcaggagtgcatcgggtacgccgccaaattgcacgccaacaatgtgcctgttatcttcgactttaagcacctgtcagccatcttcgatatggagtcgcgagacttattctttatgtgcaagcaccttggccaacagtacaccacgtattccattaagaagaaaagtgatccgaaagcaataagacttctgactgcgcccgggtggcaactgaaaaagatacaactttgcattttgcgtaacatcctgatgcgcgataattcagttagcgaacacgcacatggattcgtcaggaaaaagtcaatcgtgacaaatgcgaaggctcatgaaggagcacgatggattctctgtatggatctgaaggatttctttgggaccgtgcgcaaagggaaggtatatgattattttgagagcctgggctatgagaagagtgtggtggagactttagctacactctgtacctacgagaaccatctccctcagggtgctccaacatctccttgcctatccaacctgatggccaagggaatggacgaggaaattgaggcatactctgaacagaatggcttcgtgtacacacggtatgccgacgacattacaatcagctccaaaaccgacatcaagcccgaaaagaataccatcaacgcaatagttaggaagcatggctttcgcgtgaatcatgacaagaccaaactgcggcacaacggacagagaatggaggtaacgggtttgactgtcggcaggggagtgcacgtcccaaaagcttataaaaaggccctgttccgggagctatacttttgtagaactcagggtcccaaggaacactccgaaatggtctacaaagggaaatga

SEQ ID NO: 9927 - RNA, 915 nt, synthetic construct
  source 1..915: mol_type = other RNA
atggaacatctgttggattattattggacaggtcagttcccccgtgctaacgcctgctgccaattcgattgggcttatcgggactaccggatccaaaaaaagaccggagggtttagagaaatttccgcaccaaatccaacgctgaaatggtgtcagcactggattcagcacaacattctggaacacgtcgtgaatagactcccctcatccgtgcacggctttgttcaaaataggtccatccagactaacgctctgcctcatgtgaactcagagtggatcatcaatatcgaccttaaggactactttgattctatcttccagaagaaggtcctcgatttttttctgcagctcggatacgaggactctgttagcgaattcctgagcaacgtgtgcacaaagtttagttgcgtcacttaccagagagctctaccccaaggcgccccaactagccctctgttggccaatttcttaaccatcaaccttgacaaggatctggagcgtttagcccaggaactggatatgagatacaccagatacgccgatgacataacattttcgggcctccagaaaacgtgtcctgtcactcctcgggacattgagaacattatctatgagcacggcttcaggccgaataagtctaagacccggatacgccataaggggagtaggatgatggtaaccgggctgacagtgggtaacggagtacatgttccaaaagagtaccggaagcaggtgcttagggaactccatttcgcaaaaaaatatggccccgagaaccactgtcgcaaagtgcgaaatgagaaaggttattttagggaatggttgctaggacgcataatgttcgtgcgaagcattgacaaggaggcaggggcgcgcatgctggaaattttcaatgagatcaactggatgatgtga

SEQ ID NO: 9928 - RNA, 951 nt, synthetic construct
  source 1..951: mol_type = other RNA
atggaagatctcggaaatgaattcatcaagaaattgccggtgatacttgatatttaccatttaagcaacctcgttggcataaaatataatctgctcaaagacatcctctcaaataaggataagtactatcacaccttctacatctcgaaaaaaatgggcggcaaacgcaagattgaagcaccaaatgaggtgctggcattactacagaagtacataaagaacgagatactcgacaacattctggttagcgagtatgcctttggatttgtgaaagagaaaaacatcctgcttaatgcgaagagacacttgaatcaagagatgattctcaacatcgacctggagaatttctttcccactattaaggaaaaacgcgtgttctatatcttttacaagttgtgcaagtacgattatcatatcagcaaggtactgacaaatctagtcactctgcaggggaggttacctcagggagcctgtacctctcccgtgattagtaatatcgctgcctataaactggataaaagactttccacctacgccaagaaactgaacctgatctacacaagatatgctgatgacatcacattcagcggctctaaaaagatcatcaacaacttcttcctgaagaacatccagaatattataaaggagtgtgggttcgtcattaatgataagaaaacgaggttttgctctcagtacggtcggcaggaagtgaccgggctgatcatcaatgacaactacatacacattaacaagaagtacatccgggaaatccgacaagagctctactatattaataagttcggcatctcaaaccaccgtaacaacaaggacttcagtaacatgtattatagggagcatctgttgggtaaaattctttttgtcaagtccattcaccaagacattggactgtccttttttaaccagtttcagaatattgactgggaaaaatga

SEQ ID NO: 9929 - RNA, 1047 nt, synthetic construct
  source 1..1047: mol_type = other RNA
atgtccaaaaagaatatttacgagcagtacaaagctaaagtgtccaataacgagaattataccgacgaaaagaagaagaagtacctggagcagattgagattctcaaagccaagaatagtgaaatcatactgaacacataccatttctccaatcttgttggcattaaatggaacacgcttaagaaaatcatcgatgatcccgacaaattttactacaatttccagatctcgaagaagacaggcggcaaaagaaccatcaacgttccaaacaacagcttggaactgtgccagaagtacattaaggaaaaaatactcgacaacgtcaaactgcattcagcagcacacgggtttgtcaataacaagtctatcattaccaacgccaaagtgcacgtcaatagcgaaatgatcctcaacatagacctgaaaaacttttttcctagcatttctcgcaaaaaggtattctacatcttcaacaagatctgcggctacgacaattctctgagtcactgtctgactaagcttgtgatgtacaaaaatggtctgccacaaggtgcctgtactagccccattatttccaacatagtaaccttcaagttggatctgagactgaagaagttgtccgataagcttggcttaaattatagccggtatgctgatgacattaccttcagtggcaataagaacgtcatcaactctaagttcctagactttgtgaaaacaatcatcaacgaatgcggatatcagattaacgataaaaagacgaggttcgagtcaaaatgtggtaggcaagaggtgactgggttaatcgtgaacaatggaaaagttagcatacctaaacagtacattcagaatctacgaaaggatctctattatatcaagaagtatgggatagaggagcataaaaaacggaacaacatctataatgcgttctatcaggagcacattaaaggacaaatcatgtttgtgtactcagtgtcaaagaataaggggatcaagctcttgaagaaatacaatctgatctttgacgacaccaagtatggaaattga

SEQ ID NO: 9930 - RNA, 1065 nt, synthetic construct
  source 1..1065: mol_type = other RNA
atggaaaataagaacctctacaggaaaaagatcgagaactccgacatatcttttaatgagaagcagaagctgttatccaatctcggtaatattaaggatgactacccaataatccttaacggataccatataagcaataaggtgggtataaagtggaatgactatttgaagctcctgaaaaacacgaacaaatactaccacgtatattacatggctaagaaaagcggcggcaggcgaaaaattaccattcccgaccaaatacttatggacatccagtatttcatcaagaacaacatcctggagaatattaagattgatgaaagcgcctttgggtttcgtaagcagaaatccatcctagccaatgccacatatcatcgggagggggaaaaggtcttaattatggacatcgaaaacttctttccaagtatccataaaggacgggtgtactatgtattcaataagatttgcggttactctcgagaggtttcttacgacttgacaagactggtcacatataacaatggattgccgcagggcgcccctacttcacctatcattagcaatatcgttgcttataagctagatcttcggctgaaaggactgtcttacgtgataggtatcaaatacagccgctatgcagatgatttgaccttttccggggcagaaaacaaaattaacgacaagctcctctatactgtgagtaacatcatcgaggacgaagggttcaaattaaacctgaagaagataaggttctacggcaaaaactcaaccaagattattaacggacttgtcatcaataacgggtacgtgaccattcaaaagcgctatatcgataagatcaaacaggagctgtattatatcagaaaattcggcctggagtcgcacctgaattatgttgggttcaaaaacaaacactacgcggagcacctcaaaggcaagattctgtacgtctacagtattgataaggagaaaggcaagcagttgttttcactgtacaacgaactcaatatcgaaaataagcccaatctggtgagaggcggattcgatgagatgcccgtgctgtga

SEQ ID NO: 9931 - RNA, 1086 nt, synthetic construct
  source 1..1086: mol_type = other RNA
atgttcactcgtttgagaatgttcctcatgtccctgcttgagaaaaagaagaagtacacgaaaagcattaaggtcacacaaatcaaaaacgagaacgttacccctttgaaaaaacacaccccactgaagtacgacctgccggctatctccaacgcattgcacttatctaacaaaatcggcatcaagtgggaagtgtataaagacattgcccgacatcctgagaatcactaccacgtgtttcacataaaaaagaaaaacgggggctttcggaccattgccgcgcccaatgaggagctatcgatgatccagaactatattaacgagaatatcctgttcgcatacaagatccataagtcagcctttggctatgtaaagggcaagagtattatagatgtggccaatcaccacttaaagtctgaaaactttctgtcacttgatctggagaatttctttcccagtatcggagccgagagactttattactattttgggaaactgggcggttatgataaatccattagcgacaacttagtgaggttctgcatgtacggaacagggattccccagggggcatgcacttcccctcagatttcgaatatcattgcttacaaactcgatctgcgccttggggaactgtgtcagtccaaaggactcaagtatagcaggtatgtggatgacctgacgttctctggcgagactgaacatatcaacgacaagctgctgttcaccgttcaaaagattatagctgacgaaggatttaagctcaacagcaaaaaaacaaggttcggtaataatcgcaatggtttcattattacaggcttgatgatccggaataacagtatctgtgtcccatcttcgtacataaagaagatcaagaatgaactctactacatcaataagtacggattgctcgatcataaaaagagagagaagattgagaacagcaattatctggaacatatcaaaggaaagatcaactacgtgatgcacgtcgacgaaagcaaagggctacttgtaaaagaacagtttgacaagaccatactcaagataaactccatggagtcagatatgcggggcctgctgtga

SEQ ID NO: 9932 - RNA, 1011 nt, synthetic construct
  source 1..1011: mol_type = other RNA
atggacctgaatctgctggagagtagtctaacccagaaggggtatgggaagcgttacaagaagatttgcataaactatgcgaaggctcttaacgagcagggtctaccagtcatctttgacaacaatcatctctctctcttgatgggcattgagtcaaagatattaggccactacattatgaacagcaacaagttctacaaggagtaccagatcgccaaaagcaatggctcactcagaaccatctcgactccctcctacaatatgaagactattcaaagatgggtgctggacaacgtgcttagctctttcgccatccattctaatgcttttgggttcgtaaaagggaggaatattaaagacaatgcactcctgcacaccaagaaaaaggtggtccttaacatcgacattaagaacttttttccgacgatcaagttcgatcgcatcttctatatgttttaccaccatggttacaccaaggaactgtcctatactctggccgctctgactacatataatggatccctgcctcaaggtgccccaacctcaccttatatttccaacatactgtgccagagaatggacaaaaggttgctggcccttgccaaaaaaatgaacgcagattacagtcgatatgctgatgatattacgatgagcggagacgaaaatgttcgccagtatatagagacaattaagagcatcatcatcaacgaaggatttgatataaactacaagaagctgaggctacaaacagacaataatatgcaggaggtcacaggcctcatcgttaacgaagatgtgaaggtgaaacggaaatataaaaaacggctggagcagcacatttattactgtaagaaattcggggtgtatagccacttaaaaaaaatcgagtccgagtcaaagtcttactttaaggaatacctctacggcatcgcaaatttcattaaaatgatcgaacccgatgaaggattggagttcttgaagaaattagacgaaatcaactggggcaattga

SEQ ID NO: 9933 - RNA, 996 nt, synthetic construct
  source 1..996: mol_type = other RNA
atggaagctatgctaataaaaaagggctatggtcagcggtataaagagacatgcatgcagtatgcacaggagctggctgatcatgggttacccgtgatatttgacaacaagcacctcagtcttctgatgggaattgaatccaacatcttgggctattacatcattagctccaacaagttttacaaggagcaccaaattgcaaagtcaaatgggtccctgaggaccattagtacacctagctacaacatgaaaaccattcagagatggatactggataacatcctgtcttcttttgcaattcacagcaacgcctatgggtttgtgaaaggccgcaatataaaggataatgccatcatccatactaaaaaaaagctggtactgaacatcgacatcaaaaatttcttcccgagcatcaagttcgagagggtgttctacatgttctaccacaatggatataccaaagaaatctcttactccctagccgcgctgacgacatttaacggagctttaccacagggtgctccctcgtcacctagtattgccaacatcatctgccaacggatggacaaacgtctcttggcgctcgccgtgaagatgaatgccgattattcacgatacgccgacgacattacaatttcaggagacgaaaacattagaaagtacatcgagactatcaagtctatcattatcaatgaagggttcgatatcaattacagaaagctcaggctgcaaactaacaaaaatatgcaggaggttaccggtcttatagtcaacgaggacgtcaaagtgaagcgcaaatataagaaacggcttgagcagcatatatactactgtaagaagttcggagtttatagccacctgaagaaaaatgagagcgagagtaaatcctattttaaggaatacctctacggcatggcaaacttcattaagatgatcgaaccagacgaaggcatggaatttttggagaagctggatgagattaattggggctcttga

SEQ ID NO: 9934 - RNA, 1017 nt, synthetic construct
  source 1..1017: mol_type = other RNA
atggactacattgccgcgctgcaggaagccctgatccagaaaggttacggcaacaaatatcagaaactctgcgtagactatgcctctaatctattaaacaatcgcctgcctgtgattttcgataaaaaacatctcgccctgcttatgggggttaattatcagacacttacctactatctgatcaacacagataatttctacaaggagcacaagattatcaagagtaatggcggctatagaaccattagcgctccctcctttaacctcaaagcaattcagaggtgggtgctggacaacatcctgtataagtatcaggtgtctgacaacgcgaatggatttgtcaaagggaagtccattaagaataatgcagagtcacatataggcaaggagatcatcctaaacatagacataaagaacttcttcccaagcattacatttcaacaggttttctacctgttctataattcgggctatactaaagaaatgagcttcacattcgctaagttgcttacttttaaggggcgtctccctcaaggttccccggctagcccctacctggccaacatcttgtgtaaaaaactggatagcagattaaacggattcgccataaaaataggggccagctacagtaggtacgctgatgatatcactttttctggggatgctgacatttatcgacacatcagttttatccggaacattatcgaaagcgagaacttcaaaatcaatgagaaaaagcttcgggtccagaagagtaactccaagcaagaggtcaccggcctgatcatttctaatggagaagtgaaggtgaaacgcaactataagaagaagttggaacagcacatttactattgcaagaagtttggcgtgtttaatcatctcaagtacacgggagcatccgacaagtcatactttaaagagtacctctacggtatggcatcatacgtatccatgatcgaaccagacaccggaaaatcttacctgaattcattgaacgagatcatttgggattactga

SEQ ID NO: 9935 - RNA, 1014 nt, synthetic construct
  source 1..1014: mol_type = other RNA
atggattatataaattccctgagagaagcgctgatccaggctggctacggacggcgataccagaagctttgcctagagtacgccgataatctcctcaataatcagctgcccgttatctttgacaaaaagcacttgagcctgctgatgggcgtagagcctagcatcttgggctattacatctttaacagcgataacttctacaaggaatacaaaatacccaaatccaatggggacttacgggtgctctccgccccatctttcaatctgaagtctattcagcgctggattctggaaaacatcttgtacaattatcaggtcagtaataacgctaatggttttgtgatcggcaaaagtattagagacaacgcagagcctcacattggtaaggagatcgtgattaacattgatatcaaggacttcttcccctcaatcaactttgaacgcattttctacctgttttacaatagtggatacacaaaagagatctcttataccttcgcaaagctgctcacttacaataaactgcttccgcaagggtcgccagcctctccttatttagccaatataatctgcaacaggcttgataagaggttatcagggcttgccagcaaaattaaagcttcctataccaggtatgcggacgacattacatttagcggggaagccaacattgtgaactacatcaagactttgcgtaacattattgagtcagagaactttagcatcaatgagaataagctccgaatccaaaaacaaaattcaatgcaggaggtgacaggtctaacggtaaacaacggcgtcaaagttaaacggaagtacaaaaagaacctcgaacagcacatatactattgtaagaagtacggcgtctattcccatctggagcataccggagctaaggacaaatcctatttcaaggagtacctgtatggaatggcatcttacataaagatgatagagcccgacgtgggggaatatttcctgagaaacctcgatgaaatcaactgggattattga

SEQ ID NO: 9936 - RNA, 1014 nt, synthetic construct
  source 1..1014: mol_type = other RNA
atggattacctttctagactggaaaagaaactgatagagctcgattacgacaacaattacaagtccatctgcatcaaatacgccaagaagctcttggacaacgaagcgctggttgtctttgataagaagcaccttagtctgctgatgggaatcgacctgaagatcctcaactactacattgtgaataccgatgagttctataatgagaagaaaatccccaagaagaacggcaggtaccgcattatcagcatgccaagttataatctcaaaagaatccaacggtggattctggacaatatcttgtacaaactccgcgtgcattccaatgccaccggctttattcgtaacaaaagcattgtggataacgcctcctgccatgtgaataaagatgtggtcgtgaatatagacatcagcgattttttcccatccattgacttcgacaaagtgttttacatgttctataacctgggctatactaaggaactatgttacgccttgtcgaagctgcttacttataaggggatactcccccagggtgcaccctctagcccgtacatcgctaatgtcataatgatcaacatcgacttacgactggacggactcacgaaaaagattaattctaactacacccggtatgctgatgacattacaattagcgggaacaaatatattgtcctgcaattgccttttatcaaaaccatcatagagtctcaggggttcaaagtgaacctggaaaagctgaagattcagtaccgaaagtcacgccaggaagtaacaggccttgttgtcaatgacaggatttcagtaaaacgggagttcaagaagaatctaagacagcacatctattattgcaaaaggtttggggtttacgagcacttaaagtatacaggcaacgaagaaaaatcattctacaaggagtatctgtatggacatgcatacttcattaaaatggtggaacctgagtgtggtgagaggtttatcaaggagttagattccataaactgggatagttga

SEQ ID NO: 9937 - RNA, 1014 nt, synthetic construct
  source 1..1014: mol_type = other RNA
atggactatctgaatcggttggagaaaaagcttaatgagctcgagtacgacgattactataagtctgcttgtatcacctatgccgaaaagctcatagacaacgaggtaccagtagtcttcgacaagaaacatttgtccttactcatgggcattaacttagctacccttaattactacctggtgaacaccgatgaattttacaatgagatcaagattcccaagaagaatgggagataccgggtaatctcgatgccatcatataatctgaagaagatacaacgatgggttctggataacattctgtacaatatcaaggtgcacaacaaagccaccggttttgtcaggaaccggagtatcgtcgataatgccaagtatcatgtgaaaaaagatgtcgtcgtgaacatcgatataagcaactttttccctagcatcgacttcaataaggtgttctacatgttttacaacctagggtacacgaaggaactctgttatgtcctgtcaaaactgttaacatacaaagatactctgcctcaaggagcgccgtctagcccctacatcgcaaatatcataatgatgaacatcgacctgagactggacgggctggctaagaaaattaattccgattactctcgctatgcagacgacatcactatgagtggaaacagagatattgtggttcacgttcccttcattaaatccataatcgaatcccagggcttcaaggttaatctagacaagctcaaaattcagtatcgaaaaagtaggcaggaggtgacaggcttggtggtgaacgatcgtcttagcgtgaaaaaggagcttaagaagtcactgcgccagcatatttacttttgcaaaaagttcggagtgtatggacacttgaaatacacagggaacgaaggcaagtctttttataaggagtacctgtatggtcacgcctattttatcaaaatggtggagtatgaatgcggcaaaaggttcattaatgaactcgacagcattaactggaactcctga

SEQ ID NO: 9938 - RNA, 1020 nt, synthetic construct
  source 1..1020: mol_type = other RNA
atggactacctgtctaagctggaactgaaacttactgacaatgggtattcaaagaaatacaaggaactctgcatcagttacgcatcggcactccaaaaccgaaatttgcccgtgatattcgacattaaacacttgtctaaactgatgggggtaagatactccgtgctattttattacatcacgaagagtgaagagttttacaaagagtttaagatccctaagaagatgggaggtattcgtgccatctacgcgccatcactcaatctgaaaaaaatccagcgctggatcctcgagaacatattgacatacttcgatgtggacgatagcgccaaaggctttaaacgctccatgggcatcgtcgagaacgcagccatacataccaataaaagtctcgtctataacattgacatcaggaattttttcccatccattagctacgagaagatctacttcctgttttacaatgctggttattcttctgaagtcagcttcgctataagccgcctggtgtcgtatcagggctacctgccgcagggaagcccctgtagccctattctgtccaatatcgtttgtcgaaagatggatgaggaaatgaagcggttagctttcaaagtgggggcttcctactcaaggtatgccgatgacatgactattagtaccgatgacataaggctgttcgtttcaaaaaaagaggccttcaaggaaattattgagaggaatggctttatccttaataacaagaaggagcggatgcagtattacaaccagccccagttcgtcaccggactgctcgttaacgagggggtgaaaattagacggtcttttaagaaggagatcgaaaagcatatctacttttgcgaaaagtacggaattttcaaccacttgaagcaaattggtatggaagagaagagcttctataaagagtatctatatggcaaagtgaactttatcagatccgtagaacctgaaaccggcaagtatttcttagagagacttaacaagcttgattggacatattga

SEQ ID NO: 9939 - RNA, 1020 nt, synthetic construct
  source 1..1020: mol_type = other RNA
atgaactatctcgatgaattgaaggtgaaactgattgcaaaaggattttccgacaagtacatcaaaaggtgcacacagtacgctgaaaacctttataacgagaatttcccagtcatttttgatgtgaagcatctctctatgctgatgggtatcaactacaacacgctattctattacatcatcaacactgaaaccttctacaaagagttcaagatacctaaaaagtcaggcgattataggataattgaggcaccctccttgaacttaaagaagattcagaagtggattcttgataatatcctattacacttcccggtgaacgcgtgtgccaccgggtttaaaaagcagaccagcattgtcgataatgcaaaggttcacgttaacaaagagctggtgtacaccatagacatcaaggacttttttccttccatttccttcaaagacgtctacttcctgttttataatgtaggctattcgagtcagatcagctacgcctttgcctgcctgacaactcactgtggcaaacttccccaggggagcccatgttctcctactataagcaatatcctctgcaataagatggacgagagcatgaaggtgatggccaacgaaatttccgctaattacagtcggtatgcggacgacatgaccatcagtacaaatgacatcccattgtttctgtctaaacgtaaggccttcaagcagattgtggaattctatgggttcaatctcaacaacaaaaaggagcggatgcaattcaaaaaccaggctcaatttgtgacaggactgctggtgaataatggtgttcaggtcaaaagagccttcaagaaggaggtcgaacaacaaatttattactgcgagaaatacggcatctatggccatctgcgcgctaaaggaatggccgaaaagtctttctttaaggaatacatctacgggaaagtttatttcatcaagtcagtggagcccgaggtagcagatcagtttctcgagagactgaatcgactgcattggtcatactga

SEQ ID NO: 9940 - RNA, 1020 nt, synthetic construct
  source 1..1020: mol_type = other RNA
atggactacgtcgatgaactcaagatgaaaatgattaaccgaggctttagtaccaaatatatagacaagtgcaccacttatgccgaaaatctctacaataagaactccccaataattttcgacattaagcacctttccaagattatgggcatcagctatcccatcctgtttcactacatctataacaaccagaaattctacaaggagttcaagattcccaaaaagtcagggtcttacagagttattgacgccccaagtctgaatctgaagaaaattcagaggtggattttagacaacatcctagtgaacttttcaatctccaagtatgcaatggggtttaaaaagcaggtgaatattgtggaaaacgcccagatacataccaataaagagctggtctataacatcgacataaaggattttttcccttcgatcagtttcgagaatgtgtacttcattttctacaatatcgggtactcttccgaggttagctacgctttcgctaaattgatgacatataagggttatcttccgcagggatctccttgtagtcccatcatcagcaatattctgtgtatcaacctggatgagtctatgaactcactatccaaaaatattggagccaattactctcgctatgctgatgacatgactattagcacgaatgacatacctacatttctcgttaagaagggggcgttcaagaacatcatcgagttctatggatttaagctcaacgataaaaaggagaggatgcaatacaaaaatcatccccagtttgtcacaggcctgttggtcaataacaaagtgagagtgcggagagtcttcaaaaaggaggtggaacaacagatctattactgcgagaaatatggtatcttcaaccacctgaaggaactgggcctcgaggatcggagcttctttaaagaatacatatacggcaaggtaaactttatcaagagcgtagaaccagaggtggcagagaggtttcttgaacgcttgaatcgtttaaaatggtcatactga

SEQ ID NO: 9941 - RNA, 1023 nt, synthetic construct
  source 1..1023: mol_type = other RNA
atgcaaaatactttcctcgacgagctcaagcagaaactgtacgacaatggttttgatgatgcctatatcggcctgtgtctcgactatagtaaacggcttatagccaacaggttgccagtcatcttcgataagattcacctcagtatgctgtttggaatggaggtgaaggagttaaccgtgctggtcaaatccatagaaaatcagtacacgattaggaacatcccaaagaagaacggggacacccgagaactgtatataccctcactgaaactgaaggagattcagaggtggatcctggacgagatcctatataacatcaaggtcagcccttattgtaccggatttatgaaagagaaaagcatcctggagaacgctcgtatacacgagaataaggcctgtgtgatgaatcttgacattcggaatttctttccctccattagattcgagtcaatctatagagtattctactattacgggtacacttctgaggtgagttactatctggccagattgtgcacagtgcataattttcttccccagggggctcccacttcaccgtacttgtcaaacattgtgtgcctcagactcgacaaacggctgagctcgttggcgtctaaatatgatgcaaattacagccggtatgctgatgacattacactgtccggtacaggaagctctatcgttcctcggctgcctcttattaaaatcatcttggatagcgagggcttcaagataaattataaaaaggtccgagtgcagaaacagcaagaacgccagattgtgaccggcctggtcgtgaacaataaggcaagagttccacgcgaggttgaacgcgaactcaggcaacagatctactactgcaagaaatttggagtaaacgaacacttaaagcgcaagaagaaaaacaagctatccgggttcaaagaacatctttacggcttagcaatgttcattaagatgatcgataacaggaagggcgaacgttacgtttctgacctgaacgaaatctcctgggattactga

SEQ ID NO: 9942 - RNA, 1023 nt, synthetic construct
  source 1..1023: mol_type = other RNA
atgaaggaatacgaatatatttcccgcctgaaggcagcgcttattcaagaaaattacgatgacgactacattaaactgtgcaatgattatagctacaggctgctggagaattccttgcctgtgattttcgataaggaacacctcagtagattgttaggtctggaggaaagatatttctttcagctgtttatgatggccgatgggttttataaggaagtgcaaataccgaagaagaaactggggcagtttcgaaatatatctgtccctaccgaggtgctgaagtacgttcagaggtggatcctggacaatgtgctttacaatatacgcgtgtctgaggctaccacaggctttgttaaggggaagtctatcgtcgacaacgctaaaaaacacgtgcggaaagagtgcgtaattaatatggatctcaaggacttcttccctacaatcacatacgacagtgtttttcgactgcttaagtactacggatacactaatgagattgccttcatactgtcgaagttatgtacctttagagacgtcttgccacagggtgcacccacttcaccattcatcagcaacattgtctgttataagctggatatcaggttcataaagctctgcaacaaaatcggagctgactattcacggtatgccgatgacctcacaattagtggccccaggtacatcgtgggctacttgaacctattctccgatatcattgtagaggaagggtttcagatcaacgaatccaagacgcgcatccagtatcccaacaacagacaagaggtgaccggcctaattgtcaacgacaagatcagcgtgccaaaagagactaaaaaatacctgcgtcaacagatcttctattgcaaaaaatacggcgtgaactcacatcttcggaagatcaacatccagaagagcaactataaagaacatctgtacggaattgccttcttcatcaaaatggttgagctcgagttaggagagaaatttctcgaacagctcaatgagattgagtgggattattga

SEQ ID NO: 9943 - RNA, 903 nt, synthetic construct
  source 1..903: mol_type = other RNA
gtcatctttgacaagaaccactttgcaaaactcattggcctcaagaaagagtacatatttcagatcctgatggtgaccgagatgttctacaaggaaatcagcattccgaaaaagcgcttgggagagtatagggacattagtataccagcccagggactgaaatatattcagaggtggattcttgataacatcttatacaacatccctgtatctgaagtttgcacagggtttgtgaaggaaaagtccatcattgacaatgccaaaaaacacatcaataaggactgtgtcatcaacatggatataaaggacttttttccctccataacctacaacgatgtctttttcatcttcaaatactacggatacacaaatgaagttagcttcttgttgagcaagctgtgctcttataaagggtccctcccacagggagcgcctacttctccctacatctcaaacatcattagctataaactggatgttcgatttatgctgctggccaagaagctcaaggccgactattcccgttatgctgacgacataaccatctcaggcaacaaatacttagtgaagtacctgaaggtgttcaaaaatatccttatcgaagaggggttcaaggtcaatgagcggaaaactaggattcagtactcaaataaacggcaggaggtgacgggcattattgtgaataataaactaagtgtgcccaaagagacaaagcagtatcttagacagcaaatctattactgtaagagattcggcgtaaattcgcatctcgctcgcattggcatccaaaagagtaactacaaggagcatctgtatggtatggcattcttcattaagatgatacaacaggaagaaggtgagaatatgctgaacaacctaaacgatattgattgggattattga

SEQ ID NO: 9944 - RNA, 1017 nt, synthetic construct
  source 1..1017: mol_type = other RNA
atgtccagctacattgaatccttagtgagcggtttgagggaaaaaggttaccgggaccagtacattaatctatgtgtggagtattgtgagcgcctgattaataacaacttgcccgtgatcttcgataaggatcaccttgccctcgtgatgggcatcagagatgaatatctggccaagctgtttatgtttcctgagaaattctacaagcaagccagaatcccgaagaaaaaaaagggggagtaccgtgaaatatccatcccttatcagaccctgaaacatttgcagaggtggattctcgagaacattctctatagactgaaggtatctgatagctcgaaagggtttgttcccaagctgtctattgtcgaaaacgccaataaacaccttcagaaagagtgtgtgattaatatcgacattaaggacttctttccatcaatccagttcaacgagatattcaacatcttctactactacggctacacaaaggagataagcttcatcctggctagactgtgcacttatgaaggacgcctacctcaagggtccccagcaagtccctaccttagtaatctcgtgaacgttaagctggaccgacggttcgaaaacttttgcaagaaaatcggcgcggattacacacgctatgcagacgacatcaccatttctggaccaaagtatataacaaagtacatccaccagttgaaggaaatcattactgatgaggggtacaacctcaatgaggaaaaaacccgaatcctgtttaaacaccaaaggcaggaggtcacgggcttaattgtgaacgacgtcctgggtgtacccatcaagatgaaaaaatatctgaggcagcagattcattattgcaagaagtttggcgtcagcaatcatctcatgaaaataggaaatcaacggtcaaacttcaaggagcacttatttggactggcttattacatcaagatggttgagaaggaaaaaggcgagaagttcatagaggacctcaatacccttaattgggattattga

SEQ ID NO: 9945 - RNA, 1017 nt, synthetic construct
  source 1..1017: mol_type = other RNA
atggatacatacacccaccggctgaagtatgaaatgaatctgcataactacgacgaaaactacataaaactctgttgcgactatagcaagcgcttggaaacaaacaatttgcctgtcatatttgacaaagttcacttctcactcctgcttggtattgaggaaaactacttagccaagctctttatgattaccgaacacttttacaagctcgctagaattccaaaacggaaacccggaatgtatagggagatcctggttcccttcaagaatctaaaagagatacaaaggtggattctgcacaatatcctctacaacatagatgtgtctagcgccactacaggattcaaaccggactcttcaatcctggagaatgccaaaccacatgtcaacaagccttgcataatcaaactggatatcaaggacttcttccccagtattggctttgaccaggtgtatcgtatcttcgcatactacggatatacaaatgaggtgtcatatctacttgctaagctgtgcacctacaaaggctatctgcctcaaggcagtcctacttctccatacatatccaacatcatttgtttgaagctggataagaggtttaaggaactttgtaagacactgaatgctgactttactcgctacgccgatgatatcactatcagcggggatagtttcatcgcaaagtatatcgacaccttcaaatccattatcgagtcggagggctttgtagtaaacgaggataagctcaaagtgcgatatagcaatgagagacagattgtgacgggtatcattgtcaacaccaaattgtccattcccagggaaactaagaagtccttacgccagcagatctattactgccgaaagtacggcgtgtacaaccatatgctgcggacgaatctcgacagagccaattacaaggactacttatatgggcttgcgtactttattaaaatggtggagaaggatgttggacagaaattcattgatgacctgaacaccatctattgggggtattga

SEQ ID NO: 9946 - RNA, 1014 nt, synthetic construct
  source 1..1014: mol_type = other RNA
atggaagattacattaataggctcaaggaagagatcgagctgcgagaaattgaagagtcctatggccaattgtgcatagaatatgcagaacgcctcatagaaaataaccttcccgtcatctttgatagagagcacattgccttgttgctgggcattaactatgactacgtcaacaagatcatgctgtttacagacaagttctataaggtgtacaagatgaaaaagaagaacggcgattacagggagatcagcatcccaaatgtgcgtttgagatacatccagaggtggctgctggacaatatactctacaaaatctccgtttccgagcacgtaactggatttgtgcctaaaaaaagcatcgttgacaacgcgatcaaacatgtgaataaggaacttgtactggctatggatataaaagagtttttcccctctgttaagttcgagaagatcttcaacattttctactattacggttacaccaaagaggtgtcttactgtcttgctcgcatttgcacattagacggtagcctgccgcagggggcacctactagtccatacctggccaacatagtctgcaaaaggatggacatgcggattgagagtctctgtggaaaaatcaatgctatctttacccggtatgccgacgatattacaatctcgggcaaacggaacattatcgaatacctctctctaatgcagaacattataaaagacgaggggtttgaaatcaataataaaaagacccgggcaatgtattcaaaccgccagcagcgaataacgggactaatcgtgaacgagaaggtcaatgtgcccaagaataagattaagtatctcagacaacagatcttttacattaagaagttcggcgtcaccagacatcttgagaaaaacggttattgttatgggaatctgaaggaacacctgtatggcctggcctacttcattaagatggtgaatgaagagaaaggaatcaaattcattgaggagttagatgggatcaactgggagtcatga

SEQ ID NO: 9947 - RNA, 1014 nt, synthetic construct
  source 1..1014: mol_type = other RNA
atgagcgattacttatataagctgaaggaggcactcaatttcgagaaagtggacatcaagtacagtgaactgtgtattgagtatgcatcccgcttaataaacaataacatgcctgtgatctacgataagaaacacttttcactactgctcggtatagagcagcagtatatcaacaagctggttttgtgtaccgatcgcttctacaaaaagttctccatccgtaaaaaaaacggcggcgatcgtatcattagcataccaaatattcggcttaggtgcatccagagatggattctggacaatatcatttacaacatcagggtgtctgagaatgtcacaggatttatccccaacaagagtatcgttgataacgcgagggcccacgtagattcagacgccattctcgctttggatatcaaagatttctttccctcgatcagctttgacaagattttcagactctttaactactatggctataccaccgaaatttcttattgcctggccagaatatgcactttgaacaatacccttcctcagggcgctcccacctcaccgtatcttgccaatatcgtgtgtaagaagatggacaagcgaatctccagccttagtaaaaaaatcggggctaagtatacaagatacgcagacgatataacgatttccgggaaaaaaaacatcacatcttattccaagctcataaaggacattataagggacgagggatttctagtcaataatgagaaaactcgagtaatgtacaggaatcggcagcaacgcgttacagggctgattgtgaacaagaaaattactgtgccaaaggaaaagatcagatacttgcggcagcaaatttactacatcaataaatacggtgtcgtgggccatcgcgagaagtctaaggtcaagcatcggaacattaaagaacacctgtatggactggcctacttcattaaaatggtggacgaaatcaaaggggagaagttcctgaacgacctgaataagatcaactgggaaagctga

SEQ ID NO: 9948 - RNA, 1014 nt, synthetic construct
  source 1..1014: mol_type = other RNA
atggaaaatcatatagaaaagttcatcgacaagctgaaagtgatgcagtatagcgacgattacattaatctttgcatcgaatatgcagaaagactgactgacaacaatctaccaatcattttcgacatcgaacacttttcattcctggtgggcttggagaaggagtacatcaactacatcattcacaagaagaagcacttttacatagagttcacgatcaagaaacgaaaaggcgggaaccgccttctgtctattcctagcaagaagttgaagtatatccagcgctggatcctcgatgagattctgtataaaattcctgtgaacgagcatgccaagggttacatacctaacaaatcaattgtcgacaatgctaagccccacgtcaagaaaaaatgcatcattaaactcgacatcaaggatttcttcgacaacattgattacaaccgggtctttagaatcttctactattacggttacactaagaacatgagttacaagctcgccgagttgtgtacttatgaaaataagctcccgcaaggcgctccaacctccccctatatctccaatatagtatgtctgaagatggataaaaggtttagcaaactgtgcaacaaatttaacgccacatatacaaggtatgcggacgatattaccatctctggagacaattccattaccaagtacttcaaagcatacgtgagaattatagagtcggagggctttgaggtcaatgctgaaaaggtgataagcatcaaagggaatcggaccaagcgggtgacaggcattgttgtgaacgagaaactgagtgttgggagggaaatgaaacgcaagctacgacagcagatttattactgcaagaaatatggggttcgtgatcacctgaagaaaatcgagtgtgaaaaatccttttacaaggagcatctttacggaatcgcctactatatcaaatctgtagagcccatcgatggagaaaagttcttagaggaattagacgagataatgtgggagtattga

SEQ ID NO: 9949 - RNA, 1035 nt, synthetic construct
  source 1..1035: mol_type = other RNA
atggaatgttatcgcatggattacatcgaaaggttgagagaacagttaatcaagcaggggtatggcaagaggtatatatacctgtgtgagcagtattgcactcggttactccaaaacggactacctgtaatttttgacaacatccacttttccctgctcctcggtatgactactcaggacctgggtaagatgatctttctgacagattccctctacaatagcataagcattcccaaaaagagcgggggcaaacgagagatttcaattcccaccgtgaatttgaagtatgtccagcggtggatcctggacaacattctgtataacattcgcgttagttcacaggctacaggattcgtgaagggcctatccattgtggataacgcccgaccgcatgttaataaagagtgcgtcatcacaatcgacatcgagaacttttttcctaccattagcttcgaaactatattccggctgttttactattacgggtacacaaaggaaatgagttatgttcttgccaagctctgtacctacgagggcaaactgccccaaggcgcaccaacctcgccatacctgtccaacatcgtgtcacttaaacttgacaaacggttcaatagtcttgtaaacaagttatctgacctgaatgcgtcttacagcagatatgctgatgatctcaccgtgtctggagacaaaaagatagtgaaatatgtgcccctgtttaaagagatcatccaggatgaaagattcatcgtcaacgagaaaaaattcagggtgcaaaataagcctgatcgccaaatggtgacgggaattatcgtcaatgaaaagatttcagtaccaatccagacgaagaagtacattaggcagcagatttactactgcaaaaagttcggggtcgatagacacctggagcatataaaaagcatacgttccaattacaaggagtacttgtacggtatcgcctatttcatcaagatggtggaaaacgactacggcacatctctcttggaggagctgaataccattgtttgggactattga

SEQ ID NO: 9950 - RNA, 1017 nt, synthetic construct
  source 1..1017: mol_type = other RNA
atggatgaatacataaagaagctgaagctcctgttagagaattcggattatgaagaggaatataagaggaaatgcattgaatacgccgaacggttactgctgaatgggcttcccgtcatctacgatttggagcacctcattctggttttgggtatcaagaagaagatacttaccaagatgattttcgcttaccataacttttacagtactgtggagattcccaaaaaatcaggagggagtagaaaacttcaaattccttcagtggaactaaagtatatacagcgctggattctcgacaacattctcaaaaaaatcaagatcagcaagcacgccatcgggttctgtaatgaaaaatccattgtggataacgccaagatccatattggcaacaaatgcattttgaacatggatatcaaggacttcttcccctctgttaatttcgagatggtgtttaggattttcatctactacggatatacgaaggaactgtccttcatttttacccgtctttgtacttatgacgggtttctcccgcagggtagtccagcttccccatacatctctaacatagtctccctgaagatagacaaacggctgagcagattagcggaaaagtatcatgcaaactatagcaggtatgcagacgacatcacattctcttctaacagctcaatgaaaaagctacctgagatcatccagaaaattctgctggaagagggctttatggtgaacaaaaaaaagacccggtttcaatacttttaccagagacaagaggtgacaggactgatcgtgaacaatggacgcgtacgagttaagaagagctataagaaagagctctaccagaccatatattactgtcagaagtttggcgtcaataatcacttggagaaaatcaattgctacaagaacttctacaaggagtatctgtacggcaaagcctatttcatcaatatggtagagcctgaagagggcaaaaaaatctttaagctgctcgaggagatccagtgggattactga

SEQ ID NO: 9951 - RNA, 1017 nt, synthetic construct
  source 1..1017: mol_type = other RNA
atggaaaactacatttacaagttgaagatcctgctcaaaaaaagcggatacggtaagcactactctgagaagtgtgtcgagtatgctaaccggctcatcgagaataatttacccgtgattttcgacattcaacacttctcactggtgtccggcgcccctaaagagttgattggaaagatgctgtttgctgattccaaattctattctcttgccctcattcctaagaagtccggcggggttagagaactgcacataccctcagctgagctaaaatatctgcagcggtggattttggacaacatcttgagtagaatacatgtgagccagtttgccatggggttctgcaacaataagagtatcgtggacaacgctaaaatgcacattggcaatgagtgcatcctgaacatggacattaaggactttttccatagcatcaccttcaaaatggtctttaggatattcgcgtattatggatacaccaaggaattatcctttgtatttgcaaagctttgcacgtacgaagatgtgctacctcaaggttcgccggccagtccctgtataagcaacatcgtctctttacgtatcgataagcgactttctctcattgcagagaaatatcaggcatgttacagcagatacgcggatgatatcacattttcagggaatcggggcatcaagaagctgatcgagattacttccaacgtactcgaggaagaaggattctcactgaacaataagaagactaggatgcagttcccacatcagcgccaggaggttacagggcttatcataaatgggggtatggttcgcgtgaataagaagtataagagggacctgtaccaggcctgctattactgtaaaaagtttggcgtggatagtcacctgaaaaagatcaaatgcgacaaaagcttctacaaagaacacctgtatggcaaggcctattttgtcaatatggtggaaccagatgagggaaaaaaactgttcaacctcctggacaaaatccattgggactactga

SEQ ID NO: 9952 - RNA, 1017 nt, synthetic construct
  source 1..1017: mol_type = other RNA
atggaaaactacctggagagcctcaagattgagataacagaacagggatatgacgaatactacacaaccaaatgtattgagtatgcagagcgacttctgtctaacggtttacccgtaatctttgataccgatcatttgagcctagtgactggggcccctaaacagctgatcttaaagatgattttcgcaaattcctgcttttactcagaggccagacttcctaaaaaatccggtggtattagagtcttgaacatcccctctattgaacttaagtatgtacaacgttggatactggacaacattctcaagaagataaacgtgtcatcatacgccaccgggttctgtgacaataagtctatagtggataatgccaaggtgcacatcgggagagagtgcatcctcaatatggatatcaaggactttttccctactatcacgttcaaaatgatcttccgaattttcgtctactatgggtacacgaaagaagtgtcctttactttggcgcggctctgtacatttgagaactttctgccccagggatccccagcttcgccgtatctctcaaatatcgtcagcctgaaaattgacaaaaggctgagcctgctggctaagaagtataaggccaattactccaggtacgctgacgacatcacctttagtggcaatcatggcatcaagaaaatgagtagtattgtgagcgagatcttggaagacgagggcttcaaggtgaatgatggaaaaacccgccttcagtattcttatcaaaggcaagaagtgactggactagttattaacaacggcaaagttcgcgtcaacaagcattacaagcgggagctgtaccagattctctattactgcataaaattcggcgtgaacagtcacctgcagaaaatcaacagcacaaaaaccttctacaaggagcacttatatggcaaggcatattttgtcaatatggttgaaccagacgaaggccggaagctgttcgatctgctcgagtgcatccagtgggattactga

SEQ ID NO: 9953 - RNA, 1026 nt, synthetic construct
  source 1..1026: mol_type = other RNA
atgaataaagaggaatatctgcaggagctgaagaatggcctcgcctaccaaggctatgacagccgctacatccaggcctgcttcgagtatgctcagaatctactgatccatggactgccagtggtttttgatgtgcaccacctctccttgctgctaggtatgactaccaagcaattaaacgcgtacatcttcggctccgggaaaagattatacagtactaagcacattagcaagaaagatgggggcgtaagagtactttcaattccttgcgaaaccctgaagtacatccagcgctggatccttgacaacattctcaagcgaatgtacatatccgaatgttgcaaaggatttgtggacgattgtagcatacttgacaatgcgagctgtcatttaggcgccgaggtcatcctgaacatggacattaaggactttttcccaagtatttcactcttgcaggtctatcgtgtgtttaggtattatggatatacccaggaactgtcctacgtcatggcaaaactgtgcacgtacagggatcagctgcctcaagggtcgcccgcttcaccctacctgtctaacatcatcgcactgaagatagataaaagactcatggctctcgctgaatcttacggcgcacattatacccgctacgccgacgacataactatttccggattcgggtgtttggagaaaatgatccccattatcagctcagttatctctgaagagggttttgtggtcaatagcaagaagacacgggtggcacgaaagggtcagaggcaagaggtcacagggctgattattaacagtggaaaggcctgcgttcctaaagagtacaagcggaaaatcttccaggaaatttactattgtcagaaattcggcgtgacaaatcatcaggagcacatcggcgacgatcaccggtattataaagagcatctctatggaaaagcctactacgttcacatgatcgagccgcacatagggaagaagatgctttctgagttggataaggtgaactgggaagtgtga

SEQ ID NO: 9954 - RNA, 1026 nt, synthetic construct
  source 1..1026: mol_type = other RNA
atggataaagagaagtatatctctgaattgcgtattcaactggagagcatggaacagtcccagaaagacatcgactcctgcatatcctatgccatccggctcattgattccagccttcctgtaatctttgacaaacggcatttaagtctcttgcttggcatcgagctggaagaactgactacaatactcgcaacgttagaggagaattattacaatgagatgtctataccgaagaagtccgaagggtacagaaccttgaatgtccccgccatgaaactgaaaatgattcagagatggatcctggacaacatcctcgaacacattcccgtttcagaccatgtgactggattttgtaaggagcgtagcattgtgactaatgctaaaaagcacattggcaaacaatgcgtaatcagctttgatattaaggatttcttcccaacgattgatattgagagcatcttcatggtcttttactactatggatacaccaaggagatcagttatgctctggcaaggttatgtacctatgatggttacctccctcagggttcacctgcctcaccctacatctctaatatcctgtgcctgaagctcgacaagaggcttagcctgctcgccgagaaatatgttgcagactacacccgctatgctgacgacattacattctcaggcaactacggcctgagtaacatcatcaacattgtgaagaacatcatccaggaagaaggctttacagtcaatgagaggaagattcgagtgaagtacaagcatcagagacaggaggtgaccgggctaattgtcagcgataacaaagtgagtgtttccaaactatacaagcgcaaactttggcaggaaatctactactgtcaaaagtatggagtctcgtctcacttggagcacataaactgcaagaaatctttcttcaaggaacacatatacgggaaggtgtactttatatatatggtggagccagaagaggggcggaaactgctgattgcgctggataaaatcgcctgggactattga

SEQ ID NO: 9955 - RNA, 1026 nt, synthetic construct
  source 1..1026: mol_type = other RNA
atggacaaggagaggtatttaaaaaaactggaggaagccctttctgagtctagctcctctatccccgagtcattagcatgcatccggtatgccagcaatttgctcacattcgattttcctgtgatatttgatcgaactcacctggctcacctgctgggtataaagccgtcagacctatcagccctgatctattcgatagacagctactgctaccatgagtttcacttggctaagaaaagtgggggtatgagagtgatcaacattcccagcgttgatttgaaggatatccaaagatggatcctagacaatatcatctccaagatgcatatttcagagttcgctaatggcttttgcaaggggaagtctatcttgactaatgcgctcagccatatcgatcaagagtgcgtcatcaacctggacatcaaagacttcttcccatccgtgggtattgatcgagttttcatgcttttcaagtactatggctacaccaaggaagtaagttttgctctggccaaactgtgtacataccgcggaatacttccacagggatctcctgcatcccctgccatcagcaatgtgatatgtctcaagctcgacaaacgtctgtcgaaactggcggaatcttacaatggagtctactccagatatgccgatgacctcacacttagtgggaccaaaaacattacgcagctgattcccaccgttattgctattgtggaagaggagggcttttgtgtcaatgctcagaagacccatattgcatacgcacacgagcggcagaaggtgactggcctcctggtcaacgaaggcaaagtgcgcgtgagccaaaaatataagcggaggttaaggcaggaaatttacttttgccagaagtttggcgtgtccgaccaccagaaatactgtaacgaaaacttccagttcttcaaagagcacctctacgggaaggcctattttgtaagtatggttgagccagaagtcggaaacgccttcctggaggccctggataacattgcatgggaatattga

SEQ ID NO: 9956 - RNA, 1026 nt, synthetic construct
  source 1..1026: mol_type = other RNA
atggataagattaaatatctggcttcactcaggtctgccattatcgcttccggcaagtccgaaaagtactcgattgtgtgttgcaattacgctagcagtctcttaaactccaatctgcccgttctgttcgacaatagtcaccttgccagggcactggggattacccctctggactttgggaagctcttgtattccatcgacgattactgttaccacgagattaagatacccaaaaaaaacggtggtgtgcgcaccctggatattccctctatggacttgaaatatatccagtgctggatccttgacaacattctgaacaaaatgcatgtctctgactatgctaacggctttgtgaaaaatcggtctatcctaactaacgcccagaatcacatcaactcagagtgcgttgtgaacatcgacctaaaagatttttttcccacagtcaaattcgagcaggtctttaggattttcaagtactatggatacacaaaggaggtgagctatacactcagcaaactgtgcacgtatcgaggaatactgccacaaggcagccctgcttccccggcaataaccaatattatctgtcttaagctcgataagcgcctgtcagccttgggccaaaagcacgaagcgaccttctcccgttatgccgacgatatcactttctctgggaaaaaggccatcgtccaccttttgccatacgcaataaatattatccgggatgagggttttgcggttaacctggataagacccatacttcattcaagcaccagagacaggaagtgacaggattaatcgtgaatggagacaaagtgcacgtcagtcaaaagttcaaaaagagattccggcaggaaatctactattgtaagaaatacggcgtacagagccatctgaagcatattaatgatcatcatgccttctacaaggagcacatgtatggccaggcatactttataaacatggtagaacctagtctggggcaggagctgttaagactcctcgacagcatcagctgggagtactga

SEQ ID NO: 9957 - RNA, 1026 nt, synthetic construct
  source 1..1026: mol_type = other RNA
atggataaaaccaattatctcaaggagattgagatcttactgaagaacaacgacgagtccaatgagaacatttctaacgtgctgaagtacgctgccaatctcctgaatctagatatgccggttatatttgacaagagtcatttagccactctgctcggattgagtgtctctgattttaaccattatgtgattggctcaaatgactcccagtataataccctgatgattcctaaaaagtcaggctctttccgcgaaatcagtatccccagcgtcgagctcaaaaaaatgcaacggtggatcttggacaatatcctgtacaagattgaagtaagtgagtatgccaccggctttgtgcgtaagaaatccataaaggataatgctaagtgtcatctcgagaataactgtgttatcaaccttgatctcaagaacttttttccaacaatacacttcgaccgggtcttcaaaattttctactacagcgggtatactaaggaagttagcttcctgctctccaaaatatgcacttacaagtcaatcctgccccagggttcgccagcaagccctcagatcagcaatattgcttgtctgaagcttgactaccggctgagcaaattatctaaatgctttagggcgtcattctccagatacgcagatgacctgacattttctggagactatgggattacaaagattatcgacaccgtaaaaaagatcgtgaatgacgagggctttgaggtgaacgaaaaaaagatcagaatccagttcaaacaccagaagcaaaacgtgacagggctgacggtgaatgatttcaaggtgcgagtcagcagagaataccttaggaagttcagacaggagatttacttctgccaaaaatttggcatcagggatcacttgcgcttcataaactccgaccgaaggtatttccgcgattatatgtacggtaaggcctactttattaatatgatcgatgtggacgaaggaaaactgctattgaacaaacttaaccagatcaactgggaagtctga

SEQ ID NO: 9958 - RNA, 1023 nt, synthetic construct
  source 1..1023: mol_type = other RNA
atgaacaacaacccgtacgttaaagaattgtatagtgtgcttagtcagaagggagaaaagcaggaggatatcgacgctgcctgcaaatatgccgaaaatttgatcgctctcaatctacctgtggttttcaacaaggagcatttctcactcttagtcggtaggaagtacaaggagatcaccacattgatggctacactagagacgaactattatcacctggcatacatcaagaaaaaaaatgggggcgagaggaccctgaacatacccgcagtgtctctgcgaattatacagaggtggatcctcgacaacattctcaaaaatatgtacatcagccaatacgccatgggtttctgcaagaacaaatccatcgtgactaatgccaaataccacctggggaagacttgtgtgatcaacgtggaccttaaggatttttttccatctattacgcagaagcagattttcaacatattctactactacggctatacaatagatgtctcctatatgctctccagattatgtacttgcgaaggacggcttccacagggcgcacctacaagcccctgcttaagcaatattgtctgtctgaaactggataaacgcctgtctgaagttagtaaaagattcaaggccgaatatacccgctatgctgacgatatcaccttttcatcgaattcagacatcagcaacattctgcccatcgtgaaggagatcattcaagacgagggattccaactcaatgagaaaaagacccggattctttttaagcatcagaagcaagaggtaactggattgctggttaatggcaaccagatcagagtggataagaagtacatcaaaaagttcaagcaggagatttactattgcaaaaaatacggggtggaagaccacctggaacacattgattgtaagaagcacttttaccgtgaccatatgtatggcaaagcgtattttgtaaagatggtcgacgagaaagtcgggaaaaagctgattaatgaactggactccatagattgggagtga

SEQ ID NO: 9959 - RNA, 1026 nt, synthetic construct
  source 1..1026: mol_type = other RNA
atgaataacgagggatatctggagaacctggagaaagaactgatagactccaatgaaaaggtcaaggacatcgaagcagcaaagaaatacgccaagaatcttttgaacttggggttgccagtaatctttgataaacagcactttgccctgctagtgggcagagagctgagtgagatcaccaagatgatggctatgattgagactaattattaccacgaagctaacatcgtcaagaaaagcggcaaaatgagaacgctgaatattccggccgttagccttaggctggtgcagaaatggatcctcgacaatatcttgtataagatccgtgtgtcccagtactgtaatggcttttgtaagaagaagtctatctgtacaaacgcccaaaaccatctcaaccaggattgcattgtgaacatggatatgtcagatttcttccctagtatttcacagaagcagatctttaggatcttctactactatgggtataccgttgaggtcagttacattttagcccggctttgtacctatgacggatacctccctcaaggtgcccccacttcgccctacctgtctaacattgcttgcctaaagctcgacaagaggcttgcgggactggctaaaaaatatgagagcacatacagccggtatgcagatgacataaccttctccggaaaatgtggtatccaaaagatcattccagtggcggaaaaaataatacaggacgaaggcttctccctcaatgtcaataaaactcgcattgcctactattatcaacgacaggaagttacagggataaacgtgaacggcaaaaagatgcatgtagataagagatacgtgaaaggcttttgccaggagatctattactgcgaaaaattcggggtccatgatcacctgcagcacatcaaatgcaacaagcatttttacaaggagcacatgtacggtaaggcatactatattaatatggtggacaaggacttaggccggaagctcctgtctcgcctggacaatattgattgggatgactga

SEQ ID NO: 9960 - RNA, 1062 nt, synthetic construct
  source 1..1062: mol_type = other RNA
atgggaaatcgctgcacagagacttggcggctgtacatgaaaaccgaggagtatctgaacgaactgcgtaccgtgctcgtcgcagctgacgagtgcgaggcagatattgtggcagctgagcagtacgccgaaaatctgatgcagctggggatgccggtgatctttgatttgcaccatttcgcgaagctagttggcaaggaagcgcgggatattggcaacatgatgatgcatcaggaggattttttctatcgccaggtacagatcgagaaaaagcatggagggtaccgaactcttgacatcccagccatgaacctccgcaatatacagaagtggatcctgaagaacatcctctaccaaattagcgtctctgaacacgcctgcggcttttgtaagaagaggtcaattgtaacgaacgcagaaaggcatgtcggaaaggagtgcgtaataaacgtcgatataaaggactttttcccctccgtgcacggtgaccagattttcaaaatcttctactactacgggtatacaactgaggtttcttacctgttatcccggctctgtacatacagagactatctccctcagggtgcccctacgagcccctatctgtccaatattgtgtgcctaaaactggataaacgattgagtagactggccaagagctatcaggccgagtacagtcgttatgcagatgacattacattttctggcaatgccgggatcaaggctatgcttccaatagtggaagggattgtgaatgaggaaggttacctgcttaacaaagacaagacccgcatcgcctataaacatcagaggcaagaggtgaccggcttattggtgaatggaactaccgttagagtgagcaaacaatatcttaagaagttctcacaggagatttactactgtaaaaagtttggcgttcggtcgcacatggaacacatccactgtgaaaaaagattcttcagggatcacatgtacggcaaagcttattttatccaaatggtcgacagggacatgggaaaaagatatttcgctgaattggagcagatcgactgggaatcctga

SEQ ID NO: 9961 - RNA, 1014 nt, synthetic construct
  source 1..1014: mol_type = other RNA
atgaactacattcagaagctgcaggagaaaatgagagagtccgagcaaagcgaacaatacatcaaaacgtgttctacttatgctcagcggttgatcgataacggtgtgcctgtggtattcgactttagccatctcgcacttctcttgggatttaaaacagcggatattgctttttacctgttcgctgaagacgatctgttctacaaggaaattgaaatccccaagaagagggggggctacaggaaaattgatatcccttccgagcgactgaaatgcatccagcgctggatcttggacaacattcttgacaatatggaggttcatgagtgctgttacggattctgtaaaggcaaaagcatctatgataatgccttgcttcacgtcggcaagaaatgcgttctgaatatggacctcaaagactttttcccttcaattaagcagaaggacgtttttaacatcttctacaagaaagggtacaccaagaaggtgagctactacctctctaaattactgaccaaaaatggtgaactgccgcaaggctcacccgcctccccaatggtgtcgaatatcgtagccgagcacctagacactcggctttcagcactcgccaaacgctactgtgcggagtatagtcgttatgccgacgatataacattcagtggcgcactgaacgtcaagaacatgattcccattatcaccgggatcattgaagatgaggggttcaatatcaatgagaagaagactagatacgcctactattaccagagacaggaagtcaccggcttaatagtcaataaaaaagtgtccatcccaaaggaatatattaaggaactcaagaaggagatctattattgcgagaagtttggagtgacatctcatctggagaggacaaacatgcacaagagtttttataaggaacacctatacggtaaggcttatttcgtgaacatgatagacaagaacatgggacagcagatactgaaacacctggataccataatgtgggagtattga

SEQ ID NO: 9962 - RNA, 1014 nt, synthetic construct
  source 1..1014: mol_type = other RNA
atggggtacgtccagaagctgaaggataaaatgatcgagcagggggccgatgaaaattatgtcgaactctgcgtgtcctatgctcaaaagttatgttcaaactctgttcccgttatctttgatttcaaacacctgagcctgttgctaggatacgaaccctctgagttagccttttacctgtttgcccctgaagactctttttacacgcaaatgaagattccaaagaagtcagggggtatgcgtgagatcgagattccttcagataagctcaagtcaatacagcgctggattttgcgaaatgtgctggagaatatcgaagtacacgaagcgtgttatggcttcaccaaaggtaaaagtatttatgacaacgccttactgcacgtggggaaggagtgtgtactaaacatggacttgaaggatttttttcccagcatcactcagaaagacgtgttcaatattttctaccagaagggttacactaagcgggttagttactatcttgcaaaactcctgaccaaagacggagtgctcccacaaggcagcccagcttctccgaaaataagcaatatcgtggctctgcatcttgataaacggttgagcgaactggccaaatgctatagggctacctactcgagatatgccgacgatctgacattctccggcgcaagcaacataaaaaacatgatccccatcatcaataagataattcatgaggagacattcctggtgaatgagaagaaaacaaggtattcctactactttcagaaacaggaagtgaccggacttatcgtcaataagaaggtcagtgttcctaaagagtatcttaaggagctcaacaaggaaatctattactgcaagaaattcggcgtctccagtcatctcaagaaaactgaaaaccacaaatccttcttcaaggagtacatgtacggaaaggcatattttattaacatggtggacaaggagctcggccagaaaattctgagagagctggacacaattctgtgggaatactga

SEQ ID NO: 9963 - RNA, 1014 nt, synthetic construct
  source 1..1014: mol_type = other RNA
atggaatactgtcaagagctccagaaaatgatgagggagcaagaaatggatgaaacctacatcgagctctgcacctcctatgccaaaagactgcttaaaaacgacatgcctgtcatttttgactttaaacacctctctatgctgctgggaatagaaccctacgagatggctttttacttgttcgcagacgaaaagctgtattatacagagattcagattcctaagaagcgcggcggtgtgagaatcatcgacatcccaagtgagaggctgaaggacatccagaagtggatcttggacaatatactctcccgctatactgtgcacgaatgctgttacggatttattcgggggaagagcatttatgacaacgctctgcagcatgtcaataaacggtgcgtgttaaatctggatctgaaagatttctttccatcgattacccaagaacaaatattcaagatcttctttagcgtagggtacactaagaaggttagctactatttagccaaaatgctaacgaagaacaaaaaacttccccagggatcacctgcatctcccatgcttagcaatattgttgccaaaaaacttgacagccgtttgaatggactggctaaaaagtacggcgccgtttactctcggtacgcagatgatattacattttcaggcgaaggcaacatcaaaaatatgatcccaattgtggagaagaccatccaggatgaaaagttccaggtgaataagtccaaaacgcgatattcttattactttcagcgacaggaggtgacaggcctcattgtgaataagaaggtcagtatcccgaaagagtatatcagagagatcaacaaggagatttatttctgtaagaagttcggtgtatcaagtcatctggagaaaattcagaactacaagtccttctacaaagaacacctatatgggaaggcgtacttcataaagatgatcaacaagaggaaagggaaccagatattggagcagctggacgagatcgaatgggattactga

SEQ ID NO: 9964 - RNA, 1017 nt, synthetic construct
  source 1..1017: mol_type = other RNA
atgatcaggatagacctcgaaaagtataaagagttcctcagcaagaaaaacatcaagaagaagaacaaggagctgcttatccagtacgccgaacgtctgacgaataataatctcccgattatttgggacatccggcactttagcattataaccgacataccttacaaaaggattctgtcctacatctacgagacagagaagttttatcacgagattgatatccccaaaaagcggggaggtgtacgcacactcgaaattccctctctcgaactgaaaaccctgcagagagatatattgcatgagcttcttgaatgcattaacacaagtgaacaagcatatggcttcctgaagggaaagagcatcgtcgacaacgcacgacagcatgttggcaaaagatatatcttaggtatcgacatcgagaattttttcgctacaatcaatgtggacagaatcttcaagattttctattactacggctataccaaagaggtttcgttcatgctgtcccgcattgtgtgtaaagatgggtacctgcctcagggcgcccctacctcaccatacctaagtaacatagtttgcaggaaattagaccgcaggttgttgggagtggctaaaaaatatggcgcgacttacactcggtacgccgatgacatcaccttttcaggggaaattcacccagatgtgtatgtcgacctaatcaagaaaattatcgtggaagagggcttctgtatcaattccaacaagactcgaattctggggaataatcagagacaggaagtaacgggtatcattgtcaataagaaggtgaaggtcaacaagaagtataaagagtatctgcggcaacagatttattactgcaacaagtacgggatcgattctcacctggagaaaataggaaacaatgtgactggatttaaggaacatatgtacggcatcgccaactttatcaaaatggtggaacccgatgagggggagaaatggattaacaagcttaacgagataagctggtactactga

SEQ ID NO: 9965 - RNA, 1035 nt, synthetic construct
  source 1..1035: mol_type = other RNA
atgacatacgacgcacaaagcgaccagtacctgttagaattggactctctactggaggctaatggaactccttttgaagacagggccatctgtatagagtatgcaaccaatctccggcgaagcggacttcccgtcatcttcgacagggatcatttggcgtttctcctgggcatcacattgcatgatctgatgtacttcgtcatgcagcaggatgatcactacgctaggtactatcttagtaagaagaggggcggtagacgccctgtagatgccccgtctgagagactgaaatctgtccagcgttggattctgtcctcaattcttgagaagatgcgcgtgagcgattatgctttcggctttgtgaagggccggagtcttctcgagaacgcgagagtccacttaggcaagcactgtgtagtaaatgttgacattgaagacttctttgcttccgttcaggcggataatgtgttcagggtgttctcctattacggttacagcaaagaagtgtcattctgcctgtcacgcctgtgtacactgagcggcgtgttaccccagggagccccaacctctccctgcatctccaacctcgtgtttctcaaggtggacaagcgtctcgctcgccttgccaagacatatgaagcatcgtattccagatatgccgacgatctgactttcagtgggcgggggaatctgggcaacatcatacctgctgtggaacatattttgcgggaggaggggtttactttgaatgatgccaagacgagagtcgccttctctcaccagcgacaggaggttaccgggctgaacgtgaacggagatagtgttagagtcccacggagctttaaacgcgacttcttccagcaagtgtatttttgcaaacgatacggtgttgattcacacctggaccggaccaaccaactctttgcattttacaaagagcatatgtacggaaaagcctactacctgtgcgaaattgagccagaggtgggtcgtagggcactgggggaactagacgccatcgagtggacctattga

SEQ ID NO: 9966 - RNA, 1179 nt, synthetic construct
  source 1..1179: mol_type = other RNA
atgtgttgcgtgtcctctgcatggcaacatattgcgcacggagcctctccgatcgtaggcctgccaatagtttccctggccttccacgcaaaagatggattcgctaccgggacagtcggtactggaaccattaccgtaatcgtcgacagtaatgtgtgtttttatatggaggaagagaacctgcagattgcgctcgaaaagggcattatagaaccagccgtctatgagagagtgattgcttacaaagagagactcgaggagaaccaggttcccgtcatttacaatctgagacatcttcggaaaatattccgaatctacaaaaaggagcaggacttctttttcggggacaagaaggaggagttatataggacttttaagatccccaagaagtctggggggtatcgtaccatcgaggccccctgtgaacgcctgaaacagatccagcgctggatcaaagatgaaatcattgacaagcttgtgatgtctgaatatgccaccggatttaggaagaatctttcaatcgtcgataacgcgaaaaagcatgtgggcaaggaattggtgattgggatggacctgaaagacttttttccaagcgtgacgtatgaggaaatcttcctgatgttcaggtatgtaggctacaggaaagacgttgcacacctccttagcaagttgtgcacaaatgcagaaaacgtgctccctcagggtagtcctgctagccctagcatcgccaatcacgttctgctgaaactagataagcgtctcggcattctggctgagacaatcggagcagattatagccgctacgccgacgatatcactttttcaggaaagaagagtattgcttcaatcatacccttggtcgagaagatcgttgccgaagagaactttacgataaataagaccaagactcggctgcaatacaagaatcagcgacaggaggtgacaggcttaatcgtgaacaacaaaatctccatttcgcgggagatggagaacgagataaagaacgctatatacttcatcggtaaatacggggtgtgcgaacacatgagacacattgaatgcaacaaatccttctacaaggaacatctatacggcattgcctatttcattaatatggtggaccgggaaaaaggccaaaaatacttgcgccagttagatctgctcgagtgggagtactga

SEQ ID NO: 9967 - RNA, 1011 nt, synthetic construct
  source 1..1011: mol_type = other RNA
atggagaagaacaatcttcaaattgccctgcagcagggcgtcattacccaggatgcatataatagcatcacggaatacaaacagaggcttaacgataataacgtccctgtgatctataacctaaggcatctgcggaaaattttccgaatcaagaaacgtgagcaggatatcttctttggcgaaaacaaacgttctttataccgaagtttctcgatcccaaaaaagtctggtggcgttcgccagattgaggctccttgtaagcggctgaaggaaatccaaaggtggataaaagacgaaatcgtggacaagtttgtcgttagtgagtacgccacaggattcaggaagaacatgtctattgtggataatgcccgcaagcacgttgggaaagagctcgtgatcaatatggacattaaggactttttcccctcagtaacctatgcagatatcctgttgatgtttatgtacatagggtacaggaaagacgtggcacatctgctgactaagctctgcacaaatgcagagaatgtccttccacaggggtcacccgccagtccttccatttccaaccacatcttgctgaaattggacaaacggttaggaagactggcggaaagcgttggtgccgactactctagatatgccgatgacattactttctccgggaagcggggtatctccacaatcataccgctcgtggagcagattattgaagaggaaggcttcctcgtaaacgagaataagactagactccaatatagcaaccaacgccaggaagtcaccggactgattgtgaataacaaaatcgccgtgtcaaccgctatcgaagatgagatcagaaacgccatctactttattaagaagtatggagtggacgaccacatgaagcatataggctgcaataaaagcttctatatggagcacctgtacggcatagcttactttatcaacatggtggatcgcgataagggaaagaaatacctagctcagctggacgagattatatgggcgtga

SEQ ID NO: 9968 - RNA, 1011 nt, synthetic construct
  source 1..1011: mol_type = other RNA
atgggcaacgacaagctctacgaggcatcacgaagaggcgtcatttcggagaaaacttatcgcgagatcctgaaatataaggagagactccagaagaatggcgttcccgtgatatacaaccttcggcatgtaaggaagatctttcaaatccgccggaaggagcaggaactgttttttggtgcgcagcgcgaagctctttactaccagtttgagattccaaaaaagtccggaggtaaacggaccatcgaggctccctgcgacaggctgaagaaaattcagcgttggataaaggacgagatcatcgattcattctatccgagtgaatacgcaacagggtttcggaaggggataagtatcgtcgacaacgcgatgccacatatcgggaaggaattggtgatcaactttgatctcaaggatttctttcccagtgtgacatacgccgaaatcctgaaactcttcgtgtacatgggttaccgactggacgtggcccacttactgactaagatttgcaccaatagcgagaatgttctgcctcaaggctcccctgctagcccttcaattagcaacttagtccttttgaaactcgataaaaggttgtctagcctggccaaaaccatttcttgttcctattccagatatgcagatgacattaccttcagcggcaataaaagtatcaagtccattgtgccactggtcattcagatcattatagatgagggatacacagtgaatgagaacaagattcgtctgcagtatgccaaccagagacaagaagttacagggcttactgtgaatacgaaactggccgtgtctaaaaacataaccgatgaaatcgaaaaggccatctatttctgtaataagttcggagtaagctctcacatgaagcacatagcctgcgacaagcatttctatagggagcacctatatggaatcgcttacttcattatgatggttgacccccagaaaggcaagatctacttgaaagaactaaatgacctcaactgggtctga

SEQ ID NO: 9969 - RNA, 1011 nt, synthetic construct
  source 1..1011: mol_type = other RNA
atggcccgccaagaggaactgctggctgccgtggaaaaaggaattatcactgaggattcagcgaatcgaattctggagtacaacgctagactggacgagcacggcctgcctatcatctataatctgaggcacttgagaaagattctgaagatccgcaagcgggatcaggagatctttttcggtccaaggagaaatgagttatatcgcgaattccagatacccaagaagtccgggggcattcgtaaaattcaggctccaaatgaagaacttaaagcgattcagacctggatcaaagctgagatactggacaaatattccgcctctaagtatgcaactgggtttcggaaaggctacagcattgttgacaacgccaaccgacatgtggggaaagagctcgtgatcaatcttgatatcaaggactttttccctagcataacctacgcggatgtaatcaaaattttctcgtacatggggtacaagttggaggtcgcccacctgcttacgcagctctgtacaaatggtgagaacgtgctgcctcaaggatctccggcctctccagctctaagcaacctggcagttataaaattagacaagaggctaggtacattggccgactctctcaattgtgactacagccggtacgctgatgatatcacattttcaggcaagaagaacattaggagcatagtccccttggtaaagaaagttatctccgaagaaggattcgaagtcaacgagtcaaaggtgcggctccagtatgcccaccaacgtcaggaggtgaccggactcatcgtcaacaaaaaggtgagtgtctccgaaagtgtggtgtccgaactgaagaatgcagtgtactactgcggaaaatacggggttgaaagtcacatgcagcatattggctgcgacaaagccttctataaagagcatctttacggcctcgcctattttgtaaagatggtggagcccgcaaagggcagagcatatctgaacaagttagatagtatcgtctggtga

SEQ ID NO: 9970 - RNA, 1002 nt, synthetic construct
  source 1..1002: mol_type = other RNA
atgtatgaggacgccaaagaaaaatcaatcatcagtcaggatgcataccaactcataaaaatctacataggtcgcctcgaagataacgacatccctgtcatctttaacctgcgacacttgagaaaaatcctgaaaattcccaagcagaaacagtcggcttacttcggcgttaataggaatgaaatgtacaggaagttcatgatccccaagaaaagtggcgggtatcggaagattgaagcaccatctgaagagctgaagttaagacagctgtggattaaggaaaatatcatcgacaagttcaagatttccgatagtgcccagggctttcgtaaaaaccatagcatctatggtaatgccctgccacatgtggggaaggagcttgtgatcaacattgatattaaggacttcttccctagcatcacctaccagaaagttttcaagttctttcgctatattgggtatacaaatcaagtgtctcatctgctcacaaaaatgtgtactaacgtggataatgtcctaccgcagggatcacctgcctccccaagcctctccaacattgtactcttgaaaatggacaagagactgtcaaagttagcaggagctgtggaatgcgattacacgcggtacgccgacgatatcaccttttctggcaagaaggtgataaaaagcctggtccccattatatgcaaaattattgaggaggagggatatgacgtgaacaaagggaaactgcgccttcagtattctaatcagcggcaagaagtcacaggcctaaccgtgaataaaaaagttagcctttccaagcgaaccataaaggagatcgagaacgctatttattattgcaagaagtacggtgtacaagaacacatgactaggattaagtgtgacaagtccttttataaggagcacttgtacggaatagcgtactttatcaagatgatcgacaaagagaagggcaagaaatacctggaggagctgaacaggatcgagtggctttactga

SEQ ID NO: 9971 - RNA, 933 nt, synthetic construct
  source 1..933: mol_type = other RNA
atggctacgaaagaaaaaatcgataatgctttgcagaagggcatcatcaccgccgaaactgcgaacgagcttaaggaatacaacgataggcttacccgtaacaatatgcctatcatctataacctgcggcatctgagaaaaattctgaagatcaagaagaaggaacagaataagtactttggcaacgagcgcaatgaataccacacattttacattcccaaaaagaatggcagcaagcgcatgatcgaagcgccgtctgacagactcaaaagctttcagctgtggataaaggagaacatattggacaagattaacgttagcacgaatgctagagggttccgaaagaattattccattcttgataacgccaaggaacacgtaaacaaagatctggtgatcaatatcgacctcaaagactttttcccatccattacctacaatagggtatataagatcttcgcatacgtcggatacaccaatgaggttgcccatctcctgactcaactatgcacaaacaaagaaaatgtgctgccccagggatctcccgcctctccagtcatttccaacattgtggcactgaaactcgacaaaaggttaggtgccctcgcaaacaagttcaattgctcatatactcggtacgctgacgatatcacattcagtggatgtgtgggcatcaaaaatatgctgtcgaccgttgagcggataataatagaggagaacttctccattaacgacgcaaaagtccgactgcaatataagaaccagcgccaggaggtgacagggttaattgtcaacaaaaagatcgccgtgagccctaaaatcattaaggagatcgacaatgccatttattactgcctaaagtttggcgtggcttcacatatgcagaaaattgggtgtgataagagtttttacaaggagcacttgtatggttga

SEQ ID NO: 9972 - RNA, 1011 nt, synthetic construct
  source 1..1011: mol_type = other RNA
atgatggagcatatagagaaggcctatcaggctggggtcattactgaggaggaaaagaggttgattgaggagtataaccagagactgacggacaataatgtgcccgtgatatataatctgcgccacctgaggcagctgctcgggatccataaatctgctcaggacaggctttttggagataagaagtgcgattcgtatcgggttttccatattccgaagaaaaatggcggcctgagagaaatcgaggcccctaacgaagaattaaaacgcattcagttatggatcaaggagaacattctggataaattttccgtcagccaatttgcaaagggtttcgtgaagggcgtctcaatttacgacaacgcggtgcagcataccggtaaagagctggtagttaacatagaccttaaagacttcttcccttccattcagtacagagagatctacaagatttttaagtacatcggctataccgactctgtctccaagctgttgactaatctgtgtactaacgctaggagcgtgttgccccagggaagcccagctagtccaacaattagtaacctcgtaagcctcaaactcgacaaacgtctcgggcgactggcagacaaaattggcgcctcttataccagatacgccgatgatatcaccttctccggtaagaagacaatacagaagtacatcgagctgattcgaaaaatcatctacgaagaagggtacgagataaatgaaggaaagtttcggttgcaatacgcgcaccaacggcaggaggtgacagggcttatcgttaataaagaggtcgcaattccccaaaagcgcataaacgaattggaaaatgccatctactattgcaaaaagtatggcgtggtggatcacatgtcacacatcggatgtgaaaaaggtttctacaaggaacacctctacggcctggcctattttatcaaaatggtgaaccctgagaagggactgaaatatcttctacagctaaacgagatcgaatggccaatctga

SEQ ID NO: 9973 - RNA, 993 nt, synthetic construct
  source 1..993: mol_type = other RNA
atggcaagcaccaaggaactgcagaaagcctacgagtcgggctacataacacaaggcgacatgagtttgattgaagagtataatcagcgactcctttctaacaatgtccctatcatctacaatctgcgacacttaaggcagttgctgggcatacgcaagaaagaccaggacaaactctttggcaaggataggaaagattcatatcgcaactttaaagtaccaaagaagagcggggggtttcgcagtattgaggcccccaatgaacagctgaaaaaaattcagctatggatcaaggaaaacatactggacaaattcaccgtttctgagcatgcaaagggctttaaaaaggggttctccatctacgataatgcactcccacatgtcggcaaagagctcgtgatcaacttcgatcttaaggatttctttccaagcatcgattactgcgacatttacaagattttcaagtacatcggatacacagacggagtgtccaaactgttgaccaagctgtgcacgaaccccgaaaatgtcctaccccaaggatcacctgcctcacccgtgttgagcaatcttgtttccctgaagcttgataaaaggctcggcgaactcgccaagaggatcggtgctagttacacccggtatgctgatgacataacattttctggggaggctaacattcagaagtatgagatcctgattagagagatcatcttcgaagaggggtaccgggtgaatgaagacaaattcagacggcgtctgtatttccagaaacaagaggtgactggtctgatcgttaacgacaaagtgtccattccgaagagaaagataaaggagatggaaaatgcgatttactattgtaagaagtacggtgtgactaaccacatgaagcatatcaactgtgagaaaggattttatagagaacacctgtacggtttagcctatttcattaagatggtaaaccagcctcaaggagagaagtattataaaaactga

SEQ ID NO: 9974 - RNA, 993 nt, synthetic construct
  source 1..993: mol_type = other RNA
atggcctttgacaaaggaatcatcgatgagtgtcagaaaaagctcctgacggagtacatagagagactgcacatgaacaatgtgcccattatatataacctcaggcatctgaggaagttgtttgatattccccgagacgaacagaacaaattctttgggcacgagcggagcctgctgtacaagacattctatattccgaagaagaatggtgggtaccgcaaaattgaggcaccaaatgaaaaactcgagaagatccaatgttggataaaggagaagatcctagataatttcaacgtctctgaatacgcgaaaggatttaaaaaagggactaacattgtggacaacgcactccctcactgctctaaagaggtactgatcaatatcgacattaacaacttcttcccttcgattaaatactcctcagtgtttcggatgtttaactatatgggatataccaaagaggtttgccaccttcttacccgtttgtgcacaaacgctgaaaatgttctgccacagggtgctcccaccagccctgctataagtaatcttgtgaacttgaagctggacaagagactgtcaagcttagccatttccggtggagcggcctacactagatatgctgacgatattacctttagtggggacaagttgatactgaagtatatcaagctcatcaagcgcattatcaatgaggaaggctactccattaacgataaaaaattccgcatccagttcaagaatcagcggcaggtggtcactggcctcatagtcaattcccgagtgaaggccaataaacagatcttcaatgagcttgacaaagccatctacttcatcaagaggtatggcatccaggatcatatggcacacgaaaacatcaacagatctgcatataaggagcatttatacggcctggcctactttatcaatatgatcgataggacacaaggcaagtactacattgaacaactaaacagcattgaatggctgtattga

SEQ ID NO: 9975 - RNA, 1008 nt, synthetic construct
  source 1..1008: mol_type = other RNA
atgtcaaactacatcgagaaactaaaaaagcgaatgctgcagcaagaacttccaaacgattatatagaagagtgcatcagctacgcgactaagctcctgaataagggattacccgttatttttgacagcgaacatttcgctaaacttgtgggaattaactatgaggatctgcggaaactcaccataagcgataattacaaagaagtgaagatcccgaaaaaaaatggcattaggaccctgctcatccctaatcaagatctgatgttcgtccagaagtggatgcttgtcaatctcatttccaaggtgaaaatttcaaagcactctagaggtttcatcaagaatacctccctggtggataacgccaagcatcacgtcaaaaaagagtatgtcatcaccttagacatcaagaacttcttttcaagtatccacaacgtggtggtttatcgtattttccggtctttaggatatacaaaagaactgagcggcctgttcactaaacttctggtgactaaagatggcttgcctcaaggtgctcccacgagcccttacctttctcacatagtatgcaagaagctggaccgcaagatattcatagaactgaagtccctgaagaattgtgactttacgaggtatgcagacgatattacaatcagtggggagtacgatattaccgagaagattgagaatatcattgggatcatcgagagtctcgggtttgagatcaatctaaagaagaagaggcatcagctcagatctcagcagcagatggttacagggttggtagtcaacgacaaggtgaacattccaaagtcctatatacgcaaattgaagcaggaaatttactactgtaagaaatacggcgtgaattcccacatgaacaagacaaacattaacaattcgaactacaagctgttcctgtttggaaaagcctactacatcaaaatgatcaacaaagacctcggcgagaagtttttgaaagaattggacgagatcgactggccctattga

SEQ ID NO: 9976 - RNA, 1008 nt, synthetic construct
  source 1..1008: mol_type = other RNA
atgcacgattatctgatcaaactgaagagtgcaatgcagtcgcaggggtgcccccccaactatataaatgattgtaccaagtacgcaagcaagctgttaaacaaaggtctgcccgtcatttttgatcgggaacacttttctcgcctgattggattcaaactggaggagttggaagaactgctcaagaaggacaactaccgtgttgtcaagattcccaaaaaagacgggcacagggatctgtacattcctaacccaagactgaaattgatacagaagtggatgctgatgaatcttatcagcaaggtcaaaatttccaaacatgccaggggcttcatcacagataccagccttgttgacaacgctatcgagcacgtgaataaggacttcgtggtgagcttagacatccgcgactttttccctagcattaataagtaccgcgtgtatcggatattccgatcactgggctattgtaatgatttggcgggaatttttaccgcattactcgtgactaataatggcctcccacaaggcgcccctacttccccttatctgagtcacatcgtatgcaaaaagcttgactctagaatatcaaaggagcttaaacatttcgaggggtgttcctttacgaggtacgccgacgatttttcaatttctggcggcaatgaaattttggagaagatcagcaacatcatatacattatctcctctgagggatttgaactaaacttctcgaaaacaaggatccagagtaatagtcaaaagcagctcgtgacagggctcgttgtgaatgaaaaggtaaacgtgccaagctcatacaaacgaagattgaagcaggagatctattattgcaaaaaatacggggtcaactctcatatgaaacggctcggaatcaataaatccaactacaagctgtacctttacggtaaggcttactatatcaagatgatcaaccagaagctaggtgagaagttcctctccgagctgaacgaaattgactggccgtattga

SEQ ID NO: 9977 - RNA, 1092 nt, synthetic construct
  source 1..1092: mol_type = other RNA
atggttctcaatctcagctttgtttttttctgcaacaatccactcctttgctgccttaagagttcactcggcagcgggactatgtctgagtatctcgattcgcttcgaggtaaaatggtaagcaccgggtacagcacagagtacatagagctgtgtataaagtatgcgaatgacctggagaacaacaatgtcccagtgattttcgacaaggctcattttctgctgttaactggcctgaaaacgtccgaattgcgcaacatcctgacaaacaagcccgagcattaccacgagtttgagctgttggtgaactatagacttcggaacattttggcacccaatcctctgctaaaacaggttcagaagtggatccaggtgttcatattaaagcccctgaaggtgtcttcctgggccactgcctacaagccggggacaagtataattaagaacgcaaaggtgcacgttaaacaagattgtgtcattaatctcgatctgaagaatttcttcgactcaatcactagcgtccgcgtacataagatttttcgctcagccggatatacaaaagaactagccaccttgttcacacaaatctgcaccctggaaaagtgtttaccccagggcgctcctacttctccttacctgagcaacttgatctgtcggaatcttgatcaggacctggccatcttctgccagtctagggcaattagatttaccaggtatgctgatgacatgaccttttccggaggcgtggagatcgaaaactacattccaaatatcagaaagaccatcaccaaacacggctttgtgattaatgaagataagtcacaggtcctgttcagaaatcaaaggcaggtcgtgacgggacttgtggtaaacgacaaggtcgctatcaaaaaagaattcatccgaaagctcagtcaggaaatacactactgtctgcgtttcggtgtgtccaaccatattctgaattcccggatcaacaaaagtaactacaaagaccacctatttgggcgggtgtattatatcaggatggtgaataaacctctcggagacatcttgctcaaaaaactggagtctattgattgggagtactga

SEQ ID NO: 9978 - RNA, 1011 nt, synthetic construct
  source 1..1011: mol_type = other RNA
atgtcggagtatacagataatttacggaagtccatgctggaacttggcaattccaacgactacattgaactgtgcattaactacgcccggaaattagagaaatctcacgtgccgattatatttgataagatccactttctcgtcctcactgagctgaagtccagtcagctaaatgatttcttgaacaatagggccggttactacagggaattcgagttgatcataaataaccgaaaacgcgaaattcacgcccccaataatatcctgaaggagttacagaagtggatacagttgtatatcctgaagcccctgagggttagcgactgggctacagcttatatccctgggacctccatcattaaaaacgccgcaatccatatcggccaggaatgtgtggtgaacctggacctgaagaacttcttcaactctattagcgccgttaaagtccatagggtatttagagtcgctggatacactaaggagctggctaccctattcacgaaaatatgcacggtgaataattgcctccctcaaggggcaccaaccagcccctacctttctaatctggtgtgcattaagctggaccaagaacttgcggatttttgtcaatcactgggtattcggtttacaagatacgcagatgatatgactttcagcgggggcaaagagatcgtgaaagtgctcccacagatttataagattatctccaaacagggtttccttatcaacaatgacaagaccaagatattgaattgtggacaacgccaggaagtcaccggacttgtggtaaacgacaaggtgagtgttaaaaaagagtttatccgtaagctctctcaggagatccatttctgtttgagattcggcgttagcaaccacatcctacgcacaggcatccgaaaatcaaactataaggaccacctgtttgggagagcctactttattaacatggtcgacaaatcactcggagacgatctcctgaagaagctgcagagtattgattgggagtattga

SEQ ID NO: 9979 - RNA, 1023 nt, synthetic construct
  source 1..1023: mol_type = other RNA
atgagcaattctctgaattatctgattctgttggaagagcaaatggtacaggaacaatacccgactgacgatatccaactcgtcaaactctacgcacagagactcatttccaactccgtggccgtgatcttcgacttcgatcacctttgctatctcctggagtgtagccctgaggatatgcgctcctatatgtacaacaaggaatacaactatcacagttttgagatccctaaaaagagtggtggcactagacagctagaggccccaagttaccccttgaaaatgattcaacgttggattctggatcatatcacatgtcaggtgccaatctctagccacgctttcggcttccgaaaaaagaggagtatattggacaatgctaaaatacacgaaggccaggagtgtattgtgaacatcgacattgctaacttttttccctccataaaggggatccagatttacaagctgtacagatatctcggatacaccaagcaggtcgcttcaattctgaccacactgtgcaccaaggacgactgtcttcctcagggagccccaacctccccttacctgtcaaatatcgtgtgcaagaagctggataagcggatctctgggttagcaaatgcgataggggcaaaatatagccgatatgccgacgacatcacattaagcggatcttcgtcaatcactaattacatcggaaccctgaagaaaatccttacagacgaaggctttatcattaactacaagaagctccggattcagtttaataatcagaaacagatggtgacgggcttagttgtcaaccagaaggtaaatgttcccaacgagatgattcgcagcctcaggcaagagatctactattgcaaaaaatacggcgttaacggtcatatgcggcagaggaacatacgcaactcaaattataaggaacatctgtatgggaaagcctacttcataaaaatgattaaccccgatctaggtcttgatatgatcaggcagttggatcagattctgtgggagtattga

SEQ ID NO: 9980 - RNA, 972 nt, synthetic construct
  source 1..972: mol_type = other RNA
atgtacaagcagaactgtaacagccagtatattaaactggtgatcgattatgccgaaaatctgttgaagaacaatgtcgaggtgatatatgacctagaccacattagcctgctcactaacaaatctatcggagactttctcgacatcaataactactacaaggagattcaaatcagtaaaaggaacggggagacacgcactctggctattccggatgacaatcttaagtccgtacagaagtggatattgaaatcaattctggagaagatgcccatatcaaactcagccaaaggttttaagaaaggcttgagtatcgtcgagaacgcaaagccccatacgaacaaagattgcgtactcagcctggacctgaaagacttttttccatcgatcacccagggaagtgtttatttcatcttcaaggagattggctatacagaggaagtcagcaggttgctgaccagactgtgcacataccaaggacagctgcctcaaggggcacctacttctccctatattgcaaacctggtctgccggaaactcgatattaaattacaggagttcgcttgcaatcaaaatatagcctataccagatacgcggacgatctaaccttctctgctaacaaggaactcagcgagtatatcccacgcatcaaagagattgtgatcatccagggttttaaggttaacgactctaaaaccaggtgtcgataccgacaccagcgtcagcttgtgacaggcttagtggttaataatgaaaaggtgtccatacctcgggaactgaagcggaagttaagacaggaaatccactattgtaaaaagttcggcgtccatgggcatctttattgggggattaagtactactccaattacaaggattaccttctcggcatggccctgtacgtgaagatggtggataaaaatctcggaaaaaagctgcttgaggaaatcaagtccatcaattgggaatactga

SEQ ID NO: 9981 - RNA, 1065 nt, synthetic construct
  source 1..1065: mol_type = other RNA
atgtggctcatcaaggattttctcgtgggttcccccctgataggagttgaaaacatggacaattacctggagaaactggaacgagagatgaggaacagaaatttcgatctcgagtacataaacctgctgaaggactatgctaaaaggctactggatcacaaagttgcggtcattttcgatcaagaacatttcagcctgctcacagaggtccctgtagacaccattaaagcccttctgaataacttcaattcatacaacgagatccagattcccaagaaaaatggtgggaataggaccttgttaattccgaacgaggagcttaaatcaatccaacgatggatcttgaacaacattctgaactctattccaattagtgattacgccaaaggttttaagaaagggctgagtatagttaagaatgccgaggtgcacaccaataaggagtgtctacttaacattgacctcacagacttcttcagcagcattgagagccagcgcgtgtataaagcttttcgttatatcgggtacactaaggaaatctcagctatgctatcccggctgtgtacctataacaattttttaccccaggggagtccaacctctccatacctcgcaaacatcatatgcaaaaagatggacaaaaggctcttttccctttgcaaggataaaggcatcgactacacgcgctatgcagatgacttaacattttccggagatattaagctcagcaagtacctgcctattatctctgaaatcgtagaagacgagggctttcagatcaacactaccaagactcggatttcgtatcagcaccatcggcaggtggtgactggattgacggtcaataagggattgaatatccctcgcgatatgaagaaaaagctgtctcaagagatctatttctgcaagaagtacggagtgcagggccacctggctcagacaggccagacatattccaattataagcattacttgctgggcaaggcctacttcataaagatggtgaacaaagaacttggcgaaaaattcatcagaagaatcgccgaaatagcatgggactactga

SEQ ID NO: 9982 - RNA, 1008 nt, synthetic construct
  source 1..1008: mol_type = other RNA
atgaacttgctgagtctggaaaaggaaatgattaagcagaattacgacaaggagtatatcaacattgttaaagtctacgctcatagactggtcgagaataacattccgatcatattcaactttgagcacctttgctttctgactaactactctacagaaaagctcaggtacttcatccataataatcagagcctgtataaggagatagagattgagaagaaaagtggcaacacgcggttaatttccatcccaaataacgaactaaaggtgatccagcgctggatcctggacgaaatcctgagcaaaattcctctgagccctcatgctaagggcttccgcaaaggacaaagcatcataaacaatgcacaactgcacaccaacaaagagtgcgtgatgaatctggacattcaggatttttttgggtccgtgactcagaagcaggtgtacaagatctttagatatgttgggtataccaaacaggttagttccattctctcactgctgtgtacgaaagatggcgtattgccacaaggcgcccccacttcaccctacattgcgaatctcgtgtgcaaaaaattagacaagcgtatatctaacctcttcataaacaagcccattaattacacacggtatgccgatgatattactgtctccggagaagcaaccattaaggactacctccctatcctaattaagatcatcaccgatgaaggcttcgaaatcaacacaaacaaaacacgaatccaatattcgtacaataggcagatcgtcaccggtcttgtggtgaaccagaagatcaatgtcccaaaaaagatgataaagcagttgcggcttgagatctactattgtaaaaagtatggtgtagccgggcacattgataaaaggcatatagagtactctaactacaaacaccacctttttgggaaggcctattatatcaaaatggtgaaccccaagttgggacagaagttcctcaatgagttaaatgagatcaattgggactactga

SEQ ID NO: 9983 - RNA, 1008 nt, synthetic construct
  source 1..1008: mol_type = other RNA
atgaacattgacaccctgaaaaaaatgatggagaatgagcaactgtcagaggactatataaatctgtgcgtgacctatgctcgttccctggaggataaaggacttcccataatctttgactccattcatctggctaaactgatagggatcggaaccaaggagctatatagctattatgaactcgcgcaaacactgtacagcactgccgttatccccaagaaaacgggcgggtcccggaaactgaacgcaccatcagaaaacctgaaatacattcagaaatggatcgtagagaatgtgttgtaccgactcgatacatctaaggtggccacaggctttgtaccccagaaaagtatagtggataatgccaagcctcacgtgggaaaggagtgtgtgattaacctcgacctgaaggacttctttcccagcattaagtacgtgtggatctataatctgttcatcagcttaggttatactagacacctgagcatgctctttaccggcatttgcacgcttaataacgaattaccacaaggcgccccgtcctcaccatatttgtctaacctcatatgcgagaaattagactctaggctgagtagtcttgctgaaaacatgggcgcatcttatacccggtacgcagatgaccttaccttcagcggagacaaggaaattaccaagtacattaagctgatcaagagggtgatcaaggaagaaaaatttgagctgaacgagaagaaggttcgcgtgagattctcctaccaccagcaaatggtcacaggtctaattgttaatgagaaactctctgtccctcagaagacaaagaaatacttgcgccagcagatctactacgctaagaaatatggagtctcctcgtcattgcagaaacagggcgtcactaagagtaactacaatggtcatcttttcgggttggcctacttcatcaagatggtcgaacctgattgtgggactaagtttatcgaagagctcaagcagatcgattgggagacttga

SEQ ID NO: 9984 - RNA, 1008 nt, synthetic construct
  source 1..1008: mol_type = other RNA
atgaaaatcgacacactcaagaccaagatggaggatgaacagttcagtgaagattacattaacctgtgcgtgtcttacgccaggaacctcgaggaaaagggactgccaattattttcgattccatccacctggcaaaactcattggtattgagacgaaagaattgtattcgtactacgagcttgcccaaatcctttatcgcactgcggtgatccccaaaaaaacaggcgggagtaggaaactgaatgctccaagcgagaatctcaagtatattcagaaatgggtggttgagaacgttctgtatagactggacacttccaaggtagcaaccggattcgtgccccagaagtctattatcgacaatgctaagcctcacgtgggcaaggagtgtgttatcaatctagatctgaaggactttttcccttccataaaatatatctgggtgtacaacttgttcaagaacttaggctacacacggcatctgagcatgctgtttaccggcatttgcaccctgaacaacgagttaccgcagggggcaccctctagcccttatctatccaatctcatatgtgaaaagctggatagccgcctctcaggacttgccgaacacatcggcgcttcctatacccgatacgccgatgacctgactttttctggtagtaaagatatcgtgaagtacatcaagctgataaagagagtcatcaccgaggagaagtttgagcttaacgagaaaaaagtcagagtccggtttagctaccatcagcaaatggtgactggcctgattgttaatgacaaattgtcagtgccccaaaagacgaagaagtacttgcgtcagcagatttactacgctaagaaatatggtgtatcttcatcattggagaaacagggagtcacaaagagcaattataatgggcatctttatggactcgcctacttcataaaaatggtcgaaccagacagtgggacagagtttatcgaagaattaaagcagatcgactgggaaacttga

SEQ ID NO: 9985 - RNA, 1008 nt, synthetic construct
  source 1..1008: mol_type = other RNA
atggacatcaagtcacttgccgccgagatgatgaaaaagaactacgacaaagagtatatcgatctgtgcataagctatgccataaacctcgagaagaacggcatgcccattatttttgactctatccacttggccaaactgataggcattgagacaaaagagctgtattcatactacgagtttgccccaaggttgtataaggtcgcggtcgtgccaaagaaatccggggaaaaacgctttcttgatctgccaagtgagaacctgaaatacatccagaagtggattctcgagaacatcttgtataagatcaaagtgagcgactatgccactggattcgtgcctcaaaaatctattgtggataatgcaaagccccacatagacaaggaatgcgtcgtgaatctggacctccaggattttttccccaacatcaagtatatctgggtgtacaacctgttttacaacatcggatacacaaagcacctctcaatgatttttgccggtatttgtactctggaaaataaactccctcaaggcgcacccagctctccttacatcagtaatctgatctgtcacggcttagatacgaggttatccgatttagcgattcacatcggcgctcagtatacccggtacgctgacgatataaccttcagcgggaataaagagattgcaaagtatatatccctgatcaaacgtatcatcaaggaagagcatttcattgtaaatgagagaaaggtgcgagtgcagttcaagcatcatcagcaaattgtcaccggtcttgttgttaacactaagctctcggttccgaagaagaccaaaaaatacctaagacagcagatccattacgctaagaaatatggggtaaatgactctcttattcagcaggggatcaataagagcaactacattgatcacctgtatggattggcttacttcattaaaatggtcgaagaaaagtgcggatccgaattcatcgaagacctagatacactggactgggagagttga

SEQ ID NO: 9986 - RNA, 981 nt, synthetic construct
  source 1..981: mol_type = other RNA
atggtcgaggagcagttcagcgaagagtatataaagctttgtgtgacttacgccactaacttgatcgagaatggtctgcctataatttttgacgctcgccacttgtcatgcctgataggaatcgataccaaagaactctattcctactatcagctggcgagtaccctctacagaaaagctgtgattccaaaaaaatctggagggtcgaggaccattaatgccccctcagaaaatctaaagtatattcagcgatggatcctagagaacatcctgtataagatcaactccagtcaggaagccactgggttcgtaccacagaagaatatcgtcgacaacgcatcttaccatgtaggcaaagaatgcgtgatcaatcttgatatgaaagatttcttcccatcaatctcttttgtccaagtgtataacttgtttaaccggtctggctacacaaaacacctgtcaatgatactgacgggtctgtgcatgtataataatgagctgcctcagggtgctcctagctccccgtacatcagtaaccttgtctgtaagaatttagacctgcgtctctccaagttggcctcccaaataggggcaaagtataccagatacgcagatgacatcacatttagcggagagaaagtgattgtgaagtacattaagctcatcaagagggttatcaaagaggagaacttcaacattaatcacaagaaagtgagagtgcaattcagctaccatcagcaaatggtgacaggcctcgttgttaacgaaaagattcggattccccccaaaacaaagaagtatcttaggcagcagatttactacgctaagaaatacggcgttacgagcagcctgtctaaacagggccagaccaaggccaactataagggccacttatttgggctggcccattttatcaagatggtcgagcaggaatacggagataatttcatccgcgaactcaaagagattgactgggagagttga

SEQ ID NO: 9987 - RNA, 1008 nt, synthetic construct
  source 1..1008: mol_type = other RNA
atggacattaataagctgaagaacaacatgctaactgaggagtatgataaagagtacatcgacctgtgtatcagttatgcctacaatctggagaagaacggctttccagttattttcgacagtacacatttggctatgctgattggaatcaaagtgaaggagctttactcctattacgagctggcacagtctctgtacaagaagattatcatacctaagaagacaggcggtaacaggattctgaatgccccctgtgaaaacctcaagtatatccaaaagtggatactagataacatcctgaacaatagcgagagccttgacgtttctaccggattcgtgcaagggaaatctatcgtggataatgccaaacagcatattggtaaagaatgcgttattaacttggacatcaaaaacttcttcccgtctatcagatacatccaaatctacaacatctttcgctcgttcggctataccagacacctctgcatggtgtttactggtctttgtacgtacaaaaatgtactccctcagggagcaccaacatcacctctcctctccaaccttgtatgcaaacgcctcgatactaaattactggatctggctaatcacattggcgcatcctacactaggtacgccgacgacattacattttcaggggaaaaggtcataaccaagtacatcaagttaataaagcgggtgattaaggaagagtatttccaggtaaatgagaaaaaggtgcgggtgcagtttaaacaccaccgtcagatggtcacggggctggtcgttaataccaagttgtccgtgcccaaaaagaccaaacgatatttgaggcagcagatctactatgcgaagaaatacggggtcaacaatagtttagaccggcaagaagtgagcaagagcaattatgagggacatctctttggcctggcttatttcataaaaatggtcgagcccaaaaacggcgtggaattcatcgaacagctgaagcagattgattgggaatcatga

SEQ ID NO: 9988 - RNA, 1008 nt, synthetic construct
  source 1..1008: mol_type = other RNA
atggacatcatcaaactggagcagtcaatgcgacttgaaggccatagggccgactatattaagctctgcaaggactacgcgatcaatctgaaacggaatgaactccctgtcatttttaacatcgaacatttggctaaactgattggaattaacgccgacgagtgctatgcatactaccaactatcctctaacttgtataacgagctcttgatccccaaacgcacagggggacaacgcgttatcaacgcaccaagcgagaatttaaaatatatacagcggtggatactcgacaatatattgtcaaacgtttcgattagcgtccatgctaatggtttcattaatgagcggagtatcgtgactaacgctatacagcacatcgggaaaaagtgtgtgataaacctggacatcaaggacttcttcccaagcattacctacatccaagtttacaatctcttcaataggctcggctattcaagacatcttagtatggtattcacaggtctgtgtacacttgataacaaattgccccaaggagcccctacgtccccctacctgtctaacatcatttgcaaaaatctcgatgatagactgagcctgttagctagtcacattaacgccagctactccagatacgcagatgacatcactttttccggcgatagagggattacctcttatatcaagctgatcaagaaggtagtccaggaagagcgttttcttataaacgagaaaaaagtgcgagtgcagtttcagtaccacaggcagatggtgacaggtttaattgtgaacgaaaagctgtccattccgaagaagacccgcaattacctgaggcaggaaatctattactgtcagaaatatggggtcaaggatcacatgagcaaaaagggcctttacaagactaattatcagggccacctgaccggactagcccagtttattaagatggtggattctaagctgggcgaggaatatctgaagtccctggacaagatcgattgggagtcatga

SEQ ID NO: 9989 - RNA, 1137 nt, synthetic construct
  source 1..1137: mol_type = other RNA
atgacactgtttaggagagctttaaacaaagtgataccgcagcgccgcagcttttggggaatgcgtaagaagaagccatctagtgtagtcaattggaaagagcccgtcgagaacattttagaacgaaaaatggatctgcagaagttatacgaggaattgcagaatggcaatcatgacgaagactatactgagctctgcattaactacgcccggactcttctaaacaacggcatgagtgtgatattcgacaccgatcatctatcgaagctcattggaattagctcccacgagctgtactcttattatttgtttgccaacaatctctacaccgaagttaagctccctaaaaagaatggatctttccgcacaatcaatgctccctctgagaacctgaagtacatccaaaagtggatcctcgacaacattctttacaacaagaactgtagccactttgcaaatggctttatcaaggacaagtcaattgtcgataacgccaggccacacgtcggcaagccttgcgtgattaatttggatatcaaagacttcttccctaccatcaagtacatagacatctacaaacttttcaagggcttcggctatacatcccatctgagtatggtactgactggactgagtacgtataataatgtgcttcctcaaggggccccaacgtccccctatctgagcaatttgatctgtagaaatctggatgtcaaattcgaaagcctcgcgaaccggatctccgcttcatacaccagatatgccgacgatatcaccttctctggagagaaaagcattactaagtacatcgcacttataaaatccatcatcaagtccgaagggttcaccatcaatgaaaagaaagttagggttcagtatcagtaccacaaacagatggtgactggtctgattgtgaatgagaaactgtcagtgccaaaatcaacaaaaatgtacctgcggcagcagatttatttttctattaagtacggggtgacaaacaacttggagcgacagaacattaataagtcgaactacaaagatcacctctacggtatcgcatattttataaagatggttgaacccctggtgggtgagcaatatatcaaacaactgaacgggatagactgggagagctga

SEQ ID NO: 9990 - RNA, 1014 nt, synthetic construct
  source 1..1014: mol_type = other RNA
atgaacaattatatatctacgctgactgacaggatgattaaggaagggtatgagactgattatattaaaacggtcgtaggatactctgaacgactgatgcagaaagatctgccagtgatattcgacctggcgcatctggctctgtaccttgatgaatccgaagagacactatccgaaatggttaataacagcaccagcttctactccaaggccaaaatcaaatctaaaaagggtaaggtgcggaacatttatatcccttacgagaagcttaagaaaattcagatttggatcctctacaagatcctgtataaagtagaaacacccaagtgtgtaaaaggatttaaattaggcagttccatcgtcgacaatgccattccgcatgttaataaaaactacgtgttgaatctcgactttaaaaacttctttgagacaatcaaggagaaacagatcatcaccgttttcaccagcttggggtacaacaagatcgtgtctagtgccctgtcaaagatctgtaactacaacggaagtttgccccaagggtccccctcttcaccatacctttccaatctggtctgccggaacttggacaataagataatcgagctgattaagttcgaggatgtgacatatactagatacgctgatgacctgactttttcatcaaaccaaaagcttgactctctgatacctcttctcgaagagctcattgtgagcgaaaaattcaagataaacgaaagtaagacccgcatgcaactcaaaaatcagcgccagttggtgaccggcctggttgtcaatagccaggtcagtgtgcctcgtaaatatatcagggagctaaggtcagagatttactattgcaagaagtatggcgtgagcggccacatggacagaaagggcattctgtacagcaattacaagctccacctctatggtaaagcactgtacatcaagatggtggataaatccaaaggggagtcgtttttaaaggagttagataagatcaactggcagtattga

SEQ ID NO: 9991 - RNA, 1014 nt, synthetic construct
  source 1..1014: mol_type = other RNA
atgtcccaactggaagagttgaaaaagctggacatacctgtgttctgcaacctggaagaactccgcgagaacatcggaactaacaagaagttcttctacaaagtactctattctcacaacaagctttataaggaaatcactattcccaagcgcaatggagggaaccgggtgctcaacgtgccaaatatcgcattaaagagcatgcagcgatggatcctggacaatatactgtataaagtgcagagtgatccatcagcgaccggcttcatgcctatgaaatccattgtcctaaatgctagcatccatctgaagaagaagtacatattgaagatggatatcaaggactttttccctagtattgatttccgtaaagtgcgcagccttttttttgaactgggctacaataaagacgtggccacggctttagccaatatctgcgtgtttaggggacagctgccgcaaggtgccccaacatccccctacttggctaatctggtctgtagagagcttgataagaggattgacaatctctgtaggaaatatcgtctctcatatacccggtacgcagacgatattaccatttcgggaaatagtaagatcttctggattaagggtatagtcgaagaaataattaggtcataccagttttccctcaacaacgagaaaaccatctttttaaaacccggggaccggaaacgagttactgggattatcgtaaacgagaaacttagcgtccccagaagcgttaccagaaacttgcggaaagagatctactttatcaagaaattcggcctggaggagcacctagataagaattccttcaccggcagcaaagaacagtacatcgcccacctgtatggggttgcctcatatattaagatggtggagctgacaaagggcattttcttcattaaccagctgaactctatcttttctgggaacgagcagctggaaacaggcaaaaatctccatatagagtttgcatctatcgactggacaatctttggtgagtga

SEQ ID NO: 9992 - RNA, 1023 nt, synthetic construct
  source 1..1023: mol_type = other RNA
atgtcagagaagatcaatctaactgtcctttcaattgagagtattacctcccttgaagatctccgcaagaaaatgggggtgaagaaaaagtatttctaccgggtgttgttcagccacgataagttttacagggagatcgaggtgcctaagcggaaatctggtcaattcagaaagctgagtgttccatctatggcgctgaagaatatgcagaggtggatactggacagtattctgtacaaaatcagcgtgaatgaaaatgcaatggggtttgtgccctcaaagagcatagttactaacgcttacaaccatcttgccaagaaatatatcctcaagctggatatcaaagattttttcccttctatcggatttggaaaggtgttggacattttccaaaagctcgacttcccggcagaaatctctagtgctctggccaacatctgcatctacaaggacgagttacctcagggcgcccccacatccccatacctcgctaacatcatttgtaaacagatggacttcagaataggcagcctctgtaagaaatacgagttgaattatacgcgatatgccgatgacattactattagcggcgacaggcgcgttttttggatcgagaaacagattgagaagatcgtaaattcatgccatttcacactgaacaaagaaaaaaccgtccggcttaaacccggggataggaagcgcgtaaccggaataattgtcaatgaaaagatctctgtgcccaaaaatataaagcgtaccttacgacagaacatctactacatcgaaaagtatgggctggagagccatctggacaaaattcagtttacaggcttgtccaaccagtatataagacacctctatggcatggcatcctttattcagatggtggagattgaacggggtattgaatttatcgataagctgaactccttattcaaccaaaaaaacgatacagactaccagattagcgaggatgatctactgtcgttcgaccacatcgactggtccatcctggacatatga

SEQ ID NO: 9993 - RNA, 1026 nt, synthetic construct
  source 1..1026: mol_type = other RNA
atgaggcacctcgatttttcgttttctaatgaaaacatcccagttttctcgagcttggaggaccttcgcaaaaagatgggcattagcactgcttttttctataaggctatattcgcgagcgacttcttttataaggagatcttgattcccaagcgcaaggtggggaaatttcgaaccctgaaagttccacccgtatttcttaagaatatgcagcgatggattcttgacaatatcctgtatttcatcagctgtcatagaaatgcaaccggttttatacctaacaaatctatcgtggacaatgcactggtgcatgtcaggaagaagtacatcttaaagatggacatcgaagatttcttcccatctattaacttctacctagtgcgggaagtattcattaaaatgcactactccaaagtgatctcaaatgccctggcctcattgtgtatctgcgaagggcagctccctcaaggcgctcccaccagtccatatatcgcaaatctagtgttcatcgacattgatattcgcattagccagttatgcctcaaacataacctgaactattccagatacgccgatgatataactatttccgggagttccaatatcttttgggtgcggaaagttgtcgaaaagatcctgaaggagaagaagttcaaggtgaacaaggataagactgttattatcaaacctggcgataaaaagcaggtcacgggcctgatagtcaatgatcagctctcagtgcctaaaagcacaatccgggagctgcgtaagaacatctactacattaaggagtttggaattgacagtcacctcaacaaaataaagtacgagtatgccaaggaaaaatacattgactccctgtatggaacagcctctttcataaaaatgatctcaccggaaaaaggaatcaacttctttaacgagctgaactctatcttcagaaggggtaaccagtacaattccgagcagatagaacccagttttattgactttagcgagacacaatggaccgtcttcgagaattga

SEQ ID NO: 9994 - RNA, 1218 nt, synthetic construct
  source 1..1218: mol_type = other RNA
atggacgaatctagctatttgtccattaatggatacaagtacctgagtctttatgaagccccactgcccataacacgggcaaagttctgtaaatttcttccatggggtgtcctactgcgaggaggcccccaaccccattgtcccaccggaaagggtttctataaagtgaagctggtgctggtgactcaaaaacgctttaatatgatcaagttcgacaagatcatctctctcgacatccccgtgttcctcaccttagaagccctgcgcaagaacatcgacattgacaagaaatacttttaccgcactctcttttatcgcaacaatctatacaagtccatccagattcttaagaagaacggcagcgattataggcagattaatgcacctatcttacccctgaagaggatacagcggtggatcctggagaacatcctctataaaataccaattgaggattgtgcccacggctttgttagggggaaatcaataattaccaatgcttatccacacgtcaactctaagtacatcttgaaaatggacattgtggatttctttccttctatccactttggcttgatcaagaaattcttctacgatttaggatactctaacacgatagcatgtgccctggcgaacctatgcaccttcaattcgcagctgcctcaaggtgctccgacgagtccgtatcttgctaatattatctgcattgagatggacaaacgtatccaggggctctgcaaaaaaaacagactgaaatacacacggtatgccgatgatataacaatatccggcaactcaaatgtattttggatcaaggacattgttgaaaagatcgtgaactgctacgggtttcagattaatcagaataaaaccgtggtcatcaagccaggagacaggaagaaggtgactggcattattgtcaacgagaaattgtccgtccctaaaagcatcgttagaaaattgcgacaggacatctactacattaaaacctttgatctggagagccatatggaaagaatcagtttcactgggacaaagcaacagtacatttcacagctttacggggtggccagctttattaagatggtagacatagacaagggcctgtattttatcagtacactggatagcatcttcaagcctttctcaccttccattgctgaggttgatctcgagctcgatgattatttcgacaatctcttcaacgacctgttctga

SEQ ID NO: 9995 - RNA, 999 nt, synthetic construct
  source 1..999: mol_type = other RNA
atgaagtataaagtagaagtgtttcctgcgattgattctattgaggatctgcggaacatgatcggtgtgcagagcaattatttctataagtgcctctactccaacgaatacttctataagaccgttaagatacccaagagaaggaatgacgaatacagagagcttacaattccaaccatggctttgaagaatattcagcgttggatactggacaatatcctctacaaatttagcgttcatccatgtgcaaaagggtttgtacctggaaagtcaatcattgataatgctatcccacacattaacaaaaagtacgtggtcaaaatggacgtgaaaaattttttccccagtatctcgtttaaggatgttaggatcctgtttttgaacctggggtacaaaatcgaggtcgcaattgctctggccaatctatgtacctacaagaacacattacctcaaggttcacccacctctccctatatagccaacctgatcttctacaagatcgacaaaagaatatccggcttttgcaataagaacaaccttacttatacgcggtatgccgacgatattactatctcaggaaagtccaacatctctttctccattaagattatcaaccagatcctgacacagaaccgatttgagctcaacgacaaaaaaacaaaagtgctcaagccgggcgatcgcaaaatcgtcactggcattatcgtgaatgaaaaactgaccattcctaaagatttcatacgcaatgtcaagagggatttgtattacattaaccggttcggcttgttaaatcaccttaacttcatcagcatcgccgaggacaatagtgaatactatctgaacagcctttctggcaagattagtttcattaagatggtggactacaaacagggatacatactccaaaatgagctagacaacattatcgggtataatgacaagcatgaggaaaagtacatcgatctggaggatatagacatcaagtgggagaaactgtga

SEQ ID NO: 9996 - RNA, 942 nt, synthetic construct
  source 1..942: mol_type = other RNA
atgataggcattaagtccgattatttttacaagtgcctgtatagcaatgagtacttttacaagactgtcaaagtgccaaagaaacgcaatgatggttacagagagctgacaatccctaccatggcattgaagtctatacaacgatggatccttgacaatattctttacaactttcccgtgcatcattgtgctaagggcttcattcccgggaaaagtattattgataatgctatccctcacatcaataagaaatacatcgctaagatggacattaaaaacttctttccttcaatctctctgaaggacgttataatgctgtatctgaatttgggctataattataaggtcgcaaccgcccttgcgaatctttgcacttacaaaaatcagctcccccagggatcgcctacttctccgtacattgccaacttaatcttcttcaaaatcgataagcggatttttgggttctgtaaaaaaaactacctcacgtatacaaggtatgccgacgatatcacaatcagcggccgtacaaacattgcctttagcatcaagataatcaaccagattctcaaccagaataaatttgagctgaacgacaaaaagaccaagattctgaaacccggtgatcgcaagatcatcaccggaattatcgtgaatgagaaactgaccgtaccaaaagatttcataaggaatgtgaagaaggacatttactatatcaagaagttcggcctagcctcccacctaaacttcatagatttcccaatcgaaaacagtgaatattacctcgactccctgtatggaaggatcagcttcataaagatgattgactacaagctggggaacatgttacaaaacaagttgaacaacttcatcgactactcaaaacggagagaggaaaaatatattgatctcgaagacatcgacattaagtggaaaaaactgtga

SEQ ID NO: 9997 - RNA, 996 nt, synthetic construct
  source 1..996: mol_type = other RNA
atggtcaacaagacctatttggcaataaactcactcgaggagctgcgaaacatgatcggcattaaaagcgactatttctataagtgtctctatgtgaacgaccacttttacaatgtcattaagattcctaagcgcaaaaaagacgagtacagagaactgatgatcccaaacatggcattgaaaaatatccagaggtggatactcgataatgtcctttatagacgccaggttcataaatgtgccacgggatttgtgccacgcaagagcatagtcaataacgctattcctcatgtgggtcaaaagtatatcctgaaaatggacatcgagaatttcttcccttccattacctttaagcaggtgcgtaaaatcttttccgaaatgggctacaaatttgagctggccaccgctttggctaacttatgcacagtgaacaaccaattaccccagggggccccaacttccccctacatagccaacatcatcttttacaacatcgataaaaggatcttctcttactgccagaagaataatctgagatacacccggtatgcggacgacattacaatttcgggaagtaataaggtatctttcagtaaggagatcattagggaaatagtcaatcagtataacttccggatcaatgagtctaagactatcatgtttaagccgggtgacagaaagaaagttacaggcatcattgacaatgagaaaattagcgtacccaaaactctgattcgggaagtgcgaaagcagatttacttcgttaataaattcgggctggaggaacacctcatacggaataactattcacttgattacgagcagcaattcattatgtcaatctacgggaagatttccttcatcaagatgattgactttaagaaaggagtgagcctgcagaagaagtttaatgaagtgcttggcaacatagaaagttctaacatgtacagggataacatcgatttcgatgatatcgaactacactggatcaattga

SEQ ID NO: 9998 - RNA, 948 nt, synthetic construct
  source 1..948: mol_type = other RNA
atgaaattaatcgacaatgggctggacgatctttcccgcccggtcttcctctgcacaaaggatatacaacaggccattggaatagaccctaaaatcttttataccttcctcaaccctaagaacatttcctacatcaagatcaagattcctaaacggaaaaaaggtgaatatcgagagctgtctatcccaagtccagcactgaaaaacctccagaggtgggtcttggagcacatactgtactcattcccttgtcatgggtccgcaaacggctttattccgaacaaatcaattgtgacgaatgctatcccccatattagcaaagagtacatcttaaagatggacttaaaggacttcttcccaaatatcacgttttccatggtgaaaaatcagtttttgacaatggggtacaatgaccacgtgagtcactctttggctctgctgtgcacatataatgattctctaccccagggtgcccccagctcaccttatctcgccaatttgctcttctcaccctttgacgagctgatttacactcactgtagcaagaataacctgtcctatactagatatgccgatgacctcaccatcagcggcgggaagtacattctgaatattccacagtatgtgaaagacatactgagggatagtgactttcagatcaacaactctaagactctaattatcaagaagggcgacaagaaacaagtgaccggaatcgttgttaacgagaaaatatccatccccaagaattatctcagagaacttcgtcagataatctattacatcaacaagtatggccttgattctcatctgaagaagattgattacaaaggaagcaagtacaagtacattaacagcctgtacggcaaagcgagctacattaagatggtagatttcaagaaaggaatcaagatcttcaccgaactgaacaaaatctcgcttgattga

SEQ ID NO: 9999 - RNA, 1002 nt, synthetic construct
  source 1..1002: mol_type = other RNA
atgtcctccgataagaacccactgtccctcaaggaggagtggtccgctgaagacatcaagaaatacagctccatgttgaaacgcaacaatgttccggtgatttttgatacagaacattttcggaggctcttaggactggagaaaaccgacttttacaacattctcttcaagctggagtatcaataccacgaagtcgaaataccaaagaaaaagcaaggggagttgaggacactattccttcccagcattaaactgaagtatatgcagcgatggatactggacaacattctctacagccaagagtgtaataatgaagtgacaggattcgttcccagcaaaagtataattgataatgccaagcctcatattgggcagaaatacatcctgaaacttgatattcaggacttctttccttcaatcagcaagatccgagtttttctgatgtttaagcacttcggatatacgaatgacctgtctaacactctatcaaacatttgcatctacaagaatgagttaccccagggcgccccctcaagtccatatatcgcgaacctcatctgtaagaagatggataatcggtttctcggcttgtgcaagaaaaacaacctgaagtatacccgctatgcagatgacataactatttctggcggaaagtctgtgtataagttcaaacagttcttcatcaacatcgtgaccgacgaaaaattcttcgtcaacaagaaaaaggtgaagcttctgaaaaacggggacagaaaacaggtaaccggtattgtgatcaacgagaaactgtctgtccctaagaatgtgatccgggatctcaggagagacatctactacattactaagtacggcctgaatagtcatctgaaacgtaccggcaatatcgcctcatcgaattataaagctcacctgtttgggaaagctaagtatatatacatggtagacagagagaagggtgccttgtaccttgaacagttagatgcaatcgattgggagacatga

SEQ ID NO: 10000 - RNA, 999 nt, synthetic construct
  source 1..999: mol_type = other RNA
atgaactcagacgacaaactcagtaaactgaaggaaaactggaccgctatggagatcgaaaactacagctcatctctgaaaaaaaaaggggtaccggtgatctttgacgttgagcatttccgcaggctcctaggcttgagaagcgaggacttttacagtatattgttcaagctcgaataccattatcacaaactcgagatccctaagaaaatcgtggggacttatcggcagctcctgctacccagtatcaaactgaagtatatccagcgatggattcttgataatattttgtacacccaatcctgcattacagaggttacaggttttattcccggaaaatccattgtgaataacgctagacctcaccttaagcagaagtatatcttgaaactggatatcgaggattttttccccagcatagacgagaaacgagtgtttaacttgttcaagaactttggatacacgaaccggctggcaaggaccctttcgcggttctgttcttatgaaaatgaactgccacaaggtgctcccagctctccatacattgccaatctgatatgcagaaagcttgatgcccgtctgactgcactgtgtgccaaatatgccttaaattatacacgctacgcagatgacatcaccatttctggcggaaggatggtgttcaaactgaagaagcacatcatcaacatcatcagcgacgagaacttctccattaataagagcaagattaagctcctcacagccggggatagaaagaaaataaccggaatcatcgtcaatgaaaagttatccgtacctaagaaagtcgtgcgcgaactgaggcaggagatttattacataaagaagttcaacctggagtcacatatgaagaaaactggcaacgtctccaagtcaaattataaggggcacctttttggcattgcgaaatacattttcatgatagacaaggatctgggtacctactacctggataagttaaatggcatcgactgggaatga

SEQ ID NO: 10001 - RNA, 984 nt, synthetic construct
  source 1..984: mol_type = other RNA
atgaagaaatggaccgatcaggatatcagagagtataggaacaaactggaggctaatggagtgcccgtcatcttcgacctggagcacctgcgtagactcatcggcatcgagaagaagtacttttacaaggtcttctacaaactcgaataccaatatcgcgagattactatccctaaaagaaagccagggcagtttaggatactctcagttccctctcgtaacctgaaacttattcaacggtggatcctagacaacatattgtattgcatagagtgcggcgagattgtaaccggtttcataccactgaagtctatcgccgacaatgcaaaaccgcatacgcagaagaagtacatttataagttcgacctgaaagatttcttccctagtattcctcgcaggaaggtgtactatctctttagaaacctgggttattcatcagatctcagcaatgctttggcgacactttgttgtttcaataactatctaccccagggagctccgacaagcccatatattgccaatatcttatgcggcaaattagaccggcgaatcaactccttttgtcagaagaacaactttacctacacacgctatgcagacgatcttaccatcagcggggacgaaaaactcgtgcactacaagagtctgttccgaaaaattatcaatgacagcggcttctgttttaatgaagataaggccaggctgattcgctgcggtcagcggaagctgattacaggaatagtggtgaacgaaaaagtgactgtacccaggagttatgttcggtcgttgaagaaagaactgtactacatccataaatacgggctgaagggacatttggagcactgcgatattaagactcctccaaatatatactccaaggaaatcattggcaagatcaatttcatctccatggtcgattctaaactgggggaagagtttaagtccttatttaaggacgcccttaaaaagaacaaaattttttga

SEQ ID NO: 10002 - RNA, 960 nt, synthetic construct
  source 1..960: mol_type = other RNA
atgaactggacagaggagaatatcactaattacaagaacaggctcatcgaaaagggagttcccgtgatttttgatattgagcactttaggcgcctcctcggaatcaagaagtcttacttctacaagctgttttatgggctgaaataccaatacaaggaagtcgaaataccgaaacgaaagataggtgagtatagaaaattgacggtgccatctaaaaacatcaagaaaattcagcgttggatcctggagtttatcctgtactccaacctgtgtgatgattgcgtaactggatttatccccaccaagtccattgttgaaaacgccctacctcacatcgggcacgactatatttacaaattcgacttgaaggacttctttccctcaatacctcggagcaaagtcttttatctttttaaagacctgggctacacggctgagttaagcaactatttggccagtttctgttgctataatgactgcctgccccagggagctcctacctcaccatatattgcaaatcttgtctgtaaacgccttgataagaggctgaagattctgtgcgagaggaacggctttacctacacaagatacgccgatgatatcaccattagcggcgacttcaaaatcgtgcatttccgaaacttatttgaaaccatcatagaagactcgggtttcattataaatgagctgaagactaagctcatccggaatggccagcggaaaatagtcacaggcgtcgtggtaaatgaaaagccaacaattagccgcgagtacgtgagggagctcaaaaaggagatctacttcatcaataagttcgggattgaaaaccatatgaagagaattggggaggcgggtagtgtgaaggactatcgacgcaaaatctatgggaagatcaacttcgttaaaatggtggatcgggaactgggcctagagcttcgtagaaaagtgaattccttctga

SEQ ID NO: 10003 - RNA, 1074 nt, synthetic construct
  source 1..1074: mol_type = other RNA
atggacttggaccttttgaagagcaagttgatcgaaaagaacattccactcaatgacattgaagcaaccattagttacgcgcagaccttaaaaaataacggcgtgcctatcatcttcgatatgcagcacctccgacgccttctcaaattgacggagtccgatttcaaaagactgtactatgccagggatctacagtatcggacaatcgagatcccgaaaaacaatggttctggaacaaggaccctgagcttaccctccatagacctcaaatacatacaacgctggatccttgacaatattctgtacaacgtccacgtacatgagtacgcaattggctttgtcactggcaaatctactgttctgaacgccagccatcacatcaatcaggagtatgttctgaaaatggacattaaagacttctttccaacaatatccggcggccgagtttatggactctttaaatgcctgggttacagcagcagtgtggccctgactctaactaacttctgtatctaccaaaatagcctgcctcagggagcccctacctctccctatatttctaatctcgtatgtaggaagctcgaccaaaggttagagcttctgagtagaaagcgtaagctgaagtatacccggtacgctgacgatatgactatctctggggggagaaagatcaagaaaacgataccatatgtgaagcagatcatagaagaagagggatttcggtgcaatgagtccaagacaaaactgatttacaagtcaaaccgccagcaaattacaggcatagtggtcaatgaaaagctgtcgatccccaaaagtatgtttaagtcactgcggcaggaaatctactatatgaagaaattcggggtgtcatcccacctggataagaaggggcttaagcataagtcacatgtgaaggagcactactttgggctggctaactatattatgaaggtggacagagagaaaggtaagcagatcttgaacgatctaaacgctattgattggatttccaaatctcacaaaggaaataagcagttcaccgcacaggaaaaaaacaaagatatctacgagtga

SEQ ID NO: 10004 - RNA, 1005 nt, synthetic construct
  source 1..1005: mol_type = other RNA
atgatcgaacgcaatgtccctaatgaggagatcgaaagcacgctgagttatgcccacattctgcaggaaaacggcgtgccgattatctttgacagccagcatttgaggcggcttctcaaactgacagatactgactttaagcggctctattactccaaagagatgcagtatcggactcgggagattcccaaaaacaatgggagcggcaccagaacgctgtgtattcctagtctggatctgaaatacgttcagcgctggattctggataatatcctgtacaaagtgaagataaacgagcatgctattggtttcgtgaagggaaagtcaaccgtctccaatgccgggtaccatatgaatcaggagtatgtcctgaagatggacatcaaaaacttcttccccactatttctaattctagggtgtttggactttttaagtcactcggctactcaagttccgtagctatgactctcacaaacttctgcacatataataatgagctaccccaaggctctccaacctccccatacatctctaacttagtgtgccgtaagctggaccgacgattggagctgctttgtcggaccagggggctacagtactcgcgttatgcagatgatataaccatttctggaggtagaaaaatcaagaagaccataagtttcgtccaaagaatcctcgaggaagagggctttaagaacaacgagaacaagatgaacttaatctacaaaagcaaccgccagcaggttacaggggtagttgtcaatgagaagttgtccgtgcctaaagtgatatacaaaagcctgaggcaggaaatatattacatcaggaaatatggccttgaatcccacttggacaagaaagggttaaatagaaagtcacacgtgaaagaacactactacggactggcgaattatatgatgatgatcgataaggacaagggacaacaattcattaacgaactcaacgccatcgactggaagcgcaagagcctcggtagagactga

SEQ ID NO: 10005 - RNA, 1071 nt, synthetic construct
  source 1..1071: mol_type = other RNA
atgaaggacagcatgggttccgttatctatgctctgctgaacaagaaagacggaaaaatggacctcgccatccttgaatctaagatgattgagcagaacattcccaccatggatatcgagtcaacaatcagctatgcaagggccctgaaagacaacggcgtgcccgttatattcgacattcagcacctgcgaagactgctgagaattaccaagtccgattttaaacgtttgtactacgccaaaaagaatcagtataagaccgtggagataccaaagaataacggaacgggatctagattgctgagtatcccctcaatcgacctcaagtacatccagcggtggattcttgacaacatcctgtacaaggttgaaatcaataacctggccattgggttcgcaaagggcaaatctgtcgttgtgaacgcttcataccatataaaacaagagtacgtactcaagatggacattaaggacttctttcctaatattacagcaaatcgcgtgtttgggctcttcaaaagcctgggttattcatctagcgtggccatcacacttacaaatctgtgtacgtataatgattccctgccacagggagctccgacctccccttacatttcgaacttaatatgtcggaagttggatagtaggctaaagaatctctgccaaaagaggaatctgaattttagccgctatgctgatgacatcaccatcagcggggggaagaaagtcaaaaatactattccttgcgtggaaaagatcttggaagaagagggctttaacgtcaacgagcagaagactcggatcatcttcaaatctaagagacagcaagtgactgggatagtggtgaacgagaaactcagtgtgccaaaaagcatttacaagaacctaaggcaggaaatttactatatgtcgaagtttggcgtcgagagtcatcttgataaaaagggcctcaaaaacaaatctcacgtgcgagaacactactatggtttagcgaactacttcctgatggtcgatcgcgtaaagggcgagaaagtattatccgagcttaactccataaattggaatgattga

SEQ ID NO: 10006 - RNA, 1011 nt, synthetic construct
  source 1..1011: mol_type = other RNA
atgaatttggaggtactcgaaagcaaaatgtccgaggagaacatttccttggaagaaatcgagagcaccctttcctatgccagaaatctgaaggaaaatggcgttcccgtcatctttgatatccagcatttgcgcaggctgctaaacctgaataagactgatttcaagcgtatatactacgcacgacagcatcagtacaatactatagagatcccaaagaacaatggcaagggcactcgaaccctctcaatcccgagcttagatctcaagtatgtgcagagatggatactcgacaatatcctctacaaaatcgaagtgtctgagtacgctaatggatttgtgaaggggaaatccgtcgtcaccaatgccaactatcacgtcaagcaggagtacgtgttaaagatggacattaaagacttctttcccacaattaccgcaggtagagtgtttggtttgtttatgtccatcggatactcttctaacgttgccatagtcctgacgaatctttgcacatataacaactcaattcctcaaggtgctccaacttcaccctatatctctaacctgatttgtagaaatctggacctgcggcttagtctactgtgcaataagcggaacattaaattcagccgctacgctgatgatatcacaatttcgggcggaaggaaagttaagaagaccattcctttcattcggaaaatcataaatgaggaagggtttatcgtgaaccaggagaaaaccaagctgctgtacaagtcagggaggcaacaggtgacaggcattgttgtgaatgacaaactgagtatcgcgaaggaaattttacggaaactgaggcaggacatatactatatcaagaaattcgggctcaatagccaccttgagaaaaagaacatgatcaacaaaagtcacgtgcgcgaatattattatggaatggccaactacatcctcatggtagatcaaaacaagggccagaaactgttcaacgagctgaacaagattaactggaaatga

SEQ ID NO: 10007 - RNA, 1014 nt, synthetic construct
  source 1..1014: mol_type = other RNA
atggatctgagtatcctcaaacaggagctgatgtctagagatttaaattctgtggacgtggaattcatcataagttacgcgcagtccctcctggacaaggacattcctgtgatattcgatctcgaacacctgaggagactgttgggactcaagcggagcgatttcaagcaggtctactatgccaatagcaaccaataccacaacattgagatccccaagaacaacggatcgggaactcggaaactgtctctgccttcagataaactcaagaaagtccagagatggattcttgactacatactgtacaatttcgaggttaacgagaaggctaccggctttacactagataaaagcatcgtgaccaatgccaacttccatactaaccaaaagtttgtgttgaagatcgacatcaaagacttttttccgacaattacgagcaacagggtgtatggtctgttcaagtcattcgggtataacaattcaatcagcctggcacttaccaaattatgcacacatgagaattgtctcccccagggcgcacctacttctccatatattagcaatctgatctgccgccaccttgatattcgccttaacgggctagccaagaaaaacaacctcaatttttccaggtatgctgacgatattaccttctcaggtgaattcatcccctccaatatagtcgaaatggttcaatggattctgattgaggaaggcttctggatcaatgagttaaagacaaagttgctgaacaagagtcagcgacagaaaatcaccgggatcatcgtgaaccaaaaactctctgtgccaaaagaaataactaaaacattgcggcaggaaatctactacatgaagaagtttggggtacagagtcatctggagcgaaaaaatctgcagacgaagaccaatgtaaaggagcactactttggccttgttcgttttattctaatggtcgacaatgaaatgggcaaaaaactgtcctatgagttgaagaagattaactgggactcctga

SEQ ID NO: 10008 - RNA, 1149 nt, synthetic construct
  source 1..1149: mol_type = other RNA
atggatttgatactgctggaacaagagttaaaggccatggagctggacaacgacatcatcaacaactacataagttacgcgagcaacctcaagaataataatgtgcccgtgatttttgagttggaacaccttaggaagctgcttcacatcagccgtgaagagttctttggcatctactatagtatcaagtaccagtaccatacgatttatattccgaagagcaaaatcaagtacgaaaccaacaaagggattacccgccagagtaagaagtacattctgcccaaagtctactacgacaacgaggttaggcacaagttcaagcgctataataaggtaatcacagacctaacaaacaacaaatcctcttactatcgtaaactggaccttccctcaaaaaagctcaagtacatacagcggtacattctggataacatactgtatcgggtggatgtgcataatgccgcacacggctttgtgcctggcaaatccactatctcgaatgcaagagtacatgtcggtaatgagttcgttgccaaactagatatgagagacttttttcctgctatcaccgcacagcgagtgtatggattgttcagatctttcggctacaataagagcctttcattcacactcacaaaggtgtgcacttacaatggaagcctgccacagggagctcctacttctccctacatatcaaatctgatttgtcggaagttggattacaggattagcaccctgtgtatcaagaacaacctcaatttctcacggtatgctgatgatattacgatttctggggggaggaaggtgaagagagtcctgccaatcatcaaagacatcattaagaacgagggatttcgaataaacgacgagaaaaccaagatcctccacaactcccataaacaaaaggtgactggtgtggttgtaaaccagaaggtgagcattcctaaatccttttatcgcaatttgcgccaagaattatactatatgaacaaattcggcgtctcctctcacctgctggaaaaacagacaatgtttaagtccaataccaaagcctattatttcgggctggttcattattgctatatggtcgacccaatcaaaggtgaaaaacttttacagctcctcgagaaaatcaattggaatagttga

SEQ ID NO: 10009 - RNA, 999 nt, synthetic construct
  source 1..999: mol_type = other RNA
atgtggactaaggaatccatcaaaatttatgaacgccagctcgaaagtaataggctgcctgtgatctttaatatcgaacacctgcggcgtcttattggcgtcgagaagaaatacttctataagctgaccaatagcgtggatgcatcatacatttccaggtttatcgacaaacggaacggcggtaagagaaaactcctgataccagggtttaatctgaagcttatccagacctggatcctccataatatcctgtacacacagcctgtgtttacatctgccactggcttcatcaagcagaaatctattatcgataacgccactccgcatatcggcaagaagtatattttcaagaccgacatttctgatttcttccctagcataaagtttaagaacgtattcctgcttttcttgaattttggatacacaaaggaggtgtccaacgtgctcgccatactctgcacatatgaagggtatctgccacagggagctcccacgtccccctatttgtcaaacctgatttttcgagacttcgacaagaaattagagaatatctgtagtctcagcgagtataagtataccagatacgctgatgacattacgataagctccaatgaaaaaatcagctctatcgaggtcgattacctgtcgaaaactatcgagcagagcctccaaactatcaataacttcttgaagttgaacctggacaaaaccacagtattaaggcccggtcaacggaaaattattaccggcgtgctagttaacgaaacactgaatgtcccaaaaaagatactgtcagagattagactagagatttactgtctgcagaagtacggggcctcaaaccgcatcgaggcatataaccagaagcacaataccaacttagataaatacagttaccgacagaaactttatggaaaaatctgcttcgttaacatgatcaatcccaagaaagcggaaaagttctacgagcaattttacgacattaactggataaagtga

SEQ ID NO: 10010 - RNA, 999 nt, synthetic construct
  source 1..999: mol_type = other RNA
atgtggacggaggagtccatagagaactatgaacgtttgttagagagcaaaggtctgccagtgattttcgacgtcgaacacctccgccgactcatcggcgtgaagaagaaggatttctacaaattgacaaacagcattgatgcatgttacacttgtaggctgattgacaagcggaacggggggaagagggagctacttataccctcgttcaatctgaagattatacagacctggattttgaataacatcctgtacacccaaagcgtctccagctcagctacaggcttcattaaaggcaaatctatcgtggacaatgcagagccacatatcgggcataagtacatcttcaaaaccgatatcctcaacttttttccctcaatcaaactacgcaatatcttcctgctatttttctactttgggtacaccgtagaagtctcttatatccttgccagcctgtgcacatatgagggatatctgcctcagggcgctcctacctctccctatctcagtaacctgattctgagagactttgacattaagctgcagaatatctgctcctcactgaattatacctacaccagatatgctgatgacattactattagttccgacactaagatcactaagttctacattgagtacctgctcgataccatctctcagctcctgaactcaatcacatactttctcaaactcaacctggacaaaactaaagttttacaccctggacagagaaagataatcacgggcgtgcttgtgaataaacggcttaatgttccaaaggaactgttaagcgagattcgactggaaatctactgtcttcaaaaatatggagcctccaataggcttaaggcgtataacctcaaaaacaatacagacttgaacatagccagttatcggcagaagttgtacggtaaaatttgctttgtgaacatgatcaatccgatcaaggccgaaaagctgtatgatcagttctacgatataaactggatgaagtga

SEQ ID NO: 10011 - RNA, 999 nt, synthetic construct
  source 1..999: mol_type = other RNA
atgatgtggaacgaacagagcattagaaattacatcgggcttttggaatctaaaggactgcccgtcatttttgacttagagcatctccgaaggttaataggggtggagaagcaatacttttacaagctcaccaactcaattaacgagtcctactcttttttcacaattcgcaaaagaaacggagggagccgaacaatttccatccctttcagcaatctgagaacgatccagaattggattttgaacaacatactgacaacacaacaggtagctgagagtgccacagggttcatcaaaggtaaatctatcgtggataacgcaaaaccgcatataggccacaaatatatctacaagaccgatatcgtggacttcttcagctcgattaagtttaagtctgtgttggccctctttctacggcttggttatgttaaggaagttgcgtatatcttggcccggttttgcacctatgacggatatctgccacagggagctccaacttcaccttacatctccaatcttatactgtacaacttcgacattgagctacagaaaatctgttgcttgagtaaattctcttacacccgctatgcagatgatatcacgatcagttcaaatggcgagcaccttatcgactccaatctgctgagcgccaccataactaagctgctccaggatatctcctttgaactcaagatcaatttcaagaagaccaaagtgctgcaccccggtcaacggaagattgtgactggcgtattagtcaatgagaagctaaatgtccccaaggaaattatctcagacatcaggctggaactgttctgtctcaacaaacacggcctgagtaaacgtattaagcactacaatgaaaagcataagactgctctgagcgttgcactgtataggcagaaaatttatggcaaaatctgctttgtgaacatgattaaccctaaaaaggccgagaagctttttcaggagttctacaaaataaagtggctcctgtga

SEQ ID NO: 10012 - RNA, 1023 nt, synthetic construct
  source 1..1023: mol_type = other RNA
atgatcaaacaggtgatcttcaatatccaactttctgacctcccagagcaggagaaaaaagacctcatctactacgcagaaaacctgtatttcaagcaatgtcccgtaatattcgataatcagcatctcatgaaactctttgagctgcaggatcacgacctgaagaggttcatgacagaaaataccaatcactactccattaagaagagaaatggcgatctacgtgaggtatggaaacctaactacaagttaaagaccattcagaaatggatactgaagaacatcctgaacgaaattaaggtgagtgagtgcgcccatgggttcgtgaaaagtaagagcattctgactaatgctgaaactcaccaatacaaagaacagttttgggtgttttccatggatattaaagactttttcccctctatcaagtatcatgaagtcaaacgaatctttatgggtatagggtattccaatgaggtgtcagaagccctgtcactgcttaccactgttcatggaaagctggcgcaaggcttccctacctctcctatgcttagtaacttgttcttcagagacatcgatgaggagttccagcagattgcaagcagataccatattcgctattcacggtacgctgatgacatcacattttccggcgtccagaagaaaggatatctagtgctctctgagaagctgaagcaaatagtcacgagcgtcttgagcaagcacaatttcatagtgaacgaagccaaaacgcgcttgatgaaaggcaagcacccaaaaattattacagggctggtcgttacctcgcagggagtgaggatcccgcagaagtacatccggcggttaaacaaagagatctattactgccgaaaatttggtgtgaacggccacctcaaatatcagggtttaatcacaattgctaactacaagggatacttgatcggccttgccaggtttatctatatggttgaccccgttaagggggcaaagtttattaagatgattaaggacctggattgggactga

SEQ ID NO: 10013 - RNA, 1023 nt, synthetic construct
  source 1..1023: mol_type = other RNA
atgttcgacaagatcctggacaacattaagaaaagctctctgctcgagaaagaaaaggaggcttacattcagtatgcacgtaacctgcatctgaaaaattcacccatcatcttcgacataaatcagcttgttatgttgttcgatctcccgaatgacaacataaaggagtttgtcttagagaataccaatcaatacaccatttccaaaagggatggctcatccagggaggtctggaaaccttcttacaaactgaagactatccagcggtggattctgaagaacattctcttcaatatcaaggtgtctgaaagcgcccatgggttcgtgaagaacaagagtattctgacaaatgccgaagtacaccagtacaatgaaccattttgggtgtactcgaccgatatcaaagacttctttccaagtatcaagcagaatgaggtcaagaagattttcctagagattggttacacagagaaagtgagcgaggctcttagctctcttactaccatcaacgaatcattggtgcaaggctttcctacctcacccatgattagcaatatttactgcagagaaatcgatgaagagttcaaaaaacaggcgaacaaactgaatatctcctattccagatatgcagacgatataacttttagtggcccacaaaagaacggctacctgaagctaatcaaaaacatcaagaacatagtcctccacaactttcgcgagaataacttcctgataaacgagaagaagacacgggtgcgcaagaataagcacaccaaaatagtcacgggaattgtggttagccaatatggagtgcgaatccctcagaagtactataggcggttgaacaaagaattgtactactgtcagcgattcggtgtaaacgaacatcttaagtatcacggattaatcacaatctccaattttaagggctatctcatcgggctggccagatttatttatatggttgaccccgataaagggtccgagtatattaaaaaaatccagaagctcgactgggaatga

SEQ ID NO: 10014 - RNA, 1023 nt, synthetic construct
  source 1..1023: mol_type = other RNA
atgattaagcaagtcttgcataatatcgtgctgtcagacctgtcggaggaggaaaagaagttttttatgcagtacgcaaaagacctgcactctaatcactgtcccgtaatatttgacattaatcagattctccgcctattcgaactccccgatgatgatctggagaaatttgtcatcgataacacaaaccattactatgtgtctaaacggaatggggagcccagagaagtttggaagcctaactataagttgaagaccattcaaaagtggatattgaagaacatcctgaacaaaatcgaagtcagtgcttgtgcccatggcttcgtgaaaagcaaatctatcctgacaaatgccgaagtgcaccagcatcaggagcctttctgggttttcagcacggatattaaggacttcttcccgtccattaaatacaaggagatcaagaagatcttcataggtatcggctacagtgacgcggttagtgaagccttctccctactgaccaccgtcaataaagagctcgtgcaaggatttccaacttcacctatgttaagcaacatctttttcagagagatcgatgaagaattccaacagctcgcctcccggtataatatcagatattcccgctacgcagacgacattacatttagcggcgtgcagaagaaaggctaccttaaattggtaaagaagatcaaggagatagtttcatgcgtgcttagcaagtataacctgatcatcaataacaagaagacccgacttatgaaagacaggcacaccaaaattgtgactgggctggtcataacaccacagggggtacgtattccccagaaatacatcaggcggctgaacaaagagatctactattgccagaaatttggtgtgaatgagcacctgaagtatcacggactcattactattgctaactataaaggctacctgatcggacttgctaggtttatatacatggtggaccagtctaaagggattgagttaattaagaagatccaggaactcgattgggattga

SEQ ID NO: 10015 - RNA, 1023 nt, synthetic construct
  source 1..1023: mol_type = other RNA
atgctgaacaaagtaatcaacaatatacggctttcggacattgaagaggtggagaagagagaactgatccattactccgaacagttatactctaagaattgccccataattttcgacgtgaatcagctcctgctgctatttgaaatagagtccgacgacctggagaattttgtgcttaacaacaccctccattatttcgttaaaaagcgcaacggcgaaatgagagaagtgtggaaacctaattataagttgaaggcaatccagaaatggattctgaacaacatcctgtataatatcaaggtcagtccccattcacacggtttcgtgaagaagaagtccattctgactaatgcccaagtccaccttcacgaagaccctttctgggtgtttagcaccgatatcaaagattttttcccgtctatcaaacagaacgagattaagtcaatcttcatggaaattggctattccaagccagtcagcgaagtgttttgtctgttaacaaccgttaatcagaagctggtgcaagggttccccacttctccatacatcagcaatattttcttccggaacatcgatgagaaatttcgcgagatcgagtacaaatactctatacgttacagcagatatgcggatgacatcactttcagcggaatacagaagaagggatatctcacattggtcaacaagcttaagcagatcatttcaaacacactgagtaagtacaacctgacaattaacgagaaaaaaacccgactcatgaaggataaacacaccaaaatagtcacgggcctggtgttgaccagtaaaggtgttagggttcctcaaaaatacatccggaaaattaacaaggagatttactattgcgagcgatttggcgtaaatgagcacctcaaataccatggactcattactagggccaattaccgcgggtatttaatcgggctggctaggtttatctatatggtggacagcatcaagggcgctgagctattgaagaagattgaagacctcgattggaattga

SEQ ID NO: 10016 - RNA, 1023 nt, synthetic construct
  source 1..1023: mol_type = other RNA
atgattaagcaagtgctacacaacattgagctctcagatatctgcgaggaagaaaaaagaaagctcatacactatgctgagcagctgtacagcattcattgtccggtcatctttgatgtagaccagttgctcctgctatttgagattaaggtcgatgagctggaaaagtttgtgacggacaacactaatcattacttcatcagtaaacgcaatgggaaatctagggaagtctggaatcccaactacaaactgaaagcgattcagaagtggatccttaagaacatactgaataacatcgaggtttctaactgctctcacgggttcgtgaaaaataagtccattcttaccaacgcacaggttcatttacaccaagaacccttctgggttttttccacagacatcaaagatttctttcctagcattaagaagaacgagatcaaaaagatcttcatgggaatcggatattctgagagtgtcagtgaggccctgtgtctgctgaccactgccaatgagtcactcgcacaaggctttccaacgtccccagccatttcaaatatcttcttccgaaagattgacgaggaatttcagcaggtggcttccaaattcagcatccgctattcaagatacgccgacgacattacttttagtggcatacagaataacggcagcccctctttggttaaaaagctgaagaggatcattagctataccttgtcccgatacaacctgtacatcaatgaaaccaaaacaaggctcatgaaaaacaaggatacaaaaatcgtgaccggtctggtggtaacatcgcagggagtgagagtgcctcagcggtatatccgtatgatcaataaggaaatctactattgccaaaagttcggggtcaacgaacatcttaagtatcacggtcttattactatagctaactacaagggctacctgataggattggcacggttcatttacatggtggacagcatcaaaggcgccgagttaattaagaaaatacaggacctcgattggaattga

SEQ ID NO: 10017 - RNA, 1023 nt, synthetic construct
  source 1..1023: mol_type = other RNA
atgatcaagcagatcttgcataatataatctcttccaacctgtcgaaggaagataaagaaatacttacgcaatacgccgaaaatctctacctgaaaaacttccccatcatctttgacgttaatcagttctttctgcttttcgagttaacagacaacgatctggagaaatttattatcgacaacacaaaccactaccatattaataagaggaacggtgaactcagagaagtatggcaacctaatcacaaggtgaagataattcaaaagtggatcctgaagaatatcctgaataagatcgaggtaagcccatatgcccatggctttatcaagaacaagtccattttaaccaacgctgaggtgcatctgtaccaagagccattttggatcttttcaaccgatatcaaagatttcttccccagtatcagctacaacgacgtgaaaaaaatattcatggagatcgggtacagtgacaaagtttcagaagctttctcactgctcaccaccgtggatggaaagctgatccagggattcccgactagccctatgctctccaacattttcttgcgagatatcgatgaggaatttcagaaaatcgcggtcagatataatatacgctattctcgttacgccgatgacattacctttagcggcattcagaagaaaggatatctaactctcgtcaagaacatcaagcgcattgtgtctttcattcttgagaaacacgacctggctataaataatgagaaaacgcggctgatgaaggacaaacacactaaaattgtgactggtttgattgttacaagtaagggcgtcaaaatcccccagcggtttataaggaagctttccaaggagatttattactgccagaagttcggggtgaatgatcacctgaagtatcaggggatcattacaatagcaaactataaaggctacctcattgggttggccaggtttatctatatggtggacaaaatccagggcgcaaagttcattaaggaaatttacgacctagactgggattga

SEQ ID NO: 10018 - RNA, 1023 nt, synthetic construct
  source 1..1023: mol_type = other RNA
atgattaatgacatcctaaagaacatcaagttgtctaagctcagcgaagagaatagggccagtctgacacggtacgctatatccattcataacaataactgtcccatactgttcgataagaatcacgttctcttggtgtttaatttagtggaggaagacctgcaaaagttcattaaggagaactcgaacaagtatttcatcaagaaaagaaacgggagcctgagagaggtgtggcagcccagctacaaagtcaaagagatccaaaaatggatctacaaaaacatcctgaacgatattcaggtcagcgaatgcgtccatggcttcgtcaaaaaccgttccattctaactaacgctcagaatcacatacatgaagacaagttttgggtattcagtatggacattaagaacttctttccatctattcgaatcgaacgaatcgaacagatattcctcaaactcgggtactccttggaggtttcaaaagccctgagtctgctgtgtaccgtggacggtaagctggtgcagggatttcctacttccccttctctgagcaacatcattatgcgggagattgatgaagaatttaagaccattgcagacaggtataatcttaagtattctcgctacgccgatgatatcacattttcaggcgatcagaagaaaggctacctgattttggttaagcgcctggagaagatgatctgctttatacttaaaaacgccgacttcgagataaataactccaaaacacgcctcatgaaaaataaacacgcgaaaattgtgaccggattaatcgtagattcagacggagtgaggattccaaaaaaatatatccggaagttgaagaaggagatctactactgcaaaaagttcggagtcaatgagcaccttaaatatatcggtctgatcacgatcgctaattacaaggggtatctgtttggccttgcaagatacatatatatggtggaaaaggagctcggcatcatgttcattaagcagctcaatgatttagagtgggactga

SEQ ID NO: 10019 - RNA, 1038 nt, synthetic construct
  source 1..1038: mol_type = other RNA
atggacaacattgtgtttcagaatattaacaggtccagtcttacggataatgagaagaatcatcttaccattatcgcctcttctctgataattaagggagttcccgttatcttcgacatacatcaagtgcggttgctcttcgggatagatggcgaaattggcatcttcgtgcagaagaattgtgctaagtattccatcctgaagaaaaatagggacgaacgaacaatttaccagccctcttacaaactcaaaaaaattcagcgctggattgtgagcaatatcctttcaaagatcaagatctctaagtcatgtcacgccttcgtgccagagaaaagcatactcaccaatgctaaagcacatgttcacgaagatcctttttggatctacaagacggatatcattaacttctttggggagatcaacttcattacagtgaaggacattttctttagcgtcggctatagtcaagatgtgagcgaaatactgaccagcttgtgcatgtatgacggcgtcctggcccaggggtttcctacctcccccataatttccaacatcgttttatccaacttcgacgaagaactggatgtgatcagccagagatataattttgtctacagtcgttacgctgacgacattaccatctcagggacacagttaagaaacaaggatatagagaagatcaagaacatcatcacttacaaactgcaccacctggggttcgaaatcaacaagaacaagactaagttctttggttttaaggcggataagaaagtcactggtgtcgtaatcaaaaatggccaactgttttgcccgcagaagtacaaaaaactgctaaacaaggagctgtactatattaacaagtatggagtggattcacatctcatccacaatgagaaaacactaatctcgaactacataggatacttgtacggctatgcaggttatatcaaaatgattgagccagacgtaggagacgagtatgtgaaaaaactcaacagcattttctggatctctaattccgagcaggcccctagttga

SEQ ID NO: 10020 - RNA, 930 nt, synthetic construct
  source 1..930: mol_type = other RNA
atgaacttcacaaacacaaagcagattaaatccgtgtttaagatctctcaagacatgaccgtcgagaaattcgtgtctaagaacatcaaccagtactacttcatcaagaagaaatcgaagaatccccgtcagatttacatcccaagcattcagctgaaaactattcagaagtggatcctgaagaagattctgacgaaagaatttagctccagtgaagttgcgcatggctttattagtgggagaagcatagtgacaaatgctagagagcatttgtataaagaaccatcttggatccttacgatggacataaccaatttttttgactccatccgatttgacagtatagaacatctgtttcgccagcacggatataccaaggaggtgtcaaggacctttgccactctttgtacctatcgcggcaagctcgtgcaaggcttccctacttctccttttctagctaatctgtacctcaaatccttcgatgtgtacctgaagtccaaccttcagaaatataacgtaaagtacacacgatacgcagatgatctgacattctcagggaatatagagaaaaactacgagtcattcatcttggagagcgagaggatggtcgagaagggtttaaccaagttgcaactgagggtgaacagcaaaaagacaaatatccagactaaagaacggaaaatcgttactggtatctggctctataagaacaagctgagtgtatcaaacaattacctcaagaaattcagacgggagatttactattgcaagaagtatggcgtgatcgatcacctcattcacaccaacaaagtcgaaattagcaatttccacggatatatgtacggaaaagcctatttcgttaaaatggtcgacgagaatttagggatgaaacttctgaaggaactgaatgatctaaactggcccatgtga

SEQ ID NO: 10021 - RNA, 933 nt, synthetic construct
  source 1..933: mol_type = other RNA
atgaaactgaagaacacaaaccagattaagaagctcttcaaaattaccggcaatgatatctcctcattcgtgactgacaatattgcctcagaattcaagatcaagaagagtaacaaagagcggattatagtcgttcccagcctgcatcttaaaagtatcttcaggtggttattggataacatcttcgaaaaggagttcattcctcacgaatgtgtgcatgggtttgtgaagaataaatccattgtgaccaacgctaaagcacacctctaccactccccaaattgggtctatacgatcgatatcaacaactttttcggtagcataactcgaaatgacgtgttgtcgatctttatcgaaaaaggatggccgacttctgtagctaatgcgttcgcagatctgtgtacatacaaaaacacattaccacaaggattccccacgagcccatgcttggctaatgcatttctcaataagttcgacactcacatccacgatttttgcaagacctatggcattcgctatacaaggtacgccgacgatctaaccttctcttccaccgactttgtctctgtgaaaaagatcaacgaggaggtttcatgtactctgaaaaagcaaaacctgttccttaatcctaagaaagagcatctgcagaaagggaagcacaagaagataaccggcattaacatcaatggccataagctggtaagttctagacgctttagaaagaagttcgacaatgagatctttttctgcaagaaatacggcatcatggaccatctggccagaaccgggacacttacacggagcaactttaaatcctacatgtatggtaaagcctgctttattaacatgattgaccaggatctaggacagcagtattttcgtaagctgcagcacctcaattggcccgaaatacctaataacgcctacttttga

SEQ ID NO: 10022 - RNA, 1020 nt, synthetic construct
  source 1..1020: mol_type = other RNA
atgctggaaacaatccttaacaacattaatcttggcaacatagacaaggagaataagaacatactgatcgagaactcaaagtacctgtattcaaagggccttccaatcttcttggacgagcgccacgtgtctcttgtattcaacatcgagggaaacatcaaatctttcgtggagaatagtactagccaccatatcattaaaaagcacaatggggattcgcgggatgtcttcgtgccgtcagaacatctgaaagaaattcagaattggttgctggtgaacattctcgagaaaaagatgatcagcaatagtacttacagttttgtcaagggcaagtccattattgatcatgcgctgaatcacatctatctgaaggacttttggttagttacgttcgatgtcaaagatttcttccctagcatcaggaaagacgctataaaaaacatcttctttgagctcgggtatacctccgacattagcgacaccctaagctccttctgttccattaaaaataatctggtgcaaggctttcccacctcacctatcattagcaacatctatttgaacgaactcgattctgttctgcaggaattttgccagagtcacaatataacctattctagatacgccgacgatctggccttttccggagaaggggaaaagatccaaaaatctctatacgacaagttataccagctcgttgtaaatacgcttgccatctatgaactcaagctcaacaaaaacaagatcaagatttacgactacaaccatcccaaaaaactgacaggcataatgctgaccacaaatggcattagggtgcccttgaagattaagaaaaagatactcaaggagatctactactgcgagaagtacggagtggaggaccacttaaagaaaactgggcgtctggagttggcaaattacaaaggatatatctatgggatagctggttttatcagaatggtcgaaccagagacaggtattcagctgtttcgacggctggataacatttattggggttga

SEQ ID NO: 10023 - RNA, 936 nt, synthetic construct
  source 1..936: mol_type = other RNA
atgaactcaattctggtgagtgagcagcagattaaactgctgttcaaaatagccatgacagaagacgtcatagatttcgttaaggataataacctcgtgtactccaaatgcaaatataatggcgaaactcgatttataagctctccatccgagcacttgaaaatcatccagaggtggatcgtggacaatatactcgtgcagaaaagcatctcagacgtggcccacgcgtatgtgagggagaagtccatattcaccaatgccagagttcatgtgggcaacaaggcaatcctgaagatggacatttcaaacttcttcgattcaatccccattacaaaagtgaaggagatctttctaagcctgggatataattctgccgtatcccaggtctttgctgaactctgcaccaataatgggtacgtgcggcagggctttgtcacaagtcctttcatcagtaacataatcttgaaggactttgatgacaagttgatcaacacacttaaaaagtcctgttattccaagtatgagttcaaatacacgcgctatgctgacgatattactatcagtagcaagtacaaggttaaaagcaagctcaaagagatcgagcaagaagtgatggatatcttagaagtatctggttttagcgcaaatctcggaaaaacccgtttaattatcggggaaagcccgaaaaagatcactggcatcattgttaaagagtcgtcaattagtgtacccaacagatttaagaaggaactgcttaaggagctgtattactgtcggaagttcggtgtcattagccacctgatctacaccgggaactacggcaagctgaattacattgaacatctgaaaggactagctatgtttattaagaacaccgaccagaagttctacgagtctgtcatttctcaaatttccgagctggatcttaactcttga

SEQ ID NO: 10024 - RNA, 936 nt, synthetic construct
  source 1..936: mol_type = other RNA
atgattcccaaattgatatcagtgcagcaactgaaaaagctattcaagattgagcttacctctaatatcgaggattttgtggagaataacaatcaggtctatccccgtatcaagaagaacggcgaaatcagattcatttcctctcctaccatccacctcaaaagcattcagaaatggatcgtagagcatatactttccaagaaggactgctccgaattctgtcacgcctacgtgaaggagaagagtatttttacaaacgccggcacgcatattggcaaccagaatctactcaagatggacatacataacttttttgacagcatcccacacattagcgtgaaaaatatcttcattaccatggggtacaacttggaggtgagtcactctctggccctgctttgcacttataagggctacgtaaggcaaggatttgttagctcaccgatgatcagcaacattatcatgaaagagttcgatgactggataataaaatcactgcacgaagaggaatacctgaagttcgattttaagtacagcaggtatgcagacgatattgctatcagttctaagaagaaggcggtcgcccccttagtgattatcaaggaaaacatttccgattacctcgagaaatatgggttcatcgtcaataatgataagatcaaactgatcaagggaaaaggtcctaaattgatcacaggtatcgttgtcaaggacaactcgatttcagttccaaacaaatacaagcgcaaactgctgaaagaactgtactattgtgagaagtatggcgtggaatcccatctgttatacacaggacagtacgggaaaactaactataaagaatatctcctcgggatcgcaatgtacataaagaatactgacaaccagttctacaataccatccgggagcgaatagatgctctgaatattgactattga

SEQ ID NO: 10025 - RNA, 1011 nt, synthetic construct
  source 1..1011: mol_type = other RNA
atgttggtttttcagcgaccttcatccaagagaatggccttttgtgtaggtgggttcatcgtgaaagtgtctagaagcataagtgtgaagcaagtctctgaggctttcgggataaacgaaaatatagatgagtttgtggacaattcctcatggttctacccaattgagaaaaaaaatggtgacatccggtacatttttattgccaacaatcagctcaaagctattcagtcgtggattctcgagaacattcttgaggacgtaaaaataagcgacgcagcaaacgcgtatgtgtccaaaaagtccatctttactaacgcccagtgccatgtcggctacaagggcatgatcaagctggacatcatgaatttcttcgatgcaatcaaccgagatgacattagcaaaatctttgaaaaccttggcttcagcaaagatgtcgctatgctctttgggaagttgtgctcaaacaagaatattctgaaccagggcttttccacaagcccgatgctgagcaatatcttcttctataagtacgacaagcttattgaaaagatcttaaacgagaagtacggaaaaaacacttttgtgtataccaggtatagtgatgatattaccatcagtacgtctaaaacgtttactttcgacgacttgatgaaactgtccagcgagatagaaaacctgctgctacccaagtttaagatcaacaagatgaagaagaagatcattctgggaaagtaccccgctaaggtcacaggaatcaatgttttcaaggagtatatgtcagtgtctaagaaaatccgccgcagaattaaacgtgaaatccactattgtgagaaattcggggtttctggacatctaaaatacgtcggcgagtataataggcaaaatttcttcgggtacctccgcggtaccgcccactttataggcaatacagacaagaaactggccctgaagttactggaacggatcgatatgctggaattccgggatagggtgacccagaaaaaactctga

SEQ ID NO: 10026 - RNA, 993 nt, synthetic construct
  source 1..993: mol_type = other RNA
atggcaaattcttatattaaacgccttgaagccgcgatgacagaacagggggcagaaaatgaggccatctcgcgcgccgtcgactatgcttttaacctcctgaaccagaatttgcccgttctgttcgatgacattcacgtcgctgaggtcttactcctgagtcgactcagtctctactcatatcacacctttccagttagccagatcgataagactagaattataactgctcccagtcttaacctaaaacagcggcagaagtggatattgtccgaaatcctgaacaaaattcccagcagcgagcatgcccacggtttcgagagcggccactctattaagaccaacgcccttatccatgctaacaatgactacgtgttttgcatggacataaaagattttttcccgtcaattagtcgccagagcgtatgcgaaattttcaggaatgtgggctacagccctaaagcctctgacatgctgtccaaggtgtgctgttataacaattgtctgccccaaggagccccaacatcccctaagctctctaacattttcttcgcaaagattgacgcggagttggctaacttagccaagctcaacaatgcaatctactccaggtacgcggatgatatgaccttttcatcaaaacacgacatccctgctctgcacaaggcagtggaggaaatcatcggaaaatacaatttcacgctaaaccacaagaaaacaagagtcttttacccagggcaaccgaaaagaatcaccggcctgatcgtgcagaacggttgtattcgtgtacctaagcattttaagcggcgactgcggcaagagatacattattgtaggcagtatggagtgactgttcatctggaaaatacaaatgcctcccattgcatcaattatagggagcacctgtacgggaaggcctacttcgtgcacatgatcgagccagataccggcgataagctgttgaacatgcttgacgagatcgactggatgtga

SEQ ID NO: 10027 - RNA, 1008 nt, synthetic construct
  source 1..1008: mol_type = other RNA
atggactatgtttatatcaccaatcttatgcacggcttattccagaagggttatgacgataagttcgtcatacgatgttgtaaatacgcggaaaagttaatgcgcaagaacctgcccgtgtttttcgacgaggagcatatatacgaggtactaaggacccgcggcatttctctggaggactcctatcacacatttgatctgatccatgacaacaaggtccgcacaattctggctccttccaagaagctgaaggcgcggcagagatggatcttggacaatatcctcaataacatcaaggtcagtaagtacgcccacggatttgagctgaatcggagcattaaaactcacgctcagctgcacgctaaccacgattttgtgatttgtatggacatcaaggactttttcccaagcatctctgaggaaaaagtctttaccctgtttaagcagatcggctatactactagagcctcacaagagctaactcgtctctgttgcttcaaaggggcattgccacagggagcccctacctcgcccaaaatagccaatataatctgcaagaggatggatcgagagatacaaagattcgccaaagagaacgggattacatactccaggtacgcagacgatctgacatttagctccaactcagagatgccacaactgatccctgagattacagctatcgtgaacaagtacgatttcagtatcaacactgagaagacccagtcttttgtttgcggcgaaccgaaattcattacgggattggtggttcagaacggcaccgtgagggtccccaaacggtacaaacgggaactcaagaaagaaattcattactgccagaagttcggggtgcttattcacctggaaaatagcaatgccacgcatttcgtgaattacagagagcatctctatgggaaagcatattacgtacacatgattgaacctgatatcggtgaaaaattcctcgatgaacttgacaaaatctcatggcccgaatatatggtgtga

SEQ ID NO: 10028 - RNA, 1056 nt, synthetic construct
  source 1..1056: mol_type = other RNA
atggaacagaacgtgaaagacatgtacatagaaaggctctgtcacaccctcaacgactcaaaactgtccgatatgcacaagaacaagataatttcatacgctcagcagcttctggacaaaaatatgcccgtactttatgacaagaagcacatcgcgatgatttttgacctacggaacattcgactgatcagctccaactataacaaattctacatcgacgagaagcacaagaagcgcttaatcgaggctccttcgaagaaactcaaaagtatccagaagtggatcctcaacaatatcttagagcaactggataccagcgagtatgcctacggctttagaaaaggtagaagcatcttgcagaatgcgctttgccatttgggcaagaaaaatgttctctgtctggatattaaggattttttcggttctatcgacgaaaaaacagtcttctggctcttccggaacatagggtttactagcgaggccagtaagaccctgaaaaaactatgttgctataaaaaggcccttcctcaaggcgcacccacgagtccgtgcattgctaacatcgtgtgcattaacatggataagaagctggcacagttagctaaaaagtataatgccgtgtatagcaggtacgcagatgatatcacattttcctctgacgaggacattagcttcctgaataaggaggttgagaagattatacggaagtacaacttttttctgaacgacaaaacaaagtactacagtggcgatcatccaaagttcataactggactggtcgttcacaaagacaaaattagggtgcctaaaaagatcaagagagaattgtcaaaggaaatccatttctgtcgaaaattcggagtggatatgcatctgaataactctggggccgaaaaacgcgtaaattaccgtgagtatttgtacgggaaggcatactatattaagatggtcgagcacgaaactggagagaaattcctgggcatgctgaatatgatcgattggccagattgggccctggggtcctccaatacctctgacaatgaatcagtgctctga

SEQ ID NO: 10029 - RNA, 1005 nt, synthetic construct
  source 1..1005: mol_type = other RNA
atggagcccaacgactacgtgaacagactgaggcatgccatggaaataagtgaaaatccaaggttcagccccgagtacattgcccagtgctgcacatatgccgagaatctcctgaagcagggactgccagtgctttttgaccaaactcacatacgtaaagtcctcggtatggccgcgcctcggctctgtgactaccataggtttacgatcccaaagcataatggttcccggatcatcacagctccgtctcgcaagttaaaacttcgacagcaatggatttaccaaaatatccttatccgaaaggaagcatctccatatacgcacggatttgtgccagagcgaagcattgtgacaaacgccatcctgcatataggttacgcctatacctattgcgtggacatcacagacttctttccgagtatcaccaaaaaacaggtcctgcccattttccgcaatatggggtatagcgggtccgcggccaacactctgtgtgatctctgctgctgtgatggagtactgcctcagggagctcctacctctccctacttgtcaaatatgatatgtagggacttggacgatgagctgggcgccatggcaagaagatttagaggcattttcactcgctacgcagatgatatcgctatctccgctaaccagcagcagcctcaattgctagatgctctggggctaattctcggcaaacacgggttcagcatgaacttggataaatgccggatttacaatcctggacagcccaaacggattactggcctcaccgttcacaacagagtgtcagtgccaaaggcattcaagaggaagctgcggcaggaaatccactattgtcagaagtttggcgtcaccgcccaccttgagaacaccaaggctgcacgctccattcattatcgtgagcacttatatgggaaggcctactacgttaagatggttgagcccgaactgggcgcgcacttcttagacgaactgtcgaaagtagactggcctgagtga

SEQ ID NO: 10030 - RNA, 1275 nt, synthetic construct
  source 1..1275: mol_type = other RNA
atgggaaagtacaagtatattgatcggctaagacaggccatgggcggcaaatattctgaagagtacattaactactgcgcagaatatgccgccaagctgcttgacaagaatctgcctgtcatctatgacgctcgccacgtggacgagatactccgtctgcacgggatcaagcccgattgttatcatatctttgtaattgccgggaagaataaagagagaaaaatcactgctccgtccagagaaattaagcaacgccagcagtggatactggaagagatcttggagaagcaggacgtgtccgacaactgtcatggatttgtcaagaagaggtcgattttaacaaatgccaaaatgcacatgggccataaaaacatactcaacttggacattcggaatttcttcccatctattacagagactatggtgatattccaatttcagcagatgggctatagcaagtccgcggcggaagcattagcaggcgtttgctgttatgagggaaaactgccccaaggggccccaacctcaccctatatgtccaacctaattctcaagaagatggatcaggaccttgaaaatttctgccagaagaagggaattacatatacacgctacgcagatgacatgagcttttctagtaacgaggaaatcgaaggatttttcaaggacatcaaattcatcataggtaagtactcattcgagatcaacgagaaaaagacctgctactaccaggatccataccgcaaaatcgtaacaggcctgttggtcaaggagaacgaggtttgcattcccaaaaagttcaaaagaaagttcagacaggaaatctactactgtaggcaccttggggtgcagcggcacctcgagaatacgggtaaccaggaacggactggctttagggaatacatgtacgggaaagcctacttcatcgcgatggtcgaacctgaggccggtaaaaaatatctcgaggctaatacctttgatacctttaaagtggaacctagtctgatgacggtctttgaacaaagtcatacctgggatgagctcatctgtcacttcgtggacagctacgtggtggagactgacaaaaaggctgtgagcgccttctatgatcgaggttatatcgctgagaaactgaaaggcctggagactgaattggctctggaatgcaggataacccttaacggggaggagaggtggattcgtaatgttatcattcggggagagatcgaggattcagagtacgcaatgatttttctgcgagatgaaaagacctga

SEQ ID NO: 10031 - RNA, 996 nt, synthetic construct
  source 1..996: mol_type = other RNA
atggacaagaaggcctatattgttagactggagaatgccatgaaagggacatactccaaagaatatatcgacgtgtgcacgaagtacgcaagctcccttttggataaggatctgccagtcatatttgatgagacacacctttatgagatcctccagctctacgctataaagccagacgtataccggaagtttcatattctcggcaaacgcggaaaactgaggaccatttgcgcaccttcgcgatctctgaagctccggcagcgttggatcctggacaacattctcgaaaaaatccctgtctcagagtgttgtgaaggtttccgcaaggatcacagcatatacactaacgccaagaagcatattggctacgaacagatgttgaatatagatatcaaggacttcttcccatctatcgccgagaagaccgtgattgaaatcttccacgagattgggtacagtagagcagccgcggatgagttgggtgctatttgttgccacgacggctgcttacctcaaggcgcacccacctccccctatctagctaatttagcttgtcgagaaatggatcgggagcttcttgaattcgcccagaaccataagttgatatataccaggtatgcagacgacatgacgttttctggcaacgtagaaatggataaactgatcaaagggatcgtgcagatcgtctatgcccacggctttatggtgaacactcgcaagacacgcatctcaactggtaatcagagaaggctggtgactggaatcattgtgaagaaggacggactggctgttccgcggaactacaaaaggaaactgagacaggaaatccattactgcaaacaatttggagttgctaaccacctcgagaatacaagcagtgagagaaaagcgaatttcagggagtacctgtatgggaaagcctattacatcaagatgattgaacccaaaaccggggagcaatttctacgtgagctggacgagattcagtggcagtga

SEQ ID NO: 10032 - RNA, 1062 nt, synthetic construct
  source 1..1062: mol_type = other RNA
atggacgagtatattgtgaacctcaagaaggagctgatcaagaaggagaaatctatagagtacatagaccgatgctgtaaatacgcaaagaaactgctggacaacgggaagccaattatattcgatgccacccacgtcaaaatcatccttaagatggaagggatcaagaggaacgggtatcattactttaatgccggcaatatttacaaacagagattaatcgaagccccctctgtgaatctgaaagctagacagcggtggatcgcaaagaatattttagagaacgagcccctgggcgattggattcatggatacgtcaagggcaagagcataatcaccaatgccctggtgcacgccggaaaaaaaaggatcctccatatggacattaagaactttttccaatccatcacagacgagatggtggagaatgagttcgctaaaatgggatacagtgagtcagctgcgaaggaactgactagtatttgtactttctccgccgaaatggtctactggcaagaagtagaaaaactggaggatattagctcatcccagaaatatcttcctcacggtgcgccgtcaagtccatggttgtctaacctcgttttccagaacatcgacttgcagatcttggacattctcaaaaacaagaacatccaatacacacgatatgctgatgacctgatgtttagctccaattcggataagctagtgtggcttaaggatgagatcgaaaagctcgtgtctaagaatggtttcgccattaacgtaggtaagacgaagctgttcgaagaaaaagaccagaagctaatcatgggcctgaacctcaccaacgggataaagattcagaattcctacaaacgcaaactgcggcaggagatctattattgcaagaagtatggcatagagaatcacctgcaaaaagttggagcaagcaatcgcagcaattttgtggcatatatctacgggaaggtttattttgtcaaaatggtggagcctgaattgggcaaagaattactcgaaaaccttgatcagattttccaggaggagcccctgttttactga

SEQ ID NO: 10033 - RNA, 1056 nt, synthetic construct
  source 1..1056: mol_type = other RNA
atgaacgaatatatcatccgtctggaagaagagttacgtaaaaacaacaaggaagaggcttttataactgcatgctgcacttatgcccgaaaacttctagaaaagaataagcctgttctgtttgacgctgaccacgtggataaagtcctgcgaatggagggaatcaaacgcgatggttaccatacatttaatgccggaacaagaaagaaagctagaattatcgaagccccatcagtgtccattaagaaaaggcagaggtggatagtaaagaatatactggagggcgaagaactggggggctggatccatggttatgttaaaggcagaagtatcgtctcgaacgctaaggttcacgctggcaaaaagcggatcttacggctggacatcaagaatttctttccctctatcaccaaaggcatggtggagaaaattttcagcgccatggggtacagtcccagtgcagccggagagctggcagcaatttgtactttcagctctgatatgttgtaccaggtgaaggggaggaccgaagaagaggaggcgtccgaggagtaccggtatctgccacacggtgcccccagctccccttatctcgcgaatcttatcttccagaatacggaccttgaaattctggagtctctacagggcagagagattagatattctaggtatgccgacgatatgtttttctcatccgacacagaagagttgcagcagctggatgaagagatagaagggattctgagcaagcatggcttccgactcaataaaaacaagaccaaacttatggctgagaaggatcaaaagctcgtcatgggtttgaacatcaccaacggaattcgcgtgcagaactcatacaagcgcaaactgcgccaggagatttactactgtaataaatacggcatccaagaccacctggagcggacagggaataagggcaagagcaacttcatggggtacttgtatggaaaggcatactttgtgaacatggtagagccggccgagggaaagcggctcctcgaagagttagacaggctcttcgccgatgagcaatga

SEQ ID NO: 10034 - RNA, 996 nt, synthetic construct
  source 1..996: mol_type = other RNA
atgtacaattatgaatacacaatcaggctttgcgagactctgaaaagcctgagcgccgatgacgtgtacatatcaaagtgttgcaattatgctgaaggtcttctggacaaagaactgcccgtaattttcgatcccacccacctgaaacagatcctacgattggacgatatctccctggatgaatatcacatcttctacatcgataagaagaacggcggcagtagagaaatcaacgcaccatctgaggaactaaagaaacgacagcggtggattctgaagaacatcttggagaagatctctattagccacaatgtacatggattcataaaaggcaaatccatcgtcagcaacgcaagaaaacatttgaacaaggagtacgtcctcaacatagatatcaaggacttctttcccagcgttaccaaatactccgtggagaagatttttaggcggatgggctattgtaactctgttgctcagctgctcgccagagtctgttgttatcgcggagggctcccacaaggagcacctacatccccgtatctcgccaatttagcctttgacgaggtggatcaggagattatcaatgtggttcggaatcgcgacattacatatacaagatatgcggacgatatgactttctcagctaactatgacttatctacgttcaagaaagaagtgtacaagagtttggggaagtaccgcttttcgcctaacattatgaagacccatcaaatgtccggggaaaaaaggaagctggtcactggccttattgtggatgataaagtgaaagtctgcaagaagtacaagaggaaactgcgtcaggaaatttattattgcaagaagtttggggtgaccaatcacctgcggaattgccactcagagaaaagtattaactacaaggagtacctctacggaaaggcttactttataaaaatggtggaggagatcgttggtgagaaattcctcgccgaccttgactcaatcgactggtactga

SEQ ID NO: 10035 - RNA, 987 nt, synthetic construct
  source 1..987: mol_type = other RNA
atggagaacaattatatctaccgtctgaagattaacatgtttgagcaaggctttagcacctcctacattgataagtgctgttcttatgctacactcctgatttcacagtcacttcctgtgatttttgataagaaccacctggatcagatattgatgctggacactctgaaactggattgttaccacgaattcgagatttataccaaggggaagtccagaatcatactagcacccagtaaacctctgaagagcagacaaaggtggatactcgacgaaatcctgaacaaactaccaactaaccagtgttgccacggattcgtccagcagcatagcatcaagacaaatgcagaaatgcatgtgaataaagctcaggtactctgcatggacatccacaatttctttccgagcattaacatagaccaagtcttcgaagtgttccatcgggtcgggtatacctccgacgtggcccaagccctggctcagttgtgcacacataatgggattcttccccagggcgcgccaagtagcccagatcttgccaacatcattttcaatcccattgatcagcagatcctcaactcaatctccacaaaagacataacgtatactcgctacgccgatgatttgatcttttcttcttctcacgagatcgacttcttaatccccctgatcagtgagattatctccacgaatggcttcaaaatcaataacgataagacccacctgatgaagaatccttacaggaagatgattacaggattaattgtgaccgacactgttaaagtgccaaaatactacaagcggaaatttaatcaggagctcttttattgcgagaaatacggagtagcctcgcatcttaagaactgtaggacccacaagaaggttaacttcaaggagtatatgtatggtaaagcctactacatcaaaatgatagagcctgacctgggtgaagaatacctccgacgcttggacgcaatcagatggtga

SEQ ID NO: 10036 - RNA, 1182 nt, synthetic construct
  source 1..1182: mol_type = other RNA
atgctcaaagctaacgaactgattatcctgtcctacattaacaagtttcagaggatcgatctctatgagattcagaaaactattaacgagcccctggtgcagttaatggattccatctacaggctctacgaaaataaatacatcgtcaacgacggcatagataaattttctgttacagagaaagccaaagaagagaatattggaagctggaatatctggactctgaagtataaggagaaaaacatcaacaacaacgtgttcaagtacaacaaaaagtatacgggtgaattttgtgacaatggagtccccaagatctcgtctgtgcatcaaataaatgacatccttgaactcaaccacattgacattgagtcatatcacggattcgttttgagctacggcgggaagaacagaatgatcctggcgccagggttaaatctgaaggagaggcagaaatggatcctgcataacatacttgaaaagattcctgtggaagactgcgctcatggcttcgtgaagggacgttctataaagactaatgcagaagtgcacgttaataagaaagagatcgtgtgtctcgatatcaaggactttttcccgtcaattaagagagtgcaggttgagaatgtgtttttggaactgaactatagcgaagaggtagccaagaaaatatcttccctagtcacctacaatgatgagcttccccaaggggcacctaccagcccatatcttagcaatctcgtattccgcaatgtggatatggggctgaaaaaattagccaaagagaatgatttggagtatacacgatacgcggacgacataaccttcagtgctaatcatagtattgacaacatcatcaaggaggccgaagagattatcgaacgcgcaggttttatcgtgaatgaggataagacacacatcatgaaggataactatcggaaaatggttaccggactagtcgtcaatcacaaagtacggatacctagtgcttataagaagaagttccggcaggaaatctactattgcaagaaatacggggtgtcacagcacctgcgagcaattggtagagaaaacgccgtcaactttcaggagtacatgtacggcaaggcctactatatcaaaatgattgagaaggagctgggcgagaagctcctgttgcaactggactccattttcggcgtctga

SEQ ID NO: 10037 - RNA, 1125 nt, synthetic construct
  source 1..1125: mol_type = other RNA
atgaggaaagaagtccagaaggctctggaggattacatcagttattttgggattcaaaaggcaaaagagcaactcaaatcatataagaagcattccgagaagtataacaaaaagggttacgttttcttcgacgaaaatcactttgacaagatagtggagagtaatacgcagatcggggtttaccaggttgactactattacgacgtctacaaaataccaaaaaagcggggtggatacagagagattgcttctccatctctggaattgaaaagcattcaggagtttattaacgagaacattctgctctatggcgacgtttctgattattgccacggatttgtcaaggaacgctcaatcgtgacaaacgcccttaaccattgcaacaaagaacttgtaatctgcatggatattaaggacttcttcaaatccatcaagatcgaggatattatatctgtcttctccaacatgggctacaataaagaaattagcaatgcactgggcatgtggtgttcatttaaaggggccctagtagccggtagcccttcgtcacctgccctgtccaatctagtgttcagcaagctggacgagatcatcaatgacatttccatcaagtacaaattcatctactctcggtatgcggatgatatggtgtttagcaccaataaaaagaacgctaactacaaccagttaatcgaggaggtggagaagtgcgtgaacaacttcaattttagtataaacgctgagaagacaaagatttatcccaaatgtggaaaacaggaagtgaccggcttgattgtcaacaatactgtgaaagtgaagtccaaaattaagaaggaagtgctcactcacatatactattgtgaaaagtttggcttcgaaaatcacttaagcaggtatgataaggagtatatcctgaagaacagtatcgagcagatcaagatcaaacgacatttcatcaattacatccgcggaaagattaatttcatcaagatggtcgagccccttaatggcgggaatgtagagaagagatacctggaagtgtttgccgaagaagaggcaaaactcaaattggaggagaaaccgatagaaattggatttgaagagctggacgatatctacatatga

SEQ ID NO: 10038 - RNA, 999 nt, synthetic construct
  source 1..999: mol_type = other RNA
atgagcaataacctttccaaacacaatgagaagaatgactacgaaaagaaaatcaagtcatactcccagaagatccatgagaatggggttcccttgatttttgattccgagcaccttcgtcggataattggcgtgaacaagaagagcttcttagagattattaactctatcgacatccagtatcatacaatctatgtgcctaagaaaagagaagggttcagagagataaacaaaccaagcattaacctgatgataatccaacgatggatcctcgaaaatatcctctacaagaagaaggtgcataacaacagctttggattcgagcctaaaaaaagtgtgatcagcaatgctaaggaacacctcaataaaaaaaccgtgctgtctgtcgacattgaggatttctttcactccatcaaggaggactatatcaagaagatttttctagacatgggttataccaagaaactgtccgaactattggccaaaatctgttgctttaatggcatgctgccacagggttcaccctcaagcccgtacttgtcaaacatttactgtattgagctcgacaaagacatttacaagctctgccagaactacgatctgaagtactcccgctacgcagatgatatcacgataagtagcaataaccacattaattctgaggaagtgataaccaacctgattaaaatcttcaacaagtacggattcgagatgaattcttctaaaactcgcgtctcgctcaaagggaatagacaaattgtcacaggaattctggtgaacgacaagctgaatgttagtaagaaataccggaatgacttacgacaggaaatctattatcttaacaagtatggccttgaaaaccatctggataaacgggatgatataatgaggaggagtaactataaagagtatatctatggcaaggtaaactacttgaagctgtttgacatcgagaaagccaataactactatgaagtactgaataggatcgattggtga

SEQ ID NO: 10039 - RNA, 990 nt, synthetic construct
  source 1..990: mol_type = other RNA
atggagatctcagcccacccacaggcgttgtccaagctgaaaaacctcgggctcccagctgtgtcaaacttgaatgaattatcgtcacagatgcgtctgtcttctggtcttttacagcaactcatttacaagtccgatgaccactaccacgtttactatcttgacaaaaaatctggaggaaagcgggaaatagcacagcctagccgcgctatgaaggcagtccaatcatggattctgcgcaaaatactctataggctgagctccagtggcaatagtaagggcttcgagattggcgaaagcatactaagcaatgccaaaccccatgtcggtgcacatgtgctgctaaacatcgaccttgaggatttttttcattccgtgccggccagcaacgtgtattccatttttcattcgatcggatacaacaagaacatcagctatatcttgacatccctgtgtaccttcaatgggagactgccccaaggggcccctacttcccctaagctgagtaatcttgcgtgtcagcgactggactctaggattcagggttattctgggcccaagggaattatgtacaccaggtatgccgatgatatcactctgtcagccagaaatgaagctaagatacgcaaagctcagcctatgattgaggagataatccaggatgaggggttcatcatcaaccacaaaaagacaaaaatctgcggtactaggaagcgaaaggaggtgacgggcctggtcatcagtcccaattctgtgggcatcggcagaagcgagtatagacggattcgggcagaagtatacagcatgctcacatctgacaattcaaagctgccaaccatcaatgggcggattgcccatattaaatccgttgacaaaaacaactacgagaagattaccaagtacatcctcagcttgaaaaaaaagcacccagaaaacgatctcttcaacctgatagtttgcatcaagggccacattagtcagggagtatga

SEQ ID NO: 10040 - RNA, 984 nt, synthetic construct
  source 1..984: mol_type = other RNA
atgaccacccttcaggatagcaaaaacctctctaggctcaaaaatctgggtttgcctccagttacgaatctggacgaactgagcagtcaaatgaggctctcaacagggctagtgcagcagcttgtttataagagcgatgatcactacaaggtctaccacctggacaaaaagactggcgggaaaagagagattgcccaaccttccagagctatgaaggccgcccagtcgtggatcttgcggaatgtgctgagtcgccttaattcttcacagaactccaaaggttttgaaataggcgagagtattctgagcaatgccgcaccacatgtcggcgctcacgtgctgttgaacattgacctagaggatttcttccattctgttccagcctctcacgtgtatagcatttttcacagcatcggatacaacaagtcaatctcccatatattcacatgcttatgcacctttaatggccggttaccgcaaggagcacccacgtccccgaaattatccaatttggcctgtcagcgtctggacagtcgaattcagggatactctggccccaagggaattatgtataccagatatgcggatgatatcactctgtcagcatttaacgaggcaaagattagaaaggctcagccaatgatcgaagaaattctccaagatgaggggttcatactgaaccctcgcaaaactaagatctgtggaacacgaaagcggaaagaggtaactgggcttgtgataagcacagactctgtaggcattgggaggaagaaatacaggcagatgcgggcggagatctacacaatgctgaagtccgacaccagtaaactcgctcaggtgaacggttggctggcctatatcaagtccgtcgacgaatcgaatttcaaccgcctcattaaatacatcatcgccctgaagaacacctttcctaacaatgacatctttgactcaatccccttcatcaaagctactagccccaagtga

SEQ ID NO: 10041 - RNA, 999 nt, synthetic construct
  source 1..999: mol_type = other RNA
atgacccagtattccaatattaacaatctgagcagactcaagaacttgggcctgcccccgataggggatctcaacgagttaagtaaccagatgcggctatcatctggtctgattcagaaattggcctatctgtccgacgagcactacaaggtatactacctaaagaagaaatcaggtgggcagagggagattgcccaacccagccgcgctatgaaggctgtgcaatcctggatcttacgcaagattctctatagattgagctcttctcagaatgcaaaaggctttgagattggagagagcatcctttccaatgccactccacacatcggcgctcatgtgctgcttaacatcgacctcgaagattttttcaacaccattccagcatcgcatgtttactcaatttttcacagtataggctacaacaagactatctccaatatcttcacgcgtctgtgtacctttaaagggtatcttcctcaaggagcacctacatcaccaaaattgtccaatctggcttgccagcggctggacagccgcattcagggatacagtggacccaagggcatcatgtacactcgatacgccgatgacatcacactgtctgcgtttaatgagacgaaaattcgaaaagcgaaacccataatcgaagaaatcttaaaggatgaaggattcttcatcaacgactctaaaactaagatatgcggcacacggaagagaaaagaagtgaccgggcttgtgatttcaattgatggagtggggatcggccgtcgcaaatataggcagattagggccatgatatatacaatgctgaagtccgacggtagtaagatcgagcaggttaatggctggctggcctacatcaagtctgtcgacgagaagaattatttccggctggtcaaatatatcctcaccctggagaagaacttccctgaaaacaagatttttgagagcataagtagcatcagggaaaaaagagtcgataaggggaactacctctga

SEQ ID NO: 10042 - RNA, 975 nt, synthetic construct
  source 1..975: mol_type = other RNA
atgccaaaccaccagattgtaacttcactttcacggcttaagaatctcggcctgccgcctgtgaccaatctgaaagagctagctagtcagatgcgattgagtagcggcctcctgcaacagctggtgtataagagcgatgaacattataaggtttactacctagacaagaagagcggcgggaagagggagattgcgcagcctagcaggtctatgaaggccgtccaagcttggatccttcgcaaaattctgtacagactgttttccagccagaatagcaaagggtttgaaactggtgagagcatcctgaacaacgccacaccacatatcggcgcacacgtcctgttaaacatcgacttagaggattttttccactctatcccagcaagccacatttattccatttacctgtccatcggatataataagaagatctccaacatcttgacttccctctgtaccttcaaaggtaggcttccacaaggagcccccacatcacctaaactgtctaatttggtgtgccaccgattggatgcacgcattcagggatacagtgggcccaaaggaatcatctacacaagatatgccgacgatatcacactcagtgccttcaacgagagtaaaattagaaaggctcatccgataatcagatctatattggtggacgaaggctttaccgttaatcagtctaagactaagatctgcggtacacggaaaaggaaggaagtcaccggcctgataatttctaaagactcagtgggaatagggcggaagaaatatcgtgaaatgcgctcggagatttacaccatgctccagacagatccctcaaagctgcctaaaatcaatgggtggctgtcctatattaaatccgtggatacgactaactacaaccggcttattaagtacattaccaaactcaagacgacctttcccgacaatctcctgttcgagaaaatcttattcatacagaagaagtga

SEQ ID NO: 10043 - RNA, 972 nt, synthetic construct
  source 1..972: mol_type = other RNA
atgggctctcagtataccaataatctgtcccagctgaaaaacttaggcctcccggctattactaacctggccgagcttgccagtcaaatgagattgagcgtggggttagtgcaaactctggttttcaaatctaacgaacactaccgcgtgtatttcctagacaaaaagagtggaggggaaagagagatagctcagccttctcgggcgatgaaggcagctcagagctggatcctaagaaagatcttgtaccggctcaattcaagccagaacagcaaaggctttgagataggggagtccattctctctaacgccgcaccacatatcggggctcatattctcctgaacatcgatctcgaggatttcttccacagtgttcccgcttcacacgtgtattcaatctttcactcaatcggctacaacaaattgattagtcagaagctgacgagcctgtgcatatttaaaggtcgactgccccagggtgcgccaacctctcctaagctgtcaaatcttgcatgtcagaggctggacagccgcattcaaggttacgccggatccaaagggattatgtatacacgatatgccgacgatatcacactcagtgccttcaacgagagcaagattaggaaagcaaagcctatgatcgagaagatagtactggatgagggcttttcgatcaatcacaagaagacaaaactttgcggaactcggaagcgcaaggaagtcaccggacttattgtctccgccaacggtgtcggcataggacgggaagaatacaggaagatgagagccgagatctacaccatgttacagtccgacccctccaagttggcccatatcaatggctggctggcatatatcaagtccgtggacacgaccaattacgcgcgtctcattaaatacatcaggacactgaagaagatttttccagattctgaagtgttcaacctgattcccgctatcaaaaaaaattga

SEQ ID NO: 10044 - RNA, 975 nt, synthetic construct
  source 1..975: mol_type = other RNA
atgaccatccctagcagtcccaccgacctctcacgtctcaagaacttgggtctgccgccaatcaccaacttaaaagagctcagttccgaaatacgactgtccaagggtttcctgcagaaactgaattataagagcgatgagcactatctggtctatactctggataagaaatccggcggaaaaagggagatagcacagcctagtagggctatgaaagccgtgcagtcttggattttgagaaagattctggtcagacttaaatccagcaaaaacagcaaggggtttgaaattggcgagtcaatcctttctaacgcgagcccgcatatcggggctcacgtgttgttaaacatcgacctcgaggatttctttcactccgtaccagccagccatgtttacagtatcttccactcaatcggctacaataaactaatctcccacatcttcactaacctgtgtacatttaatggccggttaccccaaggagcccctacttcacccaaactgtctaatctcgcttgccaacatctcgactcaaggatccagggatatgccgggattaagggcattatttacacgcggtatgccgacgatataaccctctctgctctaaacgagtcgaagatacgaaaggccaagagcatgatcgaagaaattgtcgtggatgaagggttcatcatcaataagaagaagacaaagatctgcggaacccgcaaacgcaaagaggttacaggtctggtgattagcaaggattctgtgggaattgggcgcaaaaaatacaggaagatgagaacagagatttacacgatgctgaagtccgagcccgcaaagttgccacaggtaaatggctggctggcatttatcaagtctgtggacattaagaactacaatcggctgaaaaaatacatacttactctgaagaaggtgtttcctgaaaatgacattttcgaacttatcccaagtatacagaaaaaatga

SEQ ID NO: 10045 - RNA, 987 nt, synthetic construct
  source 1..987: mol_type = other RNA
atgagtgatacaaacacttccaacaacctgagccagcttcggaatctgggtctgcccccagtcgccactcttgccgacttagcgagccacatgcggctctctgtgggcctgcttcaattgctgtcatataaaagcgacgaacattacaaggtttactacctgaaaaagaagtccgggggaagaaggcaaatcgcacagccatcgcgggccatgaaggctgtgcagtcctggattttacgcaaaattctgtccaggctgagttcctcagccaatagtaaagggttcgagcagggcgaatccatactctccaatgccttaccccacgcgggggcccatgtgattcttaatatcgacttggagaacttctttaacaccgtacccgcaagccacgtgcactctgtctttcggagcatcgggtacaataaaactatctctcagatcttgacaaacctgacaacctataacggacgactgccacagggcgcacctaccagccctaagctgtctaatctgacatgccagcaactcgatgctcgcattcagggctatgctggtcctcgcggcatcatttatacgaggtatgcagacgatattactctgtccgcctttaacgaatctaaaatccgtaaggctcagccgatgatcgaggagattgtaaacagcgaaggtttcactataaacgacaagaagaccaagattagtggaacgcgtaaaagaaaagaggttaccggtctagttatttcaatcgacggagtgggcataggccgacaggaatatagacgcatgagagcagagatctataacatgctcacagaggattctgataaattgtcgcagattaacggatggctctcatacatcaagagtgtggataagaccaattaccacaggctaatcagatacatactgaagctcagggggcatatcaagaatgaggctgtcttctcagaaatagcctgtctcaataaatacaccaatcaaagctga

SEQ ID NO: 10046 - RNA, 972 nt, synthetic construct
  source 1..972: mol_type = other RNA
atgactacactgtccaaaaactatccccttagaaacttcgggttgcctgtcatctcctctttagaagactttgcttccagcacaaggttgtccgtgagctttattaagtactacctctttcaaacagactcccactataaggttttctcgatccccaagaaaaagggcggtgagcgcatcattgcccagccatctcgaaatctgaaggccatacagagctggattctgcggaatattctggatagactatcttctagcgaaaattctaaagggttcgaaaaaggcgactccatcctgaataacgctttgccccatagtggcgctagttacatactttcaattgacatcgaggattttttcccatcaattagcgcaaacaaagtgcactccgtgttccggtcactgggctacaattccgacgtttgcaagatcctgaccaccttctgtacttataagggacgtctgccgcaaggagcgccaacgagtcctaaactagccaatcttgtgtcgcagcagctggatgcccggattcagggctatgccgggcctaagggtatcatatacacaaggtacgctgatgacttaaccctctcaagtaacactgtgaagaaactcgagaaggcaagagatattatcggcctgatcagtaaatcagagggcttgaagataaattccctgaaaacgaaactgaccggaagccggtctaggaaaagcgttactggactcatcgtgaccaaggagggggtagggatcggacgagcaaagtaccgcgaactcaggagtcatatctacaacctgtttaaggacaataatggtgatatcaacaagctcacaggtcatttatcttatgtatatagcgtcgacaaacgcaacttcaagagactcaaaacctacatcaacaacataagcaagaaatatcctaaccccatttactttctgcacctttcaaaaattgccaatgtcaagaagtga

SEQ ID NO: 10047 - RNA, 963 nt, synthetic construct
  source 1..963: mol_type = other RNA
atgacaggaatctatcggcttaaaaatattggcttgccggtgattaaaaatattgacgacctggctcattttaccaggttgtcttcaaccaaactaaattacctgagcaattcgagcaagttcctgtacaaagtgtacgccctccctaagaagggatccgggattagaatcatcgcccagccttcacgggagcttaaggccgtgcaagcctggatcctccgcaatatcttagaccggctgtcctcctccgattgttccaaggggttcgaaataggttcaagcatactggataacgcaaagccacacattgggtcaaactacatactgaacattgacctaaagaacttctttccctctatctctgctaataaagtgtacagtgtcttcagctctcttggctacgagaagaaggtttgcatccttctgaccaacttttgtgtctataatggatttcttccccagggcgcacctacttctcccaaattagctaacctgatctgcagtaaactcgatagtaggattcaaggctatactgggcccaggggtctgacatacacgagatacgcagacgatattacaatcagtgcgaacaccatcaaaaagattatcaatgcccgcgatttcctcgaaacaatcataaatagcgagaatctgagcgtgaataaaaataagacccagatcagcggcgttcgaaaggccaaaaaagtaacggggttgattgtaaaccaggctaatgtcggcattggacgtggtagatatcgcgagatccgagccgaaatacactacgtttatctcaacaagaagactaatctgcatagaatcaacggacatctggcatttgtctactccgtggacaaaaaaatgtataacaagctggtggcgtatttaaacaagctcattgagaaaaacccacactgcttgttgaaggatctcaacatattcaaaaacctgatcaagaagtga

SEQ ID NO: 10048 - RNA, 1020 nt, synthetic construct
  source 1..1020: mol_type = other RNA
atgcagttagataacaggaaattccagttgaagatctttaatctcccagtcatcgagactatcgacgacttggctgagtgtactcgcttgtcaccgcccctgattaagtacctgacttatcgggcagaccacctctacaaggtgttccatatccccaaaaaaattggggagtttagagagatagctcatccctgtcgagagctgaaggctattcagggttggattctaaggcacattctcgataaactgtctcccagcgaaaattctaaggggtttgaattaggatcctctactctcgaaaacgccagcccacatatcggctccaacttcttactaaacattgatctgaaggatttcttccctaccattgtagcaagcaaggtgtacggagtcttccacagcataggttataacaagaaaatcgccggcgccctgacctcgctttgcgtgtttaagggcagacttccgcagggagcccctacatccccaaaactggctaatctggtttgcctgaaactggacgccaggattcagggatatgcaggtcctagaggaattgtatttacgcgttatgcagacgacatctcacttagtgcccagacactcaagaagatccagaacgcgaaaaaccttattcacaccatcgtcgcgtcagagggccttgaaatcaataatcggaagacctctatcagcggcaccagaaagcgcaaaaaaataacagggttggtgattaccgaaaacagtgttgggatcggccgggatctaacacgccaaatacgtgccaagattcatcacctgtttatagaaaagtctaccaatttctcccacgtgaatgggctgctggcttacacttacagcgttgacaaaaagagttatcgaaagctcgattccttcatagagaaactcaaactcaaataccctttgtgcccagccaccacagagctgtataaaatcaagaattcaacgatcacccaatttacaaaggtgtgttacaggacttcccggatcaagaagctgtga

SEQ ID NO: 10049 - RNA, 963 nt, synthetic construct
  source 1..963: mol_type = other RNA
atgccccaggattcacatatttacagactgaggaatctggggctcccggtcatgaagtccagcgaagactttgccaattatactaagttgagtgcaagccgaattagactgctgcatctgcgcgctgataagttctataaagtataccgtctgcctaagaaaagtggaggaaccaggctcattgctcaaccatccagagagttgaaggccctccagggctggatcctacggaatattctggataaactgcgggcgtccgatcaatccaaaggtttcgagattgggtcgtccatcctggacaacgctgcccctcacacaggcgccaactttatattgaatatagatctggaggacttctttcccagcataaaggccaaccgcatctttagcatatttagatcaatcggctacaacaaggagctctgtgtgctgttgacgaatctgtgtacatactcaggcagacttcctcagggggcacccacctcacccaaattagccaacctgacttgcgcacagcttgacgcacggatccaaggatacgcaggaccaaaggggatcatttataccaggtatgccgatgacatcaccctaagtgcacagaccgctactaaaatctacaaagctcgctatttcctcgactatctgatcgccgatgagggatttactattaaccgtcagaagacgcgagtctatggtacaatgtcccgcaagtgcgtgacaggcttagttgtgagcgagtctgccgttggcatcggtcgagaaaagtaccgggaaattagggctcagatccaccaccttttctctgggaaggccgactcttataggtacttaaacggcctcctcgctttctgcttcagtgtggacaccaaatcttaccgcagggcgtataaatacatgcggaagcttcaggaaaaatacccaaattctaacgccatgaatagcatcattcctgagaaggaatga

SEQ ID NO: 10050 - RNA, 972 nt, synthetic construct
  source 1..972: mol_type = other RNA
atgatgactacacagaacatttatcggttgcgtaatctgggactgcctgcaatgaaaagtctggaggatttcgcctccttttcccggctcagcccatcgaagatcaggcatctcagtcgaagcagcgagtttctttacaagacttacaaagtcccaaagacaaatggcagttataggctgatcgctcagccgagtagggatttaaaggctgttcaagcctggatccttagaaacattctcgatgaattatcttgctcaagctattcaaaagggttcgagtctggcatgtctattctcgataatgccaaaccacacatcggctctcagtatgtgttgtcagtggacctccaggatttcttccccagcgtcagcgcaaacaaagtgtacggtgtgttctcctccgttggctacaacaaggagatgtgtgtgctgctgaccaacctatgtgtctttaagggaggactgcctcaaggcgcgcccacatcacctaagcttgcaaacctggtgtgctctaaactagacagccggattcaggggtatgctggtcccaaaggaatcacatatacccgctacgccgacgatatcactctttcctctaattccgccttaaagatacagaaggccaagagtttcctcggcaccataatcagtgacgaggggtttaaaatcaacaagccaaagaccaccctgtccggggtgaagaagcagaagaaaatcacgggtttggttctctccgacaacaatgtcggcattgggtcactgaaataccgcgaaattagagcagaaatacattacctgtttgcgggtaagtctaataattacagaagggtgaacggattgctgtcattcgtatattccgtagacaagaaaatgtacacgcgattgcacgcttacataagcagcctgaaaaaaaaatttccccaaagccctgccgcttcatctctgaataaggaaatcgtcatttcgcgctga

SEQ ID NO: 10051 - RNA, 975 nt, synthetic construct
  source 1..975: mol_type = other RNA
atgaccattaacaatatctatcgcctgaagaacatagggctgccggttatgcagtctatcgaggacctggcaaaacacgcgagactgagtatcgaaaagattaggtatctgtcagtcagagccgaatttatctacctgacttacgaattgccaaaaacaaacggcaagacgcgggaaattgcccagccctcaagggagcttaaggcaatccagtcttggatactgcgtaatatcctagataagctttcaccctctatctacagtaaagggttcgagaaaggtacttcaattttagataacgccttcccccatattggcagcaccttcgtgttaacaatagatctcgagaacttttttcctacggtgaaggccagtaaggtgtttaccttattcaaatccgtgggatataataaggaaatgtgcgttctactgaccaatttgtgcgtgtacaaaggtgggttgccccaaggcgcacctaccagccctaaactcagtaatctgatctgtgacaaactcgatagccggattaacggctacgctggaccaaagggcatcgtctacacacggtacgctgatgacatcacactttccgccaataatattcagaagctgcagaaagcgaaggatttcattggtactattatctccgacgagaactttaagatcaacaagagcaagactaaactttgtggaactaagcgacagaaaatgatcaccggactggtcctgtcggagagctctgcagggataggacgagtgaaactcagagagataagggctaaaattcatcacgctttcgttggcaagcacaatgagttcgaccacattaacgggctgctgtccttcacatattccgtagataagtccagctataagaaactctaccgctttatcgacaagatgaataaagactatccagactctttggccgtactcgaacttcataagaacctgttgaagaaacaactccagtga

SEQ ID NO: 10052 - RNA, 960 nt, synthetic construct
  source 1..960: mol_type = other RNA
atgacttccaacagcatttaccatctgaaaaacctcgggctccctgctttaacatctctggatgagtttgcccatgctatgaagctgggatctaacacagttcgctcactaagcatctcttccaactcactctataaaacttacaaggagcccaaaaagtcaggcggctttagggagatcgctcagccctgtcgggaattgaaggctgttcagagctggattctgaggaatatattggataagctcaattgctccccttacagtaaaggctttgagaaaggaaagtcaatccttgataatgcacagccgcatgcaggcgcaagctacttgctttctatggacttagaaaatttcttccccagtatcggtagttataaagtgtacggtgtgttctccagcattggatacaataaggaaatgtgcaagcttctcaccaatctgtgtacctattatgacagtttgccacagggcgccccttcttctcccaaactggctaacctaacctgcagcaggctggacgccagaatccacgggtatgccggaccaaaaggaataacgtatacacgctatgccgatgacatcaccctgagtgccaacaccgcagtaaagatagagaaagccaaagcctttatcggcacaatcgtacacgatgaagggcttaaggtcaacaaaaccaagactaagatttgtgggactaagcggcaaaagaaggtgacagggctggtcctgtctggtaattccgtgggcattgggcaaaagaaatacagagaattgcgttccgcactccaccgaattttcgtcggtagatcgactgagtactcgttcgtgaatggctggctgtcctttacgtacagcgttgacaaaaaagcgtataaccagctgtacttagtgattgactccctgagcaagaaatacccacagtcagatgctctggagcacctctatgcgaagaagggatga

SEQ ID NO: 10053 - RNA, 960 nt, synthetic construct
  source 1..960: mol_type = other RNA
atgacgtccaagaacatttactcactcaaaaacatcggactgcccgctatggctagtatcgatgacttcgctaacgaagcgcggctctcgcctggcaagattagatacctttctgccactgccgaatcccactatagaatatacccgataccaaaagtggggggaaagagccgcctgatctcccagccctcaagggaacttaaggccgtacaggcttggattctgcgaaatatcctggacaaactgtctagcagtccctgttctaagggcttcgaaattggcacctcaatcctcgacaatgccaggccacatataggcagtaactacgtcctcaccatcgatttggaggattttttcccgaatgtctctgcatccaaggtgtttggggtctttagctcgattggctataacaaagagttgtccattttgctcaccaatttatgcacgtattccggtggcctgccacagggagcccctacaagccctaagttagcaaatttggtgtgcgcgaaactggacgcccgaattcaaggttacaccgggccaagaggcatcgtttatacacgttacgcagatgacatgacttttagcgcccacacagctagcaaaatcaggaaggtaaaacatttcatcggcacaatcatttccgatgaggggtttaaaattaaccacaagaagaccgccatctgtggaactaagcgccagaagaaggtgaccgggctgatcctgtcagagtcttctgttggtataggaagggtgaaacatcgggaaattcgcgctaagctacaccacctgttcacaggaaaaagtgccgagttcagccatgttaatgggcttctttcttatacttacagtgtggacagacggagctataacaagctgtactcatatattgcaggtctatccaagaaataccccaattcaaacgcaataatcgagatcagccctaaaatcgtgtga

SEQ ID NO: 10054 - RNA, 960 nt, synthetic construct
  source 1..960: mol_type = other RNA
atgacttccaagaacatttattctctcaagaatctgggactgccagccatggtatccgttgacgactttgctaacgaatcgcgattaagctcagcaaaaatcagatacctatcagccaccgccgacttacattacaaagtgttttccatccccaaagtcacagggaagagccgcttgatctcccagccctctcgcgatttgaaggctattcaggcatggatccttagaaacatcctggataaactgagttcaagttcttgtgcaaaggggtttgaaagaggttccagtatactggataatgcacggcctcacatcggaagtaactacatacttacgattgacctggaaaatttctttccgtctattgccgcttccaaaatttatggtgtttttagctcgataggctataacaaacagctgtcagtgctgcttactaatttgtgcacctataagggcggtttgcctcagggcgccccaacttcacccaaactcgcaaacctggtatgcgccaagctcgacagcaggattcaaggctacgctggaccaaaggggatcgtgtatacaaggtacgcggacgacatgactttcagcgccaacaccgctctgaagattaccaaaaccaaacaattcataggcacaatcatcagtgatgaggatttcaagatcaattcccagaagacagtgattagcggcaccaagaaacagaaaaaagttacggggcttattctctctgagaatagcctaggaattgggcgtgtgaagtaccgggaggtcagggtgaaactgcactacttattcaccgacaagctcagcaacttctcttacatgaatggaatgctggcctatatctatagtgtcgataagaaaagctacaacaagctgctctcatatatagctaaactcaagaacaagtaccctaattctatcgcggtgaattttatcaactccaagaataagtga

SEQ ID NO: 10055 - RNA, 969 nt, synthetic construct
  source 1..969: mol_type = other RNA
atgagcagcaacaatatatatagccttaaaaacctgggtctgcccgctctcaaaaagatcgaagatttcgcttttgtgaccagactctctcaggggaggataacctatctggcatacaggaccgagcacttatataaaacgtacgacgtccctaagaaatccggcaagaagcgcgaaatcgcccagcccaatcgtgagctgaaagccgtgcaggcctggattttgcgcaacattctggacaaactttccagttcgccacactccaagggattcgatctcggcaccagcattcttgaaaatgcagtaccacatcaaggagctaactacatcctgacgttggatctggaggacttctttccgtctatctcagctaataaggtttacagcatttttagctccatagggtataacaaggaggtcagtagtctgttgactaatctgtgtgtgtttaaggggggcttgccccaaggagcgcctacaagtcctaagttagctaacctggtttctgccaagctcgatgcacgaattcatggctatgcaggcccaaaggggatcgtctacacacggtacgcggatgacctcacattatcagcccagtcagtgcagaaactggagaaggccaaaaacttcatagacaagatcatcacagacgaggatctcgtgattaatcgctcaaagaccaaattgtgcggtacaaagcggcagaagaaaattaccggactcgtgctatcccagaacaatgtaggtataggccgggaaaaacttagagagattagagccaaaattcactacctgtttatcggcaagaacatcgactactctcacgtgaatgggtttctggccttcacttacggagtcgacaagaagtcttatactaagctatacaggttcatcgagaaaatgaaagcaaagtatccctccagcgaagctgttactgaactgcataacaaagccatcaaacgaatctga

SEQ ID NO: 10056 - RNA, 975 nt, synthetic construct
  source 1..975: mol_type = other RNA
atgccaaataaggcccatttatacaggctgaaaaacttgggactgccagcaatcgaatcaattgaaggttttgccgataaaacacggatctccttggagaagattaaatacatctcttaccgctcaggtcatctctacaaggtatatgagatccctaagatcaacggaaagaagagacgaattgcccagcctaaccgggagctgaaggctgtgcagagctggattttacggaatattctggacaagttgtccactagcgagcactgtaaaggcttcgaaactgggacctccatcctggacaacgcggtgccccatgtggactctaactatgtgctgacggtcgatctggaggactttttccagagtgttaaagccagctccgtgtatcgaatcttcaactcgataggctataacaaacaagtctcatctatcctgactaacatctgtacatctgatgggggtcttccccaaggagcacctacttcgcccaagcttgctaatcttgcatgcgcgaagcttgatagtagagttcacggatatgctggacagaagggcatcgtttataccaggtacgccgacgatataacactatcagctcagaccccaaagaagatctacaatgccaagcagttcatcggcaccataatttctgacgagggattcgcaattaataaggctaaaacccgcatttccgggacaagaagccagaaaaaaattactgggctcattctatctgaaaaccgcgccggtattggcaggaataaataccgtgagataaggtgcaaaatccactacttgtttgtgggcaagaataaagattatagtcacgtaaatggcctgctcagctttacgtactccgtggacaagaaggcctataagaaactctatagctacatcaagatgctcaagaacacctacagtgatagcaaagctggggacctgctggtcgccgaaatcacaaaaataccggcatga

SEQ ID NO: 10057 - RNA, 972 nt, synthetic construct
  source 1..972: mol_type = other RNA
atgtccaacaagtcatatatttaccgactgaagaaccttggactgcctgccatagagtctatcgatgatctcgcagacgcttgcaggctgtctctgggtaaagtgaagtatctctcttatcgtactgaatacctctacaaggtcttttgcatacctaagaaaaccggcaagaccagaacgatctcacaacccaaccgggagctgaaagcactgcaagcttgggttctccggaacatcttggacaagttatctagctctgaacatagcaaaggcttcgataagggcgcctctattctggataatgcatcaccccatgtgggagccaactacatcctgacaatcgaccttgaggacttctttagcaacgtgaaagccagccatgtttacaagatctttcacagtatcgggtacaatgacaagattagtgccatactgaccaacatttgcacttttaaaggtgctttgcctcagggggctccaacatcccccaaattggcgaatctggtctgtgcaaaactggactcccgacttcatggatacgcgggaccaaaagggattgtgtatacacggtacgcggatgatctaacgctgagtggccaaaccccgcagaagatctataaggcttcccagttcattgggaccgtaatatcggacgaaggcttctcagtgaataaggccaagacaaatatttgtggcactcagaaacagaaaaaagtaaccggcttggtggtttccgagcaccacgccggaatcggcaggcagaaatatagagagattcgcagcaagatacactaccttttcgaaggaaagtccaatgatttccaccaggtgaacgggctcctagcctttacttacagtgtcgacagaaaaagctataagcgcatctattcatacgtcaataagttaaagctcaggtatagtgggagcgaagcctccaagaagattgctgcagagatcggtatcaaagcctga

SEQ ID NO: 10058 - RNA, 969 nt, synthetic construct
  source 1..969: mol_type = other RNA
atgaatgagaagcagaaaaaatacgggctcaagaacttaggtctgcctgccattgagacaataagcgaccttgctaacgaaattcgactgagtgataacaagatccggtacttggcctatagggcccagcatctttataaggtttatagtatccccaagaagagcggtggaagcaggctgatcgcacagccttctcgagaacttaaagcagtgcagggctggattctgagaaatattctcgataagctgtccgcctccgaacattcaaaaggatttgagaaggagagttctatcctggataatgctatgccccacgtcggcgccaattatgtactcaccgtcgatctgcaggacttcttcccaagtataaaagccaacaaagtctactctatcttttatagcgtgggatataataagctcatctcctcagtgttgacctctatctgcacttatgacggtcgcctgctccaaggagccccaactagtcctaagttggcgaatcttatttgcgcaaagctagactccaggctctcggggtactccggcccattaggtatcgtctacacaaggtatgccgacgacatcaccctgagcgggcaagctgcgcgcaaaatatacaaagcacgtgacttcattaacgtcataatttcatccgagggctttaaggttaacgaaaagaagacaaagatctgtggcacgcagcgccagaaaagaattaccgggctggttgtgaatgagaatcacgctggaattgggcggaaaagataccgggaaattcgggtaaaactgcatagattattcgtggggaagtctgatgattacaatcacgtgaacggctttttgtcctttgtgtacgatgtggactacaagtcttacaaaaaactgttcctctacatcaacaacctaaaggagaagtatccgagctcaagcgctggcctgaacatcttccccgagatcaacaaatcatga

SEQ ID NO: 10059 - RNA, 975 nt, synthetic construct
  source 1..975: mol_type = other RNA
atgaccagcgctaccccttctcaagtctttagacttcgcaatctcgggcttcccgtcatgtcctccttggaggatatgagtagggagatgcgcctaagcgtggacattctgcgactctacatttatcgggcagataagtattacaaagtgtactcacttccaaaaagagatgggaagagatcccgaataatttcccagcccagcagagaactcaaagcactgcaggcgtgggtgctcaggaatatactcgacaagctgcatagtagccctttttctaagggcttcgagaaagggcagtctatacttaacaacgccagtccacacgtaggcgccaactatgtcttaaacattgatctggaggactgcttcaacacgatcctgattgaaaagatatacactgtgttccactccttaggatataactcaacaatctccaatgcactagcccgcttgtgtagctttaacggatcattgcctcagggtgctcctagctcaccaaagatcgctaatttagtcttgaccaagctggactaccggatccatggatatgccggtagcaagggcattgtttttacaagatacgcagatgacttgacactgtcggctcaatcccttaaaaagatcctgaaggccaaatctttcgtttgcagtattatcccctctgagtctctcaaggtaaactacaataaggtggcgattcacggtcccaaagccaggaaagaagtgactggcctggtgctgagcatcgacaatgtaggcgttggccgtatcaggtaccgggaaatccgctcgaaaatccactacctcgccgtgaagcgtaatagtgactttgaacatgttaaggggctgatcgctttcgtgaaatcagtcgacaagaaaaactatcggaagctgatgaccttcagcaataaaatgtctgagacttatggagtggatctgtccgtgctgtttccgaagaacaagaaagccatttga

SEQ ID NO: 10060 - RNA, 966 nt, synthetic construct
  source 1..966: mol_type = other RNA
atgacttctatcattcaaagccaggtctttaggctcagaaatttaggcctgcctgtcatgtccactcttgatgatatgtcccgtgagatgcggctcagcgtggaaatactgagaatgctaatttacaacgcagacaaatactatacagtctactctgttcccaaaaaagatgggcgacgcgtgagggtaatatcacagccatccagaaaactgaagtcattgcagtcctggatactgcggaatatcctggacaagctgtactcctcaccattcagtaaaggattcgagaaaggccagtctattctgaataacgcatctcctcatatcggggctaattatatcctcaatatcgaccttgaggacttttttgacaacatacccagtaggaaaatttacaccctgtttcacagcttgggatataactccctggtgtcaaatgctctgacacgagtgtgttcccacaagggttctctgcctcaaggggcccccagcagccctaagatcgccaatttgattctgaccaaacttgattatcgcatccaaggttatgctgggggcaaaggtatagtctttactagatatgccgacgatctaaccttgtccacccagtctctgaaaaagatcgtgaaggccaagaagttcctctgcacaatcatcccaacggaagacctcaaggtgaattaccggaaggttgtaattaacggcccccgtgcgaaaaagagcgtgacaggactcatcttatcaatcgacaacgtcggcattggaagggagaagtacagggagattaagagtaagatccaccatctcgcagttggccgcacctctgattacgaacatatccagggacttgttagcttcgtgaaatcggtggataaaacgaactatcggcgccttttagccttcagcaagaagatgagttcgatttacaaactgaacattaaccagttgttcccgagtaagaagtga

SEQ ID NO: 10061 - RNA, 966 nt, synthetic construct
  source 1..966: mol_type = other RNA
atgaacaatttttcttctaccgacgtctttagattgaggaactttggactacctgtgatgtccagtttgacagacatgtcccgagaaatgcgcttaagcgtcgaactgctaacacttctgattactagagcggacgatttctataaggtgtactctgttcccaaaacgggtaccgagaagggagagcgggtcatatgtcagcccagccgcagactcaaagccttacaggcttgggttttgcgcaacatcttggataagcttaattcttcaccttttagcaccggctttgagagggggcaaagtatcaaagacaatgcaaatccacatgtcggctccaacttcgtgctgaatattgatctggaggattttttcccctcaatttcgtcgaacaagatctataccgtgttcaacagcctgggctataataagtatatcagtagcgtgctcacaaagatttgctgtttcaagaataaactccctcaagggtcaccagcctcccccaagctggccaacctcgtgtgcatgcggctggatcatcgtatacatggctatgccgggatacgcggaatcatttttactagatacgctgacgatatcacactttcagctcagtccttaaagaaaatcgagaaggcaaaggactttctgttcagcattattccgaccgaacagctgatcgtgaactacaacaaagtaatcatcagcggtccacggaaacagaaaaaaatcactggcctggtgctttccattgacgacgtagggataggtaggcagaaattcagggagataaagtccaagatccactacctgagtgttgggcgatctgaaaactacgcacacgttggcggactgctggctttcacgaagtctgtcgatgaaaagaattaccggcgtctcattgtgtttgcccagaaactcaacaagaaattcaatctggacctcgataagcttttcaaacacggatga

SEQ ID NO: 10062 - RNA, 960 nt, synthetic construct
  source 1..960: mol_type = other RNA
atgaagagcacagagcacttgaatacctttcgactccgccaccttggactgcccgtgatgaatgatctgcatgacatgtcaaaagcgacgagaataagtgtggaaacgctgcgcctattaatttatcgtgccgactttcgctacaagatctatagcatcaagaaaaagaacagtcactcaatacgtaccatttatcagccaagcagggaactgaaagccttgcagggttgggttctgagaaatattctggacaagcttagtagctcccccttctcgatcggcttcgagaagaatcagagcattcttaacaacgctacccctcacataggggcaaatttcattctgaacatcgatctggaggatttctttcccagcctttccgctaaaaaagtctttggtgtgttccattctctcgggtacaatcggactatctcgtcctccctaactaagatctgctgttacaaaaacttgttgccgcaaggggctccaagcagccctaaactggccaatttaatttgttctaagctcgactatcgaatccagggatatgcagggtcccggggcctcatctacacaagatatgctgatgacctgactttgtcagcacagtcaatgaagaaagtcttaaaggccaaggacttcctgttctctatcattcctactgaaaacctcgtagtgaacaccaaaaagacatgcatctctgggcccaggtcccaaaaaaaagtgacaggcctggtgatctcccaggagaaagccggcataggacgcctgaagcataaggaactccgggccaaaatccaccacctattttctggcagaagtaagaacattgagcatgtaaggggttggctcagttttgttctgtcagtcgattctaagtcctacaggcggcttttcgtttacattggaaagctggagaagaaatacggctggaatccactctctaagaccaaaacctga

SEQ ID NO: 10063 - RNA, 963 nt, synthetic construct
  source 1..963: mol_type = other RNA
atggagaacgaacactacatgaatacttttaggctcaggaacttggggttacccgtaatgagcgacctgtccgacatgagcaaggagacaagggtgtctgttgaggccctgcgcctccttatttatcgggctgactatagataccacatctatacattggataagaaaggacctggcaacaaaaagcgcacgatctatcagccaagtagagaacttaaggcgttgcaaggatgggtcctaagaaacattctggacaaactgtcttccagtcccttcagcatgggcttcgagaaaaaacagagtatcctcaataatgctactccccatgttggcgctaatttcatactcaacatcgatctcgaggactttttcccttctttgaccgcacacaaagtgtttggtgtcttccattcgctcggctataacagagcaatagcatcctccctgacccgtctgtgttgttataagaatctgctgccacagggtgccccctcaagtcctaagctggccaacttaatctgctcacggctcgattatcggatccaaggatacgccgggcgtcgaggcctgatttacactcgctacgccgatgacctgaccatcagcgcgcagtcaatgaagaaggttgtcaaggccaaagatttcttatttagcatcattccatccgaaggactagcaataaacaaagagaaaacctgcatctctgggcctagaggtcagaagaaagtgacagggctggtcgtatctcaggacaaggtgggagttggcaagaggaaatcaaaggaaataagggctaaaatccaccatatttttgtgcggcgaagcaatgaagtggagcaggtgaaagggtggcttgcctacattctttccgtggatgtgcggaatcacaaacgcctggtcgcttacattaacaagctggaaaagaagtacaattggaacccgtttaagaaggaggaccattga

SEQ ID NO: 10064 - RNA, 960 nt, synthetic construct
  source 1..960: mol_type = other RNA
atgccaagtgccactaactctcatgtctatcagctaagaaatcaaggattacccgtgatgtcttccattgttgacatggcacgggaagttcgcctgtcggtagagatgttgcgatttctgacttaccgcactgactacctctacaagacatttgagattgagaaaaaagggacgacatccaagcgcgtgatttgtcagcctagccgtaagctcaaggctatccaaggctggattctgaggcggatcctggataaccttcggtcctctgagttttcaaaaggattcgaaaaaggtcagagtatcctagataatgccgtgccccacgtcggcgccaattttatcctgaacattgatctcaaggacttctttccctccgttgatgctagtaaggtctacggcgtgtttagcagcttggggtataacaaagagatctcatccattctgacaaatctgtgcacttataaaggaaagctgccgcagggtgctccaaccagcccaaaacttgcgaacctgacctgtgcaaggttagacgccagaatccagggatacgctggctcaaaagggataatatacacccggtacgccgatgaccttaccttcagcgcacaaaccttgaagaagataatcaagacacgattcttcattcagactataattcctacggagaagctctccgtaaataatcataagacactgctgtgcggccctaggaagcagaaaaaagtgacaggacttgtgatttcacacgacaaaactgggattggtagacagaagctcagagagatccgttctaagatacacaaaatctataccggggaaaaaaccaataccaatcatgtctacggcttgttaagctatgtgtatagtgtggataaacgcaactataggaagctcatcatctacatcgaaaaactgaacaagaaatacaacaagtctgaattcctgaagatcaagaagtga

SEQ ID NO: 10065 - RNA, 960 nt, synthetic construct
  source 1..960: mol_type = other RNA
atgaccctcgtgacagcgactcatagtcacgtctatcagctcaggaaccaaggtttaccagtgatgagcaccatctcagacatggcccgtgaggttcggctcagcgtagaaatgttgaaattcctgacctacagaacggactatctgtacaaaacatatgaaatcgacaagaagggcaagggttctccaaagcgcattatttcccagccttcccggaaattgaaggctatccaaggctggattctgagacacatcctcgatcacctgagcagttcagaattttctaaagggttcgagaaaggccagagtattctggataacgcagtcccccatataggcgccaacttcctgctcaatatagacctaaaggatttctttccttccatctccgcttccaaagtgtatcggatctttcgaagtttaggatacaacaaagagattagcagcgtgctgacaaacctgtgcacttacaagggcaaattgcctcagggaagcccgacttccccaaagctggccaatctaatatgctctagactggatgcaagaatccagggttacgctggacggcgcgggataatttatacgcgatatgccgatgacttaacactttcagcacagactctgaaaaaaatcgagaaggccaagttcttcataaaaaccatcatccccaccgaagacctgaaggtaaataattccaagacattgctttgtgggcccaggaggcagaagaaggttaccggactcattatcagtcatgacaaggccggcattgggagggagaaacttcgcgagattcgttcgaagattcacaagatctttactgaagagagccttgaatataatcacgtgcgcgggctcctggcttacgtttcttcagtcgataagaagtctcataggaagcttgtgatgtacatcgacaaactgaccaaaaaatactctggagtggagtttattatctga

SEQ ID NO: 10066 - RNA, 984 nt, synthetic construct
  source 1..984: mol_type = other RNA
atgaaaacagaaagcacagccaatatataccgcctgaaaaacctggggctgccgcccttagctactatcgaagatattgccaatgcaacgcgtctttctccagaatatatcaaatacctcgcttttcgcaccaacttcctctataagactttcaccattccaaaacggagcggcggtaatagaaagattgcgaaccctagccgcgccttgaaaggcattcagggatggatactgaggaatatcctggataagctgtcctcatccgagtttagcatgggctttgagaaaggaacctctatcttggacaacgccctaccacacacaggatctacatttatccttaccatcgatctcgaggattttttcccctcaataactggggaaaagatcttcggcgtgttcaactcaattggatacagcagatctatcagccatattttggctaacttatgtctattcgaggggagactgcctcaaggcgccccaaccagtcctaaactggcaaatctggtatgctcgcggttggattctagaattaatggctacaccggtcccaaaggcattgtgtacactaggtatgccgacgacatcaccctgtcctcccagtcgctcaacaagctttacaaggcttacaactttataccctttatcttacaggacgaaggattttccctcaatcccaacaaaacaatcttttctgggacacggaagaagaaaagtgtgacgagtcttattattagtggtgacaccgttggaatcgggcgagaaaagtatagggagatcaggagcaaattccacaaagagttcactgggatcacaaccaacaaggagcatctgcacggctggatctcattcataaattcagtcgatcgaaagtccagcattaagctcaagaattatatagcgtgcctgattgaaaagtatcctgactccgaggcaagtaagaatttcctgaagatcacggagaaaaacaagactcagtga

SEQ ID NO: 10067 - RNA, 993 nt, synthetic construct
  source 1..993: mol_type = other RNA
atgcagaaaaatacaatctacacgcttaagaatctcgggttgccagctattactaccttagacgacctttcttttctcacccgcatctcccgggaacgcattatcctcctgtccacccagcataaacggttctacaacaccttcctgatgcctaaaaagtcaggtggccacagacagatttctcaaccgagtcgtgacctgaaagcactgcaaagctggatcctgagaaatattctagataagctatctgccagtaaattctccaagggattcgaaaaggggagctccacccttgacaacgcaacaccccatataggggcgaattatatcctgtcattagacctcgaggattttttcccctccatcaaaagcggctatgtttttagcatttttcgaagcatcggttataatgtccccgtttctcacactctgacaaacctctgcgtctataacggaggactgccacagggagcccctacaagtcctaagctggccaacttggtctgtagccggctcgatgctcgcataagcggctatgccgggaagaaaggcattacttataccaggtacgccgacgacatcacattcagtgctcagactgcgaagaaaatcaccaaagtgtactctatggctaagtttatcatccatgatgagaaattcgtcattaacaagaacaagacttacttttctgggacaaagaagaataaaaggattactggtctggtagtgacggaaagaagtgtgggtatagggagggttatgctgcgatcaattaaggcaaaaatccaccacctgttggtgggaagaaatgatgatcttccccacatcattggcctgttatcatacatatacggcgtggacaagaagaactacaaacaccttataaggtatatccagaaattgtcgctgaagtactccggcgtaccacaggagctcaaggatatggtggccaagcataataacctggcagcctcaaccttgtccgaggtgtga

SEQ ID NO: 10068 - RNA, 981 nt, synthetic construct
  source 1..981: mol_type = other RNA
atgaccaaaaagatcatctttaagctgaaaacgcctcctaagatcaatgatatccacgatctcgcccgggaaactcgcttgagcgaaaagcttatttcttacattgcttatcgctctaacttcctttaccgaacttactatgtgccaaagaagtccggcggtaaacggctgatcgcccagcctgcccgtgaacttaaagctatccaaagctggatattgcgcaacattttagagctgaggccctcttccaatcagagcatgggcctggaaagagatcaatcgattttaaccaatgccttaccacacatcgggaatgggtacctcttgaatatcgatctagagaactttttcccgtccatcaaatccaagagagtgtttcatttgttcaaaaagatggggtttaacaacaacatttcaacgatattcaccagaatatgcacattcaatgatggcctgcctcaaggggctcccagctctccaaaaatagcaaatctgatttgttcgaagctggatgccaggattcagggatacgtcggcaagaggggcatcaattataccagatacgcagacgacctgacttttagtgcaccaagttacgagaagatcaataagctggagattttcattaagaagctgatctccgacgaggacctctttatcaactcaaacaagaccacattttcaggaccgcgcaaacagaagaaagttacaggtctggtcctaacaaacgacagcgtgggcattggcaggggaaaatataaggccattcgggctcggatctattactacttcctgggtatagagaaagacatcgcgagtattaatggatatctctccttcatctatagtgtagaccagaaacgttactcaatgctccagcattatatcagctctctcttcgaacgattccccgtgataccctctgcaaactttgggcagtttactaacattcacttccttccccagagcgcgctgggatga

SEQ ID NO: 10069 - RNA, 987 nt, synthetic construct
  source 1..987: mol_type = other RNA
atgaaggacagcaaaacagccaaaaaatacagactcaaaagtcttggactgccaatcattgaatccgcagacgactttactcgtctgctaaaaatatcaagcagtatcatccaacagataagcaagcagacaaccaaggatagattttacaaagagtacaggattccgaaaaagtccaagggttttcggcagatagctcaacctgtgagaaagttaaaggcccttcagatttggatcctccggaatattctggataaactaactacttcggatagtagcaaaggcttcgagaagggcaccaatatcaaggataatgtgaggcctcatgtgggcgcccgagtcatcatgtcactggatttggagtcctttttccccagtatcagcagcaacaaggttttcggcattttttactcgttaggctataatacggaagcaagctggcttttcacgaacatttgcacatataagaacaaactgccacagggatccccctcttctcctaagctctctaacttgatttgttggaaactggattttcgcattgaaggttataccaataagcgcgacattgttttctcacggtatgcggatgacctgaccttcagtagcaaatcaatcaaaaagatcatcaaggctaagaacatggtaaagcacataatagaagacgagggcttcgtcataaacgaggataagacaaggatcatgggtccctctcgccagaaaaaggtgaccggattgattgtatccgggcataaggtggggatcgggagaaaaaaataccgggagatgcgagtgaagattatcaatctctttactcacgaatctgacgacttctcacacgtcatgggatggatgtcctacattaattccgtcgacaaaagcgtgtataagaggctgatcctgtacattgagaagctgtctatccagttttccaactctatcgctgttgaagagttcaaagccctcatcaagaacgggaatctgtga

SEQ ID NO: 10070 - RNA, 960 nt, synthetic construct
  source 1..960: mol_type = other RNA
atgtccaacaacggaatcatcaagttgaatatgttcggcctccctgtgatacagactctggatgattttagcttcatctcccacatcagtaaatataccatataccagctgagcaagaattccgactactattacaagatctacttcatcaagaagaagtcgggcaaacaccggaaaatctgccagccttctaggaagctcaaaggactgcagtcttggattcttgtgaatatcctggaaaagattaaggtcagtaattcatgcaagggatttgagaaaaattcttcaacactcgacaacgcaatcccccacgcgggagctaataccattttaacgcttgatctgaaggatttctttccctccatcacatcaaaccagatcttcaacatcttcaaaactctcggctataatgacctgattagcacagtgtttactaatatttgcacatttgacgggtgtttgccacagggtagcccatgttctcctaagctcgccaacttgaccgcctggaaactagactcccgtattcaggggtatgtaggaaaaagaggcatttcctatactcggtatgccgacgatcttagcttctcaggtctaaaccccgtcaaagtggtgaacatcatcccgatgatcaaggaaataattgaggatgagaacttcctgataaacaacagtaaaaccagaatcagttcttctgggcgcgctaaaattgttacggggctggttattaccgacgagaagattggcatcggtaaaaagaagtttaacaacgtcaggtcaaaaatacatcatttaagtatgccaagggaaaatgggaacataaaacttctcaatgaggtacaaggctggctgagctacctgaattccgtggatcgcgaacgattgattaagacccaaaagtacatcgaccatctgaatcaaaaataccccaatagcatgattaagtttctggtgaagtga

SEQ ID NO: 10071 - RNA, 966 nt, synthetic construct
  source 1..966: mol_type = other RNA
atgtctaataacggaatcatcaagctcaacatgttgggactgcctgtcattcagactttggatgattttagcttaatcactcacgtctctaaatataccatttaccagctgagcgagaagagcgatttctactactcaatatattcgatccccaaaaaatccgggaagcctcggattatctgtcagccatctaaaaagttaaagggttttcagtcctggattctcgtgaacgtgctggacaagatcaaagtatctagctcatgtaaaggcttcgagaagaaatcatctacactagataatgcaatcccccataagggagccaatacaatactgacgctagatctgaaggactttttcccgaacataaccagtaagcaagtcttcaacatttttaagacccttggctataacgatctgatatccacaatctttaccaatgtgtgcacctacaaagaatttctgcctcaggggtccccttgcagccccaaactggctaatctgactgcttggaaactcgacctgcggattcagggttatgttgggaagaggggcattaactatacccgttatgccgatgacctctcattcagcggccttaatccagccaacgtcgttagaatcctgcccatgatcagtaatattatcgagagtgagaacttcatcataaaccactctaagactagaatcgcaagctcagcacgcgccaagattgtgacgggtcttgtgatttccgacgacaatattgggattggccagaaaaaatataagaacgttcgagctaagatccatcatctgacaaaaccaatcgagaaaggcaatgtaaagttacttaatgaagtggctggatggctctcctacttgaatagtgtggacaagaacaggctcgccaaggcgaataagtacattaacgagctgtacaagaaacacaccaaatccatgatacaatacctcatcaagttggactga

SEQ ID NO: 10072 - RNA, 960 nt, synthetic construct
  source 1..960: mol_type = other RNA
atgtccaagagcgagataatcaagctgaacatgctgggcttgcctgtgatccagacaattgacgatttcagtctcatcactcacattagtaactacaccatttttcaactgtcgaaaaattccgacaactattataagacgtacgatatcccgaagaagagcggacgacctcggcaaatatgccagccctcaagaaagttaaaagggtttcagagctggattcttgtgaatatcctggacaaaactaaggtatccagttcatgcaaagggttcgaaaaaaagacctctaccctggacaacgcactcccacataagggcgccaatacaattctgactatagatttgaaggacttctttcccaccattacttctaaacaggtgttcaacgtttttaagacattgggctacaacaacctgatctccacaatcttcacaaacatttgtacttacaagggttttctgccacaggggtccccttgttccccaaaactggcaaatctatcagcctggatgttggaccttcgcatccagggatatgtgggtaagcgcggaattaattacacgcgttatgctgatgatctatcattttctgggttaaatccaagcaatgtcgtgaatatttaccccatgataaagaccatcgtcgagtcagagaagttcaaaatcaacaatagtaagacccgggttgccagcagcgcgagggctaagatcgtcaccggcttagtaattagcgacgaaaagatcggcattggaaaacaaaaatacaagaacgttagggctaaaatccaccatcttacactgccctctgaaatggggaacgtgaagcttctcaatgaggtgggcggttggctctcttatctcaactctgtggataaggaaagactgtccaaagccaggaaatacataaatgagctccacaagaaaaaccctaaaagtatgatccagtatctggtcaaatga

SEQ ID NO: 10073 - RNA, 960 nt, synthetic construct
  source 1..960: mol_type = other RNA
atgtcccagactaactccatcaaactcaatatgctgggtctgcctgtaatacaatccattgaggatctaagcatgctcacgcatatctctaaatacacaatctaccagctgtccattcacgccgataagtactataagacatatgagattcccaagaaatcagggcgcaatcggactattagccagcccaacaagaaacttaagggcttccagtcatgggtcctcagaaacattctggataaggtgaaagtcagcgactcatgtaaaggattcgagaaagggtcttctaccgtcgaaaacgcactgccacatcgaggagccaatacagtgctcagtatggaccttaaagacttttttcctaccattaccatccaacgggtgttttccatctttaaggttttcggctattccgacttgatatcgacaattctagctaacatcacaacttatgcgggcgcattgccccagggatctccatgcagtccgaagctggccaatctcagcgcctggaagctggatcttcgcatccaaggttacgtggggaagcgtgggatgaattatacgaggtatgcggatgacctcactttttcctcgttaaacccaagcaacgtcgtaaagatcattcccatgatcaaggaaatcatagagagcgaaagtttcttcgttaatcactcaaaaacccggatcgctggatcaagtagagctaaaatagtgaccggcctggttattagcggtgaaaatataggggtgggcaaacagaaatacaaaagaatcagggctaagatccaccatctgaccctgcctgccgagcaggaaaactctaggctgctgtacgaggtgtccggctggttgagttacttaaattctgtggataagaaccgattgctcaaggccaaggagtacattaaggagttaagcgaaaagcaccctgacactctgatcgcaaaccttaacaattga

SEQ ID NO: 10074 - RNA, 960 nt, synthetic construct
  source 1..960: mol_type = other RNA
atggccaagacagagatcatcaagttgaatatgctgggactccccgtgatacagtctatcgacgactttagcgtcgttacgcacatttccaagtatacaatttaccagttgtctcaccactcagacaagtactacaagacctttgagattcccaagaaaagtggaggaaaacgtaccatctgccaaccttcaaaaaaattaaaaggtctgcagtcctggatcctcgtaaacatactgaacaaaatccaagtgtctccatcatgtaaggggttcaggaagggctccagcacactcgacaacgccctgccccacattggtgctaatactatcctcaacctagacttaaaggattttttccccaccgttagttccaaacaagtctacaacgtcttcaaaacaattggatacaataagctcatcgctactgtgttcacgaatatttgcacctacaatgatatgctgccgcagggctccccatgttcaccaatgctggcaaatttaactgcctggaatctggatctgcgcattcaggggtatgtggggaagcggggcattagttatacccgatatgccgatgacctgagctttagcgggctgaatccaaccaaggtcgttaagatcatacctatgataaagaccatcatcaacgatgagaatttcgaggtcaaccataagaaaactagaatagcttctagcgctagagcgaagatcgtaacaggcctaattgtgaacgaagacagtgtggggatcggtaaacagaaatataaagatcttagggccaagattcaccatttgatcctgcctactgagcagaaaaacgaaaaacttctctaccatgtgggcggctggcttagctatcttaactctgtggacaagctccgcttgcagaaggcaaagaaatacatctcggaactgacaaagaagtatcctaccactctgattgcacggctggataaatga

SEQ ID NO: 10075 - RNA, 1005 nt, synthetic construct
  source 1..1005: mol_type = other RNA
atgtctaaaagcgataagtttaagctctccatggccggcttacctgtcatggagaatctgaatgatttttcccgcctgacacacatttcaaactacacattgttccaactctcgaaatattcggacaagtactacaagcattactacatccccaaaaagtccggtaagccgcgtcttatatcacagccctgccgaaagttgaagggaatccagagttggattttgaataacatcctggacaaactctgcgtcagcaattcctgtaaaggattttctaagggaacctccatcatcgacaatgttgacccacataaacattctagcgtagtgttgacaatcgacatcaaagatttctttccttccataaggagagataaggtgtacaacatcttcaaggccatcggctacaacaagttcatgagcaccatctttactaacctatgcacttgtaatggcgcccttccccaaggaggtccgtgttctccaaagctggccaatctgagcgcatggacccttgatgtgcggatccagggctatgtgggccggagagggataacttacacacgatacgctgacgatctcacttttagcaccacgaacccacagaagcttataaagcggattagtactattacaagcattattgaggacgaaaaactgcacattaacccttctaagactaggatcgcaggtagtgccagggcgcggaaagtaacaggcctcattatcaccaatgaatcattcgggatcgggcgccaggtttatctcaaagtcagggctaaaatacaccacctcaccctgaacagagaacagaagaatttcgatctgattaacgaggtccaggggtggctggcctatctaaagaacgtggacaaactgagatataaaaaagcagcggactatatccgctcattaaaagagaagtatccagcaaccctgataagtcaaattatcctgcctcccctgattttagaggttgctaccgtgattacggctgtggaatga

SEQ ID NO: 10076 - RNA, 960 nt, synthetic construct
  source 1..960: mol_type = other RNA
atgtccaagacagacaacataaagctccatatgttgggcctccctgtgattcagatggtggataacttcagccaagtgacgcacatttctaagtataccatttaccagctctcaaagcactccgacaaatactacaagacttatacaatccctaagaaatctgggaaactgagagagatcagtcaaccctctaaaaaactcaagggcctgcaaagttggatcctggccaacatcctgaacaagttaaaagtcagcaacagctgcaaggggttcgagaagggctcatccatcgctgacaatgcagagccacataaagatgccaatacaattctgactctggaccttgaagattttttcccaactgtgaagaggaatcaggtttactccatctttaagactatcggatacaataaggcaatttcaacgatcttgactaatatttgcaccttccagggcatcttgcctcagggatcgccttgttcgccaaaactagcaaatctcagcgcaagcaagttagacgctcgcatccagggttatgtgggcaaaagaggcattaactatacacggtatgccgacgacctgagtttttccgggctatcacccgctaaggttgttaagatcattcccatgataaagagcattatcgagaacgaaaatttcgtcgtaaaccccgagaagacccgaatagctggagccgcgcgggccaaaaaggtcaccggtctgataatttccaataacacctttgggatcggtaagcagaaatacaaagatcttagggcgaaaatacaccacttgaccctgccatctgaacagaccaacaccaagctgcttaatgaagtgatcggatggctgtcttatctgaatagcgtggataaaaaacgcctcagtaaggccaacaagtacattactaagctgacggataaacatccgacaacattagtagccaaacttaaacgttga

SEQ ID NO: 10077 - RNA, 990 nt, synthetic construct
  source 1..990: mol_type = other RNA
atggtggaatctacatccggcctgattaagaaaggttccaaagacaatttccgcctgaacatgttgggactgcctttaatccagacaatgggcgacctgagctccctcacgcacgtgtcagagtacaccctctacaatctttctaagaacgctgacttccattataggatttatgatatccccaagaagaacaaaaccccacgtgaaatttcacagccctccaaacgactgaaaggcctacagtcatggattttggttaacatccttaataagcttcgcgtgtcaaatcattgtaagggatttgaaaagggaagttccattgcggataatgccgaagcacatatcggagcaaatactatcctcaccatagacttgaaggatttttttagctcaatcgattcgattaggatctacaacattttcaagagcatcgggtacaattctttgatagctactgccttaaccaatatttgcacatttagaggcgttttgccccaggggagcccatgcagtccgaaactcgccaacctgtccgcctggatgatggacgtaagaatccaggggtatgtgggtcaaagaggtatcagttacaccaggtacgccgatgacataagtctgagcggactgcacccttccaaagtagtgaagctgttgcctatgattgagagcattattaacgacgagaaattcgtggtcaattctgacaagactcgaatcgcagggagcgctcgggccaaaaaggtcacaggcttagtcctgtctgataattcgtatgggatcggcgctaaaaagcttaaaaacatacgggcgaagatatatcaccttgttctgccagaagagcaaaagaacatcaaactgctgaacgagctcaagggctggctctcttatatcaatagcgtggataagcgccggctggagaaactccacctgtacatcaagaaactcctaaacaagaaccccgagacgctactggcacagctgagtatttga

SEQ ID NO: 10078 - RNA, 969 nt, synthetic construct
  source 1..969: mol_type = other RNA
atggtgaagaacgagaatattcggctgaatatgttgggtctacctataattcagtcaatcgacgacttctcccacattacccacctgtcaaagtataccttatatcagctcagcgagaaaagcaattttcattacaagaagttcccactgaagaaaaaaactggtggtacccgtactatctgccagccctcgaagaatctgaaaggcctccagagctggatcttggtaaacattctgaacaaactgaaggtttcagactcttgcaaaggcttcgagaaaggcagctcaatcggagataatgcccgccctcatatcaacgctaattgtatcctgacaattgacttatccgacttttttggaactgtcacagacatccaagtttataacgtgttcaagtctataggatacaataaactgatcagtaccatgctgacaaatatctgtacatgtgacgggagtctgccacagggctccccatgcagccccaagcttgccaatttggtgacctggaagctggataagcggatccagggttttgtggggaaaagaggcatcacttacacgaggtatgcggatgatctctctttcagcggactgcatcccgccaacacggtacaaattcttcctgtcgtgaaaagtatcgtcgaagatgaggggttcattataaacccgaaaaaaaccagggtcgctggggcatctagggccaagattgtgacaggacttgtgatttctaacaataagtttgggataggcaaaacaaagtacagaatacttcgaagtaagatctaccacttgactaagcccaaagaacagaagaacactgacctcctcaacgaggtgaacggctggattgcatatctgaaatccgtggataaatcccgctttaataaagtcttcaagtacgttaccaagctaaagaaggaacaccctaagaccctcgttaaccaaattacgatctccaataactga

SEQ ID NO: 10079 - RNA, 972 nt, synthetic construct
  source 1..972: mol_type = other RNA
atgataaagaatgagaacatacgcttaaacatgctgggacttcccattattcagtctatcaatgacttctcccatattactcacctctccaaatatacactgtaccagctcagcgagaagtccgatttccattacaagaagtttcctctgaagaagaaggctggtggaacgcggaccatctgccaacctagcaaaaatttgaaggggctccagtcttggatcctcgtgaacatcctgaacaagctcaaggtgagcgatagttgcaaaggttttgaaaaaggatcttccatcggagataatgctcgtcctcacatcaatgccaactgtatcctgaccctggacctgtctgacttctttggcactgtctctgacatccaggtctacaacgtgttcaagtctattggctacaacaatctgatttcgaccatgatgacaaacatttgtacgtcggatgggagtcttcctcaggggtcacccagcagcccaaagttggccaacttagtctcctggaagttagataaaagaatccagggtttcgtagggaaaagaggcataacttatacccgatatgcggacgaccttagtttttcaggcctccatccggcaaatacagtgcaggttctaccagtcgttaaaagcattatccaggacgaggggtttcggattaatcccaggaaaacacgagtgtccggcgcttcaagggcaaaaatcatcactggcctggtgattagtaacaaccgcttcggaatcggccaaaccaaatatagaattttgcgggccaagatttttcaccttaccaagcccaaggagcaaaataacatcgacctgctgaatgaagtcaatggttggatagcctacctgaagagcgtagataaactgaggttcaacaaagtgttcaagtacgtgtcaaagttgaaaaaagaacacccaaaaacactaatcaaccagatgaccatagccaatattgtttga

SEQ ID NO: 10080 - RNA, 963 nt, synthetic construct
  source 1..963: mol_type = other RNA
atgaacaaaagtaatattatccgcttgaagatgctcggtctgcctgttatggaaaaggtggatgactttgctgagttaactcgtttgagccgttctatcatctaccagatgtcgtcctttgcgaatgaatattacattacataccagaggccaaagaaaactgggggtaagagaacgatctcacagccatccagaaaattaaaagctctgcaagcgtggatcctcgtgaatatcctgaacaagttaagcgtgtctccctcctgtatgggattcgagaaagggacctctacctaccagaacgcaaaggcacacataggcgcaacagccattctcaccgtggatattcaggatttctttcctagcatatcccagcgacacgtttttaacatttttcgagccgtcggctacaataatctgatctctatcatactgagcaagatttgcactttcgagaataagctgccccaagggggaccctgcagcccaaagctcgccaacctggtcgcttggagactggacaacagactacaaggatacgttggcaaaaagggcattagctatacaaggtatgctgatgacctgtccttcagtggacccatgccatctaaggtggtcaggagtcttcctttcattaaatcaatcattacctcagagaggttcgaggtaaatgacaagaaaacgcgcatcgcaggcccgagtcgcgccaaaatcgtgaccggactcgttgtcgggaacgatggcgtagggatcggtcgggaaaaatacaaactgtttcgggccaaaatacaccggctgaccaaacagactgagcagacaaatcttaagttgctttccgaagtgcatggctggttggcctatctgcatagcgtggacgtcaaacggcttaataaggccaagaagtatatcgctaacctcaaaaacaagtatcctgaatcactagtgtccaagattaactggaagtga

SEQ ID NO: 10081 - RNA, 981 nt, synthetic construct
  source 1..981: mol_type = other RNA
atggcgcgtaaaactctgaagaagaccgacaatgtccgattgaacatgctcggcctgcctgtgataggaacactcgatgatttctcagcgttgacccacctgtccaaatattccattttccagctctccaagaactcagggaagtactacaaagtttacgagattccaaaaaagtctggtaagaagagagaaattgcccagccaagtcgcaagctcaaggcccttcaaagctggatcctggtgcacattctgaacaagctcaaagtgagcccctcctgcaagggatttgagaaggggcagagcatattagagaacgcaaaccctcatgttggcagcaacgccatcctcaatattgacctgaaggacttttttccttcagtgaagtctaactacgtgttcaacatcttcaagtctttaggctatgaccataccatcagcactatccttacaaatatctgcacctttcaggggaaactgccccaagggtcgccatgttcccccaaattggccaaccttgcttgctggcagctcgacaataggatccagggctatgtcgggaagcggggcattacctatactagatatgccgacgatctgacttttagtggtctgtctcccaataaggtaatcaaaatagccaagacggttgataaaatcattcagaatgagggtctactgatcaataccgataagacacacttcgcaggaacagcaaaagctaaaaaggtaactggactggtgatcaatgacaaaagcgctggcattggaaaaaagaaatatcatgaacttcgggccaaattctgtaaccttgctaagccggagaatcaggaaaaaaaagataagctgtaccacgctataggctggttgagttttttaaagtcagtggatattgtccgctacaaaaggatcctgcactacattgcagccctgaagacgaagtaccctaacacacaactagacatgatcaaaaccgaccagtga

SEQ ID NO: 10082 - RNA, 966 nt, synthetic construct
  source 1..966: mol_type = other RNA
atgacaagcacaatccgtctgaagatcctgggtttgcccaatatcaccgatcttgaggattttgcctacctcataaatctgtccaagaactcaatctaccagctgagcaaaaactccgaatattactacaagacctatcagattgccaaaaagaacggaaaacttcgcgatatctcacaaccgaacaaacagcttaaaggcatccagttgtggatcctgaacaatatcctgaataagctcaaagtatctgagtacagcaagggtttcgaaaagggtcagtcaattagtgataacgtgcggcctcacattttctctaattgcctgttaaacatcgatatcaaagacttctacccatctatcaattccattaaggtctacaacttgttcaagagcattggctacaataatctcattagcaccttactaaccaatatctgtacctacaaaaactctctgccccagggaagtccttgttcacccaaaatatccaatctgatttgctggaaaatggactcgaggttgcaggggtacgtcgggaagaaggggataatattcactaggtatgctgacgacatcactttttccagtattatgcctgataagctgattggagtgctgccatttgtggaaaagatcattatcgatgaaggctttaccttaaataagtacaagacgaggtttacaggcaaactcagacgccgggagataacaggcctggtgatttatgacaacaactttgggataggacggaaaaaactcagaattattagatccaaggtctacaatttcactaagactactgacaacgtgaaccataaagcactacaccatctttatggctggatgaattacatcaagtctgttgacgaggttcgatataagagtttgctcgagtatatcaaactgctgtatcaaaagaatcccaaaacagacatcaagacgctctataactattataacagctga

SEQ ID NO: 10083 - RNA, 1002 nt, synthetic construct
  source 1..1002: mol_type = other RNA
atgaaaaggaagaataacttcaagttgaacttgtttggcattcccataataaatacccttgatgatctgagccttcttacccatataaccaagtctacgttatttagactctcaaaaaagtcgtacctgtactacaaagagtacactgtaccgaaaaaaaataagggagtgcggaagatcagtcaaccttccgccaagttgaaggggatccagtcctggattctccagaacattctagaaaagcttaaggtcagcccatcttgcaagggtttcgagaaagggactagcacagcagataacaccaaacctcacgtgggtgccaatgccatcttagtcgttgacatcaaagacttttatccttcaatcaaagggaatttcgtgttctctctgttcaagctcatcggctataacaacctgatcagtactattctgactaatctatgtgtgctcaatgactcactgccacagggctctccttgcagccccaagatcgctaatctggtggcgtggaagctggacattcggatccagtcttacgtcggaaaaaggggcattatttacacgagatatgctgacgatctgacatttagctcaataaacccagccaacctgattaagatcttgcccattgtgaaagacatcatagagagcgagaacttcgagataaacaagaataaaacccgctttataggaattagtcgatgtcgcaaaattacagggctcgttctgagtgataataacttcggcgtcggcaagagaaagtacaaaaacattcggagcaaagtgtttaagctgaaggacatcgaaaaaatcgaggacgacaaggaaaagcgaaaaatcaaggaaatgaaggaggtatatggactgatcgcttatctcaaatccgtggataaagaaaggtacttacgtatcctggattatatccgcacattgtccgttaagtatcccaattccatcctcaccaatatttccttcaacactaagacaaccattgcaaaatga

SEQ ID NO: 10084 - RNA, 966 nt, synthetic construct
  source 1..966: mol_type = other RNA
atggccagcccatctcagacctccaagcttaggatgttagggctccccatttttgatgacctagagagcttcgcccaagtcactcgcttatcaaagaagttcctctatctgcattcttcattcagcgaccagcactacaagaagtacttcatccctaaaaaaagtggaggacaaagagagatctctcagccatccaaagctcataaagccattcaaggctggattctccgtaatatcctggatctgttgcaggtgtctcaggcatcgaaaggctttgcaaaaaaacaaaccactgcggacaacgccattccccatattggagctaatgctatcctcagtttggatctggaggacttcttccctagcattaccgccaacaaggtgtacagcatctttcactcactgggctattctaagcccatatctatcatgctgacctcgatctgtacttgtggggggaagcttcctcagggttccccatgcagtccgaagttggcaaacctcgtatgcatcagacttgataatagggtgcaggggtatgttggagcgagaggcgttacttacacacggtatgccgatgatctgacttttagcgctgctcaccccggtaagctaatgcacattttcaacttcatccggaggataatcacagaggaaggcttttccttgaacgaaagcaaaacccggctggcaggcacacgactgagaaagaaagtgacaggactcgttgtcaccgaaggcgccgtcggagtgggtcgaataaagtaccgcgagctgcgctcaaaggtatttaacctcacgaaaacacaggacattttttatgaccagaaggagattaatgagatctacgggtggctgggttacctgaagagtatcgactccaaaaggtacgagaaactggtgtcccagatagaaacgcttaagaaaaatcacaaggaaacctcccttgactatttactggtgtga

SEQ ID NO: 10085 - RNA, 1014 nt, synthetic construct
  source 1..1014: mol_type = other RNA
atgaacacgaagatgcgccttcacctactggggctcccctcaataagcagcatagacgaattatccgatacaacccatctgagtaagtcacttatctttaggctcatcaaatacaacgataagttttatcgcgtctataaactccccaagaggaatggtggttatcgagaaattgctcagccatctaaagaacttaaggccttacaggcttggatcaaccggaatattctggaccgcctggaggtgagccccgcatgtaaaggctttgagagagataccagcatcctggataatgccactccacatgtaggctctaacgctgtgctgatattagacatcgaagactttttcccgtctattaccgcgaataaggtgtgctcgctcttcaaaaggattggctatccctcccaggccgcagctatcctagcgaagctttgcacgtttaagggcagattgccccaagggtcccctgcaagcccaaaaattgccaatttggtgtgtctccgacttgacctgcgtattctcggctatgtcggaaagagaggcatcgtgtacactcggtatgccgacgacttgaccttctccgggccttcaacctcatccctgctgaaactcttgtacgtcgtcaaaacaattatcaatgacgagggtttcgaaataaacaactacaagactaggatcataggaccgtcgaggcagcacaaaattacaggactgatcgttaacaacagcttcgccggaattggccacagacagatgcgcgttatccggagtaaggtacatcgtctgtgcaagtacgatgcatacagtgtgcctcaaaaggagctaaatcacgtgatggggtggctggcttttgttaagggtgtggatacaaaacggagtttgattctgtatcggtacatccaggggctcaaggagaaataccctgattccggaatccagaaactgaagattgatttcctgctgaataagccttctaaaagatctatcgccagcggggagccagacctgtga

SEQ ID NO: 10086 - RNA, 954 nt, synthetic construct
  source 1..954: mol_type = other RNA
atgtcttccgacagaatacgccttggactgattggacttccgaagttggtcagcattagcgacttgagtgatgccattaggttaagtaaaggtctattgttccggtgtgcgaaatacccaaataagcagtactatacctatacgatccctaagaaaacgggagggacacgagtgatctcacaaccttccgcagaactgaaggctgtgcagggctggattctgcgtaccatcctggatcgcctctctgttagcccagcttgcaagggtttcgtgcctggcgcaagcacccgagataatgcaacgccccatatcggcgccaaagcaatcatgtgcctcgacatacaggacttctttcccaacgttaaggcttctcatgtctactccctgtatcggactatagggtatagtacccaggtggcctcgatccttacttctctctgtacctttcatggcggactgcctcaaggcgccccgacatcacctgccttagccaatctcacctgcgtaaggtttgatgcgcggatacttggctacgtggggaaaagaggcattgtgtacactcgttacgccgatgacttgacattttccgcctattcatacagtagcctcccacgggctctcccaatgattactaagatcattgaatccgagggtttcctggtgaatcggcagaaaacccgcatcagaggacccgccagaaggcacacagtgacaggtctagtggtcacccagaacaacgttggggtggggcgcaagacttatagggagctgcgagctaaattacacaggctggccacaatgcccatcaaggcagttaaaaggaaggagattgctaaggtcaagggatcaatggcgtacctcaacagcgtcgacaaagtacgcagagatagactggacgactacctgatccacctgaaaatgaactatcccaagtctatcctgactaagatgtga

SEQ ID NO: 10087 - RNA, 972 nt, synthetic construct
  source 1..972: mol_type = other RNA
atgtcgagcgataaatacagactgagtctatttgatctgccaaaaatcgatagccttgaggacctgtcatatttgtccaggctgtcaaagggtcagctctatcgtttcgccaaatactctgactggttctacaaaagctacaggatccctaaaaaaagcggaggggaaaggattatttaccagccctcttttaagctgaaagcaatccaggcgtggatcctgcgtaatatcctcgaaaggctgtccatttccagtgcctcaaaaggcttcagtattgggtctagcattaaggataacgtgaagcctcatgtcggcgcaaatgccatccttgccattgatatcgagaatttctaccccagcatacccgctaatagagtgtggttcgtgtaccgcaccgccgggtattctccacagattgctgctgtcctcacatctttaacaacctacaattcattcctacctcagggtgcaccctcatctcctcgactgagcaacttagtttgttggtccctcgataaacgaatgctcgcgtttgtgggaaaacgggagataacttatacccggtatggcgacgatctgtccttttcagcctcttcataccaagttttgagtaaaagctttcacactatcaagtccatagtaagaaacgagggattctctctgaacgagtcgaagacacgctttatgggaccggcaaagcagcgcagagtaaccggcctgatcctgtatgaaaaccagtttggcatcggtcgcaagcaatacaggatcttacggagtaagattcataagatgtgctttataccatccgacgaaattgactccttcctccttaaccacattgccgggtggttgtcctatgtgaaagacgtcgacacgaatcggtacaataagctcgctaagtatatcctggacttgaagaagaagttcaacagtagcgctgttagccttctgaacgtggagatctccgcctga

SEQ ID NO: 10088 - RNA, 1005 nt, synthetic construct
  source 1..1005: mol_type = other RNA
atggataataataacaacattgcgtcatacttcctcggaatccctaccatcaataatcagaaggacttagccaaccacctgaacctttccgagtatactttgcataaggtgatcaaatgcactgataagtattacaaggaaatccgcattcccaaaaaaaatgggggtacccgtagactggcctgtccttcaaagaagttgaaagctgtacaagcttggattttacgcaacattctcgaccatctttctgttaatccaagcgccaccgcatttaagaagcggacaaatatcacaagcaacatagagcggcatactgataatcaattcttcctctgtctggacatagataacttcttcgaaagtattccgcagaagaacatcaacaatttttttaaggccctggggtacaataagcacgtgtcctttattttagccaagatttgcacctacaagggatttctccctcagggcggagtgacctctcccgcactgagcaacctgatcaatatcaagctggacaaacggatatcaggctactgctccaagagaaatattgtctatagcagatacgccgacgactttactttcagctccaacaatccaaataagctgatccagtcgattaagatcctgaaaaagatcatcaatgaggagaactatcagttgaacaacaacaaaacaaggatcattcgccccggcaatgcaaaaaaaattacaggccttctcattactgatgaaggtaagatatctatcggacgaaaacaaaggaaaacactaagggctacgatctataacagtctgaacaatgacaaccttacgatccaggagaagatagatatcgaaaatcacattaacgggtggctgtctttcttgaaaggcatcgactataacagttaccagcagctactgaagtggaaagaggagttcgagaaaaaagcgcagaccaacaaaatagctaaacaactcgagaaggaagagtttgaagaaatgctgcgatccttctga

SEQ ID NO: 10089 - RNA, 990 nt, synthetic construct
  source 1..990: mol_type = other RNA
atggacaataacaacaatatcgcgtcatactttctagggatacccaccatcaacaatcaaaaagatttagccaaccatttgaacttgagcgagtacaccttatataagatcatcaactactccgacaagtattataaggagattaacatccctaagaagaatgagggcataaggaagctggcctgtccttccaaaaatttgaaagccattcaggcttggatactccgtaatatccttgatcccctcagtactaatccgtctgccaccgcattcaagaaagagacaaatatcactagcaatgtggagcggcatctggataaccagttcttcctgtgcctggacattaacaacttctttggctccatcccccagaagaacatcaacaactttttcaaaactctggggtacaataagcacgtttctttgatgcttaccaaaatctgtacgtataaaggcttcctgccacagggaggtgtaacttctccagctctcagtaatctgatcaacattaagcttgacaagcggataagtggctactgcagcaagaggaatatagtctatagcagatatgctgatgacttcacgttttcatccaacaatccaaataagctcattcagtccatcaaaactatccagaagatcattaacgacgaaaactacgagctcaacaacaaaaaaacacgaattattcggcctggaaactctaagaagatcacaggcctgattattacagacaacaagaaaatcagcatcgggagaaaacaaaaaaggattctgcgcgcaacaatgtacaccctgtacaataatgatgccctaacccaaaaggagaagattgaaatggaaaatcacatcaatggttggatagcatacctgaaaggaattgactataattcacacaagcagctgctgaaatggaagaaaaagttttcgcatgaacgcgatcaaaaagtgatgaaagagcttctcaagcagtttcagatggaactctga

SEQ ID NO: 10090 - RNA, 1056 nt, synthetic construct
  source 1..1056: mol_type = other RNA
atggtcagcatgttcattgatccactgaaaaatcacaagaagcggctcaacatggataacaataacaacatcgctagctatttcctgggcatccccactattaataatcagaaagacctagccaaccatctgaacttgtctgagtattcactgtacaaggtgattaacttcaccgactggtattacaaaaaggtccagataccaaagaaagacgggacattccggaaccttgcctgcccatctcagacgcttaaagccattcaagcatggattctgcgaaacatcctggaccctctgtccgtgtctgccagcgctaccgcattcaagaaggaaaccacaatcaagtttaatgtggaaaggcacagcgataaccagttttttctctgtctcgatatttcgaatttcttcgaaagtatccctcaaaagaaggtgatctccttttttaaagccctcgggtacaataaacatatagccctgatactgagcacactttgtacctacgaaggaagtcttcctcagggaggggttacttctcccgcgttatccaacttaatcaatactaagctggacaaaagaatcagtgggtactgctctaagaagaatatcgtatatagtaggtacgcggatgattttaccttctcctccaacaatccgaataaactcattcaggctcggaacatcattaaggagattatcaatgacgagggctatcaaatcaacaaaaagaaaacgcgtttcatccgccccggaaacagcaaaaaaattacaggcttggtgatctcagatgataataagattggcattggtcgaaagcagaaaaaaatactgagagcaaagatccaccagtatttcttaaaggaccaattgactccccaggacaaagaggagctgaagaatcatatagagggctggataagctacctaaagggtatcgactacaactcattcaagcaggttcaaaaatggcagagggagttttcattgaaggccaagaaagagaaaagaaagaaagcagctgaaaagaaggaatttcaggagctcctgcgctccttttga

SEQ ID NO: 10091 - RNA, 960 nt, synthetic construct
  source 1..960: mol_type = other RNA
atgaacattgccgcttatacgctgggtatccccaagatcgactcactgctggatttgtctaatgcaattaatctctccgagtatacccttcagagaattctgaactccgttgacgaccaatattacctgattaagattccaaagaaggataatagcttccgggaagtgtattcacccagtcccgcactaaaggctatacagaaatggatcctcgaaaacatcctgcagcctatagctgtggatccatccgccaccgcctttcagaaaggagtcactatcagaaataacgttgagctccatattgataatcagttcctgctttgcatggatatcaaggactttttcccttctattaagaagaacagagtgtaccaactctttcgaagcgtaggctacgatgaacacatctccttggtgttttctcgcttctgcacctataaggagttcttgccgcagggcgcagtcacaagccctagtatatcgaacattatcagtatcaagcttgacagacggttaaatgggtactgttctctgaggaatatcgtgtatagccgctacgccgacgatttcacattctcaagcaacaatactgacaagctgaggaaatccataaacatcttgaaagcgatcatcgaggatgaggggtacaccctgaacactagtaagacccgattactaattccaggtaataaacgtaaggtcacaggactcattatctctgacagcaaaagcatttctattgggcggaaacagcgtaggatcctgcgcgccaaaatccatcactcgatctttaaaatggagaaaaacacagactcctggaggctttttaacaagcacattaacggatggttaagcttcctgaagggcatagattatgaatcatacatttccctcctgaagtaccgggagaatctcaaacagaagaaaaaagaacaagaggacataatctcagtgttttga

SEQ ID NO: 10092 - RNA, 972 nt, synthetic construct
  source 1..972: mol_type = other RNA
atgaatatagctgcttactctcttggtatacccaaaatcgagaatttgaaggacttcagtaacgagatcaatctgtctgagtatacactgcaacgcgtactcagctccgtgaacaaacagtacaacgtggggaaaattcccaaaaaggatcagtcatttcggactattttcatcccaagtaacgcgctccgcgccatacagacctggatcctgcggaacattctagacttgatatccattcacccctctgcaatggcctttcggaagaataccacaattaagaacaatgtggaggttcacattgacaatcagttttatctgtgcatggacgtacaggactatttcccatcggtcggcaagaacaaggtgtatcaactgtttcacagcattggcttcaataagcagatggccctgatcttttccaacttctgtacatacgaaaatttcctgcctcagggagcagtcaccagcccgtccatcagcaaccttgtgaacatcaagctggatagacgcatcaacggtttctgctccattaggaatatcgtgtatacaaggtacgccgatgatttcgtctttagctcaaataatagtgacaagctgaaaaagagcatttcaactcttaagaccattattgaggatgaggggtacaaactgaacgattctaagactaggctcctatctcctggaaacaagcgaaaaataaccggccttatcgttagtgacaaaaacaagatctccatcgggcgtgaaaagaggagaaaattgagagctcgaatccatcattcgatcttcaaactcgaagaggacaagaatttagcatcctggtacgaaatgcacattaatggatggctgagctttctgaaagatgtcgatcaaatctcttaccagcatctcgttgactataagatgaagctcgaggacaaaaaaaaaaagcaggatgaattgatggacgaattaacgtcagtgttttga

SEQ ID NO: 10093 - RNA, 939 nt, synthetic construct
  source 1..939: mol_type = other RNA
atgaatataactgcttattctctcggccttcctcgcgtcgataacattgaggagttgtcctacaaaataaatttgtcagaacacaccctccacaaggtcctgaagacagtagatctgcagtacaaaactatccacatcccaaaaaaatccggatttacaagaaccgtgcatagcccttcaatggttctaaaagcgattcaagcctggatcctgcggaatattctggatccgatcttagttgatcccgccgcaacagcctttgtgaagaacacgaatataaaggacaacgtcaagcggcacaatggcaataggttttttctctgcatggacattgaggacttcttccatagcatcggtcagaataaagtgtaccagttcttcaagggactggggtataatagtcacatgagccttgtgttctcgaaattttgtacctacgatgactatctcccacagggggcagtcacctccccctcactgtctaacttgataaacatcaagttagaccgcaggattttcggctattgctctagtaaaaacatcgtgtattctaggtacgctgacgattttacttttagttgtaataacccccacaagcttatcaaggctaagtacatgctagaaaagattattgaggacgaggggtacgaactgaacgagaacaagacccgaattctcagaccaggtaatgcccgtaagataacaggcctcattgtagccgaagacggaaagatcggcatcgggagaaaaaaaaaacggctgattcgagcaaacatctataacctgtacaataaggatctgcctgacgacgagtataagaaactggaaaaccatatccagggatggttcaactatctgtacagcgtggatcaggtggcctaccatcagcttaagaactaccaatccgaggttaaattgaatagcatcttcgctttctga

SEQ ID NO: 10094 - RNA, 975 nt, synthetic construct
  source 1..975: mol_type = other RNA
atgaacattgctacttatagcctgggcattcccaagattgagaacatagaagagttgtctcacaagattaatttgagtgagtacacgctacacaaaatcctcaaaagtacagaccagcactacaagatcattaagattcccaagaaaaacggtgagtttagggaactgtcttgtccatcattcatccttaaagggatccagaagtggattctcaagaacatcttaaccccgaattcgatagaccctagtgcgactgccttcattaagaccaaagggatcaagaacaatgttaatcggcatcagggaaatcaattcttcctttgccttgatatcgacgacttcttcccttccatacagcaaaacaaggtgtataatctcttcaagagcatcggctataatccccatatctctctggttttatcttcactgtgtacctacagaggagtactgccacaggggggtgtcaccagcccaacaatctccaatctggtgaatatcaaattggaccgccgaatatccggttactgctcgtccaggaacatagtgtattctagatatgccgatgattttaccttttcaagcaataaccctcacaagctgactaaaagcatcgcaacaatcaagagcataattcaggacgagggctacaagctgaacaacaagaaaacaagattcctgaagcccggcaacaagcggaaaattacagggctcgtcctgagcgacgagactggggaatttggaatcggcaggaagcagaaacgcatccttcgggctaagattcatacgctggtgtttaagctcaatgaaaacgataagagttggaaagccctaaacgaacacatcaatggctggctctcatacctcaagggaattgattttgaggcttattcccagttatccacttacaaagaggacctgaaagataaaaaagcaaccttgtctgccaaacaacgtgaactgttcgatctgttttga

SEQ ID NO: 10095 - RNA, 1002 nt, synthetic construct
  source 1..1002: mol_type = other RNA
atgagcaatatagcctccagatttttaaacctgcccacaattaataacctgaaggatctgagtttactgatgaatctcagtgaacacttcctcaatcaactctcaaggaatgtggactaccagtacaaagaagtgaagattaagaagaaggacggatcaaaaagactccttgcttgcccgactcagagactcaaagccgtgcaagcatggattctacgtaacattcttgaaaaactcagctgcgattccagcgctacggcatacatcaagggttataacctgaaaaacaatgcccagatgcatacaggatcatctttcttcttgtgtctggacatcaaagattttttcggcactattccacagaaacatgtttaccagctattcagggctctgggttacaacgagcacgtgtccattatcttgtctaacttctgctgttataagggggtcctgccccaagggggagtgacatcacctatactgtccaacctaatcaacattcgactcgacagacgcatacagggttatgtctctaagaggaatattacctatactcgctatgccgatgacattaccctgagtgccaataaccctgacaaactgatcaaggtcaaagggttcgtagagaagattatcaagaacgagggctatatcctgaatgagaacaaggcaaggtttctgcggcccggcaacctggtgaaaataaccggattagttatctccacagatggctcgatttctatcggccggaagaagaaacggttgttgcgagcgaaaatccacaaactgtactttgacaccaatttgtccaaactggagaaagacaagcttagcctccatataaatggctggtttagcttcttgcgctctatcgatccagatgggcttaaccagctcaaactttacaccaagaagcttaagcagaaaaagatcaagcagaagaagtacaagatcagccaaaaaatgaataagcagaaggaacaccagctgagtatcttttga

SEQ ID NO: 10096 - RNA, 954 nt, synthetic construct
  source 1..954: mol_type = other RNA
atgtccaatctgtttggcatacctaatatagaagggattaatgacttcagcaacaagaccaacatttcgtcttacacgttgtttaaaatgagctctaaaccggacctcaactataaaaaggtgctgatccccaagaacctaggtcgtgggactagagtcctggcttgccccagctataaacttaaagctatccaggcatggattctgcgcaatatacttgacaatattcagtcccatcgaaacgcaacagcgtataacggaaaaagtctggacgttaacctcaagggccatgtggggaataagtttctgatctgtatcgacatcgtgaacttctttcccagcacgaaacgggagcgggtgtatgacctttttaaatccttagggtacaatgagcagtctgccatcatgttgactaaattctgcactttcgaaggtggattgccacaagggggagttacctcccctgctctgagtaatctcattaacaaggacctggatgatgagatctctaaatactgtaacgcaaagtcaatagcctacacccgatatgccgatgatattacaatcagctccaataacaagaacaagctagatgaagccttaaaatacatcgagaaggtgatacaaggccacggctatcaaatcaaccgggataaaacacgccacctccacccaggtaagcagcgcaagattaccggacttgtatattcaaatgatcagaaggtcggcattggcagaaggaagaggaggatcctgaggtctaagatctacaattacgaaaacaaggagaagttcagcagtgagtcaactatgatctacaatcagattattggatggctgagcttcctcaaaagtgtggactccgaatcatataaatacctgaagacctactggaagacactcagaaataacgacttggagacagaggtcgccgctaccaaacaggataagtga

SEQ ID NO: 10097 - RNA, 1113 nt, synthetic construct
  source 1..1113: mol_type = other RNA
atggctgtgcgaaggcctgggcgcaagcagactctcacagctgtgagtcggaggcaagtcgcacctcgagcagcccttgcctctctgctggtattcgttatgtgtttctgggccagagccggaccaccacctaagcctggaggagcccgcgtggcttctgactcatacaggcttcgggtgttcggccttccggtcattgagagcgtggccgagttagccgccgcaacgcatctgagtccagccttactctatcacctgtgtcagtttcccgatagattttaccgcagatttagtatccctaagaaatccggagcaggtgccaggcaaatccgatgtcccgcgaggcccctcaaagccctccaagcttggctgctgcgcgccatattggattccgtgaaggtccaccccgccgctactgctttcagaaagggccacggcctgcgtagcaacgtgacaccacatcgcgagaatcggtactttctctgcctggacatcgaggacttcttcccctcaattggctacgcgaaagtctggaccgtctttcggactctgggctataatgctcacatgtcgcatgtgttcgcgtccatttgcacatgcgatggcgtcctgccacaggggggagtgacttctccagcgttgagcaacatcgtgtgttttcggatggacgcgcgcttagcagggtattgcggtaagcataacgtagcatatacaagatacgctgacgacatgacattgtctgctacctcccctcgggttctcgttgccgcaaggaggatgtgcacgaggataacacgcgatgaaggtttcgcactgaatgagcgtaaaaccagagtgatgggaccccggcagtgtagacacgtaaccggcctggtggtgagcgacagaggtaccgtcggggttgggagaaggagggaacgcgttctaagagcagccattgctaggggcgcaacccgagatactgggctaaccgatgccgaaggccggagactgaggcaccgcatccgtggatggttggattatctccaggacgtagaccgtccgcgggctgatcggctgaaacgataccgaaccgcccttcttgaacggtggcaggtgtcagaccaggcttga

SEQ ID NO: 10098 - RNA, 951 nt, synthetic construct
  source 1..951: mol_type = other RNA
atgtccggcaaccgttacagacttcggatggccggcctgcccctcatggaagacttgaaggacctggctgactatgttcacttaagcgccggactgctgtatcggctgtcaaagtacaacgacaagttctataagagtttccagctgccgaaaaagtccgggggctttcggatcatcagctgtccctcaaaggacatgaaggctgtacaggcgtggatactaaggaatatactggaccaaatccacgttgcagactctgctacaggattcagaactggaaagaacattcttgataatgccaagtatcacgagggcaatcgatactttctgtgcttggatatcgagaacttctttcctagcatccagtacgccaaagtgtacaccgtgtttaagacaatcgggtacaatactcatatttcccacattttcgcatccctctgcacttgccgagggaagttacctcagggtggcgtgacaagtccagccctgtcgaatatcatctgcattaggctggaccatcgcatttctgggtatgtgggaaagaggaacgtagcgtacacgcgctacgccgatgatatgacgttttcatctctgagcccagggcggctagttgggattaaacgcgtcgcattaaaaatcatcagggacgagggctttgaacttaacgaaaggaagaccagattcctcggcccttgtagacaaagaaaagtcactggtttgattatttccgatgactcactgggtgtgggtaagaaacgcaaaagaatacttagggccacaatccatcgactcgtgaccgctgatctcagtgagattgagcgtcagaaactgcggaatcacatagatggatggttcgcttatatgaacagcgtcgatcccaaaggattcgagcagctcaaaacctatgaagaacgcctcagcttggcatgttctggcgaggataccatctga

SEQ ID NO: 10099 - RNA, 1011 nt, synthetic construct
  source 1..1011: mol_type = other RNA
atgaccgataaaagcaaaaagagttacctgctgcaactattttcacttcctatcctaaacaatctcgaggatttgtcagtttgcacacacttcagtaagaagatcctctaccgattgtctaagttcaattcgaaacattatgcacgatttagtatcccaaagaaatctgggggcaacagagagattctgtgcccctcgctggaaatgaaggccatacaggtctggatactgcgcagcattctcgagaaaatccaagtgagcaaggctgccactgccttcagaccaaagaccagtatagctcagaacgtcgaccagcatctcggaaatcaatatgtgtattgtctggacctggaaaatttcttcccgtccatcagctacagcaaagtttatacaatcttcaataccatcggctatattccccatgtggcacacatccttgccagcttatgcacttgtgacggcaagttgcctcagggagcagtaaccagccctgctctgtccaacatcatttgtctgcgcctggacaacaggctgaatgcttacgttggagcaaagaacatctcttacacgcgttacgccgacgatatctgttttagtgctctttccgactcacggctgtggggcattagaaacacggtcaagcggattatagaatccgagaagtttgtgattaacaagcagaaaacacgcatgcaggggcccactggttgccggaagataacagggctcgtgtttaataaagattcttatggtgtggggaggaagaagaagagagttttgagggccaaaatctttaactacatttctaccttcacctccatgtctcccgacgtgcagctcaaaactgcccagcacattcacggctggatctcctttctcaactcagtagattcccagggatgccaacagctgaccaaatttagcaagattgtgttcaatcaggccgtcgtggcgaaaaaaattgatcctgcgaagatcccagcaccattccttaaagtcttatcaaggtga

SEQ ID NO: 10100 - RNA, 957 nt, synthetic construct
  source 1..957: mol_type = other RNA
atgctggatacaactgatatactgcgcatcccacggataaaagacctgaaggatctggctttccaaaccaaattaagcattggtctactgtataagatggtgaatatccccgataagttctacattcagattgaaatcgacaagaagaatggcagaaagcgcaagatcgagtgtccttcaaaaaagatgaaagctattcaggcatggatcctgcgaaatgtgctggataagatcgatgtgaaccccagtgcaaaggccttcaggcgaaggatgaacttgagctcgaacgttaagccgcacgacaacaataactactttctgtgtctcgactttaaagacttcttttgctctatcaacttcgggagtatttacaatatcttctctgtgttggggtatgatgactcaatgtgctttattctgacaaggctttgctcttacaacggaagactcccacagggaggggtgacctcccctaccttgtccaatatcgcctgtatcaagctggacgagcgcctctccaactatctcgggatacgggatattgtatatacgcgttatgctgatgatattacgctcagcgccaagcagcctgacaaactgcttaaagccttaccaactgttaaacagattatagaggaagagggatacaccctgaacaatgacaaaaccaggattttgggccccaaactacagcggaagataacaggccttatttatgatggtagtaaatttggcatcggccgcgagaaaaagagaacactccggtcagcgatctacaactatgtctacggtcgtgacgaggaagacgaaagggaaagaaaatttcaatggatcaacggatggatgaattacctgaagagcgtcgacaaaaactcctacaatatccttaagaactactggatccagttatcttgcaaggccgaggtcgcagtgactaatgagaatactttcgactga

SEQ ID NO: 10101 - RNA, 957 nt, synthetic construct
  source 1..957: mol_type = other RNA
atgtctgaggtcaaacaccggctacggctcctggaccttcctttctttgaaacaatcgaagacttggctgcgctgatccgggtggacgcaggtagattacgcttgctgagttcacatccagagaaattttatcggacatatcggatatccaagagaagtggaggctggcgcaagatctgttcaccttccaaggaactcaaggccattcaggcttggattttgagaaacgtgctggataaactatcaccatctcaatacgcgaccgcctatgtatccggcaagcgactccttgacaacgtgagcccccacgccaacaatcgttacttcatctccatggacattaggaacttcttccccagcgttacctcgtttcgcgtcagggctatctttgaggccttggggtatagcatgctggccggcagcacattagctagactgtgctgctactttcatggtctgcctcaaggtggcgtcacttctcccgccctctctaatcttgtgtgtctgagactcgatcgacgtttagcaggcctggccgccaggagaaatatagtgttcacccgttatgcagatgatattacattcagctccaataaccggaacgcactctgccgcatgctgccaatcacttacaaaatacttattagcgaacgctttcagccaaatgaggacaaactgagggtgatgggaccgcgagttaggtgttccatcacggggcttgtgaaagatgcgtctgtgggacggttcgggattggcaggcacaagaagtgtgccatgcgagccgtgatgcataatctgctggctagacacgaagcttcacctgactacactgatgaggcatcgatcgtaggatggttgagtttcctccagagtgtcgatggggagtcttacaggcagatgacccgctactggaagcagcagaaggacaaatggctgtgcagcgtcaggcccgtttga

SEQ ID NO: 10102 - RNA, 942 nt, synthetic construct
  source 1..942: mol_type = other RNA
atgaacaatatcgtgcacaggatgcagctcattggtctgccgttctttgacactgtcgaggaactggctgcgctcattcgaatcgagcctggcaggttgaagctactcagcattcatcccgaacgcttttacaggacgtatcatataaggaaaaagagtggcggctggcgcaagatttcttcaccatccaaggagctgaaggccatccaggcatggatcttgcgaaatatccttgacaaactgtctccttcaccttttgcaaccgcctacctgaaaggaaagaaactgatcgataacgttagcccacacgcctctaatcggtatttcttatccgtcgacataaaagacttcttccccacagtgatgaaggatagagtgtgtctgctattcgaagccctgggatatagtaacagagctgccctcgctctgacaaggttatgcagctatttctcagggcttccacaaggaggcgtcacttcgcccgccctttccaacctggtttgcctgaggctagatcgccggttagccgggttgtcttcacggagaaacatagtgtttacccgttacgctgatgatatgacattttccaccaacaatagaaacgcactgtgtcgactcctgccactggtgtgtgaaatccttcggagcgagtggtttgaacctaacgagaataaacatcgcttccttgggcccagagtgcagtgccggattactggactcgtaaaaaatgcgtctgaggcaagattcggtatcggcaaggctaagaaaatccgtatgcgggccatcattcacaatttgctggcagagaatcgtccacacccggactatcctaccgaattgagcattatagggtggctcagttacctcaagtccgtagaccccgattcccaccgccaaatgatgcagtactgggagaaacagaagagcaagtacaagcattga

SEQ ID NO: 10103 - RNA, 951 nt, synthetic construct
  source 1..951: mol_type = other RNA
atgctagaaaatatccaaaggctaagactgttgggccttccggtcttcgataacatcgaaaacctggccgcattgatcagggtggacagcaagagactcacaatactcgtgctgcagagtgagcgattttataggacctatcgaattcccaagcggtcaagcggttggcggaagatttccagcccatctaaagagatcaaggccatccaggcttggatcttgcgtaatattctcgataagttgtcaccctcagcctacgctactggttacattcttcgcaaaagacttgttgacaacgtcaatcctcacgcaagcaaccgcttctttctgagtgtcgatatacgggatttctttcccatgattggctcctggagaatacgcagactcttcgaggtgctgggctactctgagatggcagcggtaactcttaccaggttatgcacatatttcgggggactgcctcagggtggagttacctctcctgctctgtccaatttggtgtgcctgaaagtcgatcgcaggttagggggactggcctctcaccggaacatggtgtttacccggtacgcggacgacataactttctccaccaataatcgcaacgccttatgtcgggtgctcacactggtgttcgagattatcagaaatgagggctttgaacccaacctggagaaagtgaggcttctcggcccacgaacgcaatgtcgaattaccggcctggtaaagaatagctcggaggctcgtttcggtatcggaaaaaagaaaaagatcaggatgcgggccgttatgcataacctgctggtgaaaggccgtcatgatagtacttacccagacggggcatccatcgaaggatggctgtcatttctcaagggggtcgaccctgggagtcacgaacagatgacacgctattggaacacgctaaaggccaaatacgggagcaagacaagatga

SEQ ID NO: 10104 - RNA, 945 nt, synthetic construct
  source 1..945: mol_type = other RNA
atgaagagcaactctgaattgttgaggttgctgaatctgccagtgttctccgacgaggaggaattggctagcctcatgcacataacccccgagaggatcaagatgctgtccaagttccctcatcggtactataagaaatacaagatccctaaaagcaacggcaaacttcgagaaattagacagccgagaaaagatctgaaggccatccaagcctggattctgaggaatattttagacaaactcagccctaccacattcgccacggcatacataaaaaacaggaacatcagcgataatgtgaccccccattccaataatcgccactttgtccttctggatttagaagactttttctcctctatctcaattcggcgtgcggcaaaagtgttcctcctgattgggtattctaagaaggctgcgtcaatccttgcacgcctctgcacatgtgatggctctctcccacagggtgccgttacctctccaagtttaagtaatcttattgcagctaagctcgacagaaggatcgctggttatactagccgacggaatataatatatactcgctacgccgacgacatcacactgtctagtaacaaccccgctacactgtcactgtcgcttcctcgcatcattaagattatcaaatccgagcacctgaagccaaatatggataagctaagagtgctaggacccagaaagcggtgctcaatcactggcctggtaaaaaataactccgagccggaatttgggatcgggaagaaaaaaaaaaagcaaatgcgtgccgttattcatcactttctctttaacttgtccaaagacgataagtataccaataaggcctcaataatcggatggctgaactacctgaagagcgtcgacaaggagtccttcgagcagatgaataactactggaaccagctgattaaaaaaagtaacagtgtgtga

SEQ ID NO: 10105 - RNA, 975 nt, synthetic construct
  source 1..975: mol_type = other RNA
atgagctcacctcgggtgtggacctcactgccaaacattatcatgtctactacagaattgctgcgattacgggatctgccggtgtttgataatatcgaggagtttgcatccctgtgccatatttcgaaaatcgatatttctgctatccaatacaacgcctaccctttctataggcgatacccgatgctgaaaaagaacggtaaaattcgcatcgtgtatcagcccaatccaactgtcaaggctatacagtgctggatacttcggcacattctggacaaagtaaacccctccgagtattccaccgctttcagaaagaataaaagcacactagacaacgtttcaccacataaacacaataggtttttcttccgtacagatatcgtcgacttctttcctaccattaataggagccgcgtgttctttctctttaagaacatcggctacgacacgaagcaggcgatcttattggccagactgtgtacgtgttcaaatctcctgccccagggagcagtgacttcccctagtatttctaacttggtcgtgaataagatggacagaagacttgctggctatgccaataagaaaaacatcgtgtataccagatacgccgacgatcttacattctcatctaataatcgctccgtgcttaataacagtattcggctgatcaagcgcatcatcgaggaggaagaattcattgtcaacctcgagaagacaaatttcataggaccaagtaagagttgcaaaataactgggttgattaagaatacctccgaacccagttttggcatcggtaaaaagaaaaaaaacaggatgcgttgtgttatgtactaccacatcgttaaaaagatcaccattgaccccaattactctagcgacaacagcattatagggtggctaagcttcctgaactctgtagataaggccagctttaagtatatgaacaactattggctctccctcaaggcactgtga

SEQ ID NO: 10106 - RNA, 978 nt, synthetic construct
  source 1..978: mol_type = other RNA
atgcgttctaacaggaccgtcctccgactgttcgatttgccaccattttccagtctgaatgaattttgtgctctagcccatttcaacacggcaagagttagggtgatcgctaccgagtcgaagcgattttacaagagatacaacatacctaagcggtctggaggcgagcgcgagattctgcagccgacagcagaagtgaaagccatacaggcatggatcctgagaaacattctcgataaactgaaggcctctaactccgccactgcgttcactaggggggtgtctctaatgctgaacgtgcagccccatgccagtaatcgctactatctgtgcatggacatcgaaaattttttcccctctgtgtcctcattccaggttcagcaagtgttctcggctatcgggtacagccctaatgtgtcatactggatgaccaagatctgtacagttggaggccggttaccccagggtggagtaaccagccctagcttgtccaacctggtgtgtctcaagctcgatagacgccttagcggatacgccgcaagtaagggcctggtatttactcgctacgcagacgatatgaccttctcctcaaacaatcctaaactcttgcgaaattcagtggccaccgttcggcggatagtgcaggccgagggtttcatcattaatacgaagaaaacacaccttgcgggtccaaaccttagatgcgtcgtaactggcctggtgaaaaacgccagcatgccggcgtttggaattgggaggaaacgttatcgcatggtcagggctgaaatccacaacttcgtcatgcgtgggggggccaagcggtataattccaaagagagcatttccggcatgattagttttatcgagggcatcaatcgcgctcaaggcgagtctttacggaagtattggtatggtctggagcagtgcagcagagctcaagtcataattgacccagaaacagacaggcccacacagtga

SEQ ID NO: 10107 - RNA, 933 nt, synthetic construct
  source 1..933: mol_type = other RNA
atggccaagtacagccagagtctctacacccagcgtcttctgtctctgcctatccttcagtcaattgaagacctctccgttaagacccgcctgccgtcccctctgttgtctcagtatttgaacgataattcccggtactattgccacatttccgtgcccaagaaaaatggagggtataggcccattgactcaccaaatcggcaactaaaagctattcaaagatggatccttagacatatactggagaaattgcaaccaagcgtatacgcgacaggctttgtgcccggaatcgcccttaaacgaaatgctataccacacactggaaatcagtacatactgaagctcgacctgaaagattttttccccagcataaaagcatcgtacgtgtacagcgtctttcgggcggcagggtactctaaacagatagcatatagcctgacaagcatctgtaccctgaacggctatttaccgcaaggcgctcctacttccccatgtctctcaaacctggtgtgcctccgtttagatcagcgaattggaaagtattgcgacagacacgccctcacattcacgcgctatgccgacgacattagcatctctggtaacaagctatccatcgtgaaaaaggcttgggtagtcatcaaattgattctgagtgaggagggctatgtgatcaacaagaaaaaagagatgctttctgggcccagaagtaagagggaaatcacaggcttagtcgtgacccctaagctggggattggtcagaggaagtacaatatgtaccgcaataagatcttccacctgtgtcataagaacgataacgaatcaattctgatcatccagggtatcctcgcctacattaagggcgttgatcatgaccggtatagtaagctgaaaaggtactatgatgccttgaagaccaaggaggttactgaatga

SEQ ID NO: 10108 - RNA, 912 nt, synthetic construct
  source 1..912: mol_type = other RNA
atggccaagcactcccaaagcttatatacacagcgactactgagtctgccaatactgcagtcaatcgaggatctcagcgttaaaaccaggctcccccacgccctgctaagtcagtatcttaccgataactccaggtactactgtcacatcaaagtgcctaagaagacatcaggttaccgctcaatagactctccaaatcggcagctgaaggctctgcagcgttggattttacgcaatatcctcgaaaaactgcagagctccccgtacgcaaccggatttatttctggcatttctctgaagcaaaatgtgcagcctcatagcgggaatcagtacatcttgaagctggatatcaaagatttcttcccttctattaaggcctcgtacgtttattccatctttagagcagcaggctattcaaaaaagatcgcgttccatcttacgtccatatgtacactgaacgggtatctgccccaaggcgctccctcttctccctgcctctccaatttggtgagtctgcgcatggaccagagaataggcaaatattgcgaccgacacgccttgacttacactaggtacgccgacgacatcagcatcagcggaaacaaactttccgtgatcaagaaagcctggacagtcgtcaagttgatcatttgcgaagagggttatagcatcaacaagaaaaaagagatgctcagtgggcctcggagtagacgggagattactggtattatagctaccccaaagttaggcattggacaaaactcgtataactcctaccggaacaaaatttttcacctcagcaagaagggagatccaaatagcaaggaaattatcctcgggatcctggctttcattaaatcagtagatctggagaggcatgacaaattgcttagatactacaagaagctttga

SEQ ID NO: 10109 - RNA, 918 nt, synthetic construct
  source 1..918: mol_type = other RNA
atggtgaatcactcacagtcgttatacacccaacgactgctcagcttgccgattcttcagagtctggaagatcttagcgtaaccatgagactgcctgtcagtctgattagccaatacgtgaacaacaacacaaggtattactataacatccccttagcaaagaagaatggaggtctgcggtctatcgattcacccaatcgccagttgaaggccattcagcggtggattctgcgcaatatcctagaaaatctgtctccatccggctatgctaagggattcgtcccaaaattatcgctgctggataacgcgttgccccatggcgggaatcagtacgttctcaaaatagaccttaaggacttttttccttctataaaagccacacacgtctattccgttttcagagcagtgggatacagcaaaaacataagctattacctgactagcttttgtacgctcaatggctacctcccacagggctcaccttgttctccttacttgtctaatttggtgtgcctgcggctggatcagagggtgggtaaatatagtgacaagaatgctctcatctacactcgatatgctgatgacatcacaatttcagggaacaaactatccacaataaagagggcctggaaagtgattcgtatgatcatcgaggatgagggctttgtcatcaacaagaataaagagatgctgagtgggccaagatctaagagggaagtgaccggcctgattacccaccccgtagtgggacttgggaccaaaaaatacaacttctatcgcaacaagatcttccatctcactaagaagaacagctgcgaatcccatgaggtcattaatgggatcctggcattcgttgcctccgtggactccaaaaagtacgagaagctcaagctttactatgacggtctaaacatctga

SEQ ID NO: 10110 - RNA, 939 nt, synthetic construct
  source 1..939: mol_type = other RNA
atggctaacagatatcaggggctgttcacacaaagattactctctttacccattctccagagtatagacgacctggccatcaggactaggttacctgtgtcactcattagcaagtacctccgcaacaatacccggtattatcggcatctggttttgaagaaaaaaacaggcggcttgaggccgatcgacaatcccaacgtggaactgaaagctctgcagagatggatactgaagaacctgcttattaatctgtccccatccatctatgccaaaggattcattaagggaatttcgatcactgaaaatgccgcgccacacagcgggaaccagtacatcctatcaatcgatctcaaggattttttcagtacagtgaaggcaagccacgtttttaccgtattcaagagtgtgggatactctaaaaagatttcctacgccttgactagcatctgcaccctgaacggtgtgctgcctcagggagctcccacatcacctgctctttccaatcttgtgtgcctgaggttggatcagcgtattggaaagtattgtgacaataaagccctgacatatacccgctacgccgatgatataacgattagcggcaataaactagcagtgatccgaaaagcatggcgtattgtccgacttataattgaatccgaaggctacttcatcaacaaaaacaaagagatcctctcagggcctcaatctcaaagaaaagttaccgggctgatcgtcacccccaaggtaggcatcggccgcgaggagtacaatcattaccggaaggagatctttatactcgtcaaaaaggatgacgagtattctacttacaaaatccagggtatcctgagttttataaagtccgtcgacatcgagcggtataagaagattaaggaatactacgagtctattgtgaagaagccaacgaagaaaagcgagtga

SEQ ID NO: 10111 - RNA, 921 nt, synthetic construct
  source 1..921: mol_type = other RNA
atggcctctcgatatcagggcctttttactcagcggttactgtctttgcccatacttcagtccgtgaatgatctggccattcggacaagattacctgtgaatctcgtttccaagtacttgcgggataatcatagatattatacacgcctccctctgaaaaagaaaaccggagggttcagacctatcgactccccaaacacagaactgaaagcactgcagagatgggttctcaggaacctgctggctaacctctcgccctcaatctacgctaagggctttataaagaaaagcagcatcacggataatgcggcaccccacgcgggtaaccagtacattctgagcatcgacctgaaggattttttcacaaccgtgaaagccagttacgtcttcactgtgtttaaatccgtgggctactcaaagaaaatatcttacgctctgacgagtctatgcactgtaaatggggctcttcctcagggcgccccaacatcacccacactgagcaacttggtttgcctgcgtctggaccaacgaatcgggaaatactgtgaaaataaggcactcacctataccaggtacgccgacgacattaccattagcggaaacaaacttactgtgattcgtaaggcctggggaatcattaagttgatcattaaagacgagggttacaccatcaataagaagaaagaactactttcaggaccacaatcccagcggaaggtcaccgggctgatcgtaacgccgaggatcggcatcggcagggataaatacaactattatcgcggggagattttcaaactcgtcaagaaaggtgacacctatagtatagatcgcttaaacggaattttgtctttcatcaagaacgtggataaggacaagtataataagctcaacgagtactataagaagataactactagctga

SEQ ID NO: 10112 - RNA, 927 nt, synthetic construct
  source 1..927: mol_type = other RNA
atgccaaaccaatatcaagggttgtatacacagaggctgctgagtctacctatactccagaccctcgatgatctggccactaagacacggttacccaagactctgcttgttaagtacatccacgacaacgagagatattacaactcctcctacattaagaagaaatccaaagatctcagaactatcagcaatcctaatcgcgaactgaaggctattcagcgctggatcctgcgaaatgtgttgtcatctttaagtccctccccttatgccaacggcttcataccgaagaagtcaatcatagataacgcccggccacatagggggaatcagtacatcctgtccatcgacttaaagaacttcttcacaaccgtgaaagcttcttatgtgtttacagtgtttaagagcgtagggtacgccagcaaaatggcatactatcttactagcatttgtacgctcaacggagttttgcctcaaggagcaccaaccagtcccatgctttcaaatctggtgtgcctacgaatggacgaacgtatcggaaagtattgcgaaaacaaagctctgacctattcgaggtatgccgatgatattaccatttcaggcaacaaactggcagtcatcaaaaaagcttggattattattcgcaagatcatatctgaggagaatttcacagtcaataagaagaaagagatgctgagcggcccccagtctcagaggaaagtgaccggtgtgattgtaactccagaaatcgggattggtagagagaaatacaactactttagaaagcggatctttatcctcgttaagaaaaacggcgacaatatgagtaatgtcgtcaatggaatcttggcgcacgtgaagagcatcgacctgggcaagtacaagaaacttaacgactactacgagcagctcataaataaaacgatttga

SEQ ID NO: 10113 - RNA, 933 nt, synthetic construct
  source 1..933: mol_type = other RNA
atgatgaaaaaccagggaatctatacccaacggctgctgagcttgccaagtttaaatgatctcaatgacctgagcatccatactagactttctcatgacttgatttccaaatatgtgagcaacaacaagcggtactatcaccattttaatatgactaaacgcagcggcggagtgcgacccatcgaaaacccagatgaggaactgaaggccatacaaaggtggattctgagaaacattttggacaagctgtttccctctatctatgctaaaggtttcgtcaagaagatgtcgattttaaacaatgccaaaccccacttggaccatcagtacatcctcaacatcgaccttaaagattttttcagccacgtaaaggcatctcacgtttttacagtgtttaatgcgctgggttactctaaaatgatgagttactacctgaccagtatatgtaccctgaatgggtacctcccacagggcgctccgacctctcctagcctctccaatttcgtgtgcctccggctggatcatcgcattggaaaatattgcgaaaacaaggcactatcatacacgcgatatgctgacgacatatgtatttccgggaataaactcacagtgattaaagacgcatggcacatgctgagggtaatcatcgagagtgaggggttcataattaactcaaagaaggagaagctgtccgggcctaaaagtcgtcgcgaagtcacaggacttattgtgaacccctccctcggcatcggcagatcaaagtataattactaccggaagaagatcttcattctattaatggccaacgatcctaagagggagcagatcatttctggcatcctttcctatgtcaagtcagttgatgccaaaaggcacatctacctgtgcaagtattacgattcaatcaagctgaaagcctccactagcatatga

SEQ ID NO: 10114 - RNA, 948 nt, synthetic construct
  source 1..948: mol_type = other RNA
atgacctatatctctaacaagcagaaaacgaataacagcggactgtacacacagagaatgttggccctgcctgagctccagtcactgaatgacttcgccgctaagatcagggtaaccccagaacttctcacaaagtataccgggaataataaacatcactatgccgtgcatcaagaagaaaaaaaaacgcccgggcagtaccgtgaaatctccagtccaactagtgagttaaaggccctgcagcgctggattttgcggaatatattggacaaactgagtccctcaccatacgctaaggggttcatcaagaagaaatgcctgtttgataacgctaagcctcacgagggaaaacagtacgtcctcaacttggatctaaaggactttttctcaagcgtgagcagcaagaatgtttgtaccctctttaaatctcttggctacccgcctctcctgagctatcagatgaccaacatatgcactctaaacggttgcttaccacaaggcgcgcccacaagtccggctttatcgaatctggtgacaattcggatggattataggattggcaaatactgtgagaagtacgcactcacttacactagatacgcggacgatatgacaatttctggcaacaaactgtctatcgttaagaaagcacggatcatgattaacaagattatcagagaggaaggattctatatacaccccaagaagaataagctgagcggtccttcagtcaggcgagaggtgaccggtctggttgtgaacgagtcccttggaatcggcagagaaaagtataacttttaccgcaccaaaatgttcaagctgcacaaagagcagcaccccaattttgaatccgtctcctccgggatcattgccttcgtgaggtctgtagacatagtgcgagcccaaaaactgcatgcatattttgagaagcttcgcatcaaaaactga

SEQ ID NO: 10115 - RNA, 930 nt, synthetic construct
  source 1..930: mol_type = other RNA
atgaatacccaccagggcaagtacacccagcagctgctatccctgccaattttggagaatgttgacgatttgagccagtcgctacggttgccgaaggaggtgatctctaagttctcactgaataacgataagtactatcaccgcatcgaaatgaaaaaaaaaacaggaggcatccgacacatagagagtcctttacgggaactcaaagccatccaacgctggatcctccggtatattctcgataaacttgctccctccatctatgcaaagggctttgtgagaaaaaagtccattatcgataacgccaagccccatgagggaaatcagtatgtcctgaatttggacctccaagatttcttcactaacgtgcctgcttcacatgtgtatacactctttcggaacattgggtacaacaacaatatagctttcatactgacctctttttgcactaagagtggataccttccacagggtgcccctacaagtccagccctgtccaatttagtgtgcctgcgcctggaccatcgtgtctccacctactgcaaaaagagggcgcttacttacacacgttatgccgatgacttatgtatcagcgggaataaaattctgatcctccaaaaagcaagctacctgataaagatgattatcgcagacgagggctttacggtgaacaccaagaaagaaaaatttctgggccccaaagtccgaagagaggttactggtctgacagttacccccagaattacgatcagcaaaaaaaactactgtgtgtataggaagagaatctacgacctcgtaaggaacgaggtccagaacaagaatgaaattatcagggggatactttctttcgtacaatcaatcgacaaggaaaaggggaagaagctgagcaccttctaccagaagcagatttctctgattactgacatttga

SEQ ID NO: 10116 - RNA, 924 nt, synthetic construct
  source 1..924: mol_type = other RNA
atgaacacccaccagggcaaatatactcagcagctgctctccttacccatccttgagaatatggatgatctcgctcagttcattcggctgcctaaagaggtgatctccaaattttcgttcaacaaccacagatactaccatagaattgaaatggagaagaaatcaggcggtattcgatatattgagagccctgtaaaagagttaaaagcgatacaacgttgggtccttcggtacatcctagacaagcttagtccatccgtttacgcaaagggatttgtgaggaaaaaatcaatcctggacaatgccaagccacatgaaggaaaccagtatatattgaacctggacttcaaggacttctttaataatgtgcaagccagccacgtgtataccctgttcaaaaacatcggatacaacaacaacattagctatatactgacctcattttgtactaaagaggggtatctccctcaaggggctcccacatctcccgctttgtccaatctcgtctgcctgcgtctagatcatcgcctgtctacatactgcaataagagagccttgatctacacacgctatgcagacgatctgtgtatctctgggaataagatactgatcctgcagaaaagcagctacttgattaaggaaatcatccgcgatgaaggtttcacgattaacactaagaaggagaaattcctcggcccaaaggttaggagagaagttactggccttacagtgacgccgaagattaccatcagtaagaaggactactgcgtctacaggaaacggatttatgatttagtgcgaaatgaggtacccaataaacacgagataatcaagggcatcctgagttttgtgaggtccattgacaaggacaaggaaaagaaactcaccgccttttacaacaagcagacctctatcattcggtga

SEQ ID NO: 10117 - RNA, 939 nt, synthetic construct
  source 1..939: mol_type = other RNA
atgaataatcaccagggcaaatatacacagcaactgctctctctacccatcatcgaaaatatggatgatatctccctttcctcacggctgcccgtagaagtcatcgccaaatttagcttcaagaacgacagatactatcacagaatcgagatgaagaagaaagctgggggtgttaggctgatcgagtccccaatccgcgaactcaaagccatccagaggtggattctgcgaaatattctggataaattgtccccgtctatttatgcaaaaggctttatcaagaaccgcagtatacttgacaatgctaagcctcatgagggcaatcagtatattctcaaccttgacctgaaagacttcttcacaaatgtgaaagctagtcatgtgtataccttgtttaagaacattggctacaacaatactgtcgcgttcgcccttacctcattctgcactaaaggagggtacctccctcaaggagcacctaccagcccagctatctctaacctcgtttgtctgcgactggaccaccggattagtacctattgcaagaagagagccctcacatacacgaggtacgccgatgacctgtgcatatcagggaacaaactgcttaccattgaaaaggcatcctacctaattaaggagatcttgggggatgaaggatttagcataaacgagaagaaggagaaactcttaggccccaaagtcagacgtgaagtgacaggattaactgtgaccccaaaaattacgatcagcaagaagatctactgtttatacaggaaacgcatatacgatctggtacggaacaagatccctaacaagcatgagatcatcctgggtattatttcgtttgtgcagtcaatagacaagggtaagggcaagaagttgactgccttctatgagaaacagaagagcctgattctgccctctttgatagtgtga

SEQ ID NO: 10118 - RNA, 942 nt, synthetic construct
  source 1..942: mol_type = other RNA
atgaatgcctatcagggcaaatatacacagcagctgctgtctctgcccatcatcgaaagtgtagaggatcttagctacttgatgagactccccaaagagacaatcatcaagttctcaacgaaaaacgacaaatattaccacaagatcgaaatggtgaaaaaaaatggaggaattcggttgattgagtccccaatcaaggagctaaaagcgatccagagatggatattgagaaatatacttgacaagctgtctccctccgtctatgctaaaggcttcataaaaaacaagtccattctcgataacgcaaagcctcacgagggaaaccaatatattcttaacctggaccttaaggatttcttcaacaacattaaagcctcttacgtctacaccacatttaaaagtatcggttaccaatccaacattgcatttattctgaccagtttttgcaccaaaggagggtatttacctcagggcgctccaacctcacccgccttgagtaattttgtgtgcctgcggctggactaccgtatatcaacatattgtaaaaagcgagccttatcctatacgcgctatgcagatgatctctgtatcagcgggaataaaattcatactctgcagaagagctcttacctcattaaggaaattttactggatgaagggttcatcatcaacattaagaaggagaagtttctgggccctaaagtaaggcgcgaagtcacaggcctgaccgttactccaaagatcaccatcaacaagaagaattacaacatttaccggaagaggatctacgacctagtgaggaatactgttccgaacaatgtggacatcattaatggtataatctcgttcgtgaagagcatcgataatgacaaagctaacaagctcaataacttttacaagaagcagctcgacgagatcaagaatagcactataaaagtgtga

SEQ ID NO: 10119 - RNA, 948 nt, synthetic construct
  source 1..948: mol_type = other RNA
atggtgtatagctctaaaaactccacaagttcgacctatagagcccgcatgactggcttgcctgaaatccgatcagtaaaggagctaagtcatctcctgagaatcccagagagcacgctgcatagttttagcaagaagaatcataccattggctatgtggaattctgcatacctaaaaaaccgaacggtttcagggtgatccacgctcccgtcaggacattgaaatacatccaggcttggatcctgcagaatatactttaccactttaagagccacaagtctgccaccgggtttgagaaaggctgctctatcttagagaatgccaaaccacatgccggccagagctacgcaattaacgtggacattaaggacttctttaattccatctcttccgacaaggtgttcaacctgttctccactattggttacgagagggagatagcatggatcctgaccaatttagttacattcaaaggacacctccctcaagggtccccctgttcacccaaaattgccaacttgatttgtcatagactcgatgcacggatttacggcttttgcaaaactaagaatatgcagtacagtaggtacgcggacgatattaccatctcaacttctcacagaaagaacatatcacagacacttcggttcattaacaacgtgatcgagtacgagaattttagccttcggaacgaaaaaacaaatgttttcgggcgcggaaacgctaaaattattaccgggctggttgtctccaatgaaatccgcgtcggacgtgaaaagtatcgggaaatccgagcgaaaatgtacaaggctataaaggaagatgataagtacgagaaggaatatctcgacggatatctgaactttctcaaaggtgtagatgccaagacgcaccaactgctgatcacctatcaggagaagatcactaaaaagctaaagagcatctga

SEQ ID NO: 10120 - RNA, 1137 nt, synthetic construct
  source 1..1137: mol_type = other RNA
atgaaggaactaggcttattttgttccattaagtcgtataactgctcattccttgggacaattgagatcgtgccttttctctttagacggatcttcacgaatatgaatagtgatgcactgtacaatctctcccaacagatggataccaaatatccaattatcaccgacgtgctgaggaataaaaaacatcattacaaccagctggatgcgaagaagaggaatgggaagatccggaaactctacagcccgagcaaaatcttgaagtattaccagaaatggatcgccactgagattctgagtaagacaatgatacatgagtgttgtaccgcataccagaagggcatctcattgaatgagaacctgattccacaccagaaacacatgtacttcctttgcgtcgacatcgaggactttttccagtcaatcaacttcaaacgcatacttcatctcttcaagaaactgacaaacgatactcaaatggcctactctttgtccgaactgtgcactttgcacaagaccctcccccaaggtgctgttactagccccgtcttatctaacgccgttaactatcgcctggacaagcggatccacggctacgcaaaaaaacacggactggtgtatactaggtatgctgatgacatcacgattagtggaaatgacatgggtgctatcaaatccgcctactacacagtgaaatgcataattgaaagcgaaggctataagttcaacaaggagaagactagaattctgaagcccggagtaaagcgaaaagtcaccggcttgcttataaatgaggaacaagagatcagaattgggcgtgaaaaataccgggagctgcgctccatgatctatacatacaagaatagtcgagccattaccggagtggaaaaagagcatctcttccttagaataaagggttggataagctatctgaaacacgtagactttaagacatgtaagatgctgctagagtatattaacaagatctatgtgaacgatgagaagaatcctttttcattcctcgacaaaaggtctgatgaaatggggtacatcattcctcagctgcagcagctagaatctaatatgaactttctgaccagcgagaacacccacgttaacttagtgattaagaattga

SEQ ID NO: 10121 - RNA, 1035 nt, synthetic construct
  source 1..1035: mol_type = other RNA
atgaattctgacgctctttacaacctatctcagcaaatggatacaaaataccccatcatcacagatgtcttgcgcaacaaaaaacaccactataatcagctggatgcaaaaaaacgcaacggtaagattagaaaactctacagcccgtcaaagattctcaagtactaccaaaagtggatcgccacggagattctgagcaagactatgatccacgagtgctgtaccgcgtatcagaaggggatctccttaaacgagaatctgataccacatcagaagcatatgtatttcttatgtgtggatatcgaagactttttccagagcataaacttcaagcggattctgcacctgtttaaaaagctcacaaatgacactcagatggcttatagtctgtcagagctatgtacactccacaagaccctccctcaaggagcagtaacatcccccgtgctttcaaatgccgtgaattaccgcctggataagcgtatccacgggtatgccaaaaagcatggccttgtttacacccgatacgccgacgatattacgatcagtggcaatgatatgggagctatcaaatccgcctattataccgtcaagtgcattatcgagtctgaaggctacaaattcaacaaggaaaaaacacggattcttaaacctggtgtgaagcggaaagtgaccggactgctgataaatgaggagcaggaaattagaattggcagggaaaaatacagagagctgaggtcgatgatctacacttataagaatagtcgagcaattaccggagtggagaaggaacacttgtttctgaggattaaggggtggatatcctatctcaagcatgttgacttcaaaacttgcaagatgctgctcgaatatatcaataagatatacgtgaacgacgagaaaaacccctttagctttctggacaaaaggtccgacgagatgggctacatcatcccacagcttcaacagttggaaagcaacatgaacttcctgacttctgagaatacccatgtaaacttggtcatcaagaactga

SEQ ID NO: 10122 - RNA, 942 nt, synthetic construct
  source 1..942: mol_type = other RNA
atgggtgaactagtgttcaccaaagtgaccaaagatctcaagaccaaatatcctatcctcaaggatgttatcaacttcaaagagaagcattaccagactatatcgatccgaatgaagaatgggaagctgagaactatccataacccatctaaggccctccggtattatcagcgcgcaatcgttgagaagtttcttaatgaggtccccatacacatttgctgcaccagctatcaaaaaggtaaaagtctgaaagcaaacgtacttccacatgccaataacatgtatttcttacacgtagacatcgccaatttcttcgaccacataaagttttcacaagtgcacaagctgtttacggatttgattgaagacaagtatgaagctaagttctacgccgagctgtgtactctgaaaggcactctcccccagggagcaataacatctccctccatttcaaatgctgttaacttcagaatggatagcagaatttttggctacagcaaaaagcacaatatcgtctatacaagatacgccgacgacattactctgtcctctaatgactttgctagcatccagcgctcactttacgtggtgaaacagatcttgcaagatgaaggataccagctcaatacgcggaaagtccgcatcacaaagcctgggatccagcggaaggtgaccggcctattaattaacgaggatcaggaggtgcgtgttgggaggaagaaatacagggagctgcggtccatgatttacaactacaagaacaatacaagcgtgacaaggaaggagaacagggcgctgttccgaaaaattgtgggctggcttagttacctgaatgtcgtggacgaaaagacctacagtttgatggtcatgtatataaagaagctgtatggaaacaccaaaaacccgtttgaaacaatgctgatctccaaggagaaaatttga

SEQ ID NO: 10123 - RNA, 2058 nt, synthetic construct
  source 1..2058: mol_type = other RNA
atgggaaagcacaataaaggcaaagtgatcaagaagtactacaatcctctgaccccactggaggtattctttaacgagcttaattcctttctcagagtctacggcctgaaattcagctacgaagactattgcaacttcatcaagaataagaacgagtactatacgacctttaccatcaaaaaaaagaacgggggactcagaaggatcgatagccccaacaggctgcttaaacacatccataggtacatcttgttcaagcatctgtacaacttcaaggcccatccttctgctacaggttttattagaggcaggagcatctttgataatgccaattatcacgtcaacaagaatcatgtgtacaaactggacctggtggactttttcccatccataacaaaagatatggtgttcaacgtgttcatcagcaagggttataattccgagatttctacggtcatgtcagaactctgcactctgaacaatgttctaccccagggagctcccactagcccggcaattagcaatcttgtttgctatcgcctggataccaggctgagcagcctcgccaaaaaatgtaaactctcttatacccggtatgccgatgatattacattcagtggctggtacattaaaaaaggcgtcacaaagctgattgagaaaattatcacagacgaaggttttaaggtttcaaaggagaagaccaaactgatcaagaataaaaagaacttccgtcaggtcgtcactggcgtggttgttaataagaagctcagcatgggggaaaagcgctatctcatgttgcgcgcaatgattcacaactgtaaagtgaaaggtatttaccaggtgcagatggagacaaaagagaagcacggcaaagggtattttgcgaggagagacttgtatagtgcaaaggtggatatgttcaattaccttctggggatcgtagaactctttcggcagatgaaggactataaacgatatttgacgatgctgcgggacctctattaccttgactgggttagatactacgtcgaagccggagaactgaatgcaaacgaactaggaatcatgagaaagaaaattatcgagaggcggatcaagaaatttgtgcgatccgagctaaaggatataaaatcccggtcagattctctgaacaacaagctcaaacgctataactcacggctcgagcggctgaaagagtacattcgccaaaatacctatagtgaaaaagagcggctgatcgacgaattcctgagactgcaggaacggatagataccttaacacaagagactaacaacatgtccaggtttctcagctttgtcagtgacttcattagtaagaactggggaagaagcctgatgaaattattgaatagcgtgaccgaggaggtggaggagactatgagtaccaagtacactgtgcagaacaattttataaagttgggcaatgagttccttgagaagaatattaacgtgaacctgtctgtcaactacaacaatataaacgttgaagggtccctgtcaaaacatatttcgccagataagccctttagcaacatctcatacttttggggattaatcaggtccaatcgtgggtacatcaagtggttggacaagtacttcaataagtctggattccgtttacttactgacgagataggcgatgatccaaagtacaagtccataagtatcctaatgtccatatacccttttgtgggcggggaaaataaggaatctgctatccgaaaggtggaacgctttatcgacattttcaaacgcttcaaggaggagatgagaaacaagggtatatctgtagagttacgcatcttggacaaagactcatctgccgaaatacacgacagggtgatcatcttcgaagagaatgcttacacagtaccttccattgacaccctgatgcgagggcaacactcatatattttccccattaatccgatcgatttcccttttgatgaatattggaaccgttcgttcgatattctttctgaccgaaacaagattaatgagctgatcgacaaatatgtgaacaacaagaaaaagtga

SEQ ID NO: 10124 - RNA, 1779 nt, synthetic construct
  source 1..1779: mol_type = other RNA
atggtgaagaaattcattaacaggaatagcgaatcaaagttcctggatgatctacgtcgacatattgattttgaattgactcaggaagatctggacatattcttccaggacaagtataacaagaagaacaagctccattactcttcttattcaatcagtaagcactccgggaagaaacgcaggataaacgctccaagcagagagttaaaaaaagtacaggagtacatactgtacaaacatctttactacttccccgtgcacaaaaacacatacgggtttattaagaacaagagttacgtagacaacgctaaacagcatatccggaagccgcacgtgtttaaaaccgacgtggaagattttttccccaacatccggcatgaaaggatcttcagcttccttgtgaatgggttttcatccaaggactacgactcagtcttcgattccaatccccaactggaaattagaaaacagcgaagaggttatagcgagaaaattgctacccttataactgaattggttactctggacggatccttacctcaaggagccccaacatctccagcgctgtcaaatctcatctgttttcctttagactatagattgagcaggtttgccaagaaaggacgcctgacctatacacgttacgcagatgacatcacatttagcggtaagtatattaggaaggacttcatcagtaagatcaagacaattatcgtggacgaatgtttcaagattaacgaggacaaaagtaagtttatctcccgtaagcgcgcacgaattgaggtgacagggctggttgttaataccaaactgtcttacggtcgagagagatacaggaaaattaaagccatgttagaccaatgcaagaagaacggcatttcttccctgaataaggataacaatgacgaaactggcattaaaaatcacatcgacttttaccaacacattataggcaagatcgatatcttcaatcagatcaagcactacaaaaagcacatggtactcctgaaaatactctttcagatcaattgggcagactactatacgaaacaagaggatcttctcgagagctataacaagcacaatcatagttcattcacatccacggagctgggagagattcgcaaaaaaagcatcgagaaactgacccacaaagccgtgctcaaacaggaaagggaagataaaaaacgggatacccggcgggccgcgtattatgcaaagaagaataaatcgatcctggaggacataaagaccaaactttcccagcaagatcagttgatttccgtgtactcagagacactctctaaggagtatgaggacaagtataacttgattgaaaagattcaggctgatcgcctgaagatccaggagctggagaaaaacctcgaagatgccaataaaaaagctaagcaggctgaaaagttcaataccgatctgactaagatcttggaccgggtggacaagaattctaagacccttgagagactggagaaacagggccagaaaacgcaagacatcgttacttccatcgataagaaaattgatagcatcgcggacaggctaggcaagaacatggtcagtctgtttgatgccataaaagagtctaaggaagccatcactaaggagattaaggcaaaccatatctcgctcgagaaaggcatcgaagagattcacaaggccacccagatgctggtcgaaatacagaaagacaaggaccctgatctctgggaacggtgccgcgagaaggtccagaagagactaagctggtggaaggtctga

SEQ ID NO: 10125 - RNA, 1626 nt, synthetic construct
  source 1..1626: mol_type = other RNA
atggagcaactttcacccatttgcgggcgggtcaaagttctcaacgaggctgactataacaacgagttccaatatttcaaacagctgaagagtaaaaagctgccatacatttatgatatcgaccacttctgtaagctgattcaccttagctctaaccaggtaaagttcttcctgtcacacaaagaaaaagcttacgtcacctttcgggtcccgaagaaaaatggggacttccgcgagattaacgctccttccaaaaaaatgaaatacatccagaggtggatcctggacgaaatactttacaagcttaaccctggagagtacgcccacggctttatccctggcaaaacagtttatacaaatgcagagtctcatgtcaacaaggacctggtgttaggaatcgacattaaagatttctttccctccatcaagtttgtgtctgtgtacaatgtttttaagagcgcagggtatacagagaaggtggccaggcagctagcagacctctgcacctaccattggaaattgccacagggagctcccaccagtccaatgctcgccaatctggtggcactcgatctggacaagaaaatatcccagtattgcaagagagctaacttcggttattcccgttacgccgatgatattactattagtggtagctacgacctggccatccacaaggagacaattgtccgcatcatcaatggggcgggattcgaggtgaataaccagaaggtgagaatggtttctaagggctcaaggcaaaaggtgactggcttggtggtgaaccataaagtttcaataggacgaaccaagaaaaagacgataagagccatcgtccacaatatactgatgaatggaccggtgttggagaatagatgtaacgacccatttttcagagaacggatcttcgggcacctcggttgcgcttctgccattgaccccgaatttgccctgcctctaattgattcgttgaaaaagattgactggtctgagtattgtgaacacatcaaggaagtaaaagagagcgagattaataagaatcggatcaagcggataaacaaggtcttaatcgtcaagttcgacgaactgggcttcttcaggaagattggggaagtgcctcgagatgcatttacggaagagtttaaaatcaagttgggcaccctgcaggagatgtgcagtaaggagatacacggcgtagttgcatgttccaactgcctgaacgtcaaaaatgaaatctacaaaagctgcatgaagtacatactcgggcagtatacaggcactaccggcggtcatcatcatggtcatgagatctacgacatgaaagcggtaacagattacaatggcgaaaatattgtggtggcctttctgatgaagtccgggactaacagtcccactaaagaaaattcagtgtttacccaggcttttgattgtgccggatataacgagaacatcgaccttattagcttagtgagcaatcacaatctctccaataagctctgtgagcgtctggagatcatgattcgcgataaaaaccgcggaaaagaaaaggagcaactgtactgtcttatcatgaaaagcgaaatggaaaggatcctatatgatttcaacaagaacaaggattgctga

SEQ ID NO: 10126 - RNA, 1683 nt, synthetic construct
  source 1..1683: mol_type = other RNA
atgactgaaaagcttacgaaaaacgaacggctcaaggtgttattcgacgataggatagaagaaggcgttgtacccaaactatcagaagaagactacaacaaggagttcaaatactttacccaattgaaaagcaagaagctgccgtatatctacgatattgaccacttctgcaagttgactaattcctctagtaagcaggtgaagtttttcctaagtaacaaggagaaggcttatgcgacattcaaggtccctaagaagtcaggcgatttcagggagattaatgccccatcgaagaaaatgaagattatccagcggtggatactggataagatcctctataaacttaaccctggcaattacgctcacgggttcattcccggcaaaacgatttacacgaatgcaaaggctcacgttaataaggatctggtacttggaattgacattaaggactttttcccctctataaagtttgtggcagtctacgacgtcttcaaatttgcaggttacaccgctcgcgttgcccgacagcttgccgaactgtgcacatatcactggaaattaccacagggagccccaacttcaccaatgcttgccaacctggtggccctcaacctggataaaaagattagccagtactgtatcagagagaactttgagtattcccgttatgctgacgacatcaccattagtggatcgtataatttagcgatgcacaaggaaataatcatcaagatcatcaacgagaatggcttcgaggtgaactacaaaaaggttcgtatggtgagtaagggatccagacaaaaagttaccggactcgtagtgaatgacaaagtaggtatggggaggaccaaaaagaagaccctgcgggctatcgtgcacaacatcctcatgaatgggccggtgtttgaaaatcgggacaacgatcccttctttagagagcgcatattcggctacctggggtgtgcaaacgccatcgatcccgagtttacatctcctctgatcgacagcctgaaaaaaattgactggtcagagtacgaggagtgcattaaggaaatcaaagagtcagagatcaatgtcaatcacatcaaacgcatcaacaaagtcctgctggtcaaattcgatgaattgggcttttttcgaaagatagcagagctacctgaaggagcattctccgaagaatttaagactaaattggaatctctccaagaaaaatgtgacgtgaaaattcatggtgtggaggcttgctctgattgtctggatgtcaaaaaggtgatctataacaagtgtatgaagtacgtcctcggacattacacaggcaccacagggggtcatcatcacgggcatgaaatatatgatatgaaagccctcacagactacaatggcgagaatataactgtggcctttctgatgaagtccgccaacaagcctgccaaggagaataacagcaacaaagagaatagtttggtggttcagaccctggattgtactgattataatgacagcatcaaccttatttccatcgtgtctaataacaatctcagcaacaaaagctgcgagagactggagaaaattattaagggtatgagcaaagggaaggagaaggagcagttgtattgcttcatcatgaagaaagagatgaagaggattctgtacgacttctataaaaactaccagtcctcctga

SEQ ID NO: 10127 - RNA, 1695 nt, synthetic construct
  source 1..1695: mol_type = other RNA
atgactaaaaggctgacaaagaatgagaggttgtccattcttttcgacgattgtatcgaggagggcattgtgccggttttgaatgaggccgagtataaggaacagttcaagtacttcaagaagctgaagtctaaaaagctgccctacatctacgacattgagcacttctgcaaattaagcaatagctctagtgatcaagtaaggttttttctgtccaacaaggaaaaagcttacactacctttaaagtgcctaaaaagtctggcggttttagagagattaacgccccttccaaaaaaatgaaaaatatccagcggtggatactcgacaacattttgtacaagctcaattatggggactacgctcacggattcgtgcccggaaaaacgatctatacgaatgccgaagtccatgtgaataaagacctagtgctgggcattgatatcaaggatttcttccccagcatcaagtttggggcggtttataatatttttaagagcgccggctatagcgttagggtggctcgacagctggccgacctctgcacctatcactggaagctgccacagggggcccctacatccccgatgctggctaatctcgttgcattaaacctggatcagaagatatcccaatactgtattagacgtaactttggctatagtaggtatgcagacgacattaccatttctggaagctacaagctgcccatgcataaggagaagattatcaagatcattaacgaaaacggtttcgaggtcaataataagaaagttcgcatgctgtcgaaggggagtagacagaaggtgaccggtctggtagtgaatgataaagtctcaataggccgtactaaaaaaaaaaccctgagagctatagtccacaacatacttatgaatggtcccgtcgtggaaaatcgcaatgaggacccattttttcgggagaggattttcgggcatctgggatacgccaaagccatcgatccaggcttctctacccctctaattgaatcgctaaaagagatcgattggtccgaatataacgagcatatcaaagagatcaaggagaacggcattaacacaaaccagctcaagcgggtgtataaaacaatcttggtcaagttcgatgagttgggattttttaccaagatcgcagagctcccagagggggcattcactgaggaattcaaaatccagttgaactccttaaaagagaagtgcgatgctaaaactcatggagtagaagcatgtagtgattgtcttgatatcaaagacgagatctacaacaagtgtatgaagtacatcatcgggcactacactggtaccacaggaggacaccaccacgggcatgagatctatgacatgaaggcgacaaccgagctgtacgacgatacaattgccgtggccttcgtcatgaagtcaggcgacatatctaataagaaagaacgccgaaagggcactgatagcgaaaactcagctttccggcagttctttaaatgtacctgctatgaggacctcgaccttatatcaatcgtgacgaactttaacctcaacaacgaactttgcgaagaactcaagatcatgatgcgaaataataacaaagcaaaggaacgcgaccaattttactgcctgataatgcggaacgaaatgaagagaattctttacgacttcaacaccaaaaaggccgaaaatctgacatga

SEQ ID NO: 10128 - RNA, 1653 nt, synthetic construct
  source 1..1653: mol_type = other RNA
atggagatcagcaataatgagaagctgaagatcctctttgactcttacattgaaacagccatcataccctctttgaatgaagacgagtataggaaggagttcaagtccttcaaacgcctgaaaagcaagaaactgccctacgtgtacgacatcgatcacctgtccaacctgacgaactcttctagcaagcaggtccggttctttctgagcaataaagatatcggatacaccactttccgaattccaaagaaaatgggcggttttagggaaattaatgcatcctccaagaaattgaagattatccagaagtggatcctgaacaacattctttacaagcttgatagttcagactatgtgtacggttttattcccggcaaaacaatttactcgaatgcccagatacatgtgaatcatgacttagtcctgggcatagacattaaggatttcttcccgagtatcaagttcgggagtatctaccacatttttaaatccgcgggttattccaataaaatcgcttggacttttgccgatctgtgcacttatcattggaagctgcctcagggcgcgcctacatcacccatgttatccaacctggctggcaagcgactcgatatgagaatcgccaagtattgtaaccgtcggcatttcacttacagtaggtacgccgacgacataaccatttccggatcttataagctgccaatgcacaaagagaaaatcatcaagatcattgaggggaacggctttaccgttaataagaaaaaaacccggttgttcagtaaggggtcaagacagaaggtaacgggcctggtggttaatgataaagtctcaataggtaggaagaaaaagaaatggatacgcgcaatcgttcacaacatacttatgaatgggtttgtggccgagaataaagaaaatgacccttttttccgcgaacggatttttggccacctcgggtataccaatatggtggattctgaatttgcaagacctctaatcgagagcttgaagaagattgacctgtctgaatataacgaggctattatagaaactcgagagtctgaaatcaaggtgaactacctaaagcggaagagcaaaagcattcttatcaagtttgatgatctggggttttttcaaaaaatcgccgaattcccagagggcgcattcaacgatgacttcaaaaaccaaatcaacaatttgctggaaaagtgtgagaaacacggagtggaggcttgtagcgattgccttgacatcaaaaacgaaatctacaagaagtgcatgaaatacatcattggtcattacacagggaccaccggcggacatcaccatggacacgagatttatgatatggaagctgagacaagactcttcggaaagacaatagctgtcgcattcatcatgaagtcaggaaccagcgactccacgaaagagaactcgatattcaggcaggtggccaagtcattccgctttgatgggattgacctcatcggcattgtcaccacaagtaatttaaaatcagagctcctagaagacctcaaaagcctcattatgaatcacaacaacggaaaaaagaaggagcagctgtattgcctcatcatgcgtccagagatgaaaagaatcctttatgacttcaacaaggtagttactaactcctga

SEQ ID NO: 10129 - RNA, 1692 nt, synthetic construct
  source 1..1692: mol_type = other RNA
atggtgtcagtggagaacaagctgactgaagacgagaaactccaaatcctgtttaagaactacactgaagaagggataattcccaatcttaccgaggaggaatatgaggagcagttcaagagttttaaaagactcaagtccaaaaacctcccttatatctatgatatcaaccacttctgcaagctcaccaattcctccctgaagcaggtcaacttgttcctttcgaacaagaagaaaggttatattaccttcaagcttcccaagaaaaatggagacttccgagagatcaacgcccccagcaaaaagatgaaatacattcagcgttggatactggataatatcctgtacaagttgaacagtggggactacgcacacggcttcatcccaggtaagacaatctttacaaacgcgaaagtgcacgtaaatcaggatttggttctgggggtggacatcaaggacttctttccctccatcaattttaggagcgtgtattacgtattcaagtcagccgggtatacaaagaagatcgcatggacactggctgacctatgtacctaccattggaaactgccacagggagctcccaccagccctatgctggctaatctggtcgccttaaagttggacaaaaagatagccaagtattgcgcaaggcgcaattttaggtactctagatacgccgatgatgtgactattagcggctcatataagttaccgatgcacaaagaaaagattattggcatcattgaagacgacggcttcgttgtcaaccatgagaaaacccgaatgttcagtaagggatccagacagaaagtaaccggcctagtggtgaatgataaagttagtatcggccggaataagaaaaaaaatctgaaggccattgtgaacaatatacagacaaacggacctgtggccgagaatcgttcaaatgatccgttttttcgcgagcggatctttggccatcttggctgtgcaaacgccgttgacccagaatttgccacgccattaatcgaatctctgaaaaagattgactggtccgaatacaacgagcacatcaaagagataaaagagagtgaaatcaacacaaatcagcttaaaagagtgtcaaagactatcctggtgaagttcgatgaactcggatttttcaccaaaattgtggaactgcctgaaggtgcttttactgaggagtttaagaagcagctgaacaacttgaaggagaagtgttctactaagattcatggggtcgaagcctgctctgattgtctagatgttaagaacgagatctacaagaaatgcatgaagtacatcattggccactatacaggaacaaccggcgggcatcaccacggtcatgagatctatgacatgaaggctaccactgagttctatggagacactattgctgtcgcgttcgtcatgaaaagctccgacatcagcgacaaaaatgaaaggaggaaaaacacggactctgagaactctacatttcgccaattcttcaaatgtacctgctacgaagatctcgatctcattagcattgtcacgaactttaacctcaataatgagctgtgtgaggaactcaaaataatgatgcggaataacaacaaagcaaaagagaaggatcaattctactgccttataatgcgggacgagatgaagcgcattctgtacgatttcaataaaaattgcgggtga

SEQ ID NO: 10130 - RNA, 1509 nt, synthetic construct
  source 1..1509: mol_type = other RNA
atgagtaacaaagaaaaagcttactccacctttaagattcctaagaaaaacggaggactgagggagatcaatgcacctagcaagaagatgaaaaatattcaaaggtggatcttgaacaacatactgtacaagctcaatgccggaaatttagctcacgggtttattccagacagatctatcctcacaaacgccagcattcatgtcggccaggacttggtgctcgggatagacataaaagactacttcccgagcatcagctttcggagtgtctattacatatttaagtccgctggctataccaagaaaatcgcttggagtcttagtgacctgtgcacttaccattggaaactcccacagggggcacccacttcccctatgctagcaaacctatccaccgtggatcttgattacgaaatcgataactattgcacacgtaggaatttccgttactcacgatacgcggacgatatcaccatttcgggctcttataaactgcccatgcacaaacagaagattatcgaaattatcgagaggaatggttttgtgatcaacgaggagaagactagagtgctttccagagggtcccagcagaaggtaacaggacttgttgtgaacgataaggtttccatcggaagacggaaaaagaagatactacgcgccatcgtgcacaacatccagaaaaatggggccgaaaccgaaaaccgggagaaggatcctttcttcaaagaaaagatctgtggcgagctggccttcgctaagatggtagatcccgatttcgccaatccgctcatagagaagctcaaaggttttaattggctgagctacgacgaaaacctgaaaaattctcgagattctgaactgattgtgcgctctctggaaaaaaagcactacttccacccagttgacgccaataacatcatcgagagtgaaagcgacttcttaaaggctattgccactacgattacagaactcaagcattatattgaggatcggcgatggacagagccattttgggacgaagcgagagaagtagagatggacggcaaaaaatataagatcccagcagtcccaaagaaggagtccaaaatacaacccacaatccatatattcttctgtcgcaatttacttccttttggaattcacgtgctccgcgagactgacgaagggattggtaagctcgatttcaaattcctggtgaccattaaaggcaatattcctgtcaacgtttgtgctgagttcaaacttgcccataatgaggagctggagcacggcttgaccaaacagttgccgctgtatctgaaggcgagccccagcaaatcaggtctgtttctggtcatgtggtttaaggatgagaaggaggagtattttaagcggcccactaaccagaataagacgcaaatgctgaagtacctggaggaaaccatcaaaaagatcaacgagtgcggcaagttcaagatcgaatcagtgttgattgacgcctcgaaaaggccctctgcatcacactcatga

SEQ ID NO: 10131 - RNA, 1719 nt, synthetic construct
  source 1..1719: mol_type = other RNA
atggccaataggctcactaaaaacgagcgaatgaaagtgctgttcgataactactttgaagaaggaatcatatccccgctgagagacgtggagtacaatgacaacttcaagtcctttaagaaacttaagagccagaaactgccttacgtgtatgatgttaaccatttctgttttctctccaattccagcagcaaacaggtgaactatctgctactcaagaaggaaaaagcgtacgtgacgttcaacctccctaagaaagcgggaggctttcgagaaatcaacgccccgtctaaatcaatgaagcacattcagaggtggatccttgaccatattctgtacaaaatgtcactgggggattatgtgcacgggtttgtacccaaaagaagtatcttgactaatgcctctatccacgtaagtcaaaatcttgtcctaggtattgacatcaaagactttttcccttctattgatttcaacagcgtgttcaggattttcacaagtgtgggttacacacaaaaagcagctcatttcctggccgccctctgcacctacaagtcgaagctcccccaaggcgcccctacctctcccatgttagcaaatctagcaatagcttccttggacattattatcgacaaatactgccggcgccggaactttaagtacagccgctatgctgatgacataaccattagcggcagtcataatctgccaatgcacaagcagaagattattgagataatcgaagggaacgggtttaccgtcaatgaggagaagaccagattacacagcagaggctcacgccagaaggttaccggacttgtggtcaatgacaaggtcagtattggacggtctagaaagaagaccctgcgggctatcgtccacaacatcttgaagaacggatatgaaattgaaaaccgtgagaaggacccctttttcaaagagaagatctttggcgagctggcattcgctcgaatggtagagccagattttgccaatccactgatcgagaagctcaagtgcgctaattgggcgagctatgatgagcagacaattgattcaagggagagcgagttactcatgcggagcctggagaagaaatcctatcacaaaccagtggacgcaactcaaataatcgaatccgaatccgatttcctgaaggctatctcttccacaatagcagagttgaaacactacatcgaagatcgtaggtggatagaacccttctgggacgatgcccgcgtgattgaaatcaatggggagaaacacaaaatccccgcctccccaaaaaaagagacgaagatccagccaacattgcatgtctttttcaataggaaccttctgcctctaggtgttcaggtgctgcgcgagactgacgaaggggttggaaaactcgatttcaagttcctggtgacattgaaaggtaatatccctctgaacgtttgtgctgaatttaagctggcccataatgaggagctcgaacatggcctgactaaacagcttcccctgtaccttaaggcatccccaagtaaatcaggcatttttttagtcatgtggttcaaggacgacaagggcaagtatttttctaagcctatcagccagaataaatctcagatgttgaacatgatcgaggaagcgattaaggagataaacaacaaagaggagttcaagattgaaagtatcctgatcgatgcctcaaagaagccctcagcctcgaataactga

SEQ ID NO: 10132 - RNA, 1743 nt, synthetic construct
  source 1..1743: mol_type = other RNA
atgacaaggaaagttgccgagaatatcaagttgaagatcctcttcaatgattatttcgaggacggaatcataccgacactcaaaggtaaagagtatagcgacaatttcaactcctttaaagtcctcaaatcgcaaaccctcccttatatctacgatgtgcaccacttctgttttctgtcaaacttctctgcaaaacagattctctttttcctgaagaacaaagaaaagttctacgtcacttttagcattcctaagaaaagtgggggattccgggagattgatgcccccagtaaacagatgaagctcattcagcaatggatcctgaataagattctgtacaagatctccataggtgattatgtgcacggctttgtaccaaagcggtcaatccttactaacgcttccaatcatattaaccagaatttagtgctgggaattgatatcaaagactttttccccagtattgacataaaaagggtgaccgagattttcttgtgcatgggttacactcagaaaactgcatctttcctagcggaactttgtacatacgagggcaaactcccccagggagcccctacatcaccaatgctcgctaaccttgccgttaaagagcttgatatcgctattgatgactattgtaagaagcggaactttaagtacagcagatatgcagacgacattaccatatcaggcagccagaaactggccatgtacaaacagaaaatcatcggtattgtcgaatcgaatggctttgcggtgaatgaaaaaaagacccgtctacacagtaaatcctcacgtcagaaggtgacaggcctggtggtcaacgataaattgtctatcggccgcgagaacaagaaaaagctgagggctatcgttcataacattctgatgaaagggcccatcgcagaaaacagaaacaatgacccatttttcagagagagaatatttgggtacctggggtatgccaacacaatagctcccgaattcgcaaccccacttatcgagtccattaagaatatcgattggagcgagtactacgaaagcatcaaggaaatcaaggaaaatgagatgaacatcaatcacatcaagaagatgaacaagaccatacttattaagttcaacgatctggggttttttcgcatggtagtggaatttcctgaaggggtcttctccgaggctttccgaaatcagctggacaatctacaagaaaagtgcggcgaacatggaatcgtggcctgctctgattgcctggacattaaaaaggagatttacagcaagtgtatgaagtatgtgattgggcagtacactggaaccaccggtggccatcaccacggccatgagatttacgatatgaaatccaagaccgatttatatggagacagcataacggtagctttcctgatgaagagctccgcgccgaagaaggagagtaaaacgaagaataaagccaataagacctctaatcggcgaattacggccgttgacgattctctctttcgccagttttatgagtgcacaaggtacgagaacatcgacgtgatagccatcgtcactaattccaacctgaataacgagttgtctgaaaggctggaacagttaatcaagaagataaacaaagccgacaacaaggaacaattgtattgtttgatcatgagaaacgagatgaagcgcatcctgtacgacttcaataagaaaacaaccaatgagactggccaatatgacaatgcatttaacaacatgtga

SEQ ID NO: 10133 - RNA, 1683 nt, synthetic construct
  source 1..1683: mol_type = other RNA
atgacaaataagatcaccgaaaacgagaaattcaaaattcttttcgacgactacttcgaagagggtgtagtaccgtctttaagcaaggaagagtacaatacgaatttcaagtccttcaagaaactcaagaagatgaagctcccgtatatttacgaccttgaacatttttgcaacttgtcaaacagtagttctaagcagatcgggttttacctgtcacacaaagacaaggcttattccacatttaacttacgtaagaagactggagggcttcgggagattaacgccccggccaagaacctgaaacacgtgcaaaggtggatcctcgaccatatattgcacaaaattgatgttggaaccagcgcgcatggcttcgtgccaggacgctcaatcgtaaccaacgcaagcatccatgtgaaccaggatctggtgctggggatagacattaaagacttcttccctagtatttcagcaaatagcgtgtattatgtcttcaagcgggtgggctatgccagagaggtatcgcgactgctcgctgaagtgtgcacccataattggaggcttccccaaggggctccaacttcccctactctggccaacttggtggccctgtcgctggatagtgatatcgagaaatactgctccaaaaggaactttaagtattccaggtacgcagatgacattactatctcaggaagctctaacctcccaatgcacaaacagaaaatcctggagatcatcgagaagaatctgttcattgtgaacgaggataaaaccagaatgtttagccagggaagtaagcaaaaagtgacaggcttggttgttaatgacaaggtgtccataggccgtaacagaaagaaaaagatacgcgccattgtccacaatattctgaagaacggtcccgttagggagaatagagagaaccatccattcttcaaagaaaagatcttcggcgaattggcgttcgtgaagatggtcgatcccgagtttgcaaatccactgatagttaaactgaagcagctcgattgggaggattataacaaaaaaatcgaggatagcaaggaagccaaactacgagtcaattctcttatgcgcaaatcttacgcagagcctatgtacgttaatcagaagatcgaatcagaggatgatttctttaaagccattaccgacatctttgaaaaactccggtggtacgtggaggaccagcgctggactgaagctttttggaacgattgtaatcctcctacccccaagaaagaaacgaaaattcagcccacactcaagatgttttttaagcaggagctgaatcccataggaatccatgtggagcgggaaacacacgaggggatcgggaccctggactttaagttcctcatcacaattaagggcagccctctggtcgtgtgtgccgagtttaagttagctcaccacaaaaagctcgaacacggtctaacgacccagctgccattatatttgaaagccagcctgtccaaatccggcatatttcttgtcatgtggtttaaggacgagaaagaggaacacttcaaggaacctactaacaagaataagagcgagatgctgacatacctggagggcaaagtcaaggaaattaatgagaacgaagacttcaagatcgaatctatcctaattgacgcgtctaagaaaccctctgctagtcaatcctga

SEQ ID NO: 10134 - RNA, 1980 nt, synthetic construct
  source 1..1980: mol_type = other RNA
atggataagctaccgaatgacgacaagctgaaaataatgttcaaccactacttcgaaaagggcatcattcctaagctctctaagaacgagcacatcaacaatttcaactcattcaagaagttgaacgccaataatctgccctacatctatgacagggatcacttctgtagcctgtccaacagcagctctaaacagatcggatactatctgttcaaaaaagagatcgcctattctacctttaaccttccgaagaagaatggttctctgagagagatcagtgcccccgctaaacccatgaaatatgtacagagatggattctgaaccatatcttatacaagctggatgtcggggacttttcgcacggattcgttcccgggaaaagcattgttaccaatgcatcaattcacgtcaaccaggatctggtgctaggcattgacctcaaggacttctttccaaacattcaatttaacagcgtgcgttatatctttaagtcagcagggtacagtccaaaggtcgcctcattactggctgagatatgtacgtaccatcacactcttcctcagggagcccccacaagtcctacattatcaaatttggtcgcactcaagctcgacaaaaagatagcgacctattgtgcgaaacgcaatttcaagtattctagatatgccgatgatataacaatctccggaagctccaatctgcctaagcataagcagataattatcgagatcatcgaaaaaaacggctttattgtgaacgaggacaagactagaatgttctctcaggggtctaaacaaaaagtgactggtttggtggtcaatgataaagtgtctattgataggaagcgaaagaagaatatccgggcaactgtacacaacattctgaaaaatggtccagagatggaaaatcgggagaacaatccttttttcaaggagaagatctttggcgaactggcgttcgtaaagatggttgatcctgactttgccaatccacttatcgataagctgaaacagcttgattggattaactacaacaagaaactctccaatcccagggagatggaactgatggtgcgcagcctccaaaaaaaatcctgcatcgacccagagacttataatcagccaatcgaaagcgagggcgatttccttcaagtcatttgcgacgtgatagcagaaatgaaaaggggcattgagaagccgcgggcctacaaagcattttggaacgagggttctacagaaattctagacggaaatgaacataagatcagccccacgcccaaaatcgagaagaacatccagaacataatcgttctgttcatcgaggaccgactgctgcaccaggggatacagaccatcgaagagagtgacgaagagatcggctacttcggattcaagttcttatttaccacccagaaacgtaaagctttgaatattagcaccgggtttaagcttgctcacgatagtcaactcgaacatgggttgattaagcagctcccatcctatctggaggcctccagctccaaatcaggcatttttctcgtcatgtggtttaaggacgaaaacggaacatttttcaataagcctatcaatcgctcaaaatcggagatgctcgcctacctgcgggaaacagtgaaggaaatcaatgagaacgaggatttgaaaatagagagtatccttatcgacgtgtgcgagaaaagtagcgccagcaaaactgaatacaagaacgaccatgacgatgaaggtggcaaggggaagaacattagctattacctgtcgataataaagtgcaagattcagaaactgtggaaaatcatcattggcctcttagttctcattggcctgttggctgatgctattaatggatggcctgtgatcaaggaatttatgacgtctatatccaccagtttcattaactactcctcttacattttctcactaaacattcagctgtcctccatctttgctgtgtttttcaaatga

SEQ ID NO: 10135 - RNA, 1707 nt, synthetic construct
  source 1..1707: mol_type = other RNA
atgcccgaatccatgatactcaccgtctcacagtttgaggaatttatggagagcattaaacccccattatcttccgaggacattgagttccagcgtaaacactttgagaagttgacctacaacaaactcccatacttttttaacgttgatcatctggccaatagcatagggttctcctctccacagctccatttattcatctcaaataagcgcgtggcctattccactttcaagctgcctaagaaaaatcgggggttcaggctgatcgatgcaccatctaaagacatgaaaatcgtccagaggtggatcctggataacatcctctacaaactgaacgtcggcgagtatgcacacgggtttgtacccggcaagtcaatcgccaccaacgcttccattcacgtcgcgcaagacctagtgctcggaattgatctcaaagactttttccctagtattactcttggacgcgtgattgggctgttcaggggcatcgggtacaacgaggaaattgctcatgcgctgggcgaactgtgcacctttaattggaaacttcctcagggggcccccactagtccgatgataagcaatttgatcgcctggaatattgacattaaactctccggtttctgcaagaagcgaaacctaaattatagcaggtacgcggacgatatcaccataagtggaggcaagaggctgccaaagtataagacccttattttccgcaaaatcgaggaagaaggctttagcatcaactgggagaaagtgcggctccatgatcggggttcaagccaaagagtaacaggattggtggtcaacgacaaggttacactgggacgaaagaagaagaagacacttagagccatagttcacaacattgtaaagaatgggcccgagactgaaaatagagaaaatgagcccttctttaaagagaagatctttggtcaacttgccttcgctaaaatgatagaacccgattttgccgatagtctgcttgactcactgaaacacgtggactggaactcttacgacaagaaactgacaggtttaatcgagggagaactgtcggtgcggtctttggagaagaagaaatactgcattccagttgttgaggatcaggacatcaaatccgaaacggacctgctaaaagtgatctgtgatgtcataaccgaactgcgctattatgtggaggatagacgatggattgacgctttctgggacgatagccgtgaggtggaagttgatggaaataagatcaagctgcccgctttccctaagaaagagacgaagatacagcctactttgtacgtatttttcgacaggcgcctgtaccctctcggcatccacgtctctcgggaaacagatgagggcatcggcaaactcgatttcaaattcatggtgacaacgaaaagtcacatcccgttgctaatttgtgcagagttcaagttggcacacagcacaaagcttgaacatggtatcactgtgcagctgccagcttatctgaaagccaatagatccacctctggcttattccttgtgatgtggtttaaggacgaggaagagaagtttttcgataagccgaacgatcaaaacaagctgcagatgattgaatttatcgaggacaagattaacgtgataaagtacgaggaggaaattgacatcaagtcaattctgatcgacgccagcaaaaagcctagtgcatcgaatctctga

SEQ ID NO: 10136 - RNA, 999 nt, synthetic construct
  source 1..999: mol_type = other RNA
atgcgcatgaccaaggatcagatcctgaccgaagaccagtttaaagtgttcatctcctcaattaagcctccactctcggaagaagagcacgaatctcagtgttccagctttaagaaacttaaaagaaacgaactcccctacatcctgaatatcgagcaccttgcagagctgactggctccagtcccgcccaactccacctgtttataagcgataaacggaaggcctatagctctttcaaactgccgaaaaaacggggcggatttcgtaagatcgatgctccatctaaaaagatgaagactgttcagagatggattctggataatatgctatacaaactagacgcagggaactacgctcacgggttcgtgcctaataggagcatagcaacaaatgcttctgtccacgtagggcaggagctggtattgggaatcgacattaaggattttttcccatccattacactgaaacgggtcgtgggattattccagagtatagggtataacgaagaagtttctcacggtatgggtgagctctgcacctttaattggagattgccgcaaggcgcgccaactagccctatgatttccaatttgattgcatggcatatcgacatcaagttaagcaagttttgcaacaagcggaatctttgttattccaggtatgctgacgatatcacaatctcaggcggcacagagttgccccgctacaaaacgcttattttccgtaagatcaaggaggagggcttttcaattaacgatgagaagacgagggtgcatgggaggggtagttcacagcgagtgactggcctggtggtcaacgacaccataaccctcgggagagagaagaagaaacgactgcgcgccattgtgcataacatcgccaagaatggacctattgccgagaaccgcgacaacgacccctttttcagggaaagagtgttcggacatatcggtttcgcgaaaatggttgagcccgacttcgccaagagtctgcaatga

SEQ ID NO: 10137 - RNA, 1647 nt, synthetic construct
  source 1..1647: mol_type = other RNA
atgatcctgatagatagccagtttaagaaattcatggactccatcaaaccacagctaagccgagaggagtatgatctgcagctcacttcttttgaaaagctgaagaaaaacgagctcccatacatactcaatatcgaccacctggcacatctgtccggtatttcaccccagcagctccatctgttcatcaagaacaagcggattgcgtacagctctttcaaactgccgaaaaagaatgggggcttccggagcattgacgccccttcgaagaatatgaagcttgtccagagatggattctggacaatatactgtataagctcaatgccggcgagtatgcacacgggtttgtaccaaagaaaagtattgccaccaacgctttggtacatgtgggccaggaattggtgctgggtatagacatacgcgatttttttcccaccattacccttaatcgggtggaaggactctttaaaagcatcggttacaacgaggaaatctcttacgctttaggagaactgtgcacattcaactggaggcttccacaaggagctccgactagtccaatgattagtaatctcatagcctggcgaatggacatcaaactgtccaagttctgcgaaaaaagaggcctgatctatagtcgttacgcagacgatattaccatctcaggcaacaagaatttgccccgctacaaaacactgatcttccgcatcattgaggaggaagggttttcaatcaacgagaagaaagtcaggctcctaggaagagggtcatctcagaaggtgacaggggtgattgtgaatgataagatcagcctgggaagaaaatcacgtaaaaggctggaggccatcattcataacattctgaagaatggacctatcgccgaaaatttgaacaacgatccttactttaaggagaagctcttcggtcacctaggcttcgccagcatgattgagcctgatttcgcattgcctctgcttcagtctctcaagaagatcgactgggaaccctacgactgtgcgcttgaaacttctaaggagtcagaattaaactacaagagcctgtctcgcgactcccactccaatctgattaagtttgacaaccttggattctttaaggacgtggaaaccctgcccctgaagtggaaagatgagctaatcactcaattagacgagcttaaggaaaaatgcgaagagcagagtatcgacgcctgtaagaactgtatgcacgtcagaaaagagctctatgagaaatgcattaagtatatcctcgggcattatgtcggatgtacatgcggtccccaccacggccacgaagtttttgacgttggcggggaaacggacttatatggggatagcgtgtttgtcgcttttcttgccaaagctggcaaactcgaccgcaaatcgaaagattccctattccatcaattcttcgagtgcaccattcaggagggcttggatgttatctccgttgtgacgccagagatactggataaccggctgaaaatggatctgaggatcctgtttcgggattgcggcaaagagaagttgttctgtttgatcatgcgggatgagatgagtaggatcttatactccttccaacgaattatatccaataacatgtgtgaggacgaaaagaaggcaccttga

SEQ ID NO: 10138 - RNA, 1683 nt, synthetic construct
  source 1..1683: mol_type = other RNA
atgaattgctctgccatttgtgatgagaagcaattcgaggaatttatggactctctgcagccctctatctccaaggaagaatatgatacccagtacgaaagctttctgatgctctccgagaaaaacttgccttatatttacgacctaaaccatctaagcctgctcattggcgagagtaccaagcagctcgacttttttgtgagaaacaagcgcaagatttatgtgtcctacaggatgaagaagaaaagaggcggatatcggactatcgacgtcccatctaaaaagctgaaattcgtgcagcgctggattctccagaatatcctgtacaatatcaaggtttccaagcatagtcacggctttattccaggaagatctatagccactaacgctaaaatccacgtggggcaggagctcgtcatggggatcgatctgaaagacttctttccttcgataaagttcaaccgcgtgcgggggtttttcaagtcagtgggttataacaatcacattagtaccattcttgcggatctatgcacctttaactggcagttaccacaaggcgcgcccacatccccgatgatatcaaatttaattgctagtcggctagatcgtaggctggccggattctgcaagaaaaaggagttgctttattcaagatacgccgacgatatcactatttcgggtggcaaggtgcttcctagatacaagacactcatctttaggatcattaccgaagaaggatttgagatcaattgcgaaaaagtgaggatccagggtcgtggttcttgccagcttgttaccggcctggtcgtcaacgataaagtgtcaattgggcgaaggaagaagcgaatcatcaaaagcttagtccacaagatatccgaaaatggatctattgaagcaaatgagacggaaaatccttttttcaaagagatggtgtacggactgttgtcatttactaatgttgtggacccggagttcgctcagcccctgattgaaaaactgaaccttatcgattggaaggagttcaccgaggcatacagtcagtaccagaaaagcgagatcatagaacggtcctttaagaaatgcccaaccataaggcgaattctgttcaacgacctggagttctttaagggcataaaacttatcccccaaaatgagctgacaaaggagttcttgaaagaactcagcttactgaaagagaaatgtagcgagcataagaaagaaaactgtcaggactgcctgcttacagaagaaataagcgataagacatgtatgaagtacattctgggtcactatatcgggtcaacgggcggcgctcatcatgggcacgaggtctacgacatcggcgagatcacggagtataaaagtcaggaggtattcgtagccttcctcatgaagagcaaagacgacactaattccaagaactccctcttcactcaattctttgattgtaccgagaatggagggatagacatcatctctgttgtgagtacagaggatctggaccacaagacaatcctgcgcttgcaaagagtaatgaaacagttcgccaaggagcacctgtattgtctcattttgcgcaaggaaatggcaagcattctctactcctttaaaaaagagttctccaaaaacaaccgggaaaagagcttgttccataacggagatcaaagctcactgctgatctga

SEQ ID NO: 10139 - RNA, 1602 nt, synthetic construct
  source 1..1602: mol_type = other RNA
atggacctggaaagacagaagatcaatttcgacattccctaccaaagctttaatcagtatcgtagggacttcaggttcgccaacaagcacctaggcacacagtgcattaagttctgcattaattatgccaaagctttgaagaagaagaatctcccgatcatttacaatctggaacatctgagccaccatgtgaaactgtctaagaaatccctatacttcatcatcaagcagaaggagaaattttatcagcttttcgagattccaaagaagaaagaaggagtaagaaacattaccgccccatcaaagatcctcaaaaatgtccagagatggatcctagactgtatcctgtacaacatagatatccataagaatgccacagggttctacctggataaatccatcatcaagaatgcgaacttccatttaaaccagaagatggtcctgaatatcgacctgaaggatttcttcccctccatcaaaaacaagcgaacttaccacatatttagcagctgtggttacaaccattccgtatgtaagatcctgagtgagctctgcacctttaataacgagctccctcaaggatcacctgcatcccctatgatcagtaatatagtgtgtaagtctctggattcgcggctgtttggcttctgtaagaagaacaacctgaattactcgaggtatgccgatgacattaccatttctggagaaaggaacctcaccaagtacatcctcttcattttcaagatcattgagaatgagggttttaagatatctaccaagaagattcgacttactggaagagggaatgcacaaattgtgaccgggataacggtgaacgacaaaatttcattcgatcggaagaagctgcgcaagattcgggcgataatccacaattgcaaaaaaattggaccagagaaagctaataagaataaacacccctttttccgggagtatttgtatggctatgttgcttttctgaaacccatcaaaccagaactctctaaaaaatggaaaaaggagctcgacagcatcgattggggcgcatataaaaagaaatacgacgtggacatcatcattaacgattctgaaaaggaattgagtaacccaactgcctttatttcctactcctgggacagcaaaaaacaccgcgagtgggtcatcaggtttgctgctaaccttattaagaacggtattaacgtgttaatcgatgaatgggaccttaaagactataacgatgacctgaactactttatcgagtgcgggatacgtgattcaaaccacgttatcattatatgtacacccaaatacgcaaagaaagctaacaaacgccttggtggagccggcattgagacagccattatcacaggggagatatacgagaaaactaatgcaggcaaatttatcccgatagccttgaattaccagaaaagcatgaaagaatgcctccctacgtatctgaagaacaagttcacttttgatttcaatgaggaagaacgctatgaagagaagatcgagctgttgttaagaaagatttataagaagcccaagtacaagaaacctaaacttggcaccatacctgactttaaaagtaaggatatctga

SEQ ID NO: 10140 - RNA, 1173 nt, synthetic construct
  source 1..1173: mol_type = other RNA
atgatccttgagagtctgaacttgcccaagatttacaacctggagtccttctctactgagatcggcttgagcactaccatcctatatttattatcccaaaggcaggacaagttctatcatcaggtcattatccccaaacggaagtctggtaatcgaaccctcagtatcccatcaatgagcatgaaaatcgtgcagaagtggataaaactcaagattctcgacaagattcctgtgagtaattgtgccatggcctttcgcaaaggcaattcttatggcatcaagactaacgccgagttacacaaatacaatacgtacattctgaggttggatctgaaagacttcttcaacaacataaagaaggagaaggtgtttttcctgttccgggaaatcgggtacaataattacattagcaacatcctctctaacatttgcacatttaatgagagtttgcctcagggtggcatcacctctccgtccatttccaacctcatatgcaaaaaactggacattagactggagagcctggcatcgaaaagagatattacctatacacgatatgccgacgacctgatcttttcatgcaatgacgaagttcttcttatcaagacaaagaatgcaatactggacattctgaagagtgaaggaatggaggtcaacaaactaaaaaccaagttcataaggcccggctcacggaaaaaaattactgggctccatatcgataaaaaccgtgttattgtgcctcgcgatacaaagcgcaaggtgagagctatgatacactatagcatcgctactggagattattcaaagctggacgagatcaaggggtatatcagctttattagctccatcgaagagaattatatctccaagatcaaatcctacatcaacaagatagcgaataatgagcaatacaggctctttgaagacatcgtggaatcttacaacaagaacaaaatcttcaaggacctggacaccatgaacttcattgatgagtacatagaggaaattgacggaatcgagtatgatcttagctcaacatacttttacaacagaatcgacttcttgaagaaaaatgaacttcaggaagtcattgataacataaccaatggggaggataataacgtagatgatattgctaccacatacctggataatgaaacgtgtccattttga

SEQ ID NO: 10141 - RNA, 1140 nt, synthetic construct
  source 1..1140: mol_type = other RNA
atgcacctcaaatatagtaatctgatgaccctggaaagtctgaacctcccaaaaatttataacctggagtccttctctaccgagattgggcttagcactacgatcctgtacttattgtcccaaaaacaagacaagttctatcaccaggtgattataccaaagaccaaaagtggcaatcgcactctgtcgataccttcaattagcatgaagattgtgcagaaatggatcaaagtaaagatccttgacaatatccccgtgtcaaactgtgcaatggcgtttagaaagggcacaaattacggtatcaagatgaatgccgagttgcataagtacaatacctatattctcaagctggacctaaaggattttttcaacaacattgagcgcgagaaagtcttctatctatttcgggagatcggctataacaactacatttctaatatcctctccaatatctgcaccttcaacgaagtgctgccccagggtggggtcacatctccttctatttctaatctgatctgtaaaaggctcgacaggaggttggaaaacttagcaagcaaacgggatataacgtacactagatatgccgatgacctgatctttagttgcaacgacgaggtgctgttgatcaagataaagaacgtcatcttagatatcctgaagtcggaagggatggagataaataagctcaagacaaagttcattcgaccagggtcccgtaagaagattaccggactgcacattgacaaaaataaggttgtggtgccccgagataccaaacgcagagtgcgggctatgatccattatgccatcacaaaagaggactactcaaaacttgacgagataaaaggatacattagctttatctcctctattgaaggcaactacatcagcaagattaagagctacatcaataagatcgttaacaatggacagtgcagactttttggtcctatcgtagaaagctacaacaagaacaagatcttcaaaaaccttgagctcgtctcctgtattgaagaaatggattgggttatcactaaaggcgctttctacaatagggagaagtatgaactgaaagaagtcatagagaaatcaacagagtacggcgaagataacataaatggagagacttccccgttttga

SEQ ID NO: 10142 - RNA, 1137 nt, synthetic construct
  source 1..1137: mol_type = other RNA
atgtttataattaaggacgacatccgcaaatatgggaatctgatgattctggaggccttagacctccctaagatttatgaccttaactcatttggcagggaaatcggtttaagcaatacaatcctgtaccttttgagtcaaaagacggaaagattctataagcagaccaagattcccaagaagaaatctggcacacggcagatttctataccctccatcagcatgaaaatcgtgcaaaagtggattttgatcaacattctggagaaaatacccatatcaaattacgctatggcatttcgaaagggatcaaagtacggtatcaaaaccaatgctgagctccataagtataatgagtgcatcatccggattgatctgaaagacttcttcaactctattgaaaaggagaaggtcttttacctattcaaatccattgggtacaacaacctgatctccaacatcctcacaaatatctgcactctggatgggtgtctgccacagggagcactcacctccccgatcctcagcaacttaatttgtaggaatctcgatagacggcttgagggcttgtgctccaaacgggatatgatctatacaaggtatgccgatgacatcattctgagttgtaacaacgaagtcctgcttatcaaaacgaagaaaatcgtttctgccattttgtgcgatgagggttttaagattaaccagtcgaaagtgaagttcatgggagttagttccgccaagagagttactggcctacatatagaagaaaataaagtagtggtcccacgtatgctgaaaaggaaagtgcgaaccatgatccaccacactattgtggtaggcgattactcagaaatagacaagattaagggatatatcgcgtttataagctctattgagcctaactaccgcaagaaggtgatcgagtacataaataagatcaccagcaaacagcagtaccgcatctttaaagaaatcgtggacgggtacaatagcaataagatcctgaaggagtgtaaagatatggaatatttcaacgaggaatgcaatgaggacattgagaacgatttctacagtgagagagagaatttcataaacatgctgctcaaagaaaagaacgacactggaagctatggcgagtga

SEQ ID NO: 10143 - RNA, 1209 nt, synthetic construct
  source 1..1209: mol_type = other RNA
atgtttactatcaaaagggtgaagtaccgaaatattattatcctcgaggccctgaatctgcccaagatcttcgacataaagtcattttcaatctccattgggctgacccctacaatactgtatctgctgtctaaggaaacggagcgctactacactagtatcaagatccccaaaaaaaaagtgggtacacgtcagctaaggattccgagcttttccttgaagctggtgcagaaatggatcaaaatcaacatacttgacaagattccaatctccgactcagctatggctttcagaatcggcaaggattatggcattaagcaaaatgccgaattgcacaagtacgatagttacattttcaaaatcgacctaaaggactttttccactatatacatcgggagaaagtcttttacttcttttacaacctcgggtacaataaccttataagtaacatcttgagcaacatttgcaccttcaacgatgtgctgcctcaaggcgcagtgacctcccctagcctcagcaatctgctctgcaaaaagctggattcaagactcgaaggtgtggcttcgaagcggggaatttcttacactaggtatgccgacgacttgattttctcttgcaacgataaggtcctgttaataaaaacgcagaagatgatctatgagatcgttgaagatgaaggatttcaggtgaattctgagaaggttaaattcatggggcccgcgacaaggaagagtattaccggcctcttaattgtcgagaacaaggtcattgtaccaagatctctgaaacgcaaagtccgacgtatgatacattacatgatcgcaactagtgactattccagacttgatgtagtgaaggggtatatttcctacatttcaagcatcgagaagaagtatatcgagaaaattaagcggtatatcaacaacatggtcaacaatgaccagtataaggttttcgatgacatcgttaatctctacaacgagaatatctttcttgagtgtaatgaaatggagcatgtttcttttgagagctgtattgatatagtggacggaaccgtgctggatttcggggaacactacgtagatgaacgcatcaccttctttaaaaaacacaacatctgtggacggctgagctccttaggcatcgaatatgaggagattgcagccacagtgaatgtgacaagcgaaaatgacggcggaggtaaatga

SEQ ID NO: 10144 - RNA, 1191 nt, synthetic construct
  source 1..1191: mol_type = other RNA
atgaaagtgaaatacgaaaataccgtggtgcttggaattctcaatctgcctaagatttacgacctctatagtttttccgaagaaattggactgtctaccacaattatctacctgctttcaaagaaaaccgaccggtattacaacactattcacatccctaaaaagaagaagggtcgcacaagacagatcgacatcccctcattctccatgagaatcgtccaagaatggatcaagaataagattctagacagcattccaatctcggattcagccatggcatttcggaaagggaagaaatatggcataaagaaaaacgctgaactccataagaataaccagtacatcctcaagttagacttcgaaaacttcttttcgaatatcaacaaggagaaggtattctatatctttaagtccatcggatacaacaacaccatctccgatatcttgacgaatatctgtacatacaatgagtctcttccccagggggcaattacctccccgagcatctcaaacattgtttgcaagatgctggactctcggctggaaggactaagcaataaacgcaacatcacttatagtcgttatgcggatgatctgatttttagttccaatgatgaggtactgttgaaacgcaccacgaaagtgattttcgacattatcaatgatgagggcttctacatcaacaaggagaagatacgattcatttatccacagatgcgaaagtctattacaggcttgcttattgcagaaaacagggttgtcgtgcctaaggagatgaaaaggaaagttagagccatgatccacaacatgatcgccagcgctgactacactgacattgataaggtgaaagggtatatcgcctacattagcgggatagagtctgagtatatagagaaagtgcgtgaatacgtcaacaaaatgatagaaaaggagcagtacaaagtctttgatgacgtggtcaccgaatacaacaaaaataaactgctgaagggcactgaggatatggagctcttacccataggtagctgcatagaagaagacgagctgggcttttattctcaggacttcgccgaggattattacgaggaaaggatcgagttcttgcaagagaaatacccagaaaaggtgaagaagctgagcatcacatataaggaggctaatagtgagaacaatgaggagctcctgatatga

SEQ ID NO: 10145 - RNA, 1227 nt, synthetic construct
  source 1..1227: mol_type = other RNA
atgcttaccatcaataacctcaaatactcaaactccatcattatagacaccctgggattacccaagatatacgatataaacagcttttcgacagaaataggcttgtcacccactatcctgtatctgctgtctcagaaacaggatctcttctacaaggacacctatatcccaaagagggatggcagcaaccggcaaatatccattcctagtattagtatgaagctagttcaaaagtggatcaaggtcaagattcttgacaaactttacatcagtgacatgtccatggcgtttcgacggggtaatagctatggcattaaaaaaaacgccgagcttcacaggtatgacctgtacatcctgaaaattgacctcactgacttttttcatagtattgatcgcatgcggatattttatctgttcaaagggatcgggtacaataacttgatttccaatatcctcactaacttgtgcacatacaaggagagactgccacagggagcagtaacgtccccggtgttatctaatttggtgtgcgaaaaaatggataagcggctatcaggcgttgcctctaaacgcggtatttcttatacaaggtatgccgatgatatgtacttcagctgtgatgacgaaatactgctgagaaaaacgcagtccatgatttatgaaatcattaaggatgaggagttcaagatcaataataagaaggtgaagttcatgggacccagcagcaggaaatgcatcaccggcctggtcataaatgactctaaggtagttgtgcctagagaaatgaaacgaaaagtccgcgtcatgattcaccacggtattgctacaggggattactcaaaagtggactccatcaagggatacatctccttcatcagcagtatcgagaaggactatgagaacagaattaaaaagtactgtcagagcctcatcgataaagatcagtataaggtgttcgatgacctcattgagaagtacaaccagaacaagtttattgacaccaatgagatgaagcaagtggatgaggacgagttactgtacgaattcgaaggcattgagctcaatcatatcgactcatacatctatgagcgtattgagttctataagaagaacaatctggagaacaagatgaaagacttttacatcgagaacaaagaaatcgcttgtgtgctgaatgaagaaatcatcatgaattctgacgataacaacgaagacttcgggttttga

SEQ ID NO: 10146 - RNA, 1062 nt, synthetic construct
  source 1..1062: mol_type = other RNA
atgctgaccatcaagaaccttaaatactccaattcaatgatcctcgaaacactggggttgcccaagatttatgacattgagagtttttccacagagatagggctctctccaaagattctgtacctgcttagccagaaacaatacttgttctatcagaacaagcagattcccaaaaaagacggtagtagccgccagatttctatacctagtacgtctctgaaattagtgcagaagtggataaagattaagatgctagacaaactcccgctgtcagattttagcatggcctttagaaagggcaagagttacggcattaaaaagaatgcggagctccataagtatgacagctatatcctgaaaatcgacctgaaagacttctttcactccatcaataagaccaaagtgttctacctctttaaaggcgtaggttacaataaccttatcgcaaatatactgaccaatatttgcacttacgaagatagggtccctcagggcgctatcacttcaccagtcatatctaatctgatttgcaagaagttggattatcggctgtctggagtggcctctaagagaggaatatcctatacacgttacgccgatgatatgtattttagctgcgatgatgaaatcctgctcaggaaggctcagaacatcatttacaagatcattaaggaggatgacttcatcatcaacaacaaaaagatcaagttcatgtccccccattcaaagaagtttgttaccggattaatcatcaatgataccaaggttttggtgcctaaagagatgaaacgaaaggtgaggagtatgttacaccacgcaattgccaccggggactataataacattgacagcatcaagggctacatatcattcatctcctcgattgagaaagactaccgcatcaaaattgagaaatattgtgaagagctcatcgacaaaaaacaatatcgggtgtccaacgatctagtcgacaaatataacaacaacaacttcctgaagacaaagagcatggaatacatccaagatactgaattcaatgagtacgaggaacttattttctga

SEQ ID NO: 10147 - RNA, 1215 nt, synthetic construct
  source 1..1215: mol_type = other RNA
atgagtcaaaatatccctacactgctcatgaattccctcaagctaccctactttgaaactatagaagagctcagtgaattaacccggctcagcactcagcttctgtattgcctgtcaaccaagacgtctaaatactacatcattaagaagatcccgaagaagaatgggggtcttagagagctctctatcccctcttacacactgaggattgtacagaggtggatcttgacagaaatactgaacaaaatactcccatccgatcgagcaatggccttcagaaaagggaaggactttggacacaagcagaacgcctattatcacgccaacacattgtatggcctgtcaatcgatattaaggatttctttccctctatcacagtgaataaggtgtacactatctttagcacgttgggttacaactcctttgccgccactatactcactaatctgtgcacactggagggcaaacttcctcaggggagcccttgttcccctgctatatccaatatcatttgtagctccctagatcgccgtttcgttgggctttgtgaaaaaagaggaattcggtattctcgctatgcagacgatatgtacttcagttgcgacgataagattcttctgctaaagaacttccccatcattacgcgcatagtggaatcagagggctttatcctgaacaccagaaaagtccattttcacactccatcgaataagaaacaaattaccggaatcaccgtcagccccaccaacattgaggattatgtggagttaaaggctcctaggaccctgaaacagaaaatccgggctgagatcttcacatgtttgattagtggacagtaccagaacaaagaccatattttgggtgaaattgcgtatgtcgacttcatcgaaaaagagaataaaagcaagtacctggaacgaatcaaaaactacattggcaaacagctggtgaaaatccagctgttcccagagctggtgatggagtacaacaataataagttctacgaggacttaccactggctatctctatagacattaacatagttaccgaggaggacttcgatgatatcgagtgtctgtttcgggagaggaagaagttcctccaaaagaatggcatcaaagacatctgcaagtatagcaagtggccggacatcatcattaactcatcctataacattgccgaaaatattgcagacattgaatgcccattttga

SEQ ID NO: 10148 - RNA, 1035 nt, synthetic construct
  source 1..1035: mol_type = other RNA
atgagtcaaaaaatatcaccactcctgattaattctctaaaactccctgtgtttgagactttagaagagctcagcgaaattaccagactctctacacggctgctgtactgcctaagcaagaaaactgacaggtattataatgtcatcgagattcccaaacgcaacggtaaaatgagggagatttcaataccttcctatacccttcacattgtacagcgctggatcctgatggaaatactgaacaaacttgtgccatcttcaagcgccatggctttcaggaagggcgataacttcggacacaagcagaacgcaatctatcacgctgacactttgtacggcctcgcaatcgatttgaaagattttttcccctcgatcacggcgaataaggtgtacacacttttcagtaatctggggtacaaccacttcgcagccgctatcctgacgaatctttgtaccctggacgggagacttccccaaggctccgcgtgttctcctgctatctccaacataatatgcatgaatatggataagaggctgatcggtctgtgtgagaagcgtggcattcgtttcagccgctatgccgatgatatgtacttcagctgcgacgacaaactgttactcctgaagaactaccctatcatcaaaaagatcatagaggacgagggatttttgctgaacgaacggaagacacattttcacaccccatccaataaaaagcagattacagggattaccatctcccccggaaaggccgagaacgccgttgaactgaaggccccgcgaaaactcaagcagaagatcagagccgaaatttttacttgcctaatgacaggcgactataagaatagagaacatatcttgggggagattgcatatgtggaattcattgaacgagagaataagtacccctacaaagatcggatccgccattacatcgaggaaaagagtaccaaaattcagtacttcccagagctggtccaggcttataacgagaaccggttttttaaggacatgccgttattggagggaaaatga

SEQ ID NO: 10149 - RNA, 1206 nt, synthetic construct
  source 1..1206: mol_type = other RNA
atgaggaaaatctctcagtctttactcattaacagtctagggctgcctagattttctaccatcgagcagttttccgaaataacaggtctttctacccgtctactgttttgtctcagtaatctcaccgagaagtactatcgcaataaaaagattcccaagaggaatggagatatgcgggagatctttataccatcctacaccctgcggatcgtccagaagtggatccttaaaaacatactgaacaagatcgtcccgagcaatcagtcaatggccttcagacgtggttcttcttttgggaacaagcaaaatgcggcatatcacgcatatacactgtatggactttccatcgacctgaaggacttcttcccatcgatttccgctaataaagtttacaacatcttcagcagcctcggatataacgagtttgccgccacaatattaaccaaactgtgtactctcgacagtaagcttcctcagggatcaccctgttcacccgccattagtaatcttgtgtgcattacactggataaccggttggctggtctgtgtcagaaacgcggcattatctatacacgatacgctgatgatatgtatttcagctgcgacgataagactttattgctgcggtactactacgccttcaaacagatcattgagaatgaaggcttcgtgatcaatgataggaagacacattttaacaccccttccaatcgcaagcgaatcactggcgtaaccatcgttcaacaccatctggatgaaaagtttgagctgaaagcaccaaaggagatgaagagaaaaattagggcggaaattttcatgtgcctgatgagcggcgattacaaaaataagggcaaaattctcggcgagatcgggtatgtgagctttattgagaaggacaataacttcaactacatctccagcattaagcagtacatcactactacggcagaaaaaatcatatactttccagagctggtggatgcctataataacaacctcttcttcgacgacttggaagaaattgaatcagctctcattgatccgaaggacgaagaggagttgtactattatggggacatgtacaactccagaaaaatctacttgaacaaacgcaacctaagtgacgtgtgcacgtacaaggattggcctcaggtcataacctcccaaaataattcaagcacggacaacactgacctgcccttctga

SEQ ID NO: 10150 - RNA, 1149 nt, synthetic construct
  source 1..1149: mol_type = other RNA
atgaaggtaaataatctgctcataaagtctctaaacctgcccgagttcaaaaacattaaggagctgtctatcctgatcggcgtgtctagtcgactgctttactgcctgagccaaaacaccgagaagtattacacccacaaaatcattcctaagaagaatggaactaaccgctgtctttccatgccatcctataccctgaaaattgttcaaaggtggatactgaagaggatcatagagaagataatcccatccaaatcagctatggcatttagggtggggaaaaattttggctataagcagaacgcgtcatttcattcggatactttgtacatgctgagcatcgacctgaaagacttcttcgacaatattaaatcgttcaaggtctattgcttctttatttctatcgggtactgtgagtttgccgccatgatcctcacgaaaatttgtacattggataataagctcccacaggggggagtgtgcagtcctgctcttagtaatctcttactttcatccctcgataagcggttgattggattatcagaaaagagaggtattagattcacccggtacgccgatgatatgtgcttttcctgcgataataaggtggaactgctgaagatttttcctaccatcaagaagattatcagcgaacagggattcattatcaacgaccataagacgtattttagtactcccagcaacagaaaaaaaattacaggcatcactatcagcaaaaagaacaacatcattgaactcaaagccccccgcaaattaaaaaagcagatccgtgtcgaaatatttcagtgtattgtgtccggtgactactctaaaaagaatcacattattggggagatcgcccacgtaaactttatcgagaaagagaacaagatcaagtatatcaacaacatgaagaagtacatcgaaacaacaggcaaaaaaattagctgcagccccgaactcgttaccgcttacaatgaaaaccttttcttcaacgacataaacaaactagagatcatgccgctgatcaatatcgcatgccgcaggaatgcagtggatttcttcaaaaatcggaaagagtacttgggtaagcgacatatagtcgacatatgtaagtataatggcctgatgatttactgtgacatatga

SEQ ID NO: 10151 - RNA, 1227 nt, synthetic construct
  source 1..1227: mol_type = other RNA
atgtcaaacttgaagcgcctgaactatatttacataaacacgctgaagatccccgcttttcagaatatttacgagctgtcacgcctcaccgggatctcttctcggatgctctattgcctgagcaaaaataatgtggagtactacaagactttcacgatccttaaaaaaagtggagatccccgaacgatcaatgcccccctgtacagcatggctataatccagaagtggatcttacgcaacatcctagaaaaaattacaccttccaatagggccatggcctttcggaaagggtccgagttcggttgcaagatgaacgccaagtatcatgttggaactctgtacggtctttcgattgacctggcagacttttttacttccatcaaaagcaacaaggtctattgtctgtttcgtaatttaggctatgctgaaacagccgccaccatacttaccaatatatgtaccctagatggtgcacttccccaaggcggggtgtgctcacctactataagtaatctcatctgcatcacactggacaatagactgattggaatgtgtgaaaagaggggcattaggtatacaaggtatgcagacgacatgtacttttcttgcgacaataaagatttgctgaagaaaactttcccgaaaataaagactgcaattgaggaccaaaacttcaccattaacaacaacaagacaagatatcacaccccaagcaatagaaatcagattacaggcgtggttattgtcaaaaccaaccagtacgaagagtacgaactaaaggccaagaggaaactgaagcagtctctgcgtgccgaaattcacaacgctatcatgaccggcgattacaagaacaaggggcacattctcggcattatcagctatattaactttgtggagaaggaaaacagtgacaattacctcgaaagaatcaaagagtacatcgtgaagtgcgcaaacaagatcatcttcttcgaagagttgattaaagcgtacaacgagaaccttttcttcaataacatggagaagatcgcgtatgataaggatcagatcgtagacttcttcaaagaggaggattcctacctcaagttgctggataaacgcatagagcgggaagcttatctccagaaataccatcgggacgatatctgtatgtatttagattggccacgaggattggaccctaacaataataatgacatcggactgatggacgattgtccattttga

SEQ ID NO: 10152 - RNA, 1239 nt, synthetic construct
  source 1..1239: mol_type = other RNA
atgcagaaaaacaacctcctgttgataaactctctggggatcccttacttcgagtgcttagaagagttttcccggataataggattaagtaccaagttgatctacctcctaaccaataagaccgagatttactacagttttaaggaaattcccaagaagaatgggaaaaaacgcattatcgccatcccctcctacacactgaaaatcacccagaggtggatcctcaaaaacattctgaacaagattaggccaagcgactatgtcatggcttttcgcaaatctagcaataacaacaagttcgacatcaagaaaaacgcctactatcacagtgatagcctgtatggtctatctattgacctgtctgacttcttccctagtataaatgctgcgaaggtctacagaatttttaaaggaatcggctacaacaacacagcgagcgctattctgactaatctgtgcacattggaaaacaaattgccgcagggtgcagtgtgttcacctgctctgtcaaatcttatctgcatgcgtcttgatagacgactttttggcctgtgcagcaagcgcggcgttctctatacgcggtatgcagatgacatgtatttctcctgtgataataagggccttctgctcaaaatgtttcccatcatagagaagattatcaaaagcgaagggttcattatcaatcaagacaagttacactaccacaccccaaaaaataagcatctgatcactggagtagtgatcagccattcaaacgatacatccgaactcaaggtgtcgaaggaattcaagagaaaaataagagcagagatcttcaggtgtatcatgacaggcaattatgaaaacgccgcccatattaaaggagaaatctcctatgtgtgttttattcaatccgaaaacaggcaggattacaagcagtccatcattcagtatattaaccggacctcaaaaaagatagagtatttttgcgaactggttgacgcctacaatgaaaatttcttcttcgatgagcaagagccattggaattccttgacatcaataaactcgagattgattgccctgagaaggacaccgacaactatgatcagtacctgtttgagacaatcgaggcaatttttcagtaccgaaaagagtacatcaagaataataacctgactgacatatgtaagtaccagaactggcccaagaacactactgagaatgagtttgatgcctcttctgaggagacgccattctga

SEQ ID NO: 10153 - RNA, 1182 nt, synthetic construct
  source 1..1182: mol_type = other RNA
atgaacaaaaatttcactaacagcttcatcctcaacgcccttaatctgccaattatacgcgatctcgataccttctctaattccatcggggtatctaaacggctgctttatctgttatcacagtcaagtgaggagtactaccggagtttctttatatgtaagaagaacggagatcagcgggaaattcatactcccacctacagcctaaaactcgtgcaaaggtggattctggaagaaatccttgagaagatcgacgtgtctgaggagtccatggcatttaaaaagggacccggcaacgggatcaaaaagaatgccgagatccatctgtactcgctctatttactgcagctggacctgaaggacttctttacatctataaagcgcgagaaagtcttttacctatttaaggatctaggctacaatatcgtcgtttctaacatactcgcaagtttgtgtacgtataacggctatctcccacaaggcggggttacctcaccttatatttccaatttggtgtgctacaaactggacaaaagactcaaaggtctgtgcgctaaacgcgacatcctttatacacgttacgctgacgacttgacctttagctgcgataatcgagaaaccctcaaaaaggtgcagaaagtgatcgaggatataatcgaggacgaaggcttcaatgtgaattccttaaaaacaaggcttctgagcccttccagtcacaagaaggtgaccggtatcactgtcaatgagaaaaccgtaaaggccagtaagaagctgaagagagaagtccgtacaatgatccaccacgcatttgttacaactgattatagctccaatgacaggattaggggctacattgctttcattagctccattgaggaaggatataaggacaccatctacaagtacattaataaactggtgaacaacgagaactataggatgttcagagacattgtggaggcgtacaataacaacaagatcttcaagaacatggaagacatgaaagacatgaagtttgagaagagcgggtacctggtcgaagaatatctgaatgatttggcccaggagcgggcctcatttctgagaaaccgagatattcagactgacctgttcacaaactcgagcgctgatgagatcgcctctacgtcaatggaacgcaaggattttaaagatttgttctga

SEQ ID NO: 10154 - RNA, 1188 nt, synthetic construct
  source 1..1188: mol_type = other RNA
atgaagaaatcctataccaactcattcattctgaatgccctcaatcttccaatcatacgggacttggatactttcagcaactcgataggcgtgagtaagaggctgatttacctactgagcgaatctactgaggattactacaagaactttctcatccctaaaaaaaacggtgaacaacgggaaattaacacacccacttactcactaaaattggtgcagagatggattctagaggagatcctggagaagattggcgtcagtgaggaatccatggcctttaaaaagggccctggtaacgggattaagaagaatgctgaaatccacttatactctctttacctgctccaattggacattaaagacttcttcatcaacatcaagagaaaacgtgtgttttatctgttccgtgatttgggatacaatgtggctatctccaatattctcgcaaatttatgcacctataaggactatctgccccaggggggcattacatctccatacctctccaacctcatatgttataagcttgacaagcgattgaaaggcctgtgtgccaaacgggacatcctgtacaccagatacgctgacgatctgacctttagctgtgacaatagagagtcccttaagaaggtacagaaagtgatcgaggagattatcgaagatgaaggattcaaaacgaaccccctcaaaactcgcctgctgtcaccttcttcacataaaaaagtcacgggaatcaccgtcaatgagaggtatattaaggccaacaagaagcttaagaaaaaagtcagggcgatgattcaccacgcattcatttccgccgactattctagcaatgattgcatcagggggtatatagcattcatatctagcattgaggagggatacaaggacacaatctgcaaatacatcaacaagctggtgaataacaaaaactaccggatctttgaagatatagttgaggggtataacaacaataagatcttcaaggacatggaggaaatgcgcttcaaggaaacagtttttctggatccggactatccactgaattcgcatttaagcgatatagttcaggtacgcaccgattttctccagaatcgagatatcaagatcgacgtgtttcccgatagcagtgaagacgagatcgctagtgccaatatggaagagattgagatcgatgacctgttttga

SEQ ID NO: 10155 - RNA, 1197 nt, synthetic construct
  source 1..1197: mol_type = other RNA
atgaaaaagcattacactaactcgttcatcctaaatgcattaaatctgcctaatatccgcgacttggaaaccttttctaatagcattggtgtgagccaacgactcattcagttacttgccaattccgcacacgtgtactacaacaacttcagtatcccgaaaaagaatggaactcagagagagatcaacactccaacctatagcctcaaactcgtgcaaagatggattctgaaagagattctggaaaagatcgatgtgtcagaagaatcaatggcctttaaaaagggcctggggaactctattaagaagaatgccgagatccataaatacagcgtctacttgctccagctggacataaaggacttcttcatctcaataaagaaggagaaggttttctatctcttcagggatctgggatataatatcgtggtgagtaatttgcttgcaaacatatgtacgtacaacggctttctcccccaggggggcgtctgttcaccatacataagtaatcttatctgctacaagctggataaacgcctcaaaggtttgtgtgccaaaagagatattctgtataccaggtatgccgacgatctgacattttcctgcgataacaaggaaacactaaagaaagttaggaacatcatcgaagacattataaagaacgaggggtttgagattaaccctcttaaaacacggtttctgtcaccctcttcccacaagaaagtcacaggcattaccgtcaatgacaaccggatcaaagcatctaaaaagctgaagaagaaagtaaggtccatgattcaccatagcttcgttagcgcggactatagcagtaacgaccagatccgcggatatgtgtcttttatcgattctatcgaggagggctacaaagacaagatttgcgaatatatagaccgtcttgcgaacgataaggactacaagtattttgaggacattgtcgtggctttcaacaacaataaaatcttcaaggagctggctgacatgcccttcgaggatttatcctttaacgaccccgatgatcctgacgatctggttacctactttatctccaattccgtggaagaaagatacagttttctgaaggatcgacggattaaaattgatgccttcccagatgagtatgaagacgaggtggctgccgctaatcagaatgaaatagaggtagaggacatcttctga

SEQ ID NO: 10156 - RNA, 1110 nt, synthetic construct
  source 1..1110: mol_type = other RNA
atgaagaacgatttcacgaattctttcatcctgtactcgctcgatttaccgataattaaggatttcgaaagcctatctaactctgtgggcattagtaaaacaatgctgtacctcttgtcgaaaaaaacagacatgttttacaactccttcgacatatgcaaaaaaaacgggaccaagcgagaaattaactcacctacctattctctgaaacttgtgcagcggtggattctcgccgagatccttgagaagattaaggtgagcaatgaatctatggcatttagaaagggcattggcaacggctgtcgcaaaaatgctgaacaccacagatatagcctttacctgctgcagttagacatcaaggattttttcacttcaatcaaccgggagcgcgtgttttatctgtttaagagtctggggtacaattctttggtgtcaaatatcctggccaatctatgcacctataagggttatctccctcaaggaggagtatgtagcccctacattagcaatctgatttgctataagcttgacaagcgtttaaaaggcttgtgtagtacaagggacgttctgtacaccaggtatgctgatgatctcaccttttcctgcgacaataaagttatcctccgcaaggtcaagaatgtgatcgaggacatagtaattgatgaaggattcgcgattaatccaagcaagacacggctgctttcccccagttcccataagaaagtgactggtatcacggtcaatgacaacaagataaaagcatccaaacagatgaaaagaactgtgagggctatgatacattatgcactggtcaacagggactactctgaaaaaaacgtgatccgagggtacgtctcatatatcgactccatcgaggaggggtacattgataagatcaagaactacatcaacaagttgactgagaaagattactcctcctcaagtgagatcgtcgagagcttcaataaaaacaagctgttcaacgatctgaacgacatggtttataatgaggccagcatcatagacgaagcctttgattgggatattttcgagctcgacacatacaagcacatcagcgccaccaagcaggaagacgactttaatttctga

SEQ ID NO: 10157 - RNA, 1053 nt, synthetic construct
  source 1..1053: mol_type = other RNA
atgaccacagatttcaccaattcgttcattttgaattcactaaagctgccgatcattactaacatagattctctggcaaacactcttggcctgagcaagaccattatctttttgctgagccaaaagacatcatactactacaagccctttaagatccttaaaaaagatggcaatagccgacagattttttctccctcatattccttgaaactcgttcaacgctggattctcaacgagattctggaaaaaattgatgtgtcccatgagtcaatggcctataagaagggtaatgacaatggcatcaagaaaaacgcggagatgcacaagtataatctgtacctgttagaattcgatttgaaggacttctttacttccataaaacgggagagagtcttcttcatgtttaaaaacctgggatataacaacatggtcagcaatatcctcaccaacatatgtacatataacgattacctgccacagggcggagtgtgtagtccttatatttctaatctcgtgtgctatagactagataagaggttaagtgccctgtgtgggaagaggggtatcgtttatactcggtatgctgatgacctgacgttttcttgcgacaacaagcagagccttaaaaaggtgaaggacataatcaaagacattattgagagcgaacagttcaaaatcaacgatagtaaaacacgcctgctgtccccaacgagccataaacgtgtgactggaattacagtaaatgacaataagctcaaagccaacaagaatatgaagaagctcgtcagggctatgatcatcaaaagtttattctcgatggactacatcaacaataatatcatcaaggggtacatcgcatttataaattccatcgaagacgggtacaaatgcaagattatagagtacatcaacaagaccatcaacaaatctcttccttattccaacgaaatggtgattgcctataacgagaacaaattcttcaaggaaaccaatgatatgtgctaccacggctacgacaatatcgatgacaaatacgaggactacgaggggtga

SEQ ID NO: 10158 - RNA, 1179 nt, synthetic construct
  source 1..1179: mol_type = other RNA
atgatccaaaaggattacacggactctttcatattaaatgcacttaatctcccgaccattagcgacttggactccttgtcagatgcctttgcaatcagcaaacggctaatatttcttctgaccaagaagaccgagaactactacaaaaggttctacatcaagaaaagggatggcacttcccgtgagatcttgtctcccacatactctcttaagctgatccagcgctggattctcaaggaaatcttagagaaagtgtcactgtctgaacaggccatggcctacaagaaagggaaaaataacgggattaagaagaatgccatgcaccacagatactcactctatatactggaaatggacattaaggatttcttccactcaatcaagagggaacgtgtgttctacctctttaaaaacctgggctataataatatggtgagtaacatcctgaccaatctgtgtacatataatggctatctccctcagggaggtgtttgcagcccctatataagtaacctgatttgttaccgcctggacaatcggctgtccggcttgtgcggaaagcgggatatcctgtacaccaggtatgctgatgaccttacgtttagtagcgataacaagcaaactctgacaaaggcgatcaacataatcatcaacattattgaggacgagggttttaaggtgaacaagaacaaaacaagactcttatcaccaggcagtcataaaaaagtcaccggcattacagtcaacgattccaagatcaaagcttccaaacagctgaaaagaaccgttcgcgccatgattcatcaggccattgtcactgcggactactcgcaaatagaccggattagaggaatcgtttcctatatcaattctattgaggtcggataccgcgagaaggtaatcacttacattaatagcctaagcaacaaagactatgcttttttcgaagaaatcgtggaacgattcaacgataacaaaatcttcaaggagatccaagacatgaattataagggttatgattacgacgatcaggtgagtttggagcttgagaaaattgtatccgctcgacaggaatatctcgggaagatagggaaggtggattttctgtctgcacatattcagagccagcaggacgagttcaaaaccaatgccgcagctactaaggagacatacgaatga

SEQ ID NO: 10159 - RNA, 1182 nt, synthetic construct
  source 1..1182: mol_type = other RNA
atgaaatctgacttcactaattctttcatcttgaacgctctgaatctccccgttatgaaggatctcaatgacatttcttacctgaccggactgagtaaccagttgctctttctgttaagtcagaattccgagtcgtactacaagaagttttatctggacaagaagaatggcgaagtgcgggaaattaactccccatcatatagcatgaagctagtgcaacggtggatcttgtcagagatattagagaaggtgaaagtgagtaacgaatctatggctttcaagaaagattttggcaatgggagtatcaaaaacgcccgctaccaccagtattcactgtatatcctgcaactggatcttgagtctttcttcgattcaatagacaaggaacgaattttccttgttttcaaatcactgggatacaacacgtatatttcccacgtgctaaccaatatttgtacactgaacggcacactccctcaggggggcgtatgtagcccttacctgagcaatctgatctgctataagttagataggcgtttgacaggcctgtgcagcaaacgcgacgtcctctacacccggtatgccgatgacctcaccttttcgtgcgataacaagctcacacttaagaagattaagaatatcatcgaggacatcatcattgatgaaaacctcaaaatcaaccatttcaagacgcgactgctgtcccccggttctcataagaaagtgaatggtattactgtcaacaatggaaacctgaaagcaagcaaagaactcaaaaaaaaagtgagagcgatgatacaccacagcatagtaagcgaggattacagtaagaacaacattattagggggtatgtctcctacataaattctatcgagaagggttacttggagaagatcaaagagtacattatcaacatcttcaagaaggactacaaccatttctcctccaccgtcaatgccttcaacgagaataaactttacagagacattgaatccgccgagtacgttgagtttgtgggagcaggctatagcgacgactacgaatggttgtactatgaagaaagaaggtttgagtttctggtcgagaaaggatatcttaaggggcttcgcgactattttaaaaaagctgagaatctgctagtggaaaataaggatgatgaggacccaactagcatcttttga

SEQ ID NO: 10160 - RNA, 1221 nt, synthetic construct
  source 1..1221: mol_type = other RNA
atgaacaacaaaaacaacgtgaccaattcctttattctcaacgcactcaatctgcccatcatcaaagatctagagtccctgtcaaaccatatcggcatatcagaaaaactcatctacctcctgtcagtacgcaatagtgaattttatgaaagcttcaccatccctaagaaagacggcactgaaaggaaaattgaatcccctagctatagcttaaaattggtgcaacggtggatcctgaaggaaatcttagagaaaataccggtgtcagtccactcgtttgccttcaatccaggacggaatgggattaaagacaacgccgagctacacaagttctctttgtacctgctccagatggatattaaagacttcttcaccagcatcgagtataaacgcgtcttttacttgttcaagaaccttggctacaattccttcattagcaagattcttactgagatctgcacgcatgaggaacgactgccccaaggaggcgtctgctcaccctacatttccaacctcatttgttacaggttagacaatagactgcagggtctgtgtagtagcagagatattatctattctcgctatgctgatgacttgacatttagctgcgacaacaaagaggcacttcggaagattaagaaggtcatcgaagagatcatttttgacgaagggtttaaagtgaatcacaagaagacacggtacactagcccttcctctcataaagttgtcaccgggataaccatcaacgaccagaagatcaaggtccagaaggaccttaagagaaaagtgagagcactgatccaccacgcgatagtgtgtggggacttctctgagatcaacacaattaagggttacgtgtcctatataaatagtattgaggtgggctatcgtgagaaggtcataacctacattaacaagctgctgatggagaaagattataagtactacaatgacatcgtggagtctgtaaatggaaatctgatgatgaaggagcagatcagtatggtttatgacgagtacgttgacgatgagtacgttgatgacgaatatattccagccgacatcgtgtttgccgaaacaattctgaggaagcgaatagattttttcaagaaaaggggaaaggagctggaaatcgaagataagtataaagagtacttcgaggacgaggtagcttctactgtggttgtggatgctgatgatgatgatgaactcccattctga

SEQ ID NO: 10161 - RNA, 1287 nt, synthetic construct
  source 1..1287: mol_type = other RNA
atgaacaacacccacagcaacaccattctgctgaataatctccaattgcccatcatccacgacattttcgacctcagcgataatacacgcatctctgacgggaagctctacttgttattccagttccataactactactacaacacgttctttatcaacaagaagaacggcaaaaagcgggagatcagtagtcctcaaagaccactgaaacttcttcagaagtggattttggaggagatactgctgaatatcaaggtgagcgccgaatcacaggctttcatacggaagaagaatggcattctggagaatgctctcctgcataaagacaacttgttcttgcttcaaatggatatcgaaaactttttcccgagcattgatgacaaacgcatcttttatttcttcaggcagattgggtataactccttcgtgagcgacatactgaaaaatgtatgtactttcaagggcaaactccctcagggaggtgtttgctcgccatatctctcgaatcttatttgctatagccttgatcgacggattgctggactgtgcgcccggagagatatcatatatagccgctacgccgacgatctgtccttttcttgtgacaataaagacaatctgaggaaaattcgtcccctagtggaattaatcctgtcaaaagagggctttaaggtgaataagtccaaaacaaggttctccttttcacacaaaacaatcactggactgaacatcgcaaaagataataacaacatgaacgtcgtcaaagtgcctcgtaagttaaagagaaaagtgaggagtatcatacattactcatttgtctccggtgatttttctaatcagaatgttgttctggggtacatcgcctttatctattctattgagcccgagtacatttccaagatcataaagtacattcagtccctgcagaacaaggactataagttctttagcgatatcgtgaacgcatttaataagagtgacctggcaaagatttccaacttttgttggaatttcgatgacacctatgaatctaagatagacgtagagaaggtcctcagaaaatacaaaatttcagatcgcaaggacctggatctgttcgcggagtatctaccagatgaatactggggcttccaggaaaagtttgagaagcgatttttttacctcaagaggcataaagtccttactgaccacttagtgtctatctaccaaaacaaactgtatgacctcaacttcctaaatagagaagactctaccaacagttttcaccaggatttgttcgaattctga

SEQ ID NO: 10162 - RNA, 1245 nt, synthetic construct
  source 1..1245: mol_type = other RNA
atgagcaaggaccctacaaatattttcatccttaactcgctcaagttgcctattatagaggatctctacactctgtcgaatagtaccggcatatccttgaaaatgatctacctgctgagtaagaaccctggaaatttctacacaaaccacaaaattccgaaaagcgatggaacattccgcgatatctatagtcccaatttatctctgaagatcatccagcgatggattttggaggaaatcctgtgtaacattgaaaattcatcagaggctactgcttttaagaaagggcttaatggaccctacgagaacgccgcttatcataaagacagcctgtattttctacagatggacattaaagacttctttccatctattactcgtaagcaggtgtactatctattcaagaacctcggctataacaaatttatttccaacattctggccaatctaagtacgctgaataacaagctcccgcaggggggcgtatgtagcccatatctctccaacctgatctgctataaaatggacagaaggctgaagggactgtgctctaagagggatatcttatatacccgatacgccgatgaccttaccttttcttgcaataataaggtcgccctccggaaagttaaacaggtcgttgagaagattgtgattaacgaaggctatctcatcaaccacaagaaaactagatattcttcaccaatctctcccaagaagatcaccggtgtgacaatcacctcccaaaagaaactgaaagctgacaggcaaataaaaaagaaagtgcgggcaatgattcataaagcaatagttacaggggattaccagcataccaacaagattctgggctacatcgcctacatcaactccatagaaaaggattacaaggagaaaatcatcagctacatagagaagctcatcgacaaacagtataagcacttcgacaaggtagtgaaggcatacaattccaataaattctttcgcagcttgcctgacatgacccaagtggatattaacactcaattagccgatgagaagcttaaatgggagctgggtatcgacgtctatgactactacatcttcgaggaatacaaaaacatgttggaacagcggattgacttcatggataagaaggggatttttgatcaggagctgaagaatgagtttgagagaatcaatgatgaagtggcgagctcacttgaagacgaaataacgcccccaaaagacgatgacatccagttctga

SEQ ID NO: 10163 - RNA, 1119 nt, synthetic construct
  source 1..1119: mol_type = other RNA
atgattaagcaacaggatcagttctactcttcttttcaactgttgaagaaaaacgggagctacagaaatatatccaaacctaagttctctctgaaattaactcagcgttggatccttgaggaaattctatacaaaatcgagacaagtaacgaggccctggcgttcaaaaagaacgttaacgggcccaaggacaatgcagaacatcacaaatatagcttgtacttacttcagatcgacctggagaattttttcccgtcgattaccaaaaagcaggtgttctacatctttaagaacatcggctatgataataaggtatccaacactctttcgaatttgtgcacctataaagacgtcttaccacagggtgcagttaccagtccttatctcagcaatctcatctgctataaactggacaggaggttgaaaggactttgtggtaaaagaggcatactctatacgcggtatgccgatgatctgacattctcatgcaataataagaacgacctcaagaagattttcaaggtggtccagaagataatcaactcagagggataccagatcaatagcgataagacccgctttctgtcacctgtgtcccataagaagatcacaggaattaccgtggacagcaaaaacaagttgaaggctgataaatctctcaaaaagaaagtgcgagccatgatccacaaggctatagtatctggcgattatagccagagtaacaagatcaaaggctacatcagttacatagattccattgaaaacgggtattacaagaagattatcgagtacattcacaagctaatcaataaggaatacaagtcctttcatcaagttgtcgattgttacaattctaaccgcaacaaactgctgaaggaccttgagaaaatggagtatgaggactttattgaggaaccacccgagaatctggatgaatccgacatagaggattatatcggggaacaatttaaagactacgtggacattctcaaggaacggaaaaaattcctgaacaagcacaatttcagcgtgaaagagattaagcacgaactgtcactgctgactattggagaaaaacccctgcccaagaacacaggcaaaccagaggacctcttttga

SEQ ID NO: 10164 - RNA, 1227 nt, synthetic construct
  source 1..1227: mol_type = other RNA
atgaaaagagactttaccaacacctttatccttaatagcttagagcttccagtaattgacagtctcgatacactgtctaatcaggttgggatttcgaaaaggatgctgtatctgctgtcacaacagacaaacaaatactacaaacagttccagatccccaagaaaaacaatacatttcgtgagatctctagtccgtcctacagcttaaagctggttcaaaggtggattctagaagaggtcttctataaaatcaacgtgactgacgaggcactggcctttaaaaaaggcgttaatggaatcaaacagaatgccacgtatcacctctactctctctatatattaggcatagacatcaaggacttttttcctagtattagcagggaaaaagtgttctacctgtttaagaatctcggctataataacttcatcagcaacgtgctgagtaacttgtgcaccctagataattctctgccacagggggcggtgacttcaccctatatcagcaacatcatctgttataatctggatcgacgcattaaggggctctgcgaaaagagagatattgtgtacagccggtatgccgatgacctgaccttctcgtgtgacaataaggatacactcaagaagatgtacaaggtgcttgaaggaattattgtcgatgaaggattcgaggttaatcgctctaagacacgatttctctcacccatcagccacaagaaactcaccggaatcaccattgaccaccaaaagactaaggcagataaagaactgaagaaaaaggtccgggccatgattcataaatccatagtgaccggtgactactccaacaataacataatcttgggctatgtatcattcatcaactccattgagaatggttacaagaagaaggtcataaactacatcaacatactgatcatgaaggactacaaacactatcctgatctagtggacgcatacaataaaaacaagttgttccaggagctcaacaatatggtgcagattgacttccacacgtctttcgcttttgacattaaaacatactaccggcagtactttaagcatgggttcgacctggatgaaatggagtattacgagtatcttaacatgctggaatcccgcagagtctatttggagaagtaccatttgaaggacactgagctggagaaagagcttggcaccctgcaatccgctgctgatatcgaagaagatactgatcttttctga

SEQ ID NO: 10165 - RNA, 1152 nt, synthetic construct
  source 1..1152: mol_type = other RNA
atgataaaggagtacattaacaagacctttatcgagtctttggacttgccaatgatgaaatcattcgacgatctggtccagaatctcaggctcagcgcaaaactgatgcactggctgacttcttcttcctccggaaagtacaagacgttctacctcatcaagaaggacggctccaaaaggcgcattgatgcaccagctagaagcctgaaaattgtacaacgctggatacttgataacattctggccaaaatcaaagttagcccctattcatttgggttcaagtctggcgagaagggtagtcctctggtgaagtgcgctgagaagcacaagaacaacctgtacatcctgaaagtggacctgaagaatttttatcctagcatcaacaaggagcgagtctactacacctttctcgacctaggctataacagttccgtggcgaacttacttactgacatatgtgtgcgcgacggatatttgccccagggcgccgtaacaagcgcttatctggcgaatcttatttgtcgagatttggattaccgggttgcaggttactgtaacaagagagacatcatttacacgagatatgctgatgatctgaccttctcttgcgacaatcgcgaaactctccataagtcattattcacaatacggaggataatcgaaggagagaagttccagcttaatacaaacaagattcacttcatgacccctaaatgcaaaaaatccatcctcgggattaccctaaatgacacctccattaaagccccccgggaaatgaagcggatggttaggtcagtgatccattatcaggtggctacaggagactacaccgataatgacaaaatcagagggtacatcagttatatcaacagtatcgaagagacatacaaggatcaagtcctgagctatatccagaaacttgccgagagccagctgtgcctatttgaagaattggtcgacgccttcaacaaaaataaactctaccaggagctgccggatatgattctgcgtgatgccggggactttgtgaatgcctatgaagaagacgagtttatgactgcagtgtattacgaacatcgtgaattcctgatcaagtacggcctgctcgaggaggagacagatacttcgaatttagaggaaattcccttttga

SEQ ID NO: 10166 - RNA, 1113 nt, synthetic construct
  source 1..1113: mol_type = other RNA
atgattgacaacaagaacaagatcattttggactctctgggactgccctgtctcgtcagctttgaagatctggtgaaggcaattcgtctggactccaaactgatttattggctatcctccgaaacagagaataaatacaagactttcgagataccaaagaaaaacggaggcgtgaggataattcacgcccccgtgtactctctgaaacaggttcagaagtggatcctctgcaacattatctacaagataaaaacctccccttatagcctcggcttcaagcgctcctcaaatcttggatcaccactgtatatcagcgcgcagaatcacaagtataacctgtacgtgctcaaattggatctgaaagatttttatccgagtattaccaagaagacagtttacaatctctttctatctatcggctataactcacagatcgccttccttctgaccaatatatgtactcaccatggtgcattaccacaaggcgctgtgacatcggctcacctcgctaacctgatttgtcggaaaatggactacagattggccgggtactgtcagaagcatgacattgtctttactcgctatgctgatgatatggccttctcgtcagataatcgagacacccttaagaaagcctacaagacaatttgcaaaataatcaaggacgaaggatttatcgttaatgatcttaagaccaggttcatgactccaaaatgcagaaagcaaatcctgggcattacgatcaatgacaaccagattaaggtgagcaaggacttgaagcggaaggtcagggcaatgatacatagaagtattgccacaggggaatacaacaataacgacgtaatcaaaggttacatcagctatatcaactccatcgaacccgggtacctggagaaaaccaagaaatatatcagcgagttaatcacgaattctcctttggaactttatcccgagatcattaaccggttcaatagcaacaaaatctacagtgacttacctaatatggaactgaaagagccttcttactttgtagagagtccgtacgatactgattatatgaataacgagtacgagctccaccaggattatctggaggggataaagtgcaaatga

SEQ ID NO: 10167 - RNA, 1104 nt, synthetic construct
  source 1..1104: mol_type = other RNA
atgaagaaatacataaataagactgtgctggatagtttaaaccttcctatacttaccagctttcaggacttagtcgagcagctgcgcctcacggacaagaaagtctactgggcttcctccaatcacattatcgacaaatacaacacattctacatcaagaagagcaacggaaataagcggagaattgacgagcctaaatattcactcaagatcatacaacgatgggtgctggagaatattctgtataagatcaaggtatcaccctactcttacggattcaagtacacggaaggttcaccattggttgcatgctctaacaaacatcgcttgaaccttttcgtgctgaaaatggatctgaaggacttctacccatctatcagtaaggagaaagtgtatttccagttcctcaatatagggtataatacaaaggtcagcaacttgcttaccaacatctgcacttataacaactccctgccacagggcgcggtgacttcagcctatctagccaacatcgtttgccggaaaatggattatcgtattgccggctattgtaataagagggaaattgcttacacaaggtacgctgatgacttgatctttagcagtgacaacagggagctgttacacaacacatacggaatgattgaaaaaatcatcaccgatgaaggctttacactgaacaaggataaaacaacctttatgagccccaaaaatcataaaaaggtcctggggatcactatcaacgataatcaggtgaaggcacccaaaaagctaaagagagaggtgagagccaagatccactaccagattgcaacctgtgattactctgaacagatgaaaactaagggctacatatcctatatcaatagcattgagccgaactacaaagagaaggttaccaaatacattaccggtctgagtaagtcgccactgtgtctcttccctaatgtagtcaaggcctataacgacaataaatatttctctgagctgcctaatatgatcctcaaatcctatggggactttgtgcaaccctctctgattgaagagtttgaggagcacattaattccgaatatctcaagtacctcagcgaacattccaaatga

SEQ ID NO: 10168 - RNA, 1158 nt, synthetic construct
  source 1..1158: mol_type = other RNA
atgaacaagtattccaataagatcgtgatagagagtctggggttacccatgctaacttgcttcgatgacctggtcaaggaggtatccctttccgaaaaactggtttactggctgaccaagcgcgacgctgagggaaggtacaatcctttcttcattaagaagaaagacggcaataaacggaaaattaacagcccttcactggccctcaaaatagtgcagagatggaccctggagaatatcctctacaagatcaagacatctcagtactcatatgggtttaaaagagatattcggaaagggagcccattggtctactgcgcagagaaacacaagaataacctttacatcctgaagctggacttgaaaaacttctatcctagtatcaagcgtgagtcggtgtattacatcttcaagaatgttgggtataacgccgacatctccaacttactcaccaatatctgcgtggtgaatgatgaactcccacaaggtgcagtgacgagtccctaccttgccaatctcgtgtgcaggaagctggatttcaggattgcgggttactgcaataaacgcaatattgtctatacccggtacgcagacgacctgacttttagctgtgatgacagggagctcctgcgaaagatctacggcatgattaagaaaattgtagaagacgaaggcttttgtctaaaccaacggaaaactgtatttatgacacctaaaaaccacaaggaagtccttggagtgacaataaatgatggcctcttgaaagcccccaaagaggtgaagaaagatatacgagcaatgctccattatgaggtggcgacaggcgattatgctatgaacgatgaaatacgcggctatgttgcctatgtcgattcaatcgagaagaattacaagaacaagtgtattagctacctgaagagactttctgagtctaccctatgtttgttccccgatgtcgtgaaagcctataactctaacaagatctacaaagagttgccagacatgaaggagaagcaggttgctgatttttgtgaagaggacgaagacgagttcgctaacatgatctaccaggaacatgagcagtatctgattctgaaaggaatcttaaacaagacgaatgaagaagacattactgacctgcagaacccgttttggtga

SEQ ID NO: 10169 - RNA, 1152 nt, synthetic construct
  source 1..1152: mol_type = other RNA
atgaaaaagtacagcaataagacagtaatcgagtccctgggcctgccaatgctgacttgtttcgatgacctcgtgaaagagctgagcctctcggggaaactcgtgtattggcttaccaaacaagacgcagaaggtaggtataagacctttttcatcgagaagaaggatggtgacaaaagaaagatcaacgcgcctagcctctctcttaagatagtgcagaggtgggtcctcgagaacattctttataagataaaggctagccagtatagttacggctttacaaagggcgacagaaaaggaagtccactggtgtactgcgccgagaagcataagaacaatctgtacgtgtttaaactcgacctgaaggatttttatccctcaattaagcgggagaaggtgtactatgccttcgccaatatcgggtataacgcagacgtctccaatctcctgaccaacatctgcgttgtggatgatgaactgcctcaaggagcagtaacgtctccttacttagcgaatctcatctgtcgaaaactggacctgcgtatcgccggttactgtaataagcgcaacattgtttatacgcggtatgctgatgatttgactttctcatgcgatgatcgggaactattaagaaagatttacggcatggtgaaaaagattgtagaagacgaagggttttgtttgaatcagaaaaagaccgtcttcatgacccccaaatctcataaagtggtgctgggagttacaatcaatgacagtcttcttaaagccccgaaagaaattaagaaatcaatcagggctatgatccactacgaagtggccacaggggactacacaatgaatgataaaatccgcggctacgtcgcctatgttgactctatcgagaagaactacaagaacaaatgcataagctacctacagaagctgtcagagtccaccctgtgcctattccccgatgttgtcaaagagtacaactccaacaagatatataaggagctgcccgacatggtcgagaaacgagcaactgatttcgtggaattgaaagacgctgatgacttttatgacatgatttactacgagcacgaagagtatctgatttccaacggattgttaaatgagaaggaagacattactgatttggaagagccattctga

SEQ ID NO: 10170 - RNA, 1116 nt, synthetic construct
  source 1..1116: mol_type = other RNA
atgaaacaatactccaacaaagtgatcattgactcactccacctgcctatgctgacctgtttcgaagatatagttcgcgaggtgcgcttgtctggaaagctggtctactgggttacaaaaaaggatgctgaaggcaaatataagactttctacatcgacaagaaggatggaacaaaaagagagattaacgcacctagcctcagcgttaagatcttccagaaatggatcctggaaaacatcctgtacagaatttcggcttctcagtatagttatggatttgaacgaggaaggcggaagggctcaccacttgtgcactgcgcggagatgcacaaaaacagcctttacgtcctcaagatggatctaaagaatttttacccctccattaaacaggaaagagtatttttcgagttcaggaacaaggggtacaacgacgaagtcagttccctgttgactaatgcttgtgttcgtgacgacaagttaccacaaggtgccgtgacctccgcctatctggctaatctgatttgtcgcaagctagatgcgaggattgccgggtactgcaataagcggaatattgtatatactcggtatgccgatgatctgacatttagctgcgatgacagggacttacttaaacgaattttcgggacgatcaaaaaaatagtggagaatgagggtttccttctcaatgagaataagaccatctttatgaccccaaaaggccataagaaagtgctcggtgtcacaataaacgataatctgatcaaggcccccaaagagttgaaacgtatcatccgggcagtgctccattatgaagtctccacgggcgactatagtatgaatgacaaggtaagagggtatattgcatacatagatagcatcgagaacaactacaaaaacaagtgcatctcttacctgataaagttgtcacagagcaccctgtctttattcccggacattgtggaggcctacaacaataacaaaattttcaaggagctccctgacatggaggagaagaaccccatcgactttgtggacctggaggatgtgaacgacttttcagatatgatctactgggaacatgaagaatatctgattagtcacggcatcaataagtga

SEQ ID NO: 10171 - RNA, 1113 nt, synthetic construct
  source 1..1113: mol_type = other RNA
atgaagaagtacaacaataagatggtaatcgaatccctgggcctacccatgtttgaggacatcgagacgctggcagaagaaacgcggcttaccgagaaacttgtcttctttatcactaaagaggatgccaaaggccgctacaagaaattttatatccccaagaaggatggtacctccagagagattaactcaccatgtatgagcctcaaggtgattcagaggtgggtgttggagaatatcctttataaagtgagggtttcacagtattcaatcgggtttgtgaaaaacggaaaaggaagtcccctggtccagtgcgccgaaaggcacaaaaataacctgtacattctgaagatggacttgaagaatttcttcccttctgttgagagagggcgggtatataaccagttcctccaactcggctataacacatatgcttctaatctgctcaccaacatctgtacactcaatggatccctgccgcagggtgccgttacttcgccttacttggcaaatttagtctgctacaagatggatattcgaatagccggctattgcaataagcgggatattacatacactcgctacgcggatgacctcattttctcttctgacaatcgtgatctgctgagaaagatatacgggatgattaaaaagatcgttgaagacgaaggcttcgtcgtaaacgaggagaagaccagatttttaagccctaaagtgcacaaagaggttattggcgtgacagtgaacgacggagtgattaaggctccaaaagaaatgaagcgcatggtcagagcaatgatccattacgagattgtgaccggagactatagcgacaacgagaaaatccgtggttacattgcttacatagacagcctagaaaggaattacaggaacaagatcatcaagtatatcgagaagtacttggatgacactatcaccctgtttcccgagcttgtggagaaattcaatcaaaacaagctgtacaaccagattccagacatgaaacagcacgacatctcccgatttgtgaatttcgaagatgaagccgattattacagtatggtggtcaacgagcgggaagattatctgagtcgccatgggatagctatatga

SEQ ID NO: 10172 - RNA, 1065 nt, synthetic construct
  source 1..1065: mol_type = other RNA
atgtttgaggacatcgaaaccttagccgaggaaacacggttgactgaaaagctaatatacttcctgtgcaaagaagatgcagagggaagatatgtcagctttaagatacccaaaaaagatggcagatacagggatattaacgcaccttgtatggctctcaagaccctgcagaaatgggtactgcagaacatcctgtacaaagtgagagtgagtccatattccattggcttcaaaaaagatgggaagggttcccctctactgcagagtgccgaaagacataagaacaacctgtacatcttgaaaatggacctcaaagatttctttcccagcgtcaagagggagcaggtgttcaatcaatttcttcaactcgggtacaatacgtatgcttccaatatgcttaccaatatttgtaccctcaacggatgcctgccgcagggtgctgtcacatcaccttacttggccaatctcgtttgctataagatggatgtacggatcgctgggtattgtaacaagagggacatcatatatacccgctatgcagacgatcttattttctcttgcgataatcgggacgggctgcggaatatctacggtatgatcaagaagatcgttgagaacgagggattctgtttaaacgagaagaagacgcgatttctgactcccaaatcacacaaaaaaattgtcggcgtaactgtcaatgatggccttgtgaaagcgcctaaagagatgaagaaaatggtgcgcgccatgctccactattcgattgtttctggagattactccaataatgacaggatacgaggctatgtgtcttacattgacagcattgagaagaattaccgtaagaagattgtgaagtacatcactaactacatcaacgactcaatcacattgttcccagatgccgtgaagaagttcaacgacaacaagctgtttaacgagatcccagatatggtgcccaaaaagataagcgacttcgtggactacgaggaggaagacgactattttcagatgatcacatatgaacgcgaagaatttctgaccaagcatggcattgaggtttga

SEQ ID NO: 10173 - RNA, 927 nt, synthetic construct
  source 1..927: mol_type = other RNA
atgcaaaacatcttatacaaggttagagtctctcagtactctatcggctttattaaaaacgggaagggcagtccactggtgctctgtgctgaacgtcataaaaacaacctgtacatcctcaagatggacctaaaggatttttacccttccatctgtcgcgccaaagtatacaatcaattcctgcagcttggttacaatacttatgccgcgaatctgatcacgaacatttgcattctagacggaaagtttagccagggcgcagtcacgtccccctatctggcttcactcgtttgctacaaaatggacaccaactggcaagatatcgtaataaaacgcgacatcgtgtatactcggtatgccgatgatttgacctttagctgcgacaaccgggacgaactgcacaagatctacgggatgattaaaaagattgtggaggacgaggggttcacccttaaccagaagaaaacacagttcctcacacccaaaggtcataaaaaagtggttggcgtgacaattaatgacgggatgctgaaagcaagcaaagatttgaagagatccgtgagggcgatgatccactatcaaattatcaccggagattatacaaagaatgaacagataaggggctacattgcttatatagactcaatcgagaagaactacaagaagaagatcattaagtacgtcactggatactgtcaggacaccataactttgttctctgatgctgtgaaggccttcaatgccaataaactgtttaaggagatcccggatatggtgcagaaggacatttcatcctttgcaaaatgggaggaagatcagagcgattatatggagatggtcatgtatgagcgagaaagttatcttgccaagcacggactgatcgaatcggatatagaggacgaaagtaatttagagatgttcgagtga

SEQ ID NO: 10174 - RNA, 1110 nt, synthetic construct
  source 1..1110: mol_type = other RNA
atgaaaaagtacaccaaccagaaccttattacctctttgaatctgccattcgtgactgatatacacagcctttccatgcaattaagactcagcgagaaattggtttactttctgacaaatgagcgcacctacaagaagtatcggatctttagaatcccgaaaaaggatgggactttcagaaccattagtgcacccatcgcctccctgaagattgtgcagcggtgggtcctcgaaaacattctctacaagattaaagtctcagactatagctacggattttcaaggaatcgtaaggggtccccactcgcagcctgtgccgagaaacatcggaataacctgttcatgctgaagatggacctcaaaaatttctaccctagtatacagcgcgaccaggtcttttttcaattcctgaacatcggctacaatacctatgcggccaatttgcttactaatatttgctacaaccaggatggcctaccccagggtgcagtgacctccccttacctggcaaatatgatctgttacaagatggatgttcggatcgctagttattgcaataaaagggacattacgtatacgcgctatgctgacgatctggcgttttcctctgacaaccgagatagcctgaggaacatctatggcatgataaagaagatagtcgaggatgaaggcttctctgttaatgacgaaaaaacatgtttcatgacaccaaagaaccacaaagtactcttaggagtaactattaacgatgccaacattaaagctcccaggcagatgaagaaaatggtgcgaagcatgatccacagagccgtcatcaccggtgactattcactgaaaaatgtgatctgcggctacgtgtcgtatattgactctattgagaagggatataaggacaagatcaagaagtacatccataaatactacgaagaccctataacactgttcaaagacgctgtggatgcctataataagaacaagttttacgaggacatgcccgatatgaagaaccgtaacatcgacttctttttggatggggatgaatgggatgaggacgaagtgcttacagctttttatgaggagcgcgaagccttcctaatcactcataaatga

SEQ ID NO: 10175 - RNA, 1014 nt, synthetic construct
  source 1..1014: mol_type = other RNA
atgattgacaagaccaataagctgattctggactccattggtatcccttatttttgggacatcaactcatttgcgcagaaggtgagatataccaataaactcttattcttcctcagcaattacaaagccgtcgagagatacaacattttctacctcactaagaagaatggcaaaatgcgaaaaatcatggcccccagctttagtctgttgatgctccagcgctggatccttcacaatacactgtataagatacgagtgtctgagtacagctatgggtttgtaaaatctaactccgactctgaatccccattagtcgaggttgccggcgcccataaaaatcacaagtacatcctgaagatcgatataaaggatttttacccgagcatttcaagggctcgggtgttctttttgttcaagaacctggggtacaacttctgctgcgcaaacatgctggccaacatctgcactaacaataacgaactgccccagggggctgctacaagtgcccgtctggcaaatattctatgtacaagattggatgctcgtatttcgggctattgtaataagagggatataacatacaccagatatgcagacgatctgatttttagctgtgataataggaacgtgctacatcacatatacaagatgataaacaccatcattcaggatgagggtttcgagattaatcaatccaaaactcggttcctgagcccaaagaatcacaaagtggtacttggagtgacgattaatgacggctactgcaaagcagaccggaaactcaagcgcaaagttcgcgcaatgatccattcttcaatcgtcaatggcaattattccgaacgggccatcatccaaggatacattgcctatttctcatctatagagaaagactataccgaaaagatcaagaggtacatcaacaagttttatggaactcttcctaaagataaggctatcgcgtacaacaacaacaagttccttaacaaaatgcccgacatgagtacgcagagttga

SEQ ID NO: 10176 - RNA, 1128 nt, synthetic construct
  source 1..1128: mol_type = other RNA
atgtttatgatcaaccaaaccaatatctctctactcaagttgcgtagtttgcctatctttaatgacctgagctctatgtcaagagtcaccggcttttctgaacaactgctgtactactatgctatttcagacgatgcgaaaaaatataccattttcgagatcccgaaaaaagattcatgtaatacccgcaagatatacgccccaaactatgcccttaaaattctgcaacgatggatcctggaaaacatcttatacaaaatcgagtgctccgagtacgcattcgctttcaagagagatatggggtcccccctgaagaagaacgcactagtgcataaggaacatgtattcttattggagatggacctcgaaaacttcttccacagcatcaagaggcagagaattgtctacctgttttccaatcttggctataacgtccctatctcgaactggcttgctaatatttgtacttatgaggacattctgccccagggtagtgtgacggccccctacttgtccaacctggtatgcctgcagctggacaaaagaatagcgaagtactgttcgaagcgagatattgtctatagtcgctatgccgacgacatcacattttcttgtagcaataaagctgtgatcaaaagcatctacggaacaataaagaagattatagagagcgaacacttcactattaaccagaagaagaccaggtttattgggaaaagctctaggaaatccgtgactggcgtgatcatcgataacgactgcattaaagcaccaaaagagtacaaacggctcgttaggtgcctcatccatcgggccataatctcaggcgactattccaatattaatcggatccgtggttacatagcctatatctctagtatcgaggatgattacatgcagaaggttgtgaagtatattaacactttcaagaccaagcgggatgttatatttctcgatagcacagtggagatgtttaacgcaaatatttttctcccaggagtcgaccagatctcccagattcgcatgacaatggaggaagaagataatttcggggactacgtgacggagaggctggagttccttaagaaacgccacatgaaggtgcctcccgaactgggaaagttatga

SEQ ID NO: 10177 - RNA, 1029 nt, synthetic construct
  source 1..1029: mol_type = other RNA
atgaatattggaaacaatgtggtcctaaacactcttggcgtgcccgttattaactctttcgagcatctttgtgagcaactgtcgatcactgagcagctcttatactatctaacttatcggaaggaacattgctactacgaaaccgaaatccctaaaaagaatggaaaaacaaggatcctgcatgtgccaaacttgtctctgaaagttgtgcagaaatggatcctgaccgaaatcctggagaagattttcgtgagcgagcagactatggcttttgtgccccacaagaacggcttgagagaaaacgcagagagacacaagaaaaacatattcttactcgagatggacattacgaacttttttggtacaataaccgaagaacaggtctactccctgttctgcaacattggctacggatcaaaagtcgcagggatactggctaatctttgtacctacgataattacctgccgcagggagccgtgacctccccatacatcgcaaatttggtgtgctatcacatggattctaggataaatggctactgttcacggaaggatatcgtttatacaagatacgctgatgatctcaccttcagttctaataatcggatgctgctcaacaaagtcgagcgctttattaaatatatcgttgtagacgagggctttacgattaacgaaaaaaagacccgctatttttccaacgatgtgaagaaaacagtaactgggatcacaattaacgatgacgacattcacgtcgacaagaattttaagcgtaacttgcgcgcccagatctacaatagtatcaagacaaggagctatgataataattcccagatccttggtaagatcgcctatgtaaattcaatagaggacgggttccgagacaagatggagaagtatatcagcagcataattatccgaagtgaattcgtgcaagacctggatattgtgaacgcctttaacgcgaataagctgttcgccaaactccccgacatggtcttcatgaatgaggacaaaaaccctttcatttga

SEQ ID NO: 10178 - RNA, 1029 nt, synthetic construct
  source 1..1029: mol_type = other RNA
atgaacatcggaaatagcgtggttctgaacaccctgggggtgccagtcatcaattcatttgagcatctttgtgaacaacttagtgtaacagagcagctcctgtatttcctgacttacaagaagaagtactgctactttgaaaagaagatcccaaaaaaagacaagaccgagcgtacacttaatgtcccgtccttgagcctgaaagtggtgcagcgctggattctgaaggaaatcctcgagaagatatatgtgtccgagcaagctatggccttcatacctcataagaatggccttcgagaaaacgccgaacggcacaaaaaaaacattttcctcctggagatggatattacgaacttttttggaactatcactgaacaacaggtttaccgcctattttgcaacattggctataactccaaggtcgccggagttttggccaatctgtgtacgtatgatggttacctccctcagggggcagtgacctctccttatatagcgaacttagtctgctaccatatggacgctaggattaatgggtattgtagccggaaggatattgtgtacaccagatacgcagacgatctaaccttttctagcaataacagaaccctgttgaacaaggtggaaaaattcatcaagtacattgtagctgacgaaggctttaagatcaacgacaaaaagactaggtatctgtctaatgatgttaagaaaaccgtcacagggataacagtgaatgacgattcaattcacgtggacaaaaagttcaagaaagatttacgggcccagatctacagatcgattaaactgaaagactaccagaacaactcacagatcttgggtaagatagcttatgtgaattccatcgaggagggctatagggacaaaatcttcaaatacatcacagacgtgattactaaacccgagtttacaggccacatcgatatcgtcaacgcattcaatgataataagttctttcccgatctccccgacatgatgttcaaggaggtatgggagagtccattcgactga

SEQ ID NO: 10179 - RNA, 1029 nt, synthetic construct
  source 1..1029: mol_type = other RNA
atgaacatagggaattccgttgtgctgaataccttgggggttccagtgataaattcattcgagcacttatgtgagcagctgagtgtcacagaacagttgctttacttccttacctacaaaaagaagtactgttactttgagaagaagattcccaagaaggataagactgaaagaacactgaacgtgccatccctgtcactgaaagtcgttcaacgatggattctcaaagagattctggagaagatctacgtttccaaacaagcaatggcctttatcccgcataagaatggactacgggaaaacgctgaaagacataagaagaacatcttcctgctggagatggatatcacgaacttctttggcaccatcaccgaacagcaggtataccgcctcttttgcaacattggatataactctaaagtggcaggaattctcgccaatttgtgtacatatgatgggtatctgcctcagggcgcagtgacatccccttacatcgccaacctcatttgctatcacatggatgctaggataaatgggtactgcagtcggaaagatatagtctatacgcgctatgccgacgatctgacttttagtagctctaacagaactcttctcaacaaagtggaaaagttcatcaagtacatcgtgactgatgaaggcttcactatcaatgacaaaaagacccgttatctttctaatgacgtcaaaaagacagtgacaggtattaccataaatgacgactcaattcatgtcgacaaaaagtttaagcgggatttaagggctcagatttatcgatcgattaagttgaaggactatcagaataacagccaaatcctgggtaaaatcgcctacgtaaacagcattgaagagggctacagggacaagattttcaaatacatcaccgatgtgatcactaaaccagagttcaccggccacatcgacatcgtgaatgcgttcaatgacaacaaatttttccctaacctacccgacatgatgtttaaagaggtatgggagagcccctttgattga

SEQ ID NO: 10180 - RNA, 1020 nt, synthetic construct
  source 1..1020: mol_type = other RNA
atgaacttatccaataacgtgattctgaataccctcaatgtgccaatcatcaacggctttacacacctggcagagcagttatcactgacgcaagggctgctctacttcctcacgtacaaaaaagattattgctacacccttaaggaaattccgaaaaaagacgggactttcagaaagatatgcgtacccaatttaagtttgaaagttgtgcagaaatggatcctcgttgagattctcgaaaaaatcgacgtctccccacaggccatggccttcgtccccaagaacaacggactgaaaagtaatgccgaatatcacaagaagaatatcttcttgctagagatggacatcaagaacttttttggcaccatcaaagagggtcaagtattcaagctgttttgtaacatcggatataacactaaagtgtccactattttgacaagcctgtgcacttttgatggggagcttcctcagggggctgtgacaagtccctatctagcaaacctgattctgtatcatttggatatacgtctgaacggactctgttctaggaaagacatcgtttacaccagatacgcggatgatctctcgttcagctccaatgaccgcgccaaactgaatggtatcgagaacttcgtgaagaatatagttagcgatgaaggatttgagattaacgagaagaaaacccgctatctttcaaatgacgtcaagaagagcatcaccggcataaccatcaacaacgaagaaattcatgtcgacaagaagctgaagcgggacattcgagcacttattttctctagcattgcctctaagaactatgctttgaacgacaaaatacggggttccattgcttacgtgaattctatagagcctggctaccaggagaagatgatcaattacatcgagaggatcatcaataaagatgagctgaagaacgaccttggcgtggtgaagacattcaatgaaaataagctgtacaaggtcctgcctgatatgaagtacgaagaatcaccctttatttga

SEQ ID NO: 10181 - RNA, 1020 nt, synthetic construct
  source 1..1020: mol_type = other RNA
atgaacatgtctaacaacgttattctcaacaccctaaatgtgcccataatcaatgatttcaagcacctcgcggagcagttatcactgactcaagaactgctccatttccttacctataagaagcagtattgctacacccagaaggaaattccgaagaaagacggcacttcccggaccctttatgtgccacatttggctcttaaggtagtacaacgttggatactgaaggagattcttgagaagattaatgtgtcttaccaggctatggcattcgtccccaaaagaaatggattgagggtcaacgccgagtaccataagaagaacatcttcatcctggagatggacatcaagaagttttttgggagcattcaaaagaaacaggtattccagctgttttgtaagattggctataatactgacgtgtcagctgtgctggcaaatctctgcatctatgaggatgtcttgcctcagggagccgtcacgagcccttatattgccaatctggtgacataccacctcgacgttagattgaacggtctatgttctcggaaagatatcgtgtacacacgctacgccgacgatctgagcttttcctccaataatcgaacaaaactgaactccatcgagaaaatagttaagtatatcgtgaaggaggaagggtttgagattaacgagaaaaagactaggtacttaagtaacgacgtcaaaaagaccataacaggaataaccatcaataacgaagaagtgcacgtcgataaagctctcaaaaaaaagattcgcgccatgatctttaatagtatcgtgaacaaagactacacacggaatgataaaatcaaaggtagcattgcatacgtggatagtatcgaaatgggctataaggagaagatcctgaactacattattcagatcacggaaaaagggcagttcaaaaacaatatagacatcgttaacgcctacaacaagaataaattcttcaagtcactgccctatatgcaatacgaagagtcgccattttattga

SEQ ID NO: 10182 - RNA, 1005 nt, synthetic construct
  source 1..1005: mol_type = other RNA
atgaatacaaattcaaacctcattctcaacacactgggtgtgcccatcatctacgacctggaaagtctctcagagaggctgtcaataaccaagaccttcctgtatatgctatccaggaagcagcacctcttctacgaaaccgcagaaatacctaaaaaagatgggagcacacggaaaatccacgctcccgtgctctcccttaaggtcgttcagaagtggatccttgttgaaattctagagaaagtccgagtttcgccatacgcaatggcctttgtgcccgggaagaatggcttgaaagagaacgccatgctgcataaggaccggttattcattttagagatggatatccatgacttcttcggatccattactcagaaggacgtgtttcagcttttcaccaagatcggctataattacaccatcagcgcaattctggcaaacctgtgtacttatgaagaagtcttaccacagggcgccgtcacttctccgtatattgctaatctcatatgctacaacttggatatgcgcttgagcgcgctgtgcaataaacgagacattgtatacacgcggtatgctgatgaccttagcttctccagtgataatcgcactcggttgaatcgtatcgagaggctgttgagagagatagtgcaagatgagggttttgagattaacgatcgtaagacacggtatttttcaaatgacaggaagaagaccgtgacgggcatcacaataaacgaccgcgagattcacgccgatagaaaacttaaacaacgcatccgatctaaaatctttcatgctgtctccgaggccgactacagtgaggccgctcagattagaggactgatcgccttcgtagattctatcgaagacggatacagagatcagatggcgtgttatctggaggggctggccctgaaggaaagcctaaggagatctgcaaaggtggtgaaagcttacaacaacaacaagctgtttcaagacctcgaagacatgatgcctctgtga

SEQ ID NO: 10183 - RNA, 915 nt, synthetic construct
  source 1..915: mol_type = other RNA
atgaaaaacattaaagatttcgcgaaagagctgtctctcgacgtcaagactattgaaaaacttacgagggacaatttcaactattatcacttcaccattccaaaaggcaatggagaaaagcgtctaattacagctcccaagggtaaactcaaagtgatccagaaatggatcctcgtgaattgtctagaaaaatttgcagtcgctgaatgcgctaccgccttcattaagggaaagcatggtatacgggtgaatgcagagtcccaccaatacaacaaatacattctggagtttgacttaaaggacttctttccgaacattagtttttgggacgttcagaacctgtttctcaggatgaatctgtctcagaagctgtccatcttgtttgccaagctatgcacatatgatgggtatcttcctcagggagcaataaccagcccctatatctctaatctgatctgttacgacctcgatctgaaattacttgagctctgtgattactacgacatcacatataccagatacgccgacgatcttacctttagctccgatgaactgtacctgttgctctcattaatgcaggagatcagctcaattatccattactatgggttcaaggtaaactacaataagacaaaagtgctgcttcctagcaataagcaaactatcactgggatcaccgtcaacaacggcgagataaaagtggacaagaagctgaagagaatggttcgcgccaagctctactatggcattaagaacaatgacataaaggacttcgatattttgctgggcttcatttcgtatatctgctcaatcgagatcgattacaaatccaagatgatcagttacgtgcagtatctgttgaataaattcggccgacacgataactgggggctgctgaagatattgaacaagtga

SEQ ID NO: 10184 - RNA, 915 nt, synthetic construct
  source 1..915: mol_type = other RNA
atgaaaaatataaaggacttcgccaaagagctgtccctggatgtgaagactattgaaaagcttaccagggacaattttaattactaccacttcacgattcccaaacgcaacggcgagaaacggctgattacagcgccaaagggtaagttgaaggttatacaaaagtggattctggtgaactacctcgaaaggtatgctatcgctgaatgtgctaccgccttcatcaaaggggagcatggtatcagagtaaacgcagaggcccatctgaacaataaatatatcctagagttcgacctcaaggactttttcccaaacatcaagttttgggcagtccgagatttatttctgcgcatgaatttgactcgtaaaatcagtctgctgttcgccaagctctgcacatacaataaaagattgccccagggcgctattacctcaccttacattagtaacctgatctgctacgatctggatttagaattgcttgagctttgtaacaactatgacattacttacacgaggtacgcagacgacctgactttttctagcaattccctctatctcctgttttcgctgatgaaagagatctctgatatcatacggagccacggattcaagatcaactacgagaagacaaaaatcctttatccttccgccaaacagaccataaccggcattacaataaacaatggaacaattaaggccgacaagaagctcaaacgaatgatcagaactaagttgtactacggggtcaagaataataacatcaccgagctcaccaaactcattggatatatcgcgtatgtgaacagcattgaatcagactataaattacggctgtacgattatttctcttccctacttcagaagtttagcaaggaagatagctgggggctactgaaaatcctgaataagtga

SEQ ID NO: 10185 - RNA, 1002 nt, synthetic construct
  source 1..1002: mol_type = other RNA
atggtgaatttcttttataacagtgacaagctgcaggagtacctccaattgccccaaatctatacgctggacgatcttgcgtactttctattatttacgaaggaacagctgcacgatttcagctatcgaaaaaacgaacattacgtgacattcctgatcccaaagaaaaatagcaccgaaaaacgggtgataaatgcccctaagaaacgtttaaagatggcccaaaagctaatcctcaaagagatattggagaaagtaccctgttcttctgcttctgctgcctttattaaaaaggaaaatgggctgctcaagaatgcactgactcacaaagagaatctgttccttctgaaaatggacttcaagaacttctttcagaacatcaatgaagccaaaataatccagatctttgagaaccttggatattccccctacattgcacttcaactggctaaactgtgcacctttagcaagaaactccctcaggggggcatttgcagcccatatttgtcgaatctcgcgtgctacgagtttgacaaagatatctcatcctattgtgacgaaaagaatattgcctacactagatatgctgacgatttgctatttagtgccaacgatattgatctcctgaagaatcttaagaacgacatttactcatacaccaagaagcattccgttgcaggtctgaacattcagataaatcacaagaagaccaaactgatcaagaatactagtcacaagaaggtgacaggcatcaccattaacgaccagaagatcaaagcctccaagaaactgaaaaatacaatccgccagaacatacggtataacttgattcataaccagttcgacaataagctgatcggaaagatcgcattcgtcatctcaattgaggataaggagtacaaaaacaggatcttcaaatactgtaagaggattgagaacaagttcaaactcaacaaaaaggaaaaccagctcctgaaagtcttatacaagatgacaaagtga

SEQ ID NO: 10186 - RNA, 981 nt, synthetic construct
  source 1..981: mol_type = other RNA
atgaacaagattgaacttctcaagctgcctaagatcgagaacctgaaggatcttaatcatctgctgctttttacagagaaacagctaaacgactttgtgcggctcaagtccgagcagtacgtgagtttcaaaataccgaagaagaactcaatagaaaagcgcatcatcaacgcacccaaaaagtacctaaaactggcgcaaaagattatcttgaatgagatcctcgaaaaagtcccctgcagcaatgctgccaccgccttcatcaaaaacaagaatgggctctttgaaaatgccaatatgcacaaggataatctgtatctcttgaagttcgacttctgcaacttttttcaaagcattaagttcgagcggatccgtctcttgtttattgagttgggctataacccaaagatttccaagattctggcagagctgtgcacatattgtaaagaacttccacagggtgggatctgctctccttgtttatctaacctaatatgtctggagttagataatgacttgttagaatactgcgaaggaaatgatatcaaatacactaggtatgccgatgatctgtttttctcatcgaacaataaagaagtgctgctgaaactgaaggaagacattgagacgctgattctgaaacatcgaaccgagttctttgacataaagattaacaggcagaagactaaattcatcacagagccctggcataaaaaggtgacaggcatcaccataaacaacaacaagatcaagaccagcaaaactctgaaaagagatattcgcagagagctctatttcacgatcatcaaaaacaaaaccgactacaataagctgataggacagatcgctttcgttatatctatcgagaaagactacgccgaaaagattaaaaaatacgctctctccatctgtgagaagaataatatccacgagcacaagattattcagattcttgacaaaatggtcaagagtcaggtatga

SEQ ID NO: 10187 - RNA, 1014 nt, synthetic construct
  source 1..1014: mol_type = other RNA
atgaataacgtgaactctcgacctttccttctgggtattaacgggttgccagtcatgaccaatatctcagatatctcgcgtcagattggcatctccagcaggcggatatacgaatataccaactataccagcagtttttaccacacattcgaaattcccaagacagacaaatctattcgcatcattaatgccccctttagtgggcttaaaatggttcagaggtggattctggaaacgatactgtataagattaaggtggacacaccttcatacggatttcttaaaggtaaaaagtcaccgactaagcagaatgcggagatccatagcaataacttatacctcttccagaccgacatcatcaatttcttcacaaacgtggatttcaagcgagtctatagcatttttctcaaaattggctacaacaaggaagtgtctctcactttggccagactatgctgcctggatggttatcttcctcagggcggggtaacctccccatacctgtcccatctcgtttgtttccgcatggaccgtcggattatgggcctgtgccagaaaagggagatcgtctactcacggtatgcagacgacatcacgttgtccagcgacaataagaatgatctgaaaaaagctagagtgtacctagagcaaataatatcagatgagggattcgaaatcaacccacgcaagaccaggtactcctttcagaaaaagctggtcactggactgacaattcacaataacaaagttctcgtgcccagaatattgaagcgcgaactcagatccaagatctataacaccattgtgtttaacgactattctagttgtgaggtcatcctgggctacgtaagctatatcaacagcatcgaaaatgggtacatcaacaaggtgaaagattatatcgagactctgctgaataataagtctatagagcccgagaggttatctattatccggctcaactacaagaaatcccctctgggaagttggatggagaatgtgcacactcaatga

SEQ ID NO: 10188 - RNA, 906 nt, synthetic construct
  source 1..906: mol_type = other RNA
atgaatcggttagacaaactcatattggaaattggtctgtctagaaacgtgatcgaaaactacattacattcgctgacaagcactataagtcccattacttgccgaagaaggggggcggaaagaggaccatagattgcccaggtaagaatctcaagaccatccagcgatggatccttaaagagttccttaacaaactagaggttaacaaacgagcaaatgggttcgtcaagaataggggaataaaacgtaatgcgttgtaccacctcaaaaagaagcacattctcaccgtggatattaaggacttcttctactctatcagccaaagacaggtgtttgagacactgaacgccaattataacgatagggactttgcactgaagatcgcaaaaatttgtacctaccagcggtatctgccccaaggcgctcctactagccctgctctttcgaacctggtgtttaaacccattgacgatgagattatgaagtactgcaattcagaactgatccactatagtaggtacgccgacgatctgacgttttcaagtgataataaacagagcctgcagtacgcttacagatttatcaacgacctgctctataagaatggcttcaacctgaactcaaaaaagactcgctatctgagcggcaaagggaatatgtccgtcacaggcgttaatataaacacaggaaagcccaaggccgatccaaaacttaaaaaacaagtacgggccgaattacaccattacatcattaaggagaaggagattaacctaaacaaactcgccggaaaaatctccttcatccgcagtatagaggaagactattctcagaatttggacttctacatcaagcgcctgtataaaaaaaaggcctttatccagaagatggcgtccaagactcattga

SEQ ID NO: 10189 - RNA, 903 nt, synthetic construct
  source 1..903: mol_type = other RNA
atgaagaagtttgaaaatttcattctggagatcggccttaccaagagcgctatcgaaaactatgtgactttcagtgatgcgagctacaacactttctacataccgaaaaaaaagaagggcgaaaaacgtgtgatcgactgcccaaacgccaacctaaaagccattcagagatttttcctgaagaagtacctgaacaaggtggaagtcaacaagcgagtgaatggttttgtacctaaaaggggtatcaaaagaaatgccctgttccatatgaaaaacaagtatctgctcacaatagacatcaaagatttttttcccagcataagccagaaaaaggtttttgaggtgctttacgagatctattatgataaggactttgctctgaaaatggccaaactgtgtacgtacaagaggtccttgcctcaaggagcaccaacttcccccgccctctctaatctcgtcttcaagggaattgatgacgagatcatgaaatactgcaattctgagatggttaactactctcggtacgcagatgacttaacattcagttcagacaacaaaaactccctacagtatgtttataagttcgtatcacacctgttgtacaccaacggcttcaacattaataaaaagaagacccgctatctttcaggcaaagggaagatgtcaattacaggagtgtacattaatagtgggaaacccaaggtgtccagcgagctgaagaagcaactccgggctgaattacaccagtacattatcaatggcaaggagatcaatttgaatcaggtcagtgggtatattagctttatctcgtctatagaggatgactacttgaaaaaagtggagtcctatatcgaaaagctcaaaaagaagaagaccctgatgcttacactgaaagcagaatga

SEQ ID NO: 10190 - RNA, 1038 nt, synthetic construct
  source 1..1038: mol_type = other RNA
atgaatagtttccgtgacacatatttgtataactacaaggacaccttagatgagatcatttcaaaaatcaaggacttcttactgacagaaacatacaagaagattttcaaggatgaagacaaactccagtatataaaccacttcaccttccttgatatactgagcaacacgaaaaagttctataccaaacggatcatctataccaacaaaaaggaacggattgtgtttgagccctctgtggagctgtacctgatccagaagttcattttgtacaactacttgatacagagagacagctccttaagtgaaaatcttacttcctatcggaagaattactctgttaaaaacaacgccatcaagcacataaataagaggaccatcattaagattgacatcaagaacttcttcccgactatcaatagatatcggatctacaaatgcctgttgaatctaaacatcgaggaaaagaaagcatatctgtttagcagactgctttcttatcaggacaagctcattctcggaacccctagctctccatttctgagtaatctggtttcccgcaaactggatctacgaattgaagggtacattaaagcttaccaaaaatcaaaggtgcatatctcttatactcgctactccgacgatatgacattttcctttaaccagaggatcaatacccagaagtttatctcgtttatttaccagatcatcctcgatgagggctttgtccccaattacgagaaaacccagataatttccagcaatcacaaacaaaaggtaactggcatcattgtcaacagggacacgatatcagtgagtaaaaaagagagggatgacgtggagttcatcatcaaactctggcttaattatagcaaggacatagccctccagaaatacaacaagatcttcaagaagaactacacaaatgaacgcgatttccatcaaattctgaaatcgaagatactgtacatcaagtttatcaacgatgaacaagggaaaaagctgattcgaaaatttgaggagattaagattggttga

SEQ ID NO: 10191 - RNA, 969 nt, synthetic construct
  source 1..969: mol_type = other RNA
atgcatcggctgaagtacaattacggctcagaaaacaatagcctcgacttgttaaacctcttcggcttcaccaataatgaacttcgttttttcagtatgtccaagaaacgccggtataaaaaaatcataatccccaagcgggacggttcaaatagaatcctgcatgcaccagtttataaactgaaaaacgctcagaggatcattctcaagaacattctgtacaagaagcacaatgatctgctgatagacaatatcactgggttcatccccaataaaaacattaagaacaacgccaacttccatgttgggaagaagtacatactaaaggtcgacattaaggacttttttccaagcatcactcaagatcgagtctatggtcttttgaggaaagagtacaatttagatcactctaccagcatgtatctcagtagcctgtgcacatataacaatcagctgccccagggagcgcctacatctcctatgctggccaatctcatcgccagatttttggattaccgaatcattggcctgcttaaatcttataatctgaatgaggggcttgagttaagttactcacgctatgctgatgatctcacgttttcctttaataagaggatcgacataaacctgttcattaactacgtgatctccatactaattgaggaaggcttttacccgaattacaagaaaattcacatgatctctagcggaaaacagcagaaggtgaccggcttggtggtgaacgataaagtctcagtgggacgcagatactacaagaagtttaagtcgatcttctacaatatctccaaaaacggtttcgatgacgaactgaaaaagtggaacaacattaactccaaaaagattgagtcggtggaaaagtttaaacaagtaatcggagggtatataagcttcattaaggacattagtcctgactattatgagaaactcaagcagttcaacgtactgtga

SEQ ID NO: 10192 - RNA, 966 nt, synthetic construct
  source 1..966: mol_type = other RNA
atggcccagaggaaaaaaatcccacagatccctgcagaacagagccacctgtacggcattaagtctccccacgctttggctaacaggctggggtgggagctggataagcttcgggatttggccaaatcaggtggctatcgtatttataatcaccgaaagacaggtcgcgagatccaagagccaggtgccgcgttgcagtcactgcataagcaaatccataagtacctggccaggatccaggcacctgactacttacactccgccgtgaaagggaaaagctatctgagcaacgcacaggctcacgtaggcgacatcccgctcatcaagatcgacattgccaaattttatcagtctgtcccgcagcacaaggtgatgcatttctttcgggatgttatgaactgcgctaccgacgtcgcagggcttctggcaaacctcatttgctttagaggagccctccccacaggaagtagcgtctctcctataatctccttctacacgtacaaattcctttttgatgatctagctgacttggcggctggccacggactcactatgacttgttacgtggatgacattaccatgtctggccctatggcctcgagggaagtgctacacgaggcccgaacaatgatattccgggctggccttcgggcgcataaagacagaagtttcagtcctgatggaccaaaaatcgttaccggagttgcggtgagcaagcatgggattggcctgccctttgggcgctggcagaagataaggaatcagatacgggaactcgagcgctgtgacgacgacaatcaaaagctggcaatctatcagcagctgatttcacgcctctacgaggcaacccaaattgatccacgatgcagaatttccgccgagtatcaccatgcccgtttcagagaactgaagagagtattagctcaagctgcatccgaacccgtgcccttgaagctggccgcctga

SEQ ID NO: 10193 - RNA, 966 nt, synthetic construct
  source 1..966: mol_type = other RNA
atgacccagaggaagcgaaatcagcctatccctatagagcaatcacatctgtacggaattaaatcaccacacgcccttgccaatagacttggctgggagctggataaactgcgcgacctgacaaagtcaggagattacagggtttacaaccacaagaagactggcagggagatacaggagcccggtgctgccctgcaatctttacatcgccagatccataaataccttagccgcattgaaacaccggattatttgcactcaaccgttaaaggcaagtcctatattagcaacgcacaggctcatattggggaggtgagtctcatcaagatcgacatagccaagttctaccaatccgtgagtcagcacaaggtaatgcacttctttagagatgtaatgaactgtgccccagacgtcgcgggtttcttggcaaatctgatctgttttcgcggagccttgcccaccgggtctagtgtgagccctatcatcagcttctatacctataaactcctattcgacgacctagcagtgctggctgactcccacggcctgacgatgacatgctatattgatgatatcacgatgagcggcaaactggcaagtagaaagatcctgcatgaggcccggcggacaatattcagagccggattacgtgcacacaaggacagatcgttttccccaaacgggcccaagatcgtcaccggtgttgctgtcactacttatggcatcgctctgccatttggccgttggcagaaaattaggaatcagattcgggaactcgaacgatgctctgatgacaacaaaaagttggtgatctatcagcagctcatttcccgactgtacgaggccactcagatagaccctcggtgccggggaagcgctgaatactaccatgcgcaatttaaagaacttaagagggtgctcgctttagtggggcacgggcccattgccctctctatgaccgcatga

SEQ ID NO: 10194 - RNA, 951 nt, synthetic construct
  source 1..951: mol_type = other RNA
atgtccacaaagtctccaaaggagaaagcactggtccgcattcccattgaacgttgccatctatacaaaatcgggagcccacacgccctcgcaaaacggttaggctgggatcttaataagctggatgatctcgcagcctacgggggatataaagtgtacaagcataaatataccggaagaaccatcgaagaacctggtgcagctctgcagagtcttcatcgacaactgcatcgctatctgtcacggatcgaggtgcccccttatctccacagtgccgtgaaaggaaggtcctacttgtctaacgcgcgagctcacgttggggacggccgaatcatcaaaatcgacatagccaagttttaccagtccgttcctcaacaccgcgtgatgcacttcttcagggacaggatgaaatgcgcgcctgatgtttccggccttctggccgcgctgatatgttacgatggacacctggcaacaggttctgcaatctcgccgctgattagcttttacgctttcgagagtctttttgatgacttggcaaacattgcttgcaagtatgacctggaaatcacatgctacgtagacgacataacgatgtccggtaagcgcgcttcattcaaggtgttacatgaagtccgcagaaccatctttagagccggcctacgggcacataaagaccacgccttcgcctacaacagccccgggatagtaactggcgtggtggtcactggccaggggatttcattgccattcgaaaggtggaagaagattaagaatcagattaggctcctcgaggcctgtgagatcagagatgacaagctggagatctttcccagcctggtcagccggttgtatgaggccgctcagattgatccagcctgtcgttctaaggctgagtattatcacgccgcgtggagaaaactcaagtacgagaaaatggcccgggctgcttga

SEQ ID NO: 10195 - RNA, 978 nt, synthetic construct
  source 1..978: mol_type = other RNA
atgccaaaggccaaaaggaagtcctcgcaacccatcccaatcgagcgttgtcacctctacggcattcgctctccccacgccttggccaatcgcctgggatgggaccttaacaaactagatcagctcgccgcctatgggggttacaaagtgtaccctcataagcagactgggcggatgattcaggaaccaggggaagccctacagtccttacacagacagatccaccactatctggctagggtggaggcacccgcctatctccattcagccgtgaagggccgctcatacgtttccaacgcgcaggctcatgtgggcgcaggaggactggtgaaacttgatatcgcgaagttttaccagagcgtaccgcaacacaaagtgatgcatttcttcagagacgtcatgcattgcgcacccgacgtcgcaggcctgttggcaaatttgatctgttttcacggtaaactcgcaacaggaagcgcagcctctcccataattagctattacacctacaaatccctgttcgatgaactgaaggctctggctgactgtcgcggcctgaccatgacctgctatgtcgacgacattacaatgagtggtccgggggccggtagagccgtcttacacgaagcccgaattctcatccatagggctgggctgcgggcccacaaggattgtgccttccagcctggcgcaccacggcttgtgactggggtgattgtaggagatatgggcatagatctccctttttcacgttggcggaagatcagtgaggcggttagagaggtcgagaggtgcgtggacccagtgcagcgactggagaagtatcctaagctggttagtcggctgtatgaagctgctcaaataaacagcagatgcatgacgcgcgccaggtaccaccatgagagatggcgagcccttaaaaggtctttacaggctgcacctttgaatgctggaggcggccaacccgttatcgcggcttga

SEQ ID NO: 10196 - RNA, 972 nt, synthetic construct
  source 1..972: mol_type = other RNA
atgagccagggcaagcaggccaaacagcccagaatcccgatagaccgctgtcatctgtatgggattaggtcacctcacgcgttggctaaacgcctgggctgggaactgaataagctggattcacttgcagcctacggcggttatagagtatacaaccataaagacactggcagagagatccaggaacccggggccgctctgcaaagtctgcaccgacaattgcacagatacctggccaggatagaagtacctgtgtacctacacagtgctgtgaaggggcgaagctatttgtctaatgctcgtgctcacgtgggagatggaaagctcctcaaaatagacattgccaagttctaccaatccgttccacagcataaggttatgcattttttcagagatgtcctgtcctgtgcccccgacgtggcaggattactggcgaacctcatttgctatcgcggcgtgttggcgaccggctcgtcaatcagcccaattatctcatactacgcctataagtcccttttcgacggactagctggcctcgctgcgcagcatggccttgtgatgacgtgctacgttgacgatattactatgagcggtcctggtgcatctagggccgtgctccacgaggcacggtctgcaatctttaaagctgggctgagggctcacaaagaccgcagtttcacaggagacacagtcaagatcgtcaccggggttgtggtcggacctgatgggatagccctgccattttcccggtggcagaaaatttctcacgccgcaagagagatcgccgcctgcagtgacgacgccgagaagcttcgcctgtatcccaaattagtcagccggttatatgaagccgcccagatcgattccaggtgccgaagccgggcggagtttcatcactgtcagtggagggatctcaagcggcgtattgccgcaggcgctctgatcgcagcagcagtggataaggccgcttga

SEQ ID NO: 10197 - RNA, 972 nt, synthetic construct
  source 1..972: mol_type = other RNA
atgtctaccaatcgccgcaggacagatcagcgaatccccattgaccggtgccacctttacgggataaggtcccctcacgccctggctaagagactgggatgggacttgaacaaactagacggattggccgcatatggctcttacagagtgttccaacataaagagactggtaggttgatccaagagcccgggccggcactccagagtttacatcgtcaactgcaccgctatcttagtagggtccagatgcctgaatatttgcacagcgccgcgaaggggcggagctacttaaccaatgcgcggtcacatgttggcgccggtgcccttatcaaagtcgacatagccaagttttatcagtcagtcccacagcacaaggtaatgcactttttcagagatgagatgcgatgcgctgaagacgtggccgggctgctggcaaatttaatttgctttgagggtaagctcgcaacaggttcggccattagtcccataatttcctactactcttacaagaacctcttcgatagtctcgctaacctagctaataaacatggcctggtgatgacctgttatgtggatgatatcactatgagcgggcctaacgcaagcaatctggtgctgcacgaggcccgtacaatgattttccgagccggcctcagagcgcataaggatagacgctttccctcatctgcaccaaaggttgtgactggcgtcgtcgtgaccgaccagggagttgaactgcctttctccagatggcagaagatccgggcacagattagagaaatcgagggactgggcaacgccgcagacaaactgaggctttacccacgcctggtgtcccggctctatgaggctgcccagatcgatagccagtgtcgggccagggctgaatattaccacgctcaatggcgccaggctaaaaggcaggtggccatcggctccatggctgacggaacggaggctgtagccgcgtga

SEQ ID NO: 10198 - RNA, 963 nt, synthetic construct
  source 1..963: mol_type = other RNA
atgtctaaagcacggaagaaaaaactgccacagatacctttaaatcagtgccaccttttcagaattctatctattcatgccttggctaaaagaataggatgggaactggacaccctgaacaagattgccaaagatggcagctatcgaattttcaagcacagggaaactgggcgtcagattcaggagcccggcccgttactgcaaaacctccaccgccaattgcaccggtaccttagtcgtgttcagactcccgaatatctccattctgccgtcaaaggtcgctcttacctgacgaatgcgcgcgctcacataggctgcgataacctgatcaaaatcgacatagcaaagttctaccagtcagtatcccagcataaggtcatgcacttttttagggataccatgcaatgcgcccctgacgtagccgggctactcgcaaatctgatctgttttaacgggatgctggcaaccggcagtagcataagtccaatcatctcatacttctcctataagaagctgttcgatgatatccacaatatcgctctacgcgagaacctggtgatgacctgttacgtcgacgatatcacactcagcggtaagaacgcaagcgggaaaacattgcataaggtgagaacaaccattttccagtacggattacgggcccacaaggacagccagttttcggagggaaatcccaagcttgttacgggtgtgatcgtgggcaaagaggacattgctctgccattttccaggtggaagaaaatccacctccagatcagagagattgaaggctgttcagacatcgagcagaaactcaggctttatcctaagctgttgtcccgactgcatgaagctatgcaaattgaccctaagtgcacagctttggccaagaaacatctcactgattttcggctcctgaagagacggggagtggtgaagactctgccccttccaagggccgcgtga

SEQ ID NO: 10199 - RNA, 942 nt, synthetic construct
  source 1..942: mol_type = other RNA
atgaagaccgctaagaagcaccgaccacttattcctctggaccgctgccacctttaccggatcggcagtccgaaagtgctggctaagcgtatcggttggaagctggacaccctagaagatttatcaatgaacgccaagtaccgcgtatttaggctcaaacggtccggaaggcaggttgaagaacctcccccgccccttcagtctctgcatcggcagatacatggttatctgtcaagaattgagacacccaactacctgcactctaatagaaaaggccgctcctatatatctaacgcaaaacctcacgtgggggcattggcgatgattaagatcgatgtgaaaaagttcttcccctctgtggaacagcacaaagtcatgcacttttttagggacgatctgaagtgtgctgctgatgtcgctgggttgctggcggccttattgtgcaaggatggcaaactccctactggctcctcaagtagccctatcattagctattacgcttataaggccatgtttgacgacatccagagtttcgccgcaaagaaccacttggtgatgacttgctacgtcgatgatataaccctcagcggagcgaatgcaacactccgccagctgcatgaggttcgaaagatcatcatgagacacgggctcagagcccataaagccaagtggttcatgggtctgggcgccaagccagtaacgggggttatggtgacaaaaaatggaattgagctgccccacagcagatggaaggccattaaagccgacctcaaggctatcaaacagtgtgccaatcgggaggaaaaactggagatctacccaaagctggtgtcgaggctgtatgaggcttcccaaatagacccaggatgtaggaaactcgcagacattcatcatcgtctttggaaagaggcactagccggcgacgtccaattagccgcatga

SEQ ID NO: 10200 - RNA, 942 nt, synthetic construct
  source 1..942: mol_type = other RNA
atgtctaagacaaagaacaagactattgtgcccattcctttggaacgctctcacctctttcgtgtacgctcaatccacctgttggctaagaaactgggttttaccgtcgatggtctggagagattagccaacgacgccaaataccgtatctttaatctgaaggagtcaggaagactcgtggaggaacctccgccagtgctgcaggctctccacaggcgaatccaccggtatctcgcaaaaatcgaagtgccggagtacttacacagcgcagtcaaaggccgaagttatataaccaacgctaaggcccatgtcggggtaggccctatggtgaaaatcgacgttaagaagttctttccaagcgtccctcagcatcgggtcatgcagttcttccgagacactatgttgtgtgcggctgacgttgccgggctccttgcaaatctgctgtgtcggaacggaaggttaccaacggggtccagcgcctcacccattatttcgtattactccttcaaggcaatgttcgatgagatcgagggcctgtgcgtggctaatcagctgaccatgacctgctacgtggatgacatcacaatcagtggcgccggggctaatagggcccttctacatgacgttagacagatcattactcgcaatggactagcctcacataaagcgaaatttttcgatcaaagtagaccaaaagaggtgacaggcgtgattgtgaagggcaacggaatcgatctgccccatagcaggtggaaggccattaaagagagcataagggaagtaaagaaggcaggttccgatgaggaacggcttgcactttatcctgctctgatatctaggctccacgaagcttcccagatagacccctcctgccggcccattgccctgcatcacaaccaaaaatggcgcgaattgcgcagagcggtggttgcccactcttga

SEQ ID NO: 10201 - RNA, 963 nt, synthetic construct
  source 1..963: mol_type = other RNA
atgactcgcaaaaaagctcgccgggaccttgaacctgagcagtgctggctgtacgcaattagttcccccgccgatctcgctcataggctgtccaccccgcgacataaacttaaagcttcagatttgtcccctctcgcgcgcgatactggcaattataggttgttccaaattgaagatggcaacggtaagtctagagccattcagtggcccaagagacgactccaaacattgcacgctcgggtgcacaccctgctgagcagggtagcagtccccgcctacttgtactcagccgtcagaggcaagtcctacgtcgacaacgcatctgcccacaatcctctggtcccgacaatcaagattgacgttaagaagtttttcccaagcgttagccgggctgtgatcttcgattttttcttccagcgcatgaggtgcaggagggatgtggccggcctgttagctgacattttaacatttgacgcgcatctacccacaggaggtgccgcaagcccaatcatcgcttattattcttttaagcccatgtttgacgaaatccacaaattcgcgctctctcagggcctgataatgacgtgttatgtggacgatctgactctaagtggggtacgggccagcaagaatacactccacgagatagggaagatcatctcacgaagcgggttaaaatcccataaagcccgtgctttcgcagcgagtcagccaaaagtgataacgggagtgtgtaacaccaagtcgggaagaagagtgccaaataaactgcaccttaagattaagaaggggttcgatgacctgaccgccgccaaaactcctctggagatcaaccggatcgcccagccacttctgggaagactccgggcagcaggtcagatagaccccaaatttcgtgctcgcgctgacaccgtttctgccaacattgccgcaagttcagtgcaaaccaagacttccccttga

SEQ ID NO: 10202 - RNA, 993 nt, synthetic construct
  source 1..993: mol_type = other RNA
atgacgagctgcgagctggtcgatcccatgcgaaaaaagcccaggaccgatctcccgctcagcgactgctggctgtcagcgatcgactcaccatccacgctggcgcggcgtttatctaccccaggccataagttgtgcgttgatgatctctcttcttttgccagagacacagggaattacaggttgttccctatctttaacgagaaggggaaggcaagaccgatacagtggccaaagcgcagactgcagggagtgcatgcgcggattcataagttgctatcacgggtcgctgtgcccaagtacctgcactcggccgtgagggggaaaagttatatctccaacgccgcagctcacgaccctaaaatgccaactatcaagatcgatgtgaaaaagttcttcccctctgtctcccgagttgtcatctttaactttttcgcaggaccgcttaaatgtcggcgtgacgtggcaggccttttggccgatattctgacttttgacgcccacctgcctaccggaagcgcagctagccccattatcgcttactattccttcaaaccaatgtttgacgaaattgcccagttcgccgagagtctcggtctgactatgacctgttatgttgatgacatggcactatcaggaccccgcgccaataaaggggtgctgtatgcaataaggggcattattgcaagacacggtttaaaaagtcacaaggcccacacattcagcggattacaacccaaggtagtgacaggcgtctgtaacaccgctgccggtcctagggtacctaataagctgcatctcaagatcaagaacggcttcgacgctcttgccaaggcacagaatgcggtggaggaaggcaaaatactccgcccacttctgggcagaatggaggccgctgctcaaattgaccctgcctttaaagcccgagctaagacagttcgggctaagtactcccgccctaaagatgtggggggtctggaaaaaatcgaatga

SEQ ID NO: 10203 - RNA, 966 nt, synthetic construct
  source 1..966: mol_type = other RNA
atgctagagatttccgattgttggctatcagcgatcccatctcctgctatactggcagcccgcttatcaactgatgcaaacaagttaacagttgccacgcttcaagagttgactaaggacgacggcaactttagagtgtttcccctggtgggaaacaatggtaaggtacgcataattcaggagccaaaacgccagctgcagaggattcatagtagagtccacactctgctgtcccgggtgatggctcccgattatctgtattctgctgttaagggaaggagctacgtcggcaatgcccaggcccacgatcctaatcaccctaccgtgaaagtcgatatcaagaatttcttcccgtccatccctcgggtagctgtgtacaacttcttccaccggcagcttaaatgtcgcgtcgacgttgcagggattctcgccgacctgctgacgtacgatggccatctcgccacagggtcagccgcaagcccaattctcgcttactacagctacgaagctttgtttgacgaagtgcatgagtttgccaaggccaggggtctgaagatgacatgttacgtggacgacatggcattatccggaccaggagcagacaagagcaccctctatgaagtcaaaaaaatcatagcccgacacggcctgagatctcataaggctcatgcgttttcgtctgctcagccaaaagtgatcacaggtgtctgcaataccgtgagtggcccgcgtgtacccaaccgactgcaccttaaaatcaaaaacgggttcgatgccttggcctccgcaagtacccaaagcgaaaagctgaaagcactcaatccccttattggcagactcgaggccgccgcccagatcgaacccatctataaggcacgggtggcgactttgcgtgcggattatgccgacgttctcctgaccgctagaaggcccgtgtgcgctgagcctgcttgcgttgtggggtga

SEQ ID NO: 10204 - RNA, 930 nt, synthetic construct
  source 1..930: mol_type = other RNA
atgaataaaagacggaccaacctgaagctcagtgactgttggctatacgcacttgccagtcccacggatcttgcgcgccggttgcagactgcaaagcatccaataaaggtggctgagctgagcatgctcgctaaagatgccggaaactttcggctgttctcccagaccaatgcggccggcaaatctcgacagattcaagaaccaaagaggcgcctgcagtgggttcacgggaggatccacgcattgttgagtcgcgtggaggtgccaggttacctccactctgcagttaggggaagatcttatatctcaaatgctgctgctcatgatccaagcatgcctacctttaaggtcgacgttaagaagttctttgccagcgtgccccggtccgccatcttcaatttcttcgtcggccccatgaagtgcaggagagatgtggcccgtttactggccgacattcttacctttgacgcccaccttcccacaggttcagcagcctcgccgatcctggccttttacgcgtttaaaccaatgtttgatgagatagagcagttcgcactggcccacggtctgactatgacatgttatgtggatgacatggcactgtctggaccccgcgccaacaagtccaccctgttcgaagtgaggaagatcatcgcacgacatggcctcaagagccacaaggcccatgtgttcggcgctaaccaacctaaagtcctaacaggcgtatgcaacacacctacgggacctagagtcccgaataaactgcatatgaaaattaaggctggcttcgacaaactcctcgccgctaccacacctgacactagatcagaagctctgcgacccctgttagggaggttggaggcagccgggcagattgaccctgggtttcgggcgcgtgccttaactgtacgcgctgcttattccaaatga

SEQ ID NO: 10205 - RNA, 969 nt, synthetic construct
  source 1..969: mol_type = other RNA
atgactattgctggcccagtgaagctcaggcggagaaaacgggcccgcttggatctgaaactgtctgagtgtggactgtacgcactggccagtccggctcacttggctgggatactcagtacacctggctgcaagttttcagtcgaagagctccagggactgagccgcgatgaggggaatttccgcctatttgacctggtgtcagacggaggcaaggcgcgtaggatcgaatggcctaaacgcaggctgcagcaggtccagcggcgcattcacgtgctcctgtcaagggtggaagtgccagactacctccactcagctgtacgtgggaagagctatctcaccaacgccgccgtgcactccgcagagatgccaacagtgaagctggacgtcaagaaattttttgtgtccgtccccagagttgcggtattcaacttcttcgcaacaaccatgaaatgcaggccggacgttgcaggcctgctcagtgatctgttgacttttgatgcacatcttcccaccggcggggcagcctctcctatcatggcgtattatgcttttaagagcctgttcgacgagatatacgctttcgccagctctcaaaatgtcactatgacctgctacgtggacgatatgaccttctctggtggagccgttggcaagcggttcttgtatgaagtgcgacggatcgttgccaggcatgggttaaagtcccacaagtccagaatgtttgatgccagacagcccaaggtcgtgacgggtgtgtgtaatacgacagatggtgccagagttcccaacaaacttcatgcgaaaatcaaagacggattcgataagctttcgaaggctgacggatccgcccagaaagccaagattcttcctccactgctaggccgattagaggctgcagggcaaatcgaccccagatttaaagcccgagccgtaactttacgggctgcacatcagagcggccgttga

SEQ ID NO: 10206 - RNA, 969 nt, synthetic construct
  source 1..969: mol_type = other RNA
atggcccctaaaaacaaggcctcattgcgcattgaggactgctggctgtttgctgtagcgagcaaagaagacctcgctcggaggctcagcaccgatagacaaaaaataagcgtgagtgatctcgagaggttaagcgcagacgcagggaattatagattattctccatccgccagggcacaaaagaacgacctgttcaggaaccaaagcgcgaattgcagcagattcatgccagaatccatagactgctgtccagggtggttgtcccagaatatcttcattccgccgtgaaggggaaatcatatttgacgaatgccagagagcatggacacggaatttctataatcaagatcgacgtgaagaagttttttccatcagtgccgcggttcagggtgttcacctttttcaagatagtcatgaagtgtcggaaggacgtctctgggctgctggctgacctgatcactttcgatcagcgtctccccactggatctagtgcttctcccatcattgcttactacgccttcaaacccatgtttgacgagatttcacggtttgcagagtctgcaggcctcaagatgagttgttacgttgacgatatgactttttctggctcgaatgctaacagatttaatctgtacgagatccacaagatcatttcaaagtatgggctgaagtcccacaaaatgaaatacttcgtggatcaggagccaaagatcattaccggtgtctgcaacacacctagtggagagcgtgtcccgaacaaactgcacctgaaaattagcataggcttcgaggaactacgcgccgcaaaatcccacacaagcgccgtaaagttgctgcgaccccttcttggcaggctcgatgcggcaggccaaatcgatcctcgtttccgggctcgggccctaacccttcgatccacattcaagaccaaatcccgcattagcaacggtgccatcaagggtagggtgtga

SEQ ID NO: 10207 - RNA, 933 nt, synthetic construct
  source 1..933: mol_type = other RNA
atgcgtaaacgccgcaatgacctcaggttagacgagtgttttctgttcgctatcgagagccccagggacctggctaggagactcagcacaaagtctatgcagttttcggaggcagatctactgggactgagtgccggcatcatagggaattacaagctgtttaagatcgatgggcgcccaatccaggaacctaaacggcggctccaggctgtgcacttgcgagtgcacagactgctctccaaagtggcagtccccgagtatctccattccgccgtcaggggccgttcctacatttctaatgctgccgcacacgcacgcgatgagccagtgattaagatcgatatcaagaagttcttcgcttctgtgcctcacgccgccattttgcgatttctgagaacctcactgaggtgccggtcagacgtcgctaagcttctggccaatcttctgacctttgagggaaagatacccactggctctagcgccagtccgatcctggcctattacgccttcaagcctatgtttgatgaaatatccgcattggcgacgtcattaggtctgaccttcacatgctacgttgacgacatgacgttcagcggtcgtgccgccacaaacagcactttgatgcagatccggactattgtagcgcggtatggtctaaagtctcataaagttcgaaagttctcagctaacgatcccaaagtgatcacaggagtttgtgtcgcgtccgaaggcgacagaataccaaacaagctccatcggaaaattgcagccgacttcaaaagcctcgaagtaggggatgaaggcatgcagagagagaaaaccctgtccagtcttttggggaggttacaagctgctggacgcattaaccctgtgtttaaagcacgagcaagcacccttagagcgtcggccagtcgcagaaggcaatctatttga

SEQ ID NO: 10208 - RNA, 933 nt, synthetic construct
  source 1..933: mol_type = other RNA
atgaaaaaaattaggagagatcttcgactcaacgaatgctttctgtatgccatagatagcccggccgaccttgcatggaggctcagttctaaggctatgaagctggacgccaaggatatcgacttcctcgttagagggagcgccaactacaaattctttaagatcaaggatcggcctattcaagagccaaaggcgaggcttcaggcagtgcatttacgggtacataggttgctgtctcgcgtcgctgttccagcctatctgcactctgcggtgaaggggaaaagctacctaagtaatgcactggctcacgatgcctcccagcccctgatcaaggtggatatcaagaagttttttgctagcgtccccgaagacgcagtggtccggttcctgagatcagactgtaaatgtaggagtgacgtcgcgcgcctcttcgcatccatgttggtctgtaatgggaagattgctaccggttcatccgcctcacccattctggcctactacgcattcaaatccatgtttgatcagatcgcaactcttgccggcgagcacggactgactttcacctgctatgtggatgacatgacactgagcggacctaccgccacaaatgccatggtgattaaggttcgagctatcattgctaaattcggcctgaagagccataaggtgcgtcgattcaacgcctcctctccaaaggtggttacgggcgtatgcatcatgccagacggcatacgcgtgcctcagaagctccacttagcgatttcgagaaactttcaggaaagaagcaccgagacagacacaaaaaaacgcgagaaaataacggccagtctacagggacgtttggacgccgctggtcggatcgacgctaaattcaagtctcgggcagatacttttcgcgcttccaccaaaaaagcccaaccttcagtgccctga

SEQ ID NO: 10209 - RNA, 960 nt, synthetic construct
  source 1..960: mol_type = other RNA
atgaagaggtatgcactggaccaatctccatttttcaaactaaagagtcgacaaaagctgtcaaaaatattggacgctgatcttaatgagctggaggtttttgctagaaatgaccccgtcgataactataaattgttcgaaacatctggcggtaaacctcgacccgtgcagtgccctaagcatagattacaggtgattcacagaagggtctgtgatctgctggcgcgtattgatactccagattacctgcactcagccattaaaggccacagctacttatccaacgccaaagcccatgccgctaatgtgccgatggtcaaagttgacatcaagaagttttttccctccgtaaccatcaacgctgtcaagcgcttttttcttaaaactatggaatgctcacctgatgtggctgccctccttagtaaagtgctgaccgtttacggccatctggcaaccgggtcatccgtgtccccaatcctctcctattacgcacaccgcgacatgttcgaagagatcgctcatttgagcgcgggaaggggcgcagtgatgacctgttacgttgacgatatgtgcttctcgggagagacagtaacacggaagttcctaagcgatgtaagagtcattatacggagccacggcctcaagtctcataagatccactatttctcatccaatatgccccgcattgtgacaggtgtggtcgtgactaacagcgggattaaactccctaacatacgtcacaagaagatcgtggacggatacgcccagttgcaggccgctctgtctgacgaggaaaagcttaaactgctgccgagcctcatagggcggatcaatgaagcagcacagattgaccctcgctggacccccaaggccaaacagctcacgctggagatgaagaggatcagctctatcgcggccagtagtatgaacccaagctcccggccatctagttgggcctga

SEQ ID NO: 10210 - RNA, 939 nt, synthetic construct
  source 1..939: mol_type = other RNA
atgaaccgacatcctctcaaccaaagcccgttcttcaagttacggtctaggaaaaaactcgcgaacattctcggactgggtctgaaggatcttgaagtgttcgcgcagaatgaagccgatgagaattacagactgttcgagatcagaagaggcgggaaagctcggcctatccaatggcctatcccctgcctgcagcgcatccacaaaagggtgtgcgacctattggcccggatcgagacgcccaattatcttcactcagctataaaaggtcggtcttatctttccaatgccaaggctcacagtggcgatacagccttggtgaaggtggacatacgtaagttttttccttcggtcactgtacagagcgttaaaagcttcttcttaaagaccatgggatgtagcccagatgtcgccgcagtcctgtccaaagtcctgaccgtatacggacatttgccgaccggcagtagtgtgtccccaatcttatctttctatgctcatctggatatgttcggggagatagaacagctggcccgtaagagaggggcagttatgacatgttacgtggacgatatgtgtttttcagggaggtcagtgacacgcaagtttctctatgaagtgagactgatcattcaccgccacggcttgaagacccataaaattcactgctttgcacccggcgttccacggattgtcactggggtggtggttactggagacggcatgaagctgccaaacaagaggcatcaggccatcgccgaggacttcgctaaatttcaatcctcactcgacgagaaacagaagctaaagatttttcagtccctgctgggccgcgtaaatgaggcaagccaaattgagccccgatggaagaacaaagcaacatctctttgtcaggaagtgaacaagatgctctactgcggaaggcagaatgacggttgctga

SEQ ID NO: 10211 - RNA, 906 nt, synthetic construct
  source 1..906: mol_type = other RNA
atggccctacacgcactaaaccagtctcaactctacaaggttatgtcgcccgcagaccttgccagaaggctgggcatcttggccgaagacctggaggaactggcgaacaggaccgacaactataaacgctttaaagtaggggcccagaagaagcgccacgtgcaggagccaaaggaccggctgaaacaggcgcacaataaggtgaccagatggctcagcaggatagagacacctgattacctgcattcagccgtacggggccgttcttatatcacgaatgctgccgtgcactccgctgattccaacctggtcaaagtggatatcagatcatttttccagaatgtcactacgcacgccgtctatttattcttcgctaagaccatgaagtgtcgaggtgacgtggcaatgctcctggccaaactccttactgttgacggccatttgcccacagggtcatctgtgtcccccatactttcctatttcgctcataagccgatgtttgatgaaatcgccaagctggcatctcacgtggatctgcgcttcacagtttacgtggatgacgtctgcctcagtggggagaaagctagcaggagtgtactcttccaggtgcgcggaattattgcaaagcatggactgaagagccataaatgccacttctttccaacaggagtgccaagggttgtcaccggaaatgctctgacccttggcggtgtgcggttacctcatgttcggcacctgaaaattaagaaggcctttgacgaactggataaaatggcagaggggcccgcccgtgagaaggctttgaaagccttaaaaagccggctctacgaggctgcacagttggaacctgtctggggtgcccgagcgagaagcctgtttggcagaaaggctcaagtgactagttga

SEQ ID NO: 10212 - RNA, 951 nt, synthetic construct
  source 1..951: mol_type = other RNA
atgaagaattaccccatcgatcagagccctctctacaagctccattctaaacgaaaattggagaacatcctgtgcaccaatctggatatcgagaagatggcaaactatgagggtaagaacttcaagttcttctatattacccaggggaataaaaagagaaaggtcgagtccccaatccctgagatacaagagcttcatcggaagattgctcgcttgctgtgccgcatcgacccacccgattacctctatagtgctactaaaaagaggtcctacttgagtaacgcccagcggcacattggccgacacgccttgatcaaggtggacatttccaagttttttccgtccgtgtcccggctcaaagtgtataactttttcaggttcaagatgaagtgctctcccgacgtgtctgccattattgccaaacttttaaccgtcgatgggcacctggctactgggagctctgccagccctatactgagctattacgcaaatatcgatatgttcgaggagctctaccttctggcaaaaaatcgctcagctaccatgacgtgttacatcgacgatgtgtgtttttctggtgaacacgtctcaaagaagctactttacgaagtacagaagataatccgcagacacggatacgtgaaccataaacaaaaagcccggtattacagtcctggcgaagtgaagttgatcacaggcgttgccgttacaagcctgggagttagattaccactaagacgtcatagggccattcgagacggctatacacacatttttaccgcaaaaactgactccgataggctgacacagctggaaaaacaggtaggacggctgtttgaagcctcgcagatagacccaagtttcaaagacaaggctaaacgcgcgtcacaagctagggcaaatctcaaacgtagactgctgagcaaggcgttccatcccagctcaccgtga

SEQ ID NO: 10213 - RNA, 921 nt, synthetic construct
  source 1..921: mol_type = other RNA
atgaatacgcataaaagggtaccgctcaagggatctgcacttttccgactaacgtctcccagacggttagccgagatgttgctggtgccaagggctactttagagcgcctagtggaagcaggcgacgataactatctggtcagaccagatcgaaagtccgggcgtattatcgaggagcccaaacctcagcttaagctgatacatcaaagatttgctagactcctggcccagatcgaaacaccagactacctccacagcggggtgaaggggcggagctacataaccaatgcaaatgcacacggagccgatgacgcgtgtgtgaagctcgacattaaaaagttcttcccctcctcttccagccatcacgtccaacgcttttttgaagatgtgttggaatacccccctgatgttgcttcacgcgccaaacagctcctgacccatgatggccacctgccgacaggagggaacgcttcaccaattctgagtttttgggcatacaagcctatgtttgacgagatcgacacccttgctcgcgagaatgactgcgaattcaccctgtatgtagatgatatgtcgattacaggagtcttcgcaaaccgcaagttccagcaggctgcccggaagatcatagcgaggtatggccttcgcgcccacaaggccaaaacttttagcccaaaccagcccagggtgctgactggcatcgccaagaccaggagaggtagggaggttcctcaccgtcgtgccaaaggtattgcccagctggagcaacaggaggccgaggcagaaacaaccgccgacaagctgcgggttatgcctagtttgatcggtaaattgtcagaagcggctatcgtcgacccctcctggactgctcggaaaaacgctgccgtgcagcggagacgaaagatgaaagcgagtggctga

SEQ ID NO: 10214 - RNA, 939 nt, synthetic construct
  source 1..939: mol_type = other RNA
atgagcatgtctaagcataaacgcattgccctgaagggctcagcgctctttcggctcacatcacctaggcggctggctgaggtcctgctactttcaagaagtgccctggaacgcctcattgtggcgggggacaccaattatattgttcgcttcgatcagaagtcaggccgaatcattgaggaacccaaaccccaattaaagttgatacagaagagatttgcccgacttctgagccaaatcgagacacccaattatctgcatagcggagtgaagggtaggtcctacataacaaatgccgatgcccacgaagccaaccaatcctgcgttaagctcgatatcaaaaagttctttccatctagcaactcccaccacgtgcagcgctttttcgaggatgtcctggaatacccgccagatgtagctgcccgtgccaaacagctgctgacttatggaggtcatttgcctaccggtgggaacgcatctacgattttgagtttctgggtgtataaacccatgtttgacgaaattgaggctctgtcccggcagcacaattgtaagttcactctttacgtggacgacatcagcataactgggttgtttgctaacagaaggtgccaacaggctgtgcggaaaatcgtgagccggtacggccttagaactcataagaccaaagcattctctgccgggcagcctagagttctgacaggagtcgccaaaacccggaggggccgagaattacctcacagacgcgctaaaggcatcgcagagttagaacagctagagacagccaccgattcgacggcgaaaaagatgaagctcctgtccactctgattggcaaactgagtgaggcaaccatcatcgacccactctgggcaggacgcaaagaggcagctgtaaagaggaggagaaagctcaagcaggaggacaggatcaagcgttga

SEQ ID NO: 10215 - RNA, 942 nt, synthetic construct
  source 1..942: mol_type = other RNA
atgtcaacccacaaacgggtgcccctgaaggccagcgctctttttaggctcacaagccccagaaggttggctaacatacttatggtcacccccactgcccttgagcgcctggtacgctggggagatgaaaactatttggtgcgacctctcgcccaggtcgaaggtaaggcgcccagaatgattgaagagcctaagccacagcttaagctaattcaccagaggttcgcccgactgctggcccagattgaaactcccgactacctgcattctggcgtgaaggggcggtcctacataaccaatgccaacgcacatacagcagacaaggcttgcatcaaactcgatatcaaaaagttcttcccaagcagtagctcgcactacgtgcagcgctttttcgaggatgtactagaatatccacctgacgttgcggcaagggcaaagcaactgttgacgtacgacggccatctgccgacaggcgggaatgcttctaccatcatgtctttctgggcctataagccgatgtttgatgaaatcgccgccttagcagtcgagctcggctgcgagtttaccgtctacgtggatgatatgtccatcacgggcgtgttcgctaaccgcaaatgtcaacaggccgctaggaaaatcatcgcacggtatgggctgaaagcgcacaaagccaattcattttcaccaggccaacccagagttctgactggtattgctaagactcgacgggggagggaagttcctcaccgtcgtgccaaaggtattgccgagttggagcaggtggaagcagccgcaagtaccgtggaggacaagatgaaagtgctgccttccctgattggaaagctcagtgaggctgcaatagtggacccatcctggacaggaagaaaagacgctgcggtccatagacggcgcagattaaaggttggagccggggctgagtga

SEQ ID NO: 10216 - RNA, 927 nt, synthetic construct
  source 1..927: mol_type = other RNA
atgagcacacacaagagagtgcctctgcgcggaagcgcggtatttaagctgacctctccgcgccgtttagcagagatgctcctcattccccgaagtacccttgaacgcctgctcgatttcggcgatagcaactacctggtcagacatgacagaaaatccaaccgcacaattgaggaacctaaacctcagctgaagttggttcagcaaaggttcgctcgactgttagcccaaatcgaaacgccagattacctacactcaggggtgaaaggtcggtcatacatcacgaatgcaaatcaacatggggccgagcaggcctgtattaaattggacgtgcagaaatttttcccatcttcaagttcccattacgtgcagaggttctttgaggaaacccttgaatatcctgctgacgtagcctctagggcccggaggctgctcacttacgatggccacctccccacaggaggaaatgcttcaactatcctgagtttctgggcctataagccaatgtttgacgagatcgatgctgcggctaagagactcggctgcgagtttaccctgtatgtcgacgacatgagcatcaccggcaagttcgccaatagagaactgcagcgggaggcggccaagattgtggcactttatggattgcggactcacaagctgaagaacttttcgcccggccagccacgagttctgacaggagtcgccaaaacaaaaagggggcgggaggtgccccataggagagctaaaggcatagcagatttagagcaggaagaagccagcgctaccactgcagtggagaaactgagactgttgccgtcccttatcggtaagctctctgaggccgcagtcgttgactccagttggagcggtaggaagaacgctatggtgctacaccggcgtcgcttgaaggcagggatatcccgctga

SEQ ID NO: 10217 - RNA, 966 nt, synthetic construct
  source 1..966: mol_type = other RNA
atggcaaggcggtgcgccaaaagagttagccttaggggctctgctcttttcaagcttaccagccccgcccgtctggcccacatactgtgcatctctcctggccagctggcgtacttggtgcgcaacgctgaagccaactacctcgttaggacagatagaaaaactggcagactgatcgaggagcccaaggcactgctgaagcaggtgcacgcacgcgtggcaaaactgctccagcagattgaaactccagactatctgcattcgggggtaaggcagcgcagctatgtgactaacgcttcacaacatggagcaaaggactctgcggtcaaattggacattaaaaagtttttcccgagtgtgcgtgcagctgccgtgtattcatttttccacgaactcatggaataccccgcagacgtcgctagccgcatgactaggctactgacaatcggtggacatttaccgacaggcgggaacgccagttgtatcctgtctttctgggcctacaagccaatgtttgatgagattgccgagctagccgtggccaagtcctgtgcctttaccttgtatgtcgacgacatgaccatcagcggcaggttcgcctcccgcagtatgcaacaggcagctcggcagattgtaggcagacatcgattgagagcccacaagaataaagtgtttgtccctaatcagccacgcgtggtaacaggggttgctgtgacagtccggggactggagttacctaatcgacgggccaaggcgattgatgatgccacccaagttgtgactcacaccgccgatgggtccgcgaaattagctctgcttcctgtgctcatcgggcgggtttcagaggctgcagaaatcgatcccgcgtggaacggaaggaagacggccgctgtcaatctcagacggacgctcaccggcagaatagctaccgcttcccgacctggtggaggtgagccacccgcatga

SEQ ID NO: 10218 - RNA, 939 nt, synthetic construct
  source 1..939: mol_type = other RNA
atgaaaggaaaaccacacaaacgtgtcagcttgcgcggctcagcactgtttaagctaacttctcccgtacggctagcacagatattgtgcatccccccagctcaacttgaccgtctgttaagacggggcaataccaactactgcgtgcggaccgatcgaaagaccgaaagactgattgaggagcctaaggccctcttaaagcaagtccatgctagggtcgctcatttgctcgctcaggtggagacgccagcctatctccacagtggaatcaagaagcactcctacatcactaacgcggcagaacacagggtggaaggtggtgccgtgaaactggatgtgcagaagtttttcccttctgtccgagctgcggccgtttgtcattttttcgccgacgtgatggagtatcctatggatgtggctagtagaatgacaaagctgctgaccattaacggacatcttccgactggcgggaatgccagctgtatcctgtcgttctgggcctataaaaacatgtttgacgagattgcagcactggccgcagccaagggctgcactttcacactctacgtggatgacatgaccatcacagggcagtttgccacacgagccatgcagaaggaagcgcgcgccatcattgggcgctaccggcttaaagctcacaaaaccaagatattcagccacaggcagcccagaatagtaacaggagttgcaattaccgcccgcggcccagaactgcccaataggagggcacgcaagattgcgatcacaatggccggagtagaggccgctgccactgactcacagaggctcgccctgatgccttccctgattggtagagtctctgaggctgttgaggttgatccgctttgggcagggcggaaagcagctgctgtgggcatgcggagaacgatcaggtcccgcgtggaaaaaagcagatga

SEQ ID NO: 10219 - RNA, 912 nt, synthetic construct
  source 1..912: mol_type = other RNA
atgtctcacgatagaaatcagagcatcctgtataaagttacatcacctcagatgcttgctgataggctactcataagtcggggggagttgcacgcacttctggctaacgcggatccttacaaacgctggatcgataagaagtccggacgcgcgattcaggaacctcggccaaagctggctaaagtgcatcgacgcattgcaactctgctcacacgtatcgatactccagcctacctgcatagcgccaagaaggggaggtcttacatctccaatgctgccgctcattccgttgacgacggatgcgtcaagattgacgtgcgtagattctatccttcagcgcgggctcaggctgtgtaccacttgtttctggatcggatggcttgtgacggcgacgtagccggaatgcttgcaaagctcctgacggtcgacggtcacctgcccacaggttcgagcgcaagtcccattttgagctattttgcgtatgaggacctgttccacgagcttgccgtcttagccgaggcctccggatgcaagatgactgtgtacgtcgatgacatagtgtttaccggcgcaggcgccacccgaaggctcttattcgaagctagaaaggcaatcgggaaaagacatctacacgggcataagaccaaactgtttcgaccaggccaaccccgcattgtgaccggtgtcgccgtgacaaacaatggccttcgattgccgaaccgccgccaggtgaggatagcagaggaccaaaaactgttcgatgacttgcccctcggacgtgagaaactcattgttgcccggagactcaccggcaggctgttcgaagcctctcagatcgatgcaggctggagagtaagggccgaagccatggccgctctgagagacgatatccagaggaaaatcgggcggtga

SEQ ID NO: 10220 - RNA, 909 nt, synthetic construct
  source 1..909: mol_type = other RNA
atgtcttatccacgcaatcagtccatcttctacaaaattacctctccccaaatgcttgccgatagactccgggtgaccctggacgaactcaatgaactctgtgctgcctccgataattataaaagatggacggacaagaagaccggccggccgattcaggaacctaagcccaaactggacaaaatacacaaacgggtggctgccttactggccaagatggagacacctgattacttgcatagcgccattaaggggaaatcgtatatcacaaacgcctcaggacattctgtgggcacaggatgcgtgaagatagacgtcaggaagttctatcccagtgtcagatcacaggctgtacaccatttctttctcgatcgaatgctgtgtactggcgatgtggcagggatcctgaccaaactactgaccgttgacgggcacctccctacgggctcttcatccagcccaatcctgtcctattttgcctacgaggacatgttcgaggcgttggccgctttggccaaggcgaacggctgcattatgacagtatacgtcgatgatgtggtgttcacaggtaccggggctactaggggtcttttgtacgctgcacgtaaggtctttgcaagttaccggttatacggccacaagaccaaactgttccgcccaggacagcctcgcatcattacaggtgtggccgtcactaaagagggaatgaagctgcccaacaaacgccagcgaggaattgccgatgacctagcaacttttgacagccttccgaacggcagggagaagcttgttgttgctagaaggctgactgggcgtctctttgaggctagccaaatagacccagcatggagaagcaaggcggaagcaatggcagccgaaagggacagtctgcagcggatcatctcctga

SEQ ID NO: 10221 - RNA, 927 nt, synthetic construct
  source 1..927: mol_type = other RNA
atgccagagaggaggagttatccgagggatcagagcaggctttacaaagttaaatcaccagcccagctggcggacatcttctttctgcagcctcacgagctggatcttcttctcgacgccaatgagaattatatccgctggaccgacaaaaagaccggacgagaaatccagcgccccaaaccactgttggaaaaggtccaccggagggccggcatgctgctaagcagaatcgaaactcccgattttctacatagtgcgataaaaggtcgatcttacattagcaacgcacaaagacatatgcccgatgaacccacagctaagattgatgttcgcaagttctacccttccgcccgggcacaggctgtattccacttcttcagagacaggatgttatgcgacggggacgtggccggtatgttggcacggttgctcacggtggacggacaccttgctaccggttcctccgtctctccaatcctgagcttttttgcatatgaagacatgttcacagacattgaggctttggcaattgagagaggatgcgaaatgacgtgttacgtggacgatatggtgtttaccgggcccggcgccacaagacggctgatttacgatataattcagattgtgcggcagtatcggctctggggccataaaactaagctgtttaagcctggccaacctaaggttataactggggtagcagtgatccgcgtgggacaaagactgccgaaccgtcggcagaagaccatcgctgatgaaatggatgtcctgaaatcgactagagatgacgctgagcgactcgccatcatccgtcgcctcctgggccgattatacgaggcggcccaggtggactcttcatggtatgtcacagccgatgctatggccgacgagaagcgcgggttagagcgtagatccgccagggcttga

SEQ ID NO: 10222 - RNA, 1029 nt, synthetic construct
  source 1..1029: mol_type = other RNA
atgaatatgcccaaagctaagtcaagtaaaaaactgaagctggaggagtgcttcctgcacagtgtggcgtctcctgtggaccttgcaaggcggctcctcatagatcttccagacttagagagactcgcaaacgctgaccataggtttaagcaatggacaaccaaaaaagggagaaagattcaggagccggttcgcgaactccaagtcgtgcatggtcgcgtcatgagactactatcagcagtcgaaccacctttatatctgtattccgccgttgcaggccgcagctacattaccaacgcacgtcagcatgtcggagcttatccgaccgtaaagctcgatctgcagaaattcttccccagcgtgaagcgggcagctatccggaatttctttgtcagggagatgaagtgtgccggggacgtggcgagtatcttggcgaagattcttacatgcaacggcgccttacccactggcagcagggcttccagcataatgtccttttacgccttcaaatccatgttcgatgagttgggcgacctggccatcgccaataactgcacaatgaccgtctatgtagacgatatcgccatttcaggtgaaggagctcgacctcggctcctggttaaggctcgtagaatcatcgcccgatacgggctgaagtcgcacaaaactaagttttttcaggcattgcaggcacgcataattaccggggtggtggtagacccagcgggaattgcattgccccactccaggagggttcagatcgaaagaggccttgccgtgctcgcggctgaatgtgacccaaagtggaagctggagatcctgacacgcctggtgtctcgtgtgtacgaggctgcccagattgcccccgctgaatttctggccctggccactgagcttagcaaggcccgggcagagttgctaaaaaaagccagtgaactggctgtggccagcgttgctcctgatcggcgctcccacctgcgactcgtgcactctgatgcctcaacgtctgatagagtcgcctctccttga

SEQ ID NO: 10223 - RNA, 1017 nt, synthetic construct
  source 1..1017: mol_type = other RNA
atgacacactacaggaaatcatatgcgatctcaaattcaccctttttcaagctgtccagtaagaagaaattgtctgaacttttgggagtgagcttacacacgattaccgacattcgccaaagcgggctacacagacagtaccgtatctttaaggataaaaagacgagacgccttatcactgagccagttggcgagcttctgagggtgcacaaaaaaatcttaaagctgttcaaacggatccagccacccgcctacctgcatagcgccataaagaaaagaagctacaagaccaatgccgaggctcatctgcagaaccggaggaccctgaaaatcgacctcaagaaattctttccctccatcaggtttcaccacgtctacggcttctttctgaagaacatgcagtgtagctccgatattgcgaccattcttgcaaatctgtgtaccgcagacaccaaatctcatggcacccacctccctactggttcgtgcataagtcctctgctgtcctattggattaaccagaacctctttgaccaacttcatgatatcacatctcaggaagggtgccatatgacattgtacgtggatgacattactatttccggagaaaaagccacacccgaattcctgaataagatagcaatagccatcaactctcacggttataagtaccacaaagttgcctgctatggcaatggagtagctacaatcactggattgatcgtcaatgaaggcaagctagagctgcctcatgtgagggcccagaagatcagacgtctggaaaaggaattgatggaggccgagaatgatatcgatcggaagagaattctgaacagtttaatgggccggctcactgaggcagagcagattgtgccagcatataccgctaaaaagaacgagatcatgaaactcttcaagaacatttggggggacattgtccagcaacgcgctcaacgagctcagctcaagcgccgaatcaagaaacagccggtgctcgccgacatagctgggggttga

SEQ ID NO: 10224 - RNA, 1014 nt, synthetic construct
  source 1..1014: mol_type = other RNA
atgatgaccagccggagaagcaaaaccccccacagatatgagattgagttcagccccctgtaccgcctgtcaaataagaaaaaacttgccgcactcctgaacgtggacgtgtccattatatcttcaccggataagtctaagctgtgctcacagtataggatctttgtcgacaagaaaaccaagcgatttattacagaaccaatcggagatcttttggctattcaccagcgcttactgaagttcttcagcaggatcgcacctcccgaatacatacacagcgctatcaaaaaacgctcttatctgactaatgccgaggcccaccggaaatcttcaaatatcctcaagatcgatatcaagaagtttttcccctccattaagttccaatgtatctacggttttttcctgaataccctcaagtgttcctctgatatcgctactattttagccaagatctgcacagttcagacaaacaattatggtacgcacctcccaactgggtcctgcatttccccaatcctaagttttttggcaaaccagcaactttttgactccatcaagattatttgcgagaaggaaaaatgtaagttgacactgtatgttgacgacatcaccatcagtggggaaaacgcttcaccagctttactcacgctcattgccatggagatcttcaaacatggctacggataccataagattaagatctacaaggatcagcctgccattataactgggctggtggtctacaacaaaaaagtgtgtctgcctcatgagagagccaagaagattagggagctgatcgatgctctgaaaataagcgtgggccctttgcggcagaagatgctggcgagtcttgtaggcagactaagtgaagcagagcatatagaaagtcaatataaagcgaagcgtgtctccatcatatctcagtaccggaaagagtgggacgaagtagtggccaatcgaaattcgaagtgcaaagttagcaggaacaaaaaattggcaaaaaacaacacctga

SEQ ID NO: 10225 - RNA, 1002 nt, synthetic construct
  source 1..1002: mol_type = other RNA
atgacgaaaaatcccacacggggttccaaaaaatacgacctggagagctccccactgtacaggctaagcaacaaacggaagctggcggatcttctcggcgtggagccatcgaaaattctcggactgaagaagtccgcaatttgctctcagtacaagatattcaaggacaaacagacttctcgctttattaccgaaccccactccgacctgctgctagtgcacagaaggttgctggacctcctcacccgcattcagtgtcctccctatttgcactccgccagaaaaaaacacagttacaagactaacgcggaggcccatcaacacagctctgccgttctgaagatcgacatacgaaaattttttcccagcgtgaaattccattatgtttacgacttcttcaagaatgagatgtcttgcgctcctgatatctccactatcctcgctaaattgtgtacagtgactaccctgaagtttggcattcatctgcctactggttcatgcatcagcccacttctcagctttctggtcaataaggtcatgtttgatgaaatcgacgctctgtgcagagcccacgactgtaagttcacactttacgtggatgatatgacgatttccggcgataaggccagcagagctctgttaacatcgatcgcaatgatcatacatagattcggctatgggtaccacaagatcaagacctaccaccaggtaccgaccgtgatcacagggctcgttgtgtataagggaatgttaaggctgccacatcggagggcaaagctcgttcgtgtggcatcacaagccctggcccaggccgtcagtggcagtatgcgcaagaagctgttagggagtttgataggacgcttgtcagaggctgaacagattaaccctctatataaggtaaggaaggaggtccttctgacacggtataaatctgaatggcagaccatcatggatgagcgagtcgaaaagtcacttaaagtgcgtggaaccaaatctaaatga

SEQ ID NO: 10226 - RNA, 1026 nt, synthetic construct
  source 1..1026: mol_type = other RNA
atgaaaatcaccaaagcgaaggagccgcagcgatatgagattgaaagatcccctctgtacaaactgtctagcaagaggaagctgagtgaattactcgaagttgaattgaccaccctcagttctttggagaaatccgggctgactagccagtacagaatcttcaaggataggaagacaagaagggtgattaccgaacccatagagcagctggccgtcatacacaagcaactgctgaagctgttctcccgcatcgctccaccctcatatgtgcactcggcgattaaaaaacgcagttacaagaccaatgcggagcagcataaggatcccgccaacgtgctgaagattgacgtgaagaagttttttccctctattaagttctcccacatccatgacttctttctgaatggtttatgctgttcaaaagacattgccgtgatcctgtctaaactgtgtactgtccagacggtgaaacacggcgtgcatctgcctactggctcatgcatcagtccaatcttgtcctttttggcaaacaggcgcatgttcgatgccgtgaagaaaatctgcgatcgggagggatgtgtctttacagtctatgtagacgatatcacagtaagcggagtcaacgcaacacgagcactcctcagcgagataactaccgttattcacaagcatggctatcagtatcacaagattaagacttaccatggacaacctgcactcgtgacgggccttgttgtagccgacgggcgtctcagacttccacacgaacgtgccaagaaaatcagagagctatccaaagcccttaaggcactgcgggcttccaaaagcacaccactacggtcaaagatgcttgctagcctcgttggtcgattgtcggaggccgaacacatcaacaaagcttacaaacctcttcggcagaaaattttaagctcttacagcgccgagtggtcaggggtgatcgcttacaggctgcgcaagagtcggacaaagaggctaatgcgcaattgcgtgataaccgcttcttga

SEQ ID NO: 10227 - RNA, 1062 nt, synthetic construct
  source 1..1062: mol_type = other RNA
atgacacagaaaaagaagactggcacaccacagcagcataggtacacaatcgatagatctccactgttcgggttgagctcaaagaaaagactctccgagctcctgggcgtggagctccgtcttatacgagacgtggagaaggcagggctgacacggcagtataagatcttcgtagatcgaaagtctcggagatttatctgccaaccggttgacgaactggagaagatacacagacgcttgctcaaatatctgatacggatagcccccccttcctatgtgcattcagccatcaagtccaggtcttatcggagcaatgccaacgctcacttactgaacggccccgtcttaaagatcgatatcaagaaattcttcccttccatcaaatatgaccgtatccattccttctttttcgataccttcaagtgcgctccagacattgccactattcttgcaaaactgtgtgtcgtgtgctccaagaaccacggagtacatattcccaccggttcatgtctatctccggcaataagctacctggccaatattaaaatgtttgacaggatcgcggaaatttgtgccaaggcaggatgcagatttaccttatacgtggatgatattaccattagtggcgccaaagccaatcatcagctgctcggggaagttgcttcggttatttttcagcgcgggtacaaataccacaaaaccaacgtccagcaaagcggccacgctctgatcacgggtctggtggtgactcctcaaggactgagattgcccttcaagcgagttaagaaaattagggacctatcagagactctctttgctgcgagcgtgctgaatttggcacaggcccggaaacgcgagatccttgctagtctggtgggatgtcttagcgaggcggaacagattgaaagtaggtacaaattgattcgcgcacgcatcgtcgaggagcactgcgacacgtggaacgaaatcgtcaagaacaggaccaaacgcgcagctctcaagcgtcaacaggctacacgggccgtgatccctccagccatgaagaattgtacctctaagtga

SEQ ID NO: 10228 - RNA, 993 nt, synthetic construct
  source 1..993: mol_type = other RNA
atgacaagtagtttacgcaaaccaaagcagtacgagttagagaagtctcccttcttccagttgaagagtaaaaaaaagctcgcagagttgctgaacgtttctctgccttcactcagtcggactcaaatcgagaagttggcttcctgctaccgcattttcgtggatagagagagccgcaggtttattacagagcctgtcggagagctgcaggtaatccatcagcgtctgctccaatattttagcaggatcgcccccccagattaccttcactccgccagaaagaaaaggtcatataagtccaatgctgaacagcatattggcaacactaatgtgctgaagatagacatcaagaagttctttcctagtgtgcaattctcttacatccatgacttctttagcaatcaactgcagtgtgcaccggacattgcggcaatactggcgcgactttgtaccgtgaagacgtccagacacggcgtacacctgcctaccgggtcctgcatctcaccggttctgagctttttagccaacaagcccatgtttgatcgggtcgctgctctttgtgcctctcagaggtgcactttcagcctctatgttgatgatattactatttccggcgctggagccacgcatgccctcttgacatctattgccgtggaaatcaacaacgcaggttatgggttccacaaaatcaaatcgtactttagcgaaccagccgtcgtcacagggctcatagtcacccacgaccgcctgtgccttccccacgaaaggcagaaaaaaatcagggaagtggctgaagcgctgcgtatctcaattgacaccggcatcagagagcggctactggcctcactcgtgggtagactgagcgaggcagaacagatagataccaagtacggaaattaccgaaaaattgtgctagccagatattccgctgactggaagcgagttgtggcacatcggctggctcggatgaaaaaatctgccaagcgcccatga

SEQ ID NO: 10229 - RNA, 1068 nt, synthetic construct
  source 1..1068: mol_type = other RNA
atgaagcctagtcccaggaagccgaaacagtatgaactggagcaatcaccattatacaaactttcctcgaaacgtaagctggcagagttactgcaggtcgacctcgtcactctcggagtgaccgaactggctaagctgacatccaattacagaattttcgtccactgcgagacaggacggtttataactgaacccgtgggcaccctgataccggttcataagcgtcttctgtctttgttcagccgagtagtgccccgggactatatccacagcgccacgaaaaaaaggagttacaaaaccaacgcagagaaacacatcgggaaccagaacatcctcaagatcgatataaagaagttcttcccaagcgtcaggttctgttacgtgcataattttttcgcgaatacgctgaaatgcagccccgaccttgctactatcttagccaagctatgcactgttcggacaaaaaagcatggagttcacctgccaactgggagctgcatcagtcctattctctcttttttggctaatagggacctatttgatagaattgagaagctgtgtattgaggccgactgcacctttacgctctatgtggatgatgttactatctccggtccaaacgcaacccgcgcgctgctgacacgcattgcaatggaaatccacaaaaacgggtatggctaccataagataaaaacctaccacgctgtccccgccatggtgaccgggttgattgtgaccgagggacggctcattctgcctcacgcaagatgtcaaaagatcaggcaatacgcggaagccttagaatgttctgtgggcggccagattcgcgaaaagctgctcgcctcacttgtaggtcgactgtcagaggcagagcagatcgacgctaagtatagaacagccagacaggacgtccttaagagatatgccgtagattggggtcgagtgatggccctccgcattgctagtgccaaacatcgcgctcggaagacagcttctgtgaataaaccttccacaaccttgttggatcagcagggcgacactgtgaggagcatcaccgcctcctcatga

SEQ ID NO: 10230 - RNA, 1035 nt, synthetic construct
  source 1..1035: mol_type = other RNA
atggcaaataaccctacgcacaagaggaaacagtatataattgccaaaagccccttttttcgcctgcattcacgacaagcactggccgaactcttaggaatcacattgccacagatggaagcactggcctcatcaccaagcgatgccctctaccggatgtacgacgatgaagcatcaggccgctatattacagcccctttgcctgagctccagcggatccataaaagaatcgcccgtctgttttccagggtgattcctcccgcataccttcagtccgccaccaaaaagcggagctataaaaccaacgctgctatgcatcggaagaatttgaggattgccaaggttgacatcagacaatactatccctcgattacttttggcgcggtcttcaacttcttcaagaaaaagatggagtgtagtgtggacgtgtctaccgtgttaactaaaatttgcaccgtaagcgctcgaggcagaacacacctgccaaccgggtcctccctgtctcccatcctatcttattgggtgcactccgatctatttaaccgcatcaagctgatttgcgacagtgcagcctgtgtgatgagtctgtacgtcgatgacatcaccgtgagtggaacaaatgctactgcgtctctgatctcaaaaatagaggcagagatagcgaaggccggcctgacaagccacaagattaaggtgttcgatcgcgtcccggcaacagttaccggggtgatcgttcacaaaggtcggctcgctcttccacacgagagggccaaagatataagactcttgagaggaatcatggctaaactcccgcttgccgaagctgaggccgacgcaactctttcccgtctggttggtaagctgaatgaggcagagcagttcgtcaccgggtacggcgccatcaaaaagaatgtcctgagcgaacatgctagcgcctggaaccggattactgcggcgagggtagctaagtctaaggccgccgcccgccgaaagaggttaaaggctgctgctacgagaatcagtaagtcttcctga

SEQ ID NO: 10231 - RNA, 1026 nt, synthetic construct
  source 1..1026: mol_type = other RNA
atggctacaatcttgacgaagagaaaccagtacgccattaccaagagtccctttttccgtctgcactctcgccagacactcgcgaagctgcttggaatcacactgctcgaaatggagacacttgcttccaggccctcaaatgcgctatatcggatgtacgatgacagcgcctctaaaaggcatattactgcaccactccctgaattacagcggatccacaaaaggatcgctcgcctgtttagtagaattattccccctgcgtacctgcagagcgcaacaaagaagaggtcctataagaccaacgcagccatgcatagagacggacaaaaaatagccaaagtggatataaggcaatattaccccagcattacattcggcgccatattcagctttttcaaaaatcgtatgcagtgtagcccagatgttagtaccgtcctgaccaagctttgcactgtttctacgaaggggcggacacacctgccaaccggttccagtctctccccaatcttgagctactgggttcactcagagcttttcgatagaatcaagtctatctgcgatgacctgggctgtaaaatgtcattgtacgtggacgacatcaccatttcgggaaagaatgccgacgcagctctggtgactaagatcgaacgcgagatagagaaaaccggtctgaccgcccacaaaattaagatctttgatgggattccggctactgtgactggcgtggtggtacacaaaggacgcttagcattacctcatgatagggcgaaggatatccgaatgctgagagaggcattgaacaaactccctgaaaaagacgccgactcaacactctctaagctaatcgggaaactgaatgaggccgagcagtttgtggcaggttatggcgccattaaaaagaacatactctcggaccatgctccggtctggacccgcattaccactgtacgagtcgaaaagtccaaggctgctgcccggcggaaacgactgaaggccatcggcacgagcgggtccaagacttcttga

SEQ ID NO: 10232 - RNA, 1020 nt, synthetic construct
  source 1..1020: mol_type = other RNA
atggccaagtcccagactactagaaagcagtacaccaaaaatcggtcgccattttttagactggagagtaggcgcaaactggctaccctgctggctacaactctgaaaagcttagaagagttggccgggttgccttcaaatcagcggtataaaatgttctttgaacaagagagcgggagatacatcaccgagcccataggtgagttacgacgtgtgcacaagagaatagcaaagttactctgcagagtttctccccctgatttcctgcagtcagcgaccaaaggtaggtcatacaaaacaaatgccgaagcacacattggtggacagaatatcatcaagttggacatcaaggagtactatcctagtgtcacatttggagcaatctaccattttttcctcaacaaccttaagtgttctcaggacgtggccacactgcttactaaaatttgtaccgtttctgcgtgcggcagaacccacttgccaaccggatcttccttgtctccaattctgagttactgggcatattcccaccttttcgatgagataaacagcctatgtgccgccaagggatgcacgatgaccctctatatcgacgatattacggtaagtggcccgaatgccgacaagctcctgcttgccgaaatccgcaaccgcatagatgcaactggcctagtcgcccacaagttcaaagcgtcccaggggatgcctatcaaagtaactggcgtgatcgtgctccgggatggcattacactgccccatgaccgggccagggatatccggaaactccaagctgagcttgccacaacgtccccagaagaagtcgaccccactctgagcaagctggttggaaagctcaacgaagcacagcaattcgtggctacatatggggagattaagagggccgtgctgaggcagcattcaaacgcttggaatcgaattgtcaccgagcgcgcaacccaaagccgtagggctatgctgcggcgtcgacgcaagacagctgtgaagaaagctagcggctga

SEQ ID NO: 10233 - RNA, 930 nt, synthetic construct
  source 1..930: mol_type = other RNA
atgtcagagcagccaaaacgctaccctattgaccaatctccactgtattcgctatgcggtaaaggcaagttcgaaacggtgatcggggtgagttgggatgcggtacctgagctctgctccagctccaattatcgagtatggaccaatgagaacggacgggagatccaggccccattcaagggcctagccgctactcacaggaagattgggctgctgctgtcaagaattgacgttcccggatatgtgtattcacaaaaggggcggagctacgcagacaacgccagacagcacctgggacaccatcccgttatcaagaccgacatccaaggattttacccttcgatctctagagcccgggtctacggcatgtttagacaggatttccactgtgctgccgatgtggcagcccgactggctgatatttgtagctaccagggtcttcacctccccacaggcagccccttgagcggaagagtcgctttcttagccgcccgccatctgtttgacgatatagccaagctcgcttccgcgagcgactgcacatttactgtgtacgtcgacgacataacccttagtggggctaatgcaactaagaggctgctggcagaggttcgaaggttgatcgagaaacatggcctgcgctctaagaggggcaaatctaagtcattctctccctcctccccgaagagtgttacaggagtgattttggtgggcgaagatgtgagactccctaattcccgccaccagaaaatctgggaaacccgccgtgcacttctcacagccaccggtgaagagcggttgaaactggaacgtcagctcaaagggagggagcaggaagctaaccaggtgctttgttctccacggaacatagagccgcctagggtcagttggcggttagtcggcctgagccatgctgggatggcatgctga

SEQ ID NO: 10234 - RNA, 903 nt, synthetic construct
  source 1..903: mol_type = other RNA
atgtccgggttccgcaatgctatgccgagcagcgcccctaggaaagcctacgccctcaaccagtcaccacttttcaggctgcggggcaagggacgttttgaggatgtcattggggtgaaatgggaatctgttacagatctattagccgccgagagttttcgtgtgtggaagggccctaaagaccgggagatccaggcgcccatccattggatggccgcggtacataaggtcattgctgatttgctggctagaattgaagtgccagactatgtattctctcagaagggcagaagttacgctgacaatgcccggcaacaccttgggaaccaccccgtgataaagacagacatcaacaagttctacccatccgtgactagggcaatggtgttcaggatgtttgtcagagactttgaatgtgccgccgatgtggccgatcgactggctgatatttgctgttacaggcagctccacctgccaaccggttcccctttgtccgggagagtcgccttttttgccgcgagaggattattcgaagacatcgctaaactggctgtggcatcgggctgcaaactgaccatctatgtggacgacattgcactcagcggcccgaacgcaacaaagcggctgctcggtgaggttcggatgctgatcgcccgccacgggttgaaaagcaagggtaagaagtctgcaactttcgccgctggagctcccaagagtgtcaccggcgcagtaatcgttggtgaggagctgcgactgcccaatgaacgccatcgcaaactccacgagacgcgctcagcatatgttgcggctgatggcgacgaacgagccaaactgggaaggcagcttcggggacgtcagcaagaggccgcacagatactaagacctgtggcacgcgctacctga

SEQ ID NO: 10235 - RNA, 936 nt, synthetic construct
  source 1..936: mol_type = other RNA
atgaagtcaaaaggcaccccagagaggtaccccctgcaccagtctccactgtatcggctaaagggaaaaggccagttcgaaaaaatccttggcgtcgagtggtccgccgtcaatcgcctactcgcagcgggtaactacagagtgtggaagaatgataagggacgggaaatccagcaacctctgggctggttagcccatgttcacggaagaatcgggaaactcttgtccaggattgagctgccggattacctctattcacagaaagggaggtcttatgctgataacgcccgggaacatgttggtggcgtgcctttgattaagaccgacatccacaaattctatcctagtacaacaagacagatggtgtatcgcatgtttgtggtcgactttatgtgtgctgaagatattgctcattgcctcgcggatatatgttgttacagacagcgacatttgcccactggcagcgcgctttctgggcggattgccttctttgccgccaagcacatgttcgacgacatcgctgacttggccaatgacgaacaatgccgtatgacggcatatgtggacgacgtgactatcagcggacccgctgcaacaaagaagctgcttggggaggtgcgaaaagtagtttccaaatacggttacaagacaaagcaacgcaagtcgaagacctacgccgccaccagcgtcaaagtcgtaaccggagcagttgtggtggggcgggaactgagattacccaacgagcgacacaggaagatatggcaaactaagcaggagctgctgaggtgcgagagagaggagaaagccccactgatgagggctctgcgtggacgcctgcaggaagcatcccagattctcaataacctgagcggcgacttacacaatagtgatctcatgcttgggcggagcctgtctaaccgcgatggcagttcatga

SEQ ID NO: 10236 - RNA, 921 nt, synthetic construct
  source 1..921: mol_type = other RNA
atgagtgagagcctttctcgtctgatgcctaagcagtacgccataaaccagagtccactgtataaactagtagggctcaggcagttagagttatgtttaggcatcgacctcgagagattggacaaactcctgaaggatggttcctatcggacttgggttaacgataacgaccgagccattcaacatcccctgggatggctggcgcaagtccactctaagatagctcactacctggcgaaaattgaaactccggactatgtctaccacaagaagggccgctctcacgtgaagaacgcttcagagcatacaggttaccatctggtagccaagaccgatattagcaactactatcccagcatcacaagagcaatgctaaaatcgatgtttgtgaagaagttcaagtgcgccctggatgtggctgggatccttgcagacatctgcacctaccagcgcacccacttggctaccggtagtggcgtcagcggctacctcgcattctgggcaagtaaagacctgtttgacgctgtctatgaactgtcccgggccagaggatgtgtttttacattgtatgtggacgatctcaccatttccggaaatgctgccagcaagaagttgctgactgaggtgcgggccattgtcaagaggaatggccttaagaccaaggaaactaaaagcaaaactttcgctgcccacgccacgaaaatggttacaggggtggtgcttaaggggaatgaatctctgctctctaataaacgacataaggaaatcgctgataaccgcatcgcaattgcaaatacaggcaatgcgaatatcaaggccaccctgcagaaatccctcaaaggaaggctgatggcagccaaacagataatcgattccaacgagatcaaaacagtgacgtcatcagaccttatttactcatga

SEQ ID NO: 10237 - RNA, 915 nt, synthetic construct
  source 1..915: mol_type = other RNA
atgcagtccaagaaaacgcctgaccgaccttatccccttgcgtcaagcccattgtacggaattcgggggaaggggcaattcgagcgcgccataggcttaacctgggaccagacagatagattactgcataggaggtattaccgggtttggacaaccaagaaggacagggagattcaacagccactctacgagctggaaaagctgcatgcccggatcgccaacttgctggcaagaatagagatgcctagttatgtgttcagtcgcagggggcggtcttacgtggagaatgctgacagacacaagggcctgtcccccctcatcaagaccgatctcactaagttttatccgtccacaagctggccgatggtgtttagactgctagtatctcgctttaactgcgccaaagatgtcgcacacagactcgcagacctgtgttgctaccagcagaaacacctgccaaccggatctgcattgtcaggctatctcgcattcttcgctgcacagccaatgttcgaccggatcgccgatatccttgggcgacacggatgtgagatgactctttttgtagatgatctgaccgcctcaggcgcgggtgctacaaaacacgctctggaggaagtcagggccgaaattcgtcaccatggcttcgctactagtgaagcaaaatccaaagtctaccgcgctgctgcccctaaactggtgacaggtgcaattgttacccccacgcgcctgatgcttcccaacaagcagcatctgaagatttgggccgcccgtcggagcttgcctgttctacctaaaatcatgcgtgcggccgctcttagagctctccgaggtaggatccagcaagcccatcaggtgctcaattacagcggccccacttttgaattagccgcgcccgtggagccatcgggatga

SEQ ID NO: 10238 - RNA, 918 nt, synthetic construct
  source 1..918: mol_type = other RNA
atgagcgcacggccaacctatccactggaccagtctcccctgttccggctcccctcaaagagacgtgccgctgaggtcctgggtatagacttgcaccaaatagagcagctggtaggcgaacgcaactatcgggtctttgtcaatgcaaagggtcgcaccattcagcatcctgtgggagagctggcgggcgtgcataagaggattgcgtccctgcttggccgacttgacgtgccctcgtatgtgcgctcagtgaaaggcgaaagttacgtgagcaacgctgggagtcacgttgggaacgggccgctgatcaaaacggatatcgcccagttttatcccgggacaaacttcagtgcagtgtacggatttttccggagagacatggggtgcgcacctgacgtcgctcacttactggctcgcctgtgttgtttccgccagcgccacctacctacaggaagctacctctccggcccactcgcctttttcgctcatagagccatgttcgatcagatctactgccttgctcaggataggggttgcgtaatgacatgttacgtggatgatatcgtcatctctggaccaggagcctcaaaggaactcttgtacagggtgcgagggctgattcgtgctgcaggtcggacctccaaagatgacaagtccaagacctttccggcacataagcctaaaactgttactggagtcatcgtgacttctgacgccttgcgtctacccaatagccggcacaaacaaattcacgaggcaagggccgcgattagagccgctggtggcgatggagaacagatgagccttagagcctctctgcgagggaggttacaagaggccggccagattgccaattggaacgttaggaatcctggcggcggcgtactcgtgagaggggttgttccagacgtgtcctga

SEQ ID NO: 10239 - RNA, 1026 nt, synthetic construct
  source 1..1026: mol_type = other RNA
atggttaagcaaatcgatcgctacccactggagaggagccccttgtacaacgcgaagagtctgaagaagatctcgtgtctgctaagcctgtctagcttgaaggtgaacaaaaatgacagatccaaacccatgctccagaagctgtataagcttacaccgactgacctggacaattttgctgcccagcagaactatactataaaggagctgattgacaaaaaggggaagagtcggtcaaccgaaatccccgcgatcgatctgaagtggctccattacagactggagcacttgctgaaaaaaattgagccacctccttaccttttctcagcaattaaaggacggagctgcaaggataacgctagaatgcatgccaccaatacgcagctgttcaagattgacatcaaaaccttctacccaaacatcaacttcgggaaggtctataatttttatcggcacatcctccattgtgaacaccacattgccacaatcctgacaaaaatttcaacgtacaatggccatttgccaaccggttcccccttatcacccattttatccttttacgcctgtaagccgatgtttgatgaaatttatcagcttgctctcgaacacaattgcgtcatgacactatacgttgatgacatctgcgtgtccggagataaagctaccaaagctctgctgtggaagatcaaacagataatacataggtacgggctcaggtatcacaaggtgaaattttacttccagaaacagccaaaaaccgtgaccggcgtcatagtaacagagaacagcattaagctccctaaccgccgtcaccaggcaattactgaacgaataacctatatccagtctccttctatcactgcaaaggagaaacgacaagccaataattctctgctcggccagcttaacgaggcaatgcaattagagcctaaactggccaagacaaaagccttgctaatccagcaaggtgtgcttaagccccacatgtccctccctcgcagtaacagcaagagaaagactaaatga

SEQ ID NO: 10240 - RNA, 954 nt, synthetic construct
  source 1..954: mol_type = other RNA
atgacctcaaagtacagcctcagtcaatctccgctctttaaattgaagtctaaaaagaagctggcagatttactgggtcagtcactgggcgatttacagtccctggccaaatcgaacgataactataacgtctataccctaagtcctaagagcaagctagaccacccctactttctcagaaaggagcgacaggtgcaggaggtgcggcctcatctgaagaatgtacacgagcgcatcttgaatctgctgaaaagagtacaaacccctgactacctgcactctgcaacaaaaggaaaatcctaccgtagcaatgctgaagcgcatttaagcaaggacgtcatttacacagtcgatattaaatccttctacgagtcagtgacgttcggcaggatataccatttctttcactccacacttaaatgttcccccgacatatcccacctgcttaccaggttgtgcgcgtataaacgcaatctgccaaccggcagttgcatctctccactgctgtctttttggactaatgttacaatgttccaggaactggacctgtttagtaagaccaacggcttgaccatgacgctctatgtggatgatctgactttcagcgggacagacctcccaaaaaagacttgcttcaagatcgacaagatcatagccagctatggatataaaccccataagcaacagttgtacatcaacaagaaggccaaaattgttacaggccttgccctctgtggagctagacttgatatccctaacaagagacgtggtaagattcgggtgctcattgaggcaattgccagggaacgcgacgcagaaaagaaagagaaactatgcaactcacttgtggggatgacttatgaagctgcccaatttaatcgagggtacgccaggctgatcgctaaacagatccggaagaagtgtccctgtactcggcagcagattaatctctga

SEQ ID NO: 10241 - RNA, 954 nt, synthetic construct
  source 1..954: mol_type = other RNA
atgaaaaccaaatactccctgtcccaatcacctttttacaagctctccacgaagaagaaactcgctcaattactggggcaaccactggctgatctgcaggccttggcgaagtcaaacggtaattacaacgtctataccctgctgcccaaaagcaagctcagccatccctattttgtgaagaaagagagacaggtccaggaagtgcgcccacatcttaaaaccgttcacactagaattcttaacctactcaagcgtattaagacccctacatacttgcactcagctacgaagggtaagtcttacaaaactaatgctgagtcgcatctgaataggaatgccctttacaaggtcgacatcaaatctttctatgagagcataagtttcggcagaatctatcacttcttccacgaaatcatgaagtgcaacgaagacgtggcccatctcttgacccgactgtgtgcatatcagcgaaatttaccaacaggcagctgcattagccctctcctgagttactggaccaacgtaacaatgttcgacgacctctacatatttagtagggcacacggcctgactatgacactgtatgtggacgatcttactttctccggaaacgagatttctaaaaggacctgttttgagatcgacaaaattatagccggatatgggtacaaaccgcataagcagaaacagtactcaaccaagaaaactaaaatcgttacagggttggcactttgcaatgatcgcctggatatccccaataaacggaggggcaagatcagagtgttgctggaggccatatcccaagaaaaggatgccgcgaagaaggagaagttatgcaactctctagtaggaatgacttatgaagcagctcagtttaacctgcgctacgcccagatcattgcaaaaaaggtgcggaagaagtgtccctgtgcccggcagcacatcacaatttga

SEQ ID NO: 10242 - RNA, 966 nt, synthetic construct
  source 1..966: mol_type = other RNA
atgtctagggaccggtacgccatcgaccagtctccgctgttcaaactaaagaccaagaaaaagctcgcaacactgctcgactccagcgtgagggaattacaggcattatctgtcagcagtgatagctatagagtgtttgacttgcccgctgagtccctggttcagcaccccctgtttgcccgaaaatcaagaaagattcagcagctgaaacctgaactggatgcgatccacaggactcttcataagtacctcagccgcatcaacgtgcctgactacctgcatagcgctgtgaaatgtaagagctacgcaacaaacgccaagactcactccggctgtctctatctgtatcgtgtggatatcaaaaagttttacgagtccgtgaactggagaacggtctaccggttcttttataaaaccctggactgcgctccagatgtatccgccctcctaaccaatatctgctgctacgaggacaagctgcctacgggtagttgcctgagtccaattctttccttctttgtgaaccaagagatgttcgatgaactttatgagtacgccagtcagcgggatttaaccatgaccgcctatgtggacgacattgttttctcaggacgcgaatttcaccgcattaatgcgcacagcatccgagggataatcaattcttatgggtatgagtgtcataaagagcggatatgtcccccacgcaaatcaaagattgtcactggcctgtctgttacccgtacaggcgtagccataccccataagagaatggctaaggccagggtccttttgcaagaattggccaaaaggatgcggcagtcacataaggaaaagctctgtgcatcgctcacaggtatgatcactgagatgtctcaattcgatcgagcaaaagctaaatacctggctactctgggaaagaagtactgcagaacaattcagaatattcacttcaagttgtgcaaatga

SEQ ID NO: 10243 - RNA, 906 nt, synthetic construct
  source 1..906: mol_type = other RNA
atgcagaagaaaagacaggggaattatccactgaatcagtcccccctttataaactatgtaacaagcggaaccttgcagctgagttcaacctgacactgcgcgagctggactccttactcaaacgccaaaacaattaccgggcttttttcctgacccaaggtgaaaaaaagcggccagttgaagcgcccaagcccatcatcgaacgcgtgcacaggagactgtttcagctcctcacgcgtatcaccccgcctgagtacctgcatagtggagttcgtgggaggtcctacgtatcgaatgccgagcagcataggaaaaaccctgtgctgtacaagttagatatcgtgaagttctatcccagcacaaagcaatggcacgcctttgaattctttaggtccactatgaagtgtagcagagatgtcgccggccttttagctaaaattgtcactgtagatggacacctgcctactggcagttgcctctctcagataatggcattctacgcacactttgatatgtttgaggcattgtatgggctcgccacatcttacaacctggtgatgacatgctacgtcgacgacattgtcttcagcggaaataagattcccaaatctttccagctcgaagccaaaaaaataatacagagctcaggcttgctctcacatccacgcaaggagaaattgttttttggtgagaagcctcggattgtcaccggcgtggtgatttcccagtctcagctgaaaattccgaatagacaacacctgatgatcaaggaggctctattcgaattgccaacccttgtggccgactcacctgagcgagagaagctgtataggcaggtggttggccgaatcgttagcgcgagtcagatcgaaccaaagttcttcaagcataagaaagtgaagtga

SEQ ID NO: 10244 - RNA, 924 nt, synthetic construct
  source 1..924: mol_type = other RNA
atgaaaaaggaggagaagaaaaggggcaattatgccctgaatcagtcccctctctttaagctacgctctcagaggagactggcccaactgctgcgtacccctcttaatgatatctatgggttgctgaacactggtaacaactacagagtgtttccacagggaaaccggacttgccatgaccccaagccaaagatgaaaggcatacataaacgcctccagattcttctgaatcgcattgctccccccgagtacttgcattcagctacgaaaggtcggagctacgtcaccaacgctgccgcgcacttgggcaatgacgttctccacaaactcgatatccgaaagtttttcgacagtacaacctataagcatgtccacgacttttttaagaacaccatgcagtgctccgcagacgttgctgctctcctctcccgtatcacaacatacgatgataggctgcccactgggagccctatctcgccaattctagcttacttcgcacacaaatctctgttcgaccagataaatcaagaggccacggccaccaacgtgatgatgacttgttatgtagatgacctgtccttctcaggctctaccgtgccgaaagcagtcctgagaaaggcgaaaaaagggattattcagagaggacttgagtaccataaggaaaagcggttccagaagggagacacaaaaatcgtgacaggagtggccttacgcgacgagcaaatgttactgcccaataagagacacaaaaagattcacgaagaaaaacaaaggagtcttgagatcgatgatgccaagaagaagcgggaaatcattcacaaattgataagccagactggcgaggccgcacgaatcgaacctagccagttcgaacctctgaagcaggcactgatgcaggtgaggcggaacttaccaaagccgtga

SEQ ID NO: 10245 - RNA, 1068 nt, synthetic construct
  source 1..1068: mol_type = other RNA
atggcaaagaccctcaagctccacgaaagtccactgtacaggctgacaagtaagaagaaactggccgcccttttcggagtgaaagtggccgatattaaatttctgaggaagctcgacgggaattatagagtgtggcccctaaagcagaaacaccaagatgtgctggccggcatgcccgtaagcgataaagtgcggatggtgcagcagcctaagcctactctggatgcctttcagcggcgtcttgctaagttcctgggcgctatcgaaaaacctgactatgtgtactcggcaacaaaaaagcgctcttacctcgagaacgctctggtccatcgccacagtcagccggctttgaaggtggatatcagatctttctatccttctgtgaagcgcagggccgtcaaatctttctttgaggaacagttgggctgtgcagaggacgttgcacatgtacttagcgagttgtgttgccatgaaggcaagctaccaaccgggtccgcgctgtcccctgtcttaagctacttctcatgcgcccccatgttcgccaggatcgcagctctggccgacgccaaggggttacgatttaccctgtacgttgatgacatggtttttagtgggaccggtctggacgacaaattcttggctcaagtactgaacgagctcaatcgggaaggatatagcggacacaaagtccgattttataaggccaggcggccgaaagttattactggtgcggtcgtctggccatcacgtgtcgatgtgccccacaagagacgatggaagatgaggctctatgagcgtgctcttaaggtggccaaacctgaggacaaggcgatcctgggacgcgcgctgttagggcagtacagagagtccagccggataaacccatccttcaaggtggcagctagcagactccaaaaatttatggacgatatgggaggtaagacgaaggcagccaaaccccggaaacgacccaggggcagatcctcctactcactattccttagccgcatttcacggttgagagctgaagtggccgctgttcgcacagtagcaggctctgccccatga

SEQ ID NO: 10246 - RNA, 1077 nt, synthetic construct
  source 1..1077: mol_type = other RNA
atggtaaaaaactcaggatatagcatcgatcagtccccactatttaggctctccagcaagaaaaagttagctgggctactcggcgtgtctgtcaagtacctccacagcattctgacccttgacaactatagaatctgggaggcgccccaaaagtaccaggacattctggctgggtttcctcctccatctaaaacacgcaaaattcaggagcccaagcagttgttgctccgcctccacaagaagttatcaattttcctgtcaaggatcaagaaacctgacttcgtttattcggctacaaagggtaggtcttacgtcgataatgcccgggaacacatgaatttcggcagagcaatcaaaatcgacatcaaggacttttaccccagtgtaaggcgaaaactggtgcgcgattttttcattaacgacatgcaatgcgcacccgacatcgcctatgtgctgtcactgctgtgttgtgtgaaggattccctgccgactggatcccctctgagcccagtgttgtcatacttcgcctgtagtcgcctgttttgcaaaatcgcccatatggctgccgttaagaatctgaagttcaccctttacgtggatgatatggtgttctctggcgcgaatgccacacggagcttctgctaccaggttgtcaaggaacttgcttataatggtttcataggtcataagatcacaaggttttccagcagacaggtgaaggtgatcactggagtggccgtatggcctcacaaaatagggataccccataaaaggcagaaacgcattcggttctttgagcgtgcatttaaactgaacaacaatccggatgagattaagattttgggcgggaccctgatcggccaatatcgagaggccgaacggctccagcccggatctagcatgcgagcaagaccaatccaggaacggcttaacctcattaatttgcagtgcgtttccgtcagtccagtcactaaaaaacgtcggagacgtagattaagcagtaagctttctaagggcatcatagacacgctgcaaacccagaagaacaaaaagaaaaacgacatttccagtgagtga

SEQ ID NO: 10247 - RNA, 1065 nt, synthetic construct
  source 1..1065: mol_type = other RNA
atgatgcacagcctctgctatccactagatcagagccccctttacatggctggcagtaaagtacggctgtgtgagttgctgggcatcaccaccaaggatctgaggctcttgctggctctcgagaactaccgggagtggaccgcaaagcagaagctggccgacaaactcgccaacctcccggcgaagtcccgaaacattgaggagcctaaaccactgctgcgcctcctgcacaaacgcatagcgttgttacttgacaaaatcgaaaagcccgatttcctatactctgcacgcaagggctgttcatatttttccaacgctttacagcatcagaggtcagagggggcggtccgtgttgacattaagtctttttatccctccgttcgacagcgcatggtgaaagaattctttgagagtcaaatgcggatgcctgccgacgtagcacatactcttgccaagctctgctgtcacgatgggaaactacctactggctctcctctttcaccaatcctgtcctacttcgcctgcagcccctttttcagtcgggttgccgctatcgctgaccggctgggattgcagttcacactttacgttgatgatatggtctttagcgggaaaggggctaatagagctctggccgaccagattaaacgcgaactggcgggcgtggccctgattggacacaaagtctcgtatttcccagcaggaggcgccaaggtgatcaccggggcagctgtgtttcccgacagaattgaagtgccgttcaagcgacaacgcagaatcaggaagttcgaggaagcctttgccaagacgacaaatgtggcaactaggggagcgggtacaccttgggcagcttggggccctggagcaggaagacctggtccaggtccacgtgctaggcccgtggaggtgagattggcagccctggaggcacgtacaccggaaatccacggcaaggccaatgccaagaggcgaaagaaacccgtcgggaaatctataatgagagaaatagccagaaaggccgccgtgctgcgggagcataggttagaagctgacgtctgcagctga

SEQ ID NO: 10248 - RNA, 942 nt, synthetic construct
  source 1..942: mol_type = other RNA
atggtcgagcctcgaacatatccgctgcaacaatctccattatataggctgacctctaagaagagactggccttactgctgggtatctcagcctccgagctgaagctgctgtgtgatctccaagattacaactttaaaagatgggaactcggtcagcgcgagagagataaactgatcggtctgcccgctaaggcgaaaaaaaggagtattcagcagcccaaaaccgccttgcatgccgtgcacaagcgtattgccctcttgttgggccggatagaaaaacccgctttcgtgtattctgccacaaaacggaggtcctacgttgataatgctatccagcaccagagagacgaaccatgcgtgaaagtggacgtgaaggagttttacagacatgtgaagttcggacgcgtgaggcgattcttcctagagaatcttcagtgcgccgacgacgtggcacatgttctagcgatcctgtgttgtgtcgacggggccttggcaactgggagtgcggtgagccctgtgctctcgtattttgcctgcgcttccatgttcgccgagatcgaggactttgctcagcggcgaaggctggttttcacactctatgtcgacgatatggtcttctcaggagctgctgctaaccgggctttcgcagatggcgtaagataccttctcaagggaaaggggttcgtcggccacaaagtcacctgctaccgcgcccacgacgttaaggtggtcacgggcgtagcagtacgagccggctttgtggatctcccttttagccggcaggggcggatacgtcgcactgaagtggcatttgcgaagagcaccgacccaaacgagctgcgcattttaggaagagcccttctgggacagtacagggaggcagaaaggatccgtcctggcattaaggcaaaggcagctcccgttgaagcccggcttcgctga

SEQ ID NO: 10249 - RNA, 1119 nt, synthetic construct
  source 1..1119: mol_type = other RNA
atggctaatgcccgtgcataccctctgacgagctcgcccttttacagactagcttcaaaacagaaactggccgctattctgggcgtgagtctcagagatctccggctgcttctgaagcagccagacaactatcgcctctgggatacaagacgccgacgtcgggacgaactggtggggatcccacacaaagctcgagccattcagcagcccaagcctctgctggcgatcatccacaaaagattggcaattctgatcggccggatcgagaaacctgactatgtgtactctgccaccaaggcccggagctacttcgataacgccaggcctcatgccattggggaacccacggtcaagatagatatcaagaacttctacagtaacgttaccaggcggttcgttcgggatttcttcgagcgtcgcttacagtgttcccccgacgtcgcacacgtgctgaccgaactgtgctgtatcacaaccgcatcaagttcagcgctcccaaccgggtccgctgtatctccggtgctgagtttctttgcctgctctgagatgtttagaagaattgcggagatagctaaggaccatggtttgattttcactctttacgtggatgacatggtcttctccggctccaaggcaaacagacatttcacttccaaggtggtgcacgaattggccaaaaatggatttgtcggccataaaatcacacactttcggggggatgccactaaagtggttaccggagtagcggtatctgctggccgcgtggaccttccgtttcggaggcaaagaaaaatccgccagtttgaggaggccttttgggcagccacaaatcctgaggacatatcactgctcggtgctaccctcctcggccaatatcgagaagctgagcgcattaagccaggtactaagcttcgcgcattggcagttgccgcccgactggaaaagcttgggctatccaacggactgcctccatctgtgaagaaaaggaggggatatcccggaaagaggttagatgcaaagcgattcgacaggttgaggagcgctgtcagcctaaatcccagcaccactagcggaggtccagagacattagttaatacaggcgtcgtgatggccgcttga

SEQ ID NO: 10250 - RNA, 1107 nt, synthetic construct
  source 1..1107: mol_type = other RNA
atgaaggcccccaaacgatacccctatcaccagagccccctttacgctttaacctccaagaggaggctcgccgatatcctgggtgtgccactgaaggacctggttttcctggcctctcttaaagaccataattaccaggtttggccgctgaaacagaaacgtagagatcagctcgcgggcatcaagcctcctgaaaaatcccgatttgtccagcagcccatgcccttgatgaggctacttcacgatcgtatcgcctcacttctcgggaagattgagaaaccgcagttcgtgttctccgcaactaagggacgcagttatctggacaatgccctgcagcacagggacaacatcgcgcagccagcgttcaaggtcgatataagaagcttctaccctgccgtgaaatcacaatgggttcgccgcttcttcgaggtcgacatgaaatgtgcaccagatgtggcccggtttctcgcccggctgtgctgtgtcaacggagcattgccgacaggcagtccaatatcccctacacttagctactttgcttgcgctccaatttttcgatggatggcagaatttgccgagtccaatggcttggtgttcacactctatgtggacgacatgttcttttctggtgctaaggctagtaaggacctctcaaagctggtgctgggtcatctggccgcgaacgggttccgaggccacaaagttgctcattttagagccggccaaccccgtgtaatcactggcgctgccatcagccaggacggagtctcgatcccctttaagcggcaaatgcggattcgcctgtacgagagagccttcgcatctacaaacgaccctgaggcaattcaaacgttaggaaaagctctgttgggacaatatagggaaggggaaaggctgcagagggggagtagagagagggccaagcctatacaggatcgcatggatgctattaacgcagtacggtttgaggaattaactcaggtgcaaccaaaacggaagaagagagggcccctaagcaccgctgcaatgaaaaatcacgtgcagaagctcagagagcggcgctctggccagttgcatcctgtgaccgataccccacagtggcagtga

SEQ ID NO: 10251 - RNA, 969 nt, synthetic construct
  source 1..969: mol_type = other RNA
atgatctccaaaaagcagtacaataaagaccaatctccactgtactctataaaaagtaagagacggctagccaggattctggaaacagacgctaaaaccattatccgcctggccagtgacacttcaaagcactataaactgtgggaaaccaagcagaagcccagagataaaatctgcaacatcacgcacacacctagaaaaatccaggagccaaaagaggacctgctgaagatccataaaaagattgctaagttcctgagcaggatcaaaaaggaggaattcgtatatagtgcaacaaaagggaggtcgtacctcaataatgctgaattccataaggaccgtattcatgagcctagctttaaggtcgatattgagaagttctacccttctgtcaaaattaagaaggtgcacaacttctttcagaacgaaatgaaatgcgcaccagatatagcccgcttgctcgccaaaatctgctgtatccacggcgcgctacctaccggatcccccatctccccgactctgagctattttgcatgtaaggatatgttcagctggattggcaatcttgccaggtcaaataatctctgttttagcctgtatgttgacgatatgtttttctccggggaggcagctagccaagagctgagaaacaaagtgataacacacctgaaaaagaatgacttgcgtggacacaagatttcccatttttcagccaacaagactcgggtgattacaggagtggctatcacgcccaaaggccttagaattaccaacaagcgacataagaagatacggatctacagtaacgccttcttccgctcaaaatctcccgataatatccagaccttagggaagactttacttggtcagtaccgggaagcgagccgagttgagccacacctcttgcaacgcaccggtaaggtgcagtctaggatggacctctttaaggataagtcccagaacatgtga

SEQ ID NO: 10252 - RNA, 1131 nt, synthetic construct
  source 1..1131: mol_type = other RNA
atgaggccactcggccggttccttttcatgctgcagggtgaacaagagatggttcggaaaaaggaggagaagaggtacagcattacctctagtcccctgtatggcctctctagcaaaaagaaattcgccgaacttctcaagatcgatctggccgacctgagatttctggccaagttcggggattccaactttaaggtatggtccactgcccagaagttggtggatgaagtggcagggctgcctgccaaaaaatccagggtcgtacagcagcccaaaattgtgctctcagtggtccaccggcggatcgctgagtatttatcgcgcatcgagcgtcctgaatttcttcacagtgctacaaaaggaagatcatacctgaccaatgccatggtacatgcttggaacatgccggggtgcaagatagacatcaaggagttttacccatctgtgaaaaggaatcttgttaagtcattctttgagaatcgcctgaaatgtacacatgacgtggcgagcttcgctgctgacctttgcacctacaatggcgccttgcccacgggcagcgctgtttctccaatactgagctttttcgcctgccttgagatgttcgaacggattgatctgctcgcacgccaaagagatctgagattttctctatatgtggacgacatgttcttctccggtgacaaggcagacaaggggatggccaagtcggtcgtggatctgttgtcccgccatggatttgtggggcacaaagttgtgtgttttagtgctaacgaaaccaaactaattacaggagtcgctatcaacggctgtgaaacttccatcccaaacgcacgacaaaataagatgaggttgttctcacgtgcattacgccgagagcgcaaccgagaaagagcaattctcctggcccaggcgctggttggtcagtttagggaggccgagcggctacagcctggaacaaaagcgagggcactgcccttcgaacgacgcctcataaagctcaagggcgcagagaagaaaactgtcagcgtcgtgcgtagaagaagacggaggagtcgaccgaaagtcttgacgagcaccctgctgagggccattgccttaatgcgggcggctcctaagatcgtgaatgtgtga

SEQ ID NO: 10253 - RNA, 954 nt, synthetic construct
  source 1..954: mol_type = other RNA
atgcccaatgggtactccattaaccagagcaggctgttcaaattagccaacaaacgcaagctcgccggtattcttgggatcactattaaagaactgagtctgtgcgcaaataccgcaaacaactaccggctgtggtcaactaagtccaagtatccgtctaagctgcagatcctcagccacaaaccccgggatattcaggagcctattggcctgctgcgacggatacaagatagactgagtgatttattggtgagaattgaaacccctgaatatctgctaagcgcaaagaagggcggctcctatgtgaagaatgcgtccctacatatggggtttggacaggtgattcgcatcgacataaagggattctacaaaaacgcttccgaggtgttcgtgttccgttttttttggcatgacctgcaatgctctcaggacattgccagaattctcacagacctcatatgttggaatggttgccttcccacgggaagtcccgtttcaccaattatctcattttttgcataccgacctatgttcgacgaacttcacgctcttgctttagctatcaatgcagtcatgacagtttggatcgatgatatcgtgttcagcggagacaacgtaaatggcaccttgatcccaaaagcgaagatcgtgatcaagaaatctgggttgcaggggcacaagatctctgtcttcaataggggccaggcctcagtcgtaaccggagttgccatcacagctgacggccagctgcatatacctaacaagcgctataggaaaatccgggctctggagaacgagtattgtgccgcatcgaaccaagctgacagagccatatacggtaaagccctgatcggtcaatactttgaggggagccagttggatccaggcctcgcgaagaaagccaaggtcctccaggccgatatgaaatgtaagaacagcaatcacccaaggtga

SEQ ID NO: 10254 - RNA, 936 nt, synthetic construct
  source 1..936: mol_type = other RNA
atgtctaaagttctgaggaaatcatacccagccgctcaatcacctctgtttcgtctcagaagcaaagcccgattggctgagctcttggacgagactcccagacgggtcagagaactgatcacagacaagaattattgcgagtggttcaccaaagcaaagtatcccgactctacacacccagctctggtgcataaaccccgtgcaattcagcagccgctaggtgctttagatatggcgcaaaggcgactcaactcactactgtctcggattgaacttcccgattatctccacagtgctagaaaggggagatcttaccggaccaatgcagccgcccattccagtgctggacgagcgataaaggttgacatacgccaattttaccggagcatcaacgacagttacatccatgcattctttcgggacgtcatggaatgttctcctgacgtgacccacatcttgacagagttagcatcatttgaacgatatctgcctactggaagcagcctcagcccaatcgtctccttcttcgcctattggcccatgttcgataagctgaactccgttgccagtagcgtaggcgctcagatgacagtgtatgtggacgatgtggtgattagcggtcctggcgtctcggggtcacttattcctatttgcaagcgcataatgaaggatcacgggctgaggggccataaagtggcttactaccactccggcaagactagggtggtgaccggggttgccgtctctcccagaggactgtccattccaaataaaaggctgatgaagatccgggcacttcgccaggagatggatgccgccgtagatccggcaaccaaggccttgtacaaacaggccgtgctgggccagcttagggaaggaagtccactcgacccttcctttcgcacgtactcccaggccatcgagcgcatggcgtga

SEQ ID NO: 10255 - RNA, 954 nt, synthetic construct
  source 1..954: mol_type = other RNA
atgagtaccgctaaaggataccagctggatcagagccccttatataagctagagtctaagcgaaagctcgcaaagctcctgttctgggacctttcgaggttacaagctctcgccaatagaactgacaattaccgttcaaaaaagaccatgcatgcaaacaaggaaaggagcttagaggttccaaaacctgctctagaaaacgtgcaacgccggatataccagctgttggatcggattgagaagccagactacctgcacagcggacggaagcagcggtcatacatcactaacgcccaagtccatgccggtgccgtctggctgatcaaattggacatcaaaaagttctacgcagccgtgagctcagcgagggtgtaccgattttttcaggacgtgatgaggtgcagccccgatgtcgcctcccttttggccaaactgtgcacagcaaggggccacctggccatcgggtctagagtgtctcagctgctggctttctttagtgctaaacctatgtttgacgagctgcacgccagagccctggagtattccatcaaggacacttactatgtggacgatctgacctggtctggcacccgggcaacagctggctttctgtgggaagtaaagaagattgtacaccgccatggattcgagtatcatagagccaggctgtatgcgccaaataacccgaaacttgtcacaggggtgcagatcattggggatcggattgctgttcccccctatcgcgatagagaactctgggatgctatacgcacactgaagaagccttccgcctgtacgaccttgaaagttgcagagactcttttgtccaaagctgccgcgtatgcacaggtggaagaccgtttccagctccaagtccgccagctcagagcgctccgagcatccatgaaacttaccgccagtacggaccacattgatggccctcagggtgtgtga

SEQ ID NO: 10256 - RNA, 915 nt, synthetic construct
  source 1..915: mol_type = other RNA
atgcccgcttcacgatcttacccgattaatgaaagccccctgtacaagatccgttctcggcggaggcttgctgcagtcctgttttccaatctgcctaagttggaggcccttgccaaccagacagataactacagacgctttgatgtggtttacgctggaaaaaaacgatcagtggaactccccaagccggccttagcccgcttgcatcggaggatattccagatcctgaattgcatcgaaaagcctgactacctgcacagtggctgcaaacagagaagctacatcaccaatgcacgcgtgcatgttggcttggtccccctcgtgaagctcgatatcaaaaagttttatgcctccgtgtccagtgcgcacgtctatcgcttctttaactccggtctacagtgctccccagacgtaagtggccttctggcaaggctctgtactgccaacgggcatctgcctatcggtagctctgctagccagctgctcgcttttttttctgccaagccaatgttcgacgaactccaccggcactcagtgcgccacgaggttagggacagctactatgtagacgatctgacttggtcaggggtaaatgcgacccctcggttcctttgggcagccaagcagattgttcacagacatggattccgttatcattcggatagagtgtataccgctagtcagcccaaaattgtcaccggcgtgctgatagctggagacaggatcgctgtgcagccaagacgggagctggagctgtggaacacgattaatacactatgtatgcaagatccagccaagaggttagagacaattaacagcttgattgggaaagccgtggccaacgcgcagatagacgagagattcctggcacgcgtccgtcaactccgagcatataagatcaaaatgcaattatga

SEQ ID NO: 10257 - RNA, 942 nt, synthetic construct
  source 1..942: mol_type = other RNA
atgaaaagctatgcgctcaatcagtgccctctctttaagatggctagtaggcggaagcttgccagcctactgggatttgacgccggggtgcttcagactctagctaacaggaccaccaactacctgtgctttgacatcgcgcagggctccaaaaagagaagagtggaggttcccaagcgtgctttggagagagtacaccggcgcttgttcgccctcttggaacgcatagagaagcctgattatctgcactcgggaagaaagaagagaagctacattacaaacgcccaagtgcacaccggtctggccccactcgtgaaactcgacctaaagaagttctatccgtcagtggcctcctctaggatctatcggttcttcaacgaggtattactgtgctcctgtgacgttgcagctattctgactaaattgtgtaccgtggatggacatctccctactgggtcatgtatatcacagctgctggctttcttcgccgccaagccaatgtttgacgaacttcacgagtactcctttaaattaggcaatagggactcctgctacgttgacgatctgacatggagcggcagtaacgccacacccgccttcctttgggcagctaaacaaatcgttcatcgccatggctttaaataccataaagatctggtgtaccgggctgatcagcagaaggtggtcacaggagtgttaatctctgggggcgagctgacggtacaacgatctcgtgagcacgaactgtggcggagcatccacgcactgggtggtcaggatcccgccaagcgactcaaggcgattgactcacttattggcaaagtcatcgcaaatgggcagattgaaaatcgattcctcctgagggtgcaaggcctgagagcacgccgggtcatgctgatggggtctagggcagaagtcgtcagtagcttgcagcgcggatga

SEQ ID NO: 10258 - RNA, 969 nt, synthetic construct
  source 1..969: mol_type = other RNA
atggccattagaaagaaatcctatgctattcatcagtgtcctctctttaagattgcgtctcgcaagaaacttgccgcactcttaggattcgacctctcggtgctggaggggctgtcaactgctaccaataacttccggaccttcgagatcaaacaaggcattaagttacggaaggtcgaggtcccaaagcgtcgacttgaacttgtgcaccggaaggtgtttagtctgttggaaagaatagagaaaccagaatacttgcactccggcattaaagggaggagctacatcacgaatgctaaggtgcatgttggccctgtacccctggtcaaactggacttgaaaaagttctacccctccatcgatggagcacgcgtgtaccgcttcttccagcaggccctgcagtgctccccagatgtgagcggtcttctcacaaagctgtgcaccattgacggccatgttccgactgggagctgtgtgtcacaactgctagcctatttcagcgcaaaacctatgtttgatgagctccacatgctcagttcacagtggggcctgagggacacatgctacgttgacgatttgacttggagcggagaaagggctacacccgcttttttatggaatgccaaaaaggtggtgtatcgacatggttttaagtaccacaaggaccacgtgtatacagcagacgagcagaaactggtcaccggggtcatgatcgacggagatcgtatagccgtactacccagtcgagagctgaagctatggaaagacatcaatgccctcggaatgtcagaacctgtggagaggctggccgcggttaactctctgatcggtagtgtagtcgcaaacggccaaatagagccgaggtttctgcagaggttgagaagactccgggatacccgcatctctctgatccgccagcttgaagtgaacttcagccggcagccctctctgctgccatccgatagatga

SEQ ID NO: 10259 - RNA, 933 nt, synthetic construct
  source 1..933: mol_type = other RNA
atggctacccggaaaacatacgcgctggatcagtgccccctttataagatagcatcccgtaaacggctggctcaggatgtgttcaatgtagatctgccctttttggaacggcttgccgccaacgaggggaatttcagagtcttcaccattaagcagggtgacaaagataggcaggtggaagtgccaaaggtggtgctggagcgtatccaccggcgactttttaatctattagagcggatcgagaagcctgactatctgcactcaggagtgagaggccggtcctatatcagtaacgctaaagttcatgttggtgctgtcccactggtcaagctcgacctgaaaaaattttacccttcggttgacggcgcccgcgtatctcgcttctttacaggaacgatgaggtgcagccccgatgtcgccgccttgctcaccaggttatgtacttttgagaatcacgtgccgactggatcttgcgttagtcaactcctcgccttttttgcggcaaaacctcttttcgacgagctccatgctctggcggaaagcgcagggttgcgcgatagctgttacgttgacgacctgacctggtccggccatggggctacaccagcattcctctgggcagctaagcaggtggtccacagacacggcttcgcccatcacaaggacagatgtttcgcagccggcgaccgaaagctggtcactggcgtgatgctggaggggaaccgaattgccgtattgccttccaaggaattcgatctttggaagaacattcaggcgctgggaggattccagccccaagaacgtatagtggcagtgaactctctaatcgggtcagccgtggccgccggtcaaatcgagagcaggtttctgcgccgcctcttgaggttaaggagagtcagagctgcagccattgctgaagctgccctgacatga

SEQ ID NO: 10260 - RNA, 948 nt, synthetic construct
  source 1..948: mol_type = other RNA
atgaagtcccggaaaacgtatccgatcgatcaatgtccactctacaggctccagtcccgtaagaaactcgctaaggacgtattcaatctcgagctcagccacctagagtccctggccaaaaacacgtctaactaccgcatttttaaaattccaagcggtgataaagagaggcaggtcgaggtgcctaagccaatactagagaggatccatagaaggctcttcgccctgctggaacggatccacaagcctccctaccttcaatcgggagtgaaggggaggagctacattactaatgctcagctgcacgtggggcttgcccctctggttaagttggacgtgaagaaattttacccctctatcgactcagcaagagtttaccgattcttcaacacaatactgctatgtagcccagatgtaagtggtctgttaacaaagctcaccacatgcgagggacacgtgcctaccggctcatgcgtctctcagttactggcgttttttgccgcaaaacccatgttcgacgagttggattatctggcaaccaagcagtctcttcgcttcagctgctatgtggatgatatgaccttctcgggcacacttgccacaccctcactgctgtgggctgccaagcaaattgtgcactcacatggctttggatatcataaggaccgttgttatactgccgaacaggacaaacttgtgaccggcgtcatggtcactagtgaccgcatcgcaatattgccgtccagagagttcgaattatggcgcaagactcaagatttgggaaccggcgacattgaacagcggatcgccgccgtgaattccctgattgggactgttgtcgcggcgtcccagatcgaagctcgactgttgagcagactgaagcggctgaaagggatcaaagcagcttttgaacaggaggctagtaccagcagtccctctcagagatga

SEQ ID NO: 10261 - RNA, 927 nt, synthetic construct
  source 1..927: mol_type = other RNA
atgaaggtcaggaagacataccctctgcaccagagtccgctctacaggatgcagagcaggaagagactggccgccgaaattttcaacgcagacatcgacttattggagagaatcgctggccacggggataatttccgggtgttccacatcattcagggtgaaaagcgacgtcaggtggagactcctaaaccaatcctggagcggctccatcggcgactctttgtgcttttcgagcggattgagaagcctgcctacctacagagtggtgtcaaaggacgctcatatatcaccaatgcccaggagcacgttggcgctgtacccctcgtcaagctggatataaaaaaattttacccctccgtggacgccgcccgggtttataggttcttccatgaagtgatgcgctgctcacctgacgtttcagggcttctcacaaaactgtgcatttatgacagccatgtaccaacgggctcttgtgtttctcagctgctggcatactttgcgactcgccccatgtttgatgaattaagcgctctggctgagagccgaggcgtcaaatttaccctgtatgtagatgacatgaccttcagcgggaggtctgcaacccccgcttttttgtgggacgtgaagaaggttgtccactcccatggtttgcagtaccataaggataggatttatgctgcagattcccaaaaagtggtcacaggcgtgcttgtgagtgcccagggcatcgccgtgctgccatcaaaggaattcggaatctggctgcaatcgagaaacctcgggagtggagacttagctgagagacgcgccgcaatagagtccctgcttggaagcgtgatagcggccggccaaattgaaaaacgcttgctatccagagtgcggggactgagaatcctgcacgccgatgcgctccgttctgcagggtga

SEQ ID NO: 10262 - RNA, 1008 nt, synthetic construct
  source 1..1008: mol_type = other RNA
atgaaacggccctatctctcaaatcaaagcccactctattgcctggaaagcagaaaaagattggcaggggagattttagggctgtcgctccctaagctcgaaggtctggctgcccgtgcgaacaactaccgcgagtgtacccgagttactggcggaaaacagcggaccgtgcacgtgccaatgccactgctcctcgcggtacataggagactggccgtcctgctgaacaggattgctgtcccccattatcttcagagcggacagacccatcgcagccacctcaccaatgccagagcccacgagacagcccggaatatcgccaagctggacatcagacacttttacccctccatcactaaggacagagtctggcacctgttcgtggatggcatgttgtgtagtcgtgatgtggcttcactcctggctagactgttcacacaccaggggtctgcccccataggctccccagtttcccaggttttggccttccacgtggtgcggccgatgcttgacgagctgcaagagcttgcaagccgacacaggctgaggttcacatgctacgtcgacgatctcactttctctggggatggggccgaccatggctttcttgctctggccggagatgtggcgcgcaggcatggttttctacctcatgcagaagcctgctacggccctggagaggacaagttagtgaccggagtaatgctgacacgcgacggtctgagggtacctgcaccccagttgcgacgcattgacgctgcccgccaggagctactcttagccgaaggcaacgaatctcggagggtcctattaagccgacttatcggccacctggctgccgctgcgagtgttgatgactcatttcgtccggagttgtctagtcggtgttttgctgctaggaagctggccgcagcattgcctgcacgcccatctccatcagattccaaagtggcaagtgtggtgccccggcttcggcctatgagactgtcctatggtgtcggaacgtga

SEQ ID NO: 10263 - RNA, 924 nt, synthetic construct
  source 1..924: mol_type = other RNA
atgtcctatgcatttcaccagtctcccctgtacgtgatgcgttccaggcgtaggctggccgacgaaattttcggtataagcctgacagctttagagggcctggtggagaatggaaacaattacattgagtcacgccgcgtcacgggcggtaaagagcgacttgtgcgagcgcccaagcccctgttgaggcacatccaggagcgcctcgcgcagcttttgaatcgcatcgaggccccggattacttacatagcggacggaagcaaagaagccacatatctaacgctcttgcccatcaaggagcaactcgggtgctcaaactcgacattaggaaattctatccatctatcactagagcccgtgtgtggaactacttcgccggccagatgcgctgttcgccagatgtcgccgcattgctagccaagatttgctgctttgaaggtagtgcccctatcggctcccctgtgagtcaggtcctggctctccaggtcgtacggcccatgctggacgaagttgatgttttagcaagggcccatggcctgacctttacttgttatgttgatgacctgagcttttcaggggaaaaggcaacacccgcatttctctggcaaatcaagcagctgattcggaggcatgggtatcgctaccacggcggaaccgcttacgggccagatgctgagcgaagagtcacaggagtgctcctaaccgcgcaaggacctcgagtgccacctgctcacctgcagggcatacgagccgccagacacgcctttgaggctgcgaaggaggcttcagaccgggaagctaccctgtccgtactgatcgggagattggccgccgcagccgctatcgaaaaaagattcctcgcacagattggcgaccttcggcggaggcgcaggagattcagaccgcctagtttcggggggtga

SEQ ID NO: 10264 - RNA, 954 nt, synthetic construct
  source 1..954: mol_type = other RNA
atgaccgaccacccgatccatcatagtccattacacggactgagatcctctgagaggttggccagaagggacgtcctcggcctttccctcgaaagactgagcgcgctggctggggatgcctctagttaccgggcgttcatccgagtaactagcggaaagaagagggcagtgacagagcccttaggcgacctcttagccgtccacgatcggctgtacgatctcctcgatcggatagagaagcctgactacctacacagtggcgtgcgtggtcggtcacacgtgaccaatgccggcgctcacctaggggataaggcaacagttaagctggacattcgccagttttattcctctattgatgtgcctagggtatcgagattcttcgggcgccagatggcatgttctgcgccagttacggatctcctcacccggctttgcacctttcgaggtcatgtgcctatcgggagccgtatgtcccaacacctggcctattttgctgctcggcccatgttggaggatctgaggagattgagcgagcgccagggcgtggtattcacttgttacgtggatgacctgagcttctcaggaactgccgccacacccagtttcctgtggcaggtgaagaggcttgtgcatcatcaccgttttggctatcataacggatgctgctatcgcgctggcgaatcacgaatcataacgggggtcgtggtgaccggagagaaactggctgttttgcgggaacaagctgagcgaattcgccaggacgtgcgggacatggacaaattgacagtcgacgaccaaagaagggccctgcagaggatgatcggtaggactgcagccgcagcaagcattgatctggaataccgaaaagtcatgaaacagctggttgccagaagagctcgccttaaatccgccccaccttcaccctgtatggtccgcccatttgacgaagtttga

SEQ ID NO: 10265 - RNA, 1014 nt, synthetic construct
  source 1..1014: mol_type = other RNA
atggcccaaagcggtaatcagaccgagcttgaacagtcaccattgtttggaatctccgacccacgcgaactggcagagctcgtggcaacacctctgccttcactgtggaggatagcgagggcccgagacaactacacggccctgcagatggaaactgggggaaagctgagaactgtaaaccgtccctgtagagccttgggcgctgtccagcgcagaattcagcatctcctgagttttattcctctacccgattatctccacagtggagtgcctgggcggtccaacctgacaaatgcaaccgttcaccgtgacggcgcatggctgtgtcaaattgatttgaaggcgttcttcgtgcaggtgactgacgccaaagtctttcatttcttctggcagcgaatgcagtgcgagccagaaattgccacccttctgaccaggctaaataccacaaatggccatgttccgctgggcggccactgcagtctccagctagctttcttagtggcacagcctctgctggatgaccttgacagaaccgcccgagaggaggacatcagattttctacctacgttgatgacctctccttctctggtgccaaagcaactccatcctttctctgggccgtgaagcagataatccaccggcacggctttcgttatcatcacgatcgctgtcatcggccaggaggtagacggttagtcacaggggtgctgctgcacaagagctgcatggaggtccgcccccaacttgtacaacgaatctggacggactggagcgctatgttcaccgctcccagcgatgacgcgtcattgcggccgcttcaaggaaggttggctgtggcctcccagatcgagccaagataccgcgaggcccacgatagcatgaaagtcatgcggaagacactccgcgattcgcccgaacctgctctggctcccgcttctgtttcagcactcgccaacaggaaattagtgagggctaggctgagcacaagtgggtctgcccatttcgatacttga

SEQ ID NO: 10266 - RNA, 1059 nt, synthetic construct
  source 1..1059: mol_type = other RNA
atggcccagaaaaattacgacatcaagtatgacatcacccaatcccctctgtacaaattacggtctaagaagaagctcatctcacttctgaatctcgggtccctctcggacctcaaaagtatcatgcggaccgattccccttaccgaaaattccccatcatgtctaagggaaaattgcggccagtggaagtgcctagcagagttttgttgcccatccataaccggctgttcaggctcctgaagaaaatccatctgccgtcttatctgcattctggagtgaaaggatgttcttacctatccaatgctcgagcacaccgcgaccgcaaggaagcatatactctcgacattaagaagttttacccctcagtgaccagagcgaaagtcgttaccttttttagagagacaatgaaatgcgagccagatatttccgcaattctggccaacattactacttgtgacgatcacattccaacgggcagcagcctgagccaggtgctggcttacctaagttgcaaggagatgtttgacgccctccatgatctgagtcaggaggccggtgtcaccttcacttgctatgtcgatgatctgacgttttccggggatcgaatctcaaagaagtggatttatgatcgggtgaagcccatgattaataaattcggcatgaggagccacaaggataagcacttcagggcgggccaagtaaaagagattacaggggtgattgtagacggctgtatagttaaggtgtgtaacagaatgcaccagtcaatccacaagctgacacttcaaatcgctgagacagaagaacctctactcattgacagcttgtacgacaagcttatcgggaaactgtgcgccgctggccagatagaggaaaggtttaaacttcagcgcgtcatggccactaaaacccgtcgtaaactgttaggtccgaagttcggaagcagtagaatcaagctgaacaatggtaaccaggagatcaggaagaaattaacaccaatacttccctctatatggcgcccagtcgatcatttggacgaatcgataccttgggactga

SEQ ID NO: 10267 - RNA, 903 nt, synthetic construct
  source 1..903: mol_type = other RNA
atggtgctgaagagtaggtacgccctaaaccaatcacctcttttcaagttgcattcgaaaaagaagttggccagtcttttgcgtctggattccaaagagctcctggctctggctgcgaatcccaacaactttcataagttcaacgtggagaaaaacggtaagctgcgatccgtgcaggtgcccaagaaggatctggaggcggttcacctacggttattcaatctcttgcgccggctcgaaacccctccctacctacattctggaatcaaggggtgtagccatgtgaccaatgccctcgctcatgacggcgcagtgagcacagccaagctggacatcaaaaagtactacccgtctacaggcagagagtatgtctacaacttctttaagatttccctctgctgctctgctgatgtagctaaggtcctcagcgacctgagctgcgttgatggacacattccaactggaagcgctttaagccagctcctggcattttttgcaacccagcaaatgtttgacgaaatcgccgtccttgcgagtgactctgatatttgttttacactctatgtagacgacctgaccttctccggcacccgcgtgaatccaaacttcatatggcaggtgaagcaaatcatctcaaaatacggttacacatatcacaaagtggaatctgcccctccaaataaaacgaaaattgttactgggctggctctgactgcaaacggggccaaagttagaaattcacaccacgagaaaatccacgaactgtatgtccagtatctggatgacacgattgcaactaaagatcttgcacggcttataggcatgctgagttccgccagccaggtcaatcagagaatggccaataagctgaggaacttattggagtcaagggcctccaaatga

SEQ ID NO: 10268 - RNA, 972 nt, synthetic construct
  source 1..972: mol_type = other RNA
atgatgaagcgcgtctctaaacataaatcctatcctctaaaccagagtgcccttttcaagatcaatagcccaacaaagttggcaaagatccttcttgttagtgacatgtcagtcctctttaagctgcagaacaaaggtgaagaaaactactatttcggcaccacagggagcgggcgggatatcgaggtgccactgagccagcttcggcgcatccataataggataaacaagctcttatctcacatcagcgttcccgactacctgaacagcggcgtaaaagagcggtctaacattaaaaatgcggccgctcacgtgaacgctaaaaaactgctgaagatcgacatcacgaagtattaccaatctataacagaggagcaagtacggaagtgctttaggaaaacttttcagtgttcccctgacgtttccagcctgttggccagtttgtgctgcgtgaggggacacctgccaactggatcaacaatttcccaatcactcagtttcgccgtaaatcgccccgtcttcgactcgattaacatttactcgaacagtaagggggtgaaattcacttgttacgtggatgatctcaccttttccggcgacgacattcctcccagcgagttttgcgattatattgtgggctatatcaagaagtctagaggttacaagtgtcataagatcaggcgttataattccgaaaccgataaaccggtgactggagttatcatttcaaatggccacctgaaagtgatgaacagacatgtgaaagtcatcaattccctgtacaagtccatgaataagatgacggcaagattctcttcaaccgacaaggaattgattcactactttcaggtcctgcagggtcacctgttcagcgcaggacagataaacccccgatataagagactagggtggcatgtggtcgatatacgaaaagagttatctgtgcctgctctcaatcagaataccatgtga

SEQ ID NO: 10269 - RNA, 966 nt, synthetic construct
  source 1..966: mol_type = other RNA
atgatgtcacgtgtgaacaacaaatcctatccgctaaaccagagccctctcttcaaaatcaattcaccagccaggctcgctaaaattcttctcgtcagtgacgcttctgtgctgattaagctgaaagagaaaggggagaagaattattacttcggctctaccgataagggccgagagattgaagttcccttgtcccagctttctcgcattcatagccggatcaacaagctgttgagcaatattacccctcccgactacttgtattccggagtgaagaaaaggtccaacgtcaaaaatgccgccgttcacgcgggtaataagaaactgctgaagatagatatcgcaaagtattaccaatccataagcgaggagcaggtcttcagatgtttcaggaaggtgtttcagtgcgcccccgaagtggccagcctaatcgcctcactgtgttgtgttaaggggcatctgcctactgggtctaccatcagccagtctttatccttcgcagtgaatcggccagtgttcgataacatcaatatctactcacattccaagggcattaaatttacgtgctatgtcgacgacttaacattttcgggagatgaaattccaagtggtttttgcgactacattgtaggatacatcaaaaagaatcgcggctacaaatgccacaaaatacggcgatataacgcagagacagataaaagagtcacaggggtaatcatcagtgatggaaagttgaaggtgatgaacagacacgtgcgggaaataaactacctgtacaagaacgtgaacagtatgctgaagaagcacgcggctaccgacaaggaacttatccatttctttcagcgcctgcagggccacctttttagcgctggtcaagtaaacctccgctatagacgtctcggcgcatctgttgtccaaattaggaaatcaagtgccgtgcccgctctgaatcagaatactatgtga

SEQ ID NO: 10270 - RNA, 987 nt, synthetic construct
  source 1..987: mol_type = other RNA
atgagatatgggtggagtctgcttgccaacaacaacaaaggcgtgaagcagtatccagtgcaccagtctcctctctttaagttacgtagccacagcaaacttgcagctgtgcttggaactaaacccaagactctgaaaacagttgtacgcagagcggacaaaaattacaagttcggcaccactgagagtggccgagccatcgagataccgaagtcacaaatcctacggtatcataaccgaataaacaagctgctatgccgtattagtcctcctgactatctgatgtccggcgtgaaagggaggtcttatgtcgataatgcagctaaacacagaggagagagggctgtcgcaaaacaagatatccagaaattctaccagagcacgaccagagatattgtgtatagagggctccgtaagagattgcactgcagttccgacatcgcccagacactggccgacctctgtacagtgaagggacatatacccaccggatcccccatctctcagagcctggcgttctttgtcaacttcggcgtttttgagcacattaatcagtacgccagctcacggggactgcgcttcactttgtatgtggacgacctgacgttttccggccagaaaattccaaagaatttcctcaggtacattagcggttatttggagaagaataggggctacaaagtgcataaaaatcggacctaccacgctaccactgaaaaggaagtcaccggggtaatcctgaagcagggggggatagatgtgaagaaccggcataggcagaagattgattctatgctgcggcgcctgtcctacttttctgacgagtcacaagaatccgatgcaaagacacgggactactttcagcgactcatcggccatttatactcagccggtcaagtctcgccaggttaccgcacaaggggtaaggaaatggttgagattcgcaaagccatcggcatcgaaggacaaaaccagaataataagtga

SEQ ID NO: 10271 - RNA, 960 nt, synthetic construct
  source 1..960: mol_type = other RNA
atgaagaagaacaagagttataagatcaaccagtccccactgtacaagttatcaagccataagaagctggccgcatgtctgggccttgacaatgagaaaacactgagtaacattctgcagcacggggataataattactatgtgtccaccttgccgagtggccgggttattgaggtccccaagccccaattgaatagaattcaccggcgacttaacaaactgctaactcgcattgaggtccctgactatttaaattcaggagtgaaaggaaggagtaatgtgaagaatgcccaggatcacattggcgaactggccgtgcttaaactcgacatacagaacttctatcagtctgttacgcagcagcagatcgcgcgatgtttcgtgaaatccttcgcctgcccaaaagatgtcgccgaaaccctctctaaactgtgcgtgatccacggtcatattcctacaggatcttccatttctcaaagcctcgcttttatagtaaacaggcccgtttttgatcacatcaacatatacagcatctccaagggtattcggtttacctgttatgtagacgacctaacattctcggggcaaactatcccaaaaggcttttcatcctacatcacgtcttacctgaaaagaaatagaagctacaagtgccacaagatgcgcgtgtataaaacacttaccccaaaactcatcaccggcgcagtagttgtcggaaagctgctcaaggtcaagaacagacataggaaccagattcagaaactgttgcatagctacgattcaatggtgaaaagctacaagcctgacgataacaagctgatcaattacttccagactttgcaaggtcacctctacagcgcagctcaaatcaatcccaggtatcgccagatgggggacatcatagtgcagcgtcggtgccatcttggggtgcctgctctgaaccagaacactaagaaatga

SEQ ID NO: 10272 - RNA, 960 nt, synthetic construct
  source 1..960: mol_type = other RNA
atgaagaaaaataagtcttacaagatccaccagtcccccctgtacaagctgcggagtcataaaaaactggcatcttgccttggacttgaaaaggaacagactttgaggcgactcattaaacaaggagacaagaactattacgtttccaaactgcctgatggccgcgtaatcgaggtccctaaaccgcagttgaaccgtgtgcacagaaggattaataagctactgactcggattgaagtcccagaatatctcaattcaggcgtcaaaggtcgtagcaatgttaagaacgcaagggagcacacgggagagctgagcgtgctgaagctggacatcaaaaagttttaccctagcgtcaccgaacaacagattgctagatgttttgtcaagagcttcggttgtactaaggacgtggctgagacattaagtaaactctgcgtggtcgatggccacttacccaccggctcctcaatctctcagagtctttcgtttaccgtgaaccgaccagttttcgatcacctgaatacatatgccaaagcccgaaagatcaaatttacctgttatgtggacgatctgacttttagcgggcaggcaattcccaaggagttctgcaaatatgtgacagcgtatctcaaaagatctagggggttcaagtgccacaagatacgggtgtacaaagctatcacgccaaaatcaattaccggtgccgtcgtggtgggcaacgttctcaaggtgaagaactgccatagaaaacgcatccagaagttgctgcatttatacaactacatggtgaaaaggtacaagcctgacgatgagaatttgatcaactacttccagagacttcaggggcatctatattccgctgcccaagttaatccacgctaccggcagatgggggacataatagtacagcggcgctgtaacctcggagtacccgccctgaatcaaaacacaaagaagtga

SEQ ID NO: 10273 - RNA, 984 nt, synthetic construct
  source 1..984: mol_type = other RNA
atggaaaaacagtatcacctgaatcagagccctctctacaagctcagaagctttaaacggttagctaaaattctggactgcccccagaaatctctggagaagctcctcttacaaccgaacaataactattacacctctcacatcaaccaggaaaaaatcattaaaggctcaaagcagatcgtccagcgcaagattcaggtcccaaaaccacagcttaataggatccataagaaggtgcagaagttcctaagtaagattgagaagcccgggtatctgtttagcggagtcaaacgccgaagcaatgtgtcaaatgcactctaccatgtcgaaaccgattacatgcgtaagatggacattcaaaaatactacgagaaaacatcagccaagtatgtgtataaatgcttcgtaaataccttcagaatggctcccgatctcgccaaggtcatgacgaaattgtgcacatttaatagccacatacctactggctcctccctttcccaaaatctggcgtttttctgtaatcttcacctgttcaatcagattgagtctttctgcaaaaaaaggaagatctcattttccctgtacgtggacgatctgaccttctctgccaaacataagctgacaaaggatcttactaaccggatcgtgcacatctttaacaagaacagtgactatgttatccataaattccaggtgtacaacaaggagacgccaaagctggtgaccggcgttatcttgaagaataacataatgctggttcccaacaaattgcgagtaaagatgctgaaccacgacaaggagaaatccattataatcgataacttgagcaacgacagagatggagcaataaatttctatcagaggtttatcggtctagtgagttgtgctaaccaaatttcgcctaactacaagctgtggacaaaagaattatgtgaagagcggaagaagtacgggattcaagccgtgactggtaagaaggactga

SEQ ID NO: 10274 - RNA, 972 nt, synthetic construct
  source 1..972: mol_type = other RNA
atggagctcaaaaagtatgacatcaatcagtcaccgttgtacaagctcaataactacaagcgcctgttgaagattctggacattaaagacaaatctctgaccaagctgctcgttgctggagataataatttctacacgtcagaaattggcggacgcaaggtgcaggtgcccaagccacagttatctcggttgcataagcgactgcagaaactgttcagtagaattcagacaagacccttcctgtattcaggtgtgaaaggcaggtctaacgttgataatgcccgcgtgcacgagaagagctcgcacctcctgaaggtggacatcgcaaaatattacgagagtacgaactttaagagagtgcttaagtgctacatcaacatattcaaggtttccccagatctggccgagatcctcgcacggctgtctacctattccggccatgtccctactggaagctccatcagccaatccctgacatacttctgtaacataaaggtctttgatcaagtgatgctatattgcaaaaagagaggggtgaccttcacattatacgttgacgacctgacattcagtagccgtgtgccattaggcaacgggtttttgggaggtatcaacctcattttttccaaaaacaccgactataagctccacaagattagggcttacaaccccactaccccaaaaaaagtaacaggggtcatattgaaagggacttctctggatgtacctaacgatatccggaaacggctgaatgaatttaaaatgaagcacaggcgagtcgtccttaactacgtgaataatagcactccgtccagttacgaaaacgctattgcgcatttccagaaatttattggccttgtatcgtgtgcctcacagatcagcccctattataagctatggaccgacagcctttgcaatgagcgtagggtgaataacatccctgccgtcaatcaaaacaatcctatgccctga

SEQ ID NO: 10275 - RNA, 942 nt, synthetic construct
  source 1..942: mol_type = other RNA
atgataaagtcttacaatcttaaccagtccccgttgtatagaatcaactcccataaaaagctgtcctcagtgcttggagtgaagtcaagcagcgtgttgacaaaaatcgtgagcaagtccgataataactactacctctcaaaggtggatgacagagacattcaggtcccactgaatcagttgcgtcgcattcacaaacgaattgatagtctcctccgacggatcgaacagcccgattatctgtattctggcgtaaaagggcgctctaacgttctgaacgcccgtgtacacgacaataattacaacgtcctgaaactggacatcaaaagctactaccaaagtgtgtccaaggatcaggtcgcccggtgctttattagcgtctttaaatgctctcaagacgtggcgaagacgttatcagagatttgtacctataacaatcacatacccaccggatcaccagtgagtctctccctcagtatggctgtgaatcggcctgtcttcgaccatatccataagcattcgcattccaggaacattagattcagttgttatgtggatgatcttagcttttctggtaaagtaatcccattgagcttccgcgactacatcgtttactatctgaaaaagtcgcggggctacgaatgccacaagattagaagctacaatccttcaacacctaaaaagataactggcgttgtcttaactaaaaacggcctgaaggttatgaataggcacaggtccaccatcagttctttactcaatgaccggaaacgcatcctgaagaataacaagaaggatgacgagcttaccattaacttctatcaaaagctgatcggacacctgtttagcgcagggcagataaatggtagatataaacagctggggaggatcctagtgaacgagaggaaactatactctattcccgcttgtaacaagaagtga

SEQ ID NO: 10276 - RNA, 939 nt, synthetic construct
  source 1..939: mol_type = other RNA
atgccctatgagatcgagaattctcctctcttcaaaatcacctctattcaccggcttagcgaggtgctgcagcttcgggtgggccgattgaggcgcctggagtatctgacaggccaatttaaagagggcacaactgagagaaatggtaagcagagaaagactgaaactcctattagaacgatgtgcagggtccataacagagtgcagaagctactcagccgtatccaaatgccgaactacctccattccgggaagaggaagagatcttatctgtccaatgctgtcgcccatagtggacttatacagtccttccaggttgatattgcaaaattttacccatcctgtacatggcaccacgtctatctgtgcttcatacgccagtttcagtgttcaagcgatatcgccggaataatggccaccatcctgacctaccgcggtcatattccaactggatctcctacctctagcctcttggcttttctgtcacacaaggagatgtttgacgccttatacgagttagctcagagtcacaacctgacgatgacagtttaccaagatgacatttcgtttagtgggtctagcatttccgaatccttcaggagcgaagtaagatgtatcatcaaaaggtgcaatctggtgcctaagcgcagcaagcagcgctattgccatggtgggaggagtcccaacattaccggggtagtgctcaccagtagaggacccaaagcaccacggagcaggcacttggcgctacggcagtctatagacgaattcgatgctgcagaatcagagatcgacctccgcatctcataccaccgaatgatgggccgtctgtcagagatcgaacgagttcaaggccggctgttcgaccttaaacccaagttgaagtcccggttccgttcgcgactgaaagccatgtcccagtgtccacaggtggaatga

SEQ ID NO: 10277 - RNA, 1056 nt, synthetic construct
  source 1..1056: mol_type = other RNA
atgaagcagaaacgaaagaaatcagtgaagcgcgagcgtaaatcctacgacatctgccaatctgccctgtataataccagtacaaagagcaagctggcctccttatttagtatcggcttgcatgaactgagagaatgcataggggactaccggcagtttcagctgatacctgaacccgaccccttcaaagctgggaaactccctaaggcccgacaggttcaaaaaccttcagctagacttctggtcatccacgaacagatccttaaactactgcgctgtgtgagggtgcctgagtatatgcagttcgctttgaaagggaccagctacaagatcaacgccgagagccacctctctaagaatactgtcgctacgttggatattcggaactttttcggaagcacctccaaatccaaggtgtttaacttctttaaggaggatctgaaagcccctggagatgtagccaatttatacgctgatcttatcaccttcgagaactgcctgcccactggttcgccactttccccgttaatctctttctatgccaacaagaatctctatgaggacattaataacctggcaaaagctcataatctgaagttcacatgttacgtagacgatctcacttttagcggcgataagatctcaagcggattcatgtggcaaattgaagaggcaattgcaaaatatgggcacgtcgtggcgcgggacaagacaaagatatacaagaacggtagaccagcgcatataactggtgttattgtgcacgatggcgtcattagggtcccgaacgcccgccatcgtaaaatgcggctcatcaaggcggcaattgccagaggaaaaggaacacacgggttttctaagaaggagcttgagtacaagctcggcggcctgttgggcgaagcagcttatctggacccctcacacctacccgccgccatcgagttcaacaaaagcgttcagaggtacagtctggtggcaaccgagtataagtccaataggccagaaacgggctctgaacagccactcgacagtcccgtgaatctgccatgggactga

SEQ ID NO: 10278 - RNA, 1056 nt, synthetic construct
  source 1..1056: mol_type = other RNA
atgaggcagaagagggagaaggtggttaaaagagagcgtaagtcttacgagatctgccaatccgccctgtacaatactagcaccaagagtaagctggcgagtctgttcagcatcggaatacaagaactgaaggagtgcataggagattacagacagtttcagcttaaatctgagccagacccgtttaaagcggggaaacctcccaaagtgcggcaggtccagaagcctagtcctaggctcttagtgatccatgaacgcattctgaaattactgcggtgtgtgagggtccctgagtacatgcagttcgccctgaaggggacttcctacaaaattaacgccgaggcacacctaggtaaaaactctgtcgctacacttgacattcgcaacttcttcggatcgacgtcaaagagcaaggtctttaattttttcaaggaggccctgaaagctcccggcgatgtggctaacctctacgccgacttgatcacatttgataattgtttgccaacaggctcccccttgtcccctctgatctctttctatgccaataaatcactcttcgacgatattgacaatatcgccaaggcacacaatctggtatttacatgctatgttgatgacctgaccttttctggagacaagataagcgatggcttcatgtggcaaatcgagcagaccatcgctgcacatggccacgtcgtggcctcagacaagaccaaggtgttcaaaaacgggcgacccgcacacataactggtgtgattgtgcacgatggcctgatcagagtacccaatgcacggcatcgaaaaatgcgcctcattaaggctgcaatcacatccgggaagggcacccatggcctcagcaagaaggaacttgagtataaattgggaggtcttctgggggaagcggcttatctagacccgtcattactcccagctgccatcgaattcaacaagtcctttcagaagagcaacaccaaaactattgaacataaggccgaccacacgaacaaaaatgacaaacagagtccagatagccccattgatgttccatgggaatga

SEQ ID NO: 10279 - RNA, 1053 nt, synthetic construct
  source 1..1053: mol_type = other RNA
atgaggcagaaacgagaaaaagccgtgcgacgcgaacgtaagagctatgacattagtcagagcgcactgtataatacctcaaccaagctgaagctcgcttccctgttttctgtggagatcggagcactgaaggactgcattggcgactatagacagttcgaattgattccagaaccggatccctttaaagctggtaagccccctaaaagtcggttggtgcagaaacctgcacctcgcctgcttgctatacatgagcggatcctaaaactgctgagatgcgtgagggtcccagaatacatgcaattcgccctcaaaggaacgagctacaaaagaaacgccgaggagcatcttcacaaaaagtgtgtggctactctagacatcagaaactttttcggcagtacaagcaagtccaaggtatttaacctgttcaacaatgatctgaaggcgccaggagatgtcgcgaatatgtacgccgacctcgtcacagtggacaactgcctacccaccggaagtcccctttcgcccctgatgtctttttacgcgaacaagaacttgttcgatgatttgtctaagctggctcacgctcataaccttaccttcacctgttatgtagatgatctcacattctctggcgaaaagatctccgagtcatttctttggcaagttgagcgcgccatcgccgcgtatgggcacatcgttgcttccaataagaccaagttattccagaacggtaaaccagcccatataactggtgttgtcgtccacagcggcgctataagggtgcctaacgcccggtatcgtaaaattaggctgatcaaggccgctattgccactggcaaaaataattacgggttaactcggaaggagttggaatacaaactcgggggcctcctcggggaagcagcatacctggacccaagcaatctgcctgccgccattgagtttaataagtcatttaagcgctcctcttcacctctgccggagcacgtgcccgataatcccgcagcaacggagaaaacattcgacgacgcctccgacttaccatggaactga

SEQ ID NO: 10280 - RNA, 1116 nt, synthetic construct
  source 1..1116: mol_type = other RNA
atgaaactgagaagggagaagaaacccaaaaaagagcgaaaatcctacgacattagccagagcgcactgtacaacacttctagcaaggcgaagctggctgcaatctttagtaccgacatccaggaggtaatccgctgtataggagactatcgccgttttgaactcatcccagaactggatccattcaagctaggtaaaccaccaaaagtgagacaagtccagaagcctgctccgaaacttctggcaattcacgagagaattttgcggcttctgcggtgcgttcaggtccccaagtatatgcagttcgctctcaaggggacatcttacaagaataatgccgagatgcacctcctcggtcgatgcgtggccactttggatattaggaatttcttcgggtccacatccaagtcaaaggtttttaacttcttcaacggaccgctcaaggcccctggagatgtggcgagtctgtacgccgaccttaccacttttgatgactgtctgcctaccggtagccccttatcaccactgttgagcttttacgccaacaaagccttatttgacgacctgaacataatcgccaccgagcacggcttaacatttacatgctacgtggatgatctaactttcagcggcgagtcaatttcccggagatacctctggcaaatcgagaataccatacgtcagtatggccatgtggtcgctagtaggaagacgcggctattcaaagacgggattcccaagcacattacaggcgtagttgtccacgagggctctattagggtgcccaatgtgagatatcgcaagatgaggttgatcaaagaagccatccatggatctggcaagaaccacggactcacccgcaaggaactggaatataagcttggcggtctgctgggagaagcggcctatttggacccttcaaatctgccggctgcaatcgagtttgggaagacctcgcacaagaacttcctcaaaaccataacgtccgtgcaggaatacctggaaccccccaaacctaatgctactgacgagaaattccatcctccttggcatgaacaagagcttatcacaatgctgctgccagaacatgcaaacgatgggaatgaggccgattga

SEQ ID NO: 10281 - RNA, 1056 nt, synthetic construct
  source 1..1056: mol_type = other RNA
atgaccctgaagcgggagcgaaagacgaaaaaagagaggaagagctatgatctgtcacagtcggccctgtacctcacccgcaataaatctcgaatggccgccatccttgcaacaaccactcaaaacttaacagactgcattggcgattatcgcagatttgaaacagtgccagagaatgatcccttcaagttgggaaaccaaccaaaacctaggcaggtccagaagcctgccgccaaactcatggcaatccacgagcgcattcttaaactgctgaggtgcgtgaaggtgcctgaatacatgcagtttgcactgaaaggcacatcatacaaaaagaacgctgaagctcacatcagtggcaagtacgtggccactctcgacattcggaatttttttggctctacctcacagtccaaagtattcaactttttcaacggaccacttcgctctcccggagatatcgctaacatatatgcgcagctcacgaccattgataattgtctgcctactgggtccccactaagcccgctgctgagcttttacgcaaataaaaagctcttcgacgatttaaacgacatcgctaaagaacatgagctgactttcacctgttacgtcgatgacctcaccttcagcggcgagtgcataagtaacagattcctgtggagagtggaagaaagaatccggaagtccggccacattatcgcggctaacaagacaaggattttcagtgagacaatgccgaagcatataactggggtagttatccaggacggggggatccgtctgccatatgtgcgtcagcggaagattaggttaataaaagacgcaatctctggaaaagccaaaaatcatggttttaccaagaaggagctagagtataagttgggtgggctgctgggtgaggccgcctatttggaccctagaaatttgcccgctgccatcgagttttccaaaagcgttcggatgaattccttcaagttcttcaagctctttgactacgtcgaacttccaaagcccgcagcgcccgatgagaactttattcccccttggcaagaatga

SEQ ID NO: 10282 - RNA, 1062 nt, synthetic construct
  source 1..1062: mol_type = other RNA
atgcggcttaagcgcgtaaagaagacgaagcaggaaaagaaatcatacgaattatcccaaagcgctctctataaaaccagttcgaaatgtaagctgtccgccatcttttctctgtctgctccagacatcctcaacagtatcggagattacaaacgcttcgagatgtcccccgtgcttgaccccttcaagatcgggaccccccctaagacacgatgggtgcagaaaccaaaggggaaactgttagcaattcatgaacgcatcctaaagctcctgagatgcgtggaagtgcctgagtatatgcagtttgcgcttaagggcactagctataaaaagaatgccgaggcgcacttggctggctccatggtagcgaccttggacatttcgaattttttcggctcaactactaagtctcaggtgttcaacttctttcgggacagactgaaatgtgccggagatattgccaagatatacgctgaattagtcacctgtgacgattgcatccctaccggctctcctctgtcacctcttctgagctactacagtaataaaccactgttcgacgagctgtcctgcctggccaaaaacgccaacctgcactttacctgctacgttgacgatctaacatttagcggggcttacattggtcgaggtttcctttggcaagtcgagaagacaattaagaagtacggtcacatcactgccagcaagaaaactagactgttcggactcggggttccgaagcatatcaccggaacagttatagcagatggggctctcaaagtccccaatgtgagattcaggaaaatacgtctgatcaaactggcaatcgagggcaggattagcaaatttggcttttccgatgtgcagttgaaatataagctgggagggttgctgggcgaggcagcctatcttgacaatgactttaagtcactcgccgacgaatataatcggaagattagggaactaaacctcgcctctctggaaggcggagagacatataggagcagtacgaaaccgttggagctcgcagatgataacttcatacccccatgggagatttga

SEQ ID NO: 10283 - RNA, 1080 nt, synthetic construct
  source 1..1080: mol_type = other RNA
atgaaacccaagagagtgaagaaggcgaagcaggagaagaaatcttacgaaatctcacagagtgctctttataagactacttcacggagtaaactggccgctattctctccctctctatacatgacctcctatgttcgattggtgactataagagatttgagatgaccccaaagcccgacccgtttaaaatcggaaaaccaagcaaaaccaggtgggttcagaagccaaaaggtaagctactggcaatacacgaacgcatcctgaaactcctacggtgcgtgaaagtgccagaatatatgcagtctgctctcaaaggcacaagctacaaacgcaatgcagaacaacacctgtccgggtgcatggtggcaacccttgacatttctaacttcttccgtagcacaaagaagagccacgttttcaatttctttcgggataggttagaatgccccggggacattgccaatttttacgccgagctggtcacctgtgatgactgcatccctacaggctcacctctgtcaccattgttgtcattttatagcaacaaacccttattcgacgagctcagcgtccttgcgaaaaactccaatttgcagttcacatgttacgtggatgatctcactttttccggcagccatatcacgcatgacttcctctgggaagtacagaagattgtgaagaagcatggccacgtgacagccactaagaagacccgactgtttggggcagaagtacctaaacacattaccggaaccgtcgtcgctgaaggcgtgctgagggttccgaatgcccgttttcgaaagatccgcctgataaaactggccttggagggaaagcgggacagtttcggtctgacgaagacccaaatggagtacaaactttctggacttctgggcgaggccgcatatttggacaacgatttcaagtccctggccgatagatacaacacgactatcagggagatcaacttagctagtctgggggatggaaagtacagacccagcctgaaggctacagacctgattgatgataaattcatccctccttgggagactgagcagagttcctccaaatcttga

SEQ ID NO: 10284 - RNA, 1080 nt, synthetic construct
  source 1..1080: mol_type = other RNA
atgaaacagaagcctgtagagtcccacataaagaattacaaatcttacgccctcaaccagtgtgctatgttcaacacctctagccgaaccaggctggccgcaatccttctaaagcccctgcatcttatcatggagtccatagggagttacagcaagttcaaaaaagatccaaagcctgacccgttctcgcataaaaagccaagacgccctcggagcgtgcagaaaccaaagggggagctcttacacattcacaataggatgttacgcctgctgaagagggtggtcgtccccgactacatgcaagcggccctggctggtacaagctatcgtaagaatgccgctatgcatgttggtgggccatgcgttgcaacgttggacattagaaattttttcgtggctactaacaagtcaaaggtcttcaactttttcgagactgatctgaggtgcacaggagatatcgcctcaatttacagcgagttggtgacttgtaatgactctcttcccaccggcagcccactgtctcccctcatgtccttctatgccaataagagactgttcgacgaattggatgtgttggcccgtaataacggatttatctttacctgctacatcgatgatctaacattcagcggcaataacatcagtggttcctttctgtgggatgtagaacgcatcgtccactgttatggccatgaagtgaccgcagggaagactagactgtttaaggctggacggcccaaacacgtgaccggcgtcgtgctgtttgacaacgaggtgagtgttcctaactcaaggtataagaaactgcgcaacattaatgccgctctcgaaggccgggcaagtatgcacgatttttccgaagtagagctgttaaacatgaaagcgggagttttgggcgagattgcctacctcgatcccaaaaaggggttccttgcgagacgggcaattgacgagcttaaactccgagacttgaagatcctgggcgacggtaaactgaaaatatctacgtcacctccagcctatctctcccctggagaagtgcccccgtggcaacctctcccactggctacacccgactga

SEQ ID NO: 10285 - RNA, 1002 nt, synthetic construct
  source 1..1002: mol_type = other RNA
atgcccggcaatgctagcgccaaattgttggcccggaggtcccggagtaagagatacgatatcgatcagagccatctttttagagttggaagtcctgctcgcttatcaatggtgctgggtgtgagcctggacaaactgttggccctttcacgacgcactgataactataaattgttccagaaggaagacgtggatccctttgccagacatcataggcgccggcgcgatatacaggaaccaaaggcagccctgaagaagatacatgagcgggtggcaaagctgctgaaattcgttagagtcccaacctacctgcactccgctatcaaaggggtgtcctatcgtaccaacgcactggagcacgctgagaggggtgtgtcaattcttacgatggatatcgccgatttctatccatcaacgggggcgtcccgcgtatttaatttcttccgcgatgtcctcgaatgcgctcctgacgtgtctaaattaatggccaagctcctgacatggcgtggcgtgttagctacaggaagccctgcatctcctctcctgtcgtttcactgcaatagacccatgtttgacgagatggcggccgtggctgtcaagagcgagttcacttttacctgttatgtcgacgacgttactttctccggcgtcaacgtacgacgggggctagtttctgaaattgcttgtattgcccgccgtcacggtcaccggatcaaggaacacaaaacacgattttactctgccggccaagcagggattgttaccggggtcgtggtcgaggacggaagtgtgagtgtaccccatgagagacgactgaagggcaggaggattgagacagcaatcgatggagcgaccgacccggtagaaagactcgcgctgactgagaaacttatgggcctcgctggcgaagccgcatacctagacaaagccttcaggccatgggtggactccatcaggggaaagctcaaggtgctgagaaggagctacgcctctcggcggtga

SEQ ID NO: 10286 - RNA, 993 nt, synthetic construct
  source 1..993: mol_type = other RNA
atgcccgagtcgacccccaaaaaagtggtgcggcgtagggacgggtccgacagatacgagattgaccaatgtgccctctataaaacaggatcattgcgccgcttggccaaaatcctgctcatcgagaaatcagatctcatcgccctttctaatagacgcgatctgtacagcgtctacgatctggaagatgacgacgagttttcagataaacggggtaaggtgcggaagatacaggatcctgttgaagagctcaagaagatccagagacgggtggctaagttattacactatgtcagggtccccagatacctgcatagcgcagtgaagggagtgagctatcgcagtaacgtgaaggcacacgcccacgcagggtccaatatactaactatggacgtagccagcttttatagtagtactcgggaaagtcaagtttttaggttcttccgtgaaaccctgctctgcgccccggatgtcgcacgtatgcttaccaggctgttgacgtggcatggagtccttccaaccgggggtccagcgtccccactgctaagcttccactgcaatcgcgagatgttcgatgagatagccagggaagccgagcgagctggggtagtgttcacatgttacgttgacgacattacgttttctggcacaaacgtcaagcgaggcttcgcttccctgattgatagaatcgtgcggcgctctggctatcgaattgcagcccagaaaacacgattttaccgccctaaccaggccgctctggttactggcgctgtgatccaggacggaaaggtgtccgtacctcatgctaggcggagaaaggcgaggagaattgagattgccgcgaggagcactaaggaccctgcaaggagactcgcactgaccgaaaaattgatgggactggctggcgaagcagcctacatcgaccccgcctatcgcggttgggcttacgcggttagaggccgacttgtggctctgcggaaatctgccgcctga

SEQ ID NO: 10287 - RNA, 1014 nt, synthetic construct
  source 1..1014: mol_type = other RNA
atggccaaacgcggactctatgatataaatcagtgtgccctttacaaactggggtctaaagctcgcctggcccaaatcttgggcgtgcctaaggccagactgctcatactggttcgtcgatccgagaactacagggttttcacactaccccaggaaatttgcgaatttaccggaaaggtgcgcaaggaacggctcgtgcaagagcctaagcccgagctaaggcgggtccatgagcggattcagaggctgctgtcgcgcatccgacctcccgaatacggtcacgctgctgtgaagggacgctcctatagaactaatgcggaggcccatctcaacgggcccagaatcgccactttcgacgtgagacgtttttatccgagtacttctcggtccgcagtacggaacttcttcagcgagcaactgtgctgcgctcctgacgtcgcagatcttctggcccaattgtgttgctggcagaacgtgaaggaatccaatagttctagcgggctcccaacggggagtccgctttcaccaatcctctcactgtatgcgaataggccaatgtttgacgtgttaaacgactacgcaggccgccaccagctggtgttcacatgttacgtagatgatttgacctttagcggcgagatgctcccagcaggaatctctaagttcgtcgagaagatcgttacagccggtggccacaccctggctaccgaaaaaacaagattattccggagaaatcaggtgaaacacgtgactggggtcgtactaagcaactcccaggttaaggtcccccacgcaaggtttctgaaagctcgtgcgattgccagcgccattaccgcccatgaaacggccgatgcaaggtacagattgctgctgcagcgaaaactcgccggtcttttgggcgaggccgctttcctggacagcaggtttgctggctgggcgaatcgggcatatgctgacttacgagcagtgcaggccgaggtgcatatggctgagtcacttcacgtcgaatcatga

SEQ ID NO: 10288 - RNA, 1011 nt, synthetic construct
  source 1..1011: mol_type = other RNA
atggctaaacgggagctgtatgacataaatcagtgcgctctgtataggttgggatccaagacacgcctgagtatcctcataggggtgcccaagagcaagctcctggcactggtgaactcactggaaaactatcgcgttttcccgttaccccaggaggtgtgccaatttactgggaaggtccgcaaagagcggttggtacaagagccaaagccggagcttcgaagggtgcacgagcgtattcataaactgctcagcagagttagaccccctgagtatggccatgcggcggttaggggcaggtcctaccgatccaacgccgaggcacatatcaatggccggcgggttgctacgtttgacgtaaggcgtttttacccctctacatcactgagcgccgtccgcaatttttttgccgatcagctctgttgtgcacctgacgtggcagacatcctggcacgtctgtgttgttaccgcaatgtgaaagaagcctcatccctcctcggtcttccaaccggctctcctctcagcccactgctttcgttgtatgccaataagcctctattcgatgccctctaccactacgctggacgccacaaactggtgttcacctgctacgtcgatgacctgactttctctggagcactgcttccacgaggattaagtcagttcgtgaccaagatggtggagtcttgcggccacacactggctcaggaaaaaactagatttttcaggtcaaaccaagtgaaacatgtgaccggtattgtcatcagcgacaacgagatcaaggtaccccacgcccggttcttgaaagcccgagccatcgccagtgccattgcgaagcacgccccagctgatgtccagcagcggttactgttgcagagaaagctagcggggcttctcggggaagcagctttcctggatggcagatatgctggttgggccaacaggtcctacgtcgatctaagagcaattcaggaagaagctagagctgccgaacttcatagccctgaatga

SEQ ID NO: 10289 - RNA, 1044 nt, synthetic construct
  source 1..1044: mol_type = other RNA
atggcgaccagagggttttactcgattgaccagtgtgcactcttcaagcttggctccaagactagactcgccgaactgttacacgtccccaaatctcatttgacgaaacttgcggccggctccgacaactaccgcctgttcgagctaccacgagaggtgtgcgaatttacgggtaaagtcaccaaagccaggtgggtgcaggagcctaagaatgacctgcgccaagtgcacgaacgattacagaaattgctggccaggattaggcctccagagtacgggcatgctgctgtcaagggacggagttatcgtacaaatgccgctgcacatgtacacgccgctgtggctgcgacttttgacatacggcggttctacccatcaacacctcgtctggccgttagggatttctttctccatacactcagatgcgcctcagacgtagccgaactgttgacgaccctgtgttgctaccaggacagaactgaagaaggtgcacagtgcgggctccctacaggctcacccctttccccgatactcagcctgtatgctaaccgagccatgttcgataggctccaccggttcgctctgcaacacgagttgacctttacatgttatgtggacgatctaaccttcagcggtcccctgttaccgcgctctctgggacgctttgtacggaagactgtggacgcttatggccacagtctagcagttgagaaaaccaaagtgttcaggagggggcaagccaagcatgtgaccggagtcgtgatcgttaataacaagatcaaggtcccaaacgcccgctttaaaaaggcacgcgccatcgcagcggttattcagagaactgccagcgatgactatatgcgactgcttgccttgcagagaaagctgtctggcctccttggcgaggctgcattcctggatcccgcatttagtgattgggccagacgtagctaccgggatctgaagaaaatcaatgaagaggctgccacctctacatccggggtgggagcagcaaaggagggcactggagctgtggcgttcctgtga

SEQ ID NO: 10290 - RNA, 1023 nt, synthetic construct
  source 1..1023: mol_type = other RNA
atgctgttcatgaaaaagcagaagagctatagtatcgaccagtgcgtgctctataaggttggaagtaaaaagcggctcgctgacatcttgaatatccctctgtcgtccttgttgaaactggctaagtccaagaacaactaccgagtcttcgagctcccttttgagcagtgtgaattcacaggaaagaccaaaaacgccagggttgtccaggagccgaagaagctgctaaaggccgtacatgctaggttacaaaaactgatctctcggattgaagctccaaagtacggccacgccgccataaagggacggagctatagatctaacgcctctgaacatatctcttcagtgtacctggcgactttagacgtgcgaaagttttatccctccacgaggcaaagcctggtgcgtaattttttcgccgatcagctccggtgcgcaccagatgtggcggacatcctgaccaagctctgttgtttttttggggcaagtaagacaggaggatccgttggcctccctacagggagccccctttcaccaatattaagcctttacgcaaacaagcctatgttcgataagctgcaggggtatagtaacgacaactcactcatcttcacgtgctatgtggacgacattactttttctggcgaggcccttcccaaggacattgtgagaaaggttggcgagattgtgtactcctacgggcacactattgccgtagaaaaaaccaagatctttcgcgagaaggatacaaaacacgtcaccggtgtcgcaattaaaaataataggatctctgtcccacattccagattcaaaaaagctcgtgcgattgagaggataataagcaatactccccaggaggaactagccaaaaaaagaaccctgcagcgcaagctggctggtctgcttggcgaagcaggctttttggattcaagatacaaaccgtgggccagccgctcctacgtggatctgaaaaaactggagtatgacttcaatcaacagtcgcgccaagtggatttcaaatga

SEQ ID NO: 10291 - RNA, 1005 nt, synthetic construct
  source 1..1005: mol_type = other RNA
atgacaaaccctcctctccgtctggtcacaaagacccccaaaaagttttatccgattaatcagagtgcactatataagattggaagcaaaaagcggctcgccaagatcctggccacctcactggagaggatcttacttttatctacggccactgataactacaaaattttttgtctcccagaggaagtctgcgagttcaccaaaaaaaccaagaaatctagatgggtgcaggaacccaagcgtcccctgcggtcaattcacgaacgcatccaaaagcttttgaagtccattatctaccccgattatagccacgctgccgtgaaaggcaggtcttacagaaccaatgctgaaacacataaagatgccacccgagtggcaactttcgacctgcgaaagttctacccctccacctcaagctccagagttagggatttctgggcggagcagatgctttgcgcgcctgatgtggccgacttgcttgcgaaattgacatgtcacgaggggtgtctcccaactggttcgcctctctctcctctgctgtccctttatgctaaccgcccgatgttcgatgacctgaatgagctggccaacagccataacctcaagttcacatgctacatcgacgatctgaccttttcaggtccaataatcccaattgggctgccccggcttgtcagtaatatagtccatcgcagtggccacacactcagcgttgagaagactaaaatttttcggagcgaccagaggaagcacgtgacgggcgtggttgtgtacgggaattccttgcatgtaccttacagcagattttttaaggctagagccatccaaaatgcattcgacctggagaaaaactccatcgctaagctggctctagcacggaagctgagtggattgctaggagaagccgcctatctggacactaggtacgcagacttagctaaaaagtcttatgtagagctcaaacgaatcaacgaagaaataatgcgcgacaagctgccattctga

SEQ ID NO: 10292 - RNA, 960 nt, synthetic construct
  source 1..960: mol_type = other RNA
tacactatcgaccaatgcgctctgtacaggctcggtagcaaagcccgcttatcggccgtacttggaatcacactggattggcttctacagctcgccgagtctgaaaagaattactgtttgttcaaccttcctgaagaggtgtgcccctttaccaggcgcgtgaagaaggctagagcggtacaggcacctaaaaatggcctccgtaccgtgcatgagaggattctgcacctattacggcccatcattctgcccacgtacgcccacgctgggatcaagggaaagtcctaccggtccaacgctgctgctcacaaagattcaccccgcctggctgcatttgacatcaggaaattctatccctccacgaccgccagccgagtttattacttcttcgccgacaagatgctttgctctcctgacgtcgccaggttactgaccgcactcacttgctataagaatggcctccctactggctcaccgctgtctccgctgctgtctctgcatgctaacatgccaatgtttgatagcttggaggccctggccttgagtaacgacctggtgtttacatgttacgtcgacgatctaacattcagcggggaaaaattgccaatcggcctgccaagactcgttaaagggatagtggaaaagtacggtcacaaagtctcagaggaaaagacccgcctctatagaagacgacaggggaagcacgtgaccggcactgttctgctggatggtcggattctggtgcctaatacacggttccataaggcacgcgcaattagtgcggcgcttgcatccgagagagatccagcactgcggctcgaactcggaaggaagcttagcggcttattgggagaggccgcctttattgacgaccgttatgccaaatgggcgagtgacagctatatatccctgcgaaaattgcaggctgattttgcctgtgaggaggcatcactggattga

SEQ ID NO: 10293 - RNA, 1005 nt, synthetic construct
  source 1..1005: mol_type = other RNA
atgcagaagtctctgcccaacccacccccgactaaaaaaatcaagcggacatactccatcgaccagtccgctctctacaaaatcgcctcgatgaagcgtctggcctccctaataggcttgccccgcgggaaattactgaggattgccgggggtgcccataaatacaaaactttcgttcttcctgaggagaaatgtccctttaccggcaaggtccgcaagagccgaaaggtggaagagccaattaatgaactgcgctatatccacgagcggatccacgcacttctgtgtaaagtggatcatcctgagtacgcgcacggtgctgtcaagggacggagttatcgatctaatgcactagcccacgtggagtctcaaagtcttgccacctttgacatgcgtgaattttacccttctacgagcgagtcaagagtatatacattctgggtagagcagatgtgctgtgcaccagacctggcgaacgtgctcgctaagctgatctgctataaaggcagattggccacaggatctcctgtttcccctcttgtcagcctctatgccaataagcccatgtttgacgaactgtcaaggatagctttgagccggaacctgaagttcacctgctatatcgatgacattaccttcagtggtcagaatttgccgcgcaactttgaacagtggatagcttcaatcgtggggagatacggccatgcactgagtgagaaaaagacgaggttcttcaggagcgagcaggccaagcatattactggagccatcattaaagatgggctcgtcaccgcaccacacagcaggttccagaaaatgagactgattggaagcgctctccggcaggtgaaggattttaacctgagaaagtcgttactgagacgccaagccggcctcatcgcggaaatagcatacttagacaagtcattctccgctatggcagaatccgcgaatcaacagtttcgagatttgagggttaaggctgccacagacattgtggattga

SEQ ID NO: 10294 - RNA, 1047 nt, synthetic construct
  source 1..1047: mol_type = other RNA
atgcccagagggctgtatgaggtgacccagtgcgcgctctataagatcaattccaaggcacgcctcgcaggactgctgcatgtcagcgtgcctgtgatgttaggtatggcgtcctcacgcaagtaccaggagttcacactgaaagagaaagtttgtccattcggaggcaaatcccgtaaggcacggatggtgcagactccaaccgaagcgctgcggcctctccacgaccgtattcatgacctacttagacgctgcgcccctccaaattacgctcacgccgccgtcaaaggcaggtcttacaggactaacgctgaggcccacaagggaagttgcgtggctgccacattcgatctggaaagcttttactcctcaacctcagagacgactgtattccgattcttcgttgatcaaatgaagtgtgcacccgatattgctagtttgctggcaagactcatctgcgtagaaagggacgatagttatccatgtctccccactgggagccccctttcgccattaatctccgtgtacgccaataaacctatgttcgacaagtttgcccatctggctgagacacacgccctgagctttacgtgttacgtcgacgatctaactttctctggcttggctatgccgaagggcttggagcggatggtcaccagcgtggccaaacgctatggccacacattagctacacacaagaccatgacctttggtccttctagcgccaaacatatcaccggggtggttatctttaacggtaagatcactgtgcctaatgccagatttcggaaagctcgaaaaatacaggcagcaattaacgctgaaaatgacccgattaaaaaaattagcctcatgcaaaagctgtcgggcctgcttggagaagccgcctatctggacaacaggtactctaatctggccaagaaggctcagcatagtatgtccgaattcaggttgaactctccagcaatcaccatgtctgcgatacccgtgacgcaggaggacgcctcaaaggcagggtttgttcttacaaacgatgtccccttttga

SEQ ID NO: 10295 - RNA, 1023 nt, synthetic construct
  source 1..1023: mol_type = other RNA
atggccggctacgctcttaatcaatgtgccctgttcaaggtaggctccaaagccaaactcgcttccgtgcttttgctaaaacaaagagatctggtcgacctgagtgaagatggccagtatagacaattcaggctggaggcctcggtttgcgagtttacaggcaagcgcacgaaggcacgtgacgttgctgagccaaagaaggccctcaaacgggtccaccagcgtattggggatctgctcagccgcgtgctgctggtggaatatgcccacgccgcagtcaaaggtcggtcatacagaacgaatgctgctgctcaccagcatggcgatgagatcgccacatttgacatagaaaacttctacccctccaccacccacgcccatgtgtaccatttctttttccgagaaatgaaatgcgcagctgatgtggctcacctattggcccgacttctctgctttagagcaacccccgaagcattaggatgtctgccgaccggtagtccggcctcacctattatgtctgtgtatgctaacaagcctctgttcgacgctctccacaggctggcccaggagttgggacttgtgtttacttgctatgtggatgacctcacttttagcggaccccagatcccaccatcattaggcaggcgggttgactctatcgtcgccgcccatgcacagaggctgcatgcatccaagtctcgcgtgttccggaaagggaagccaaagcacgtaaccggagtggtcatcgcggacgggaagcttgctgtccccgatgcgagattcttcaaagcccgcagagttgagcagcggttggtggccgagacagatcctggggaacgcgcgaggttgagccgaattctgtgtggtctgctgggggaggctgcctacctggacaacaaatatgccaattgggcaaaggacagctaccggaagttagcagcggagactcgtctcgcggtagtgaccgctgcaggcacaatagcctttgctgcaacaagggccgaccctcccactggagcatga

SEQ ID NO: 10296 - RNA, 1113 nt, synthetic construct
  source 1..1113: mol_type = other RNA
atgtcagagaaccagaaacctcccgccccagccaaaccacgaaagacttacgctttaaatcagtgtgctctgtacaaagtgggctccaagaagcggttagagaaaattctcggcgtcaacgttgccgaccttatccgcctcagtgcagacgaaggcaattttcaggtgtttgaattggaggcggaagtgtgtgagtttaccggtaagacacggaaggccaggtgggtacaaaatccggtcccagagctcaaggccatcctggctcgcattaccaagttgctgagccgggtacgggtgcccgattactgccatggtgctactccgggacgctcttataggtccaacgcacaggcccacgtgggagcacagtccgtggcaacattcgacctcaaagatttttttcccacaacgacgtctaaacaagtcttccagttcttctctaaggacctggaatgcgcgccagacgttgcgggactccttacagatctctgtacacatggccacgtgctacctaccggcgcaccgacttcacccattcttgcctattgggccaataggcggctgttcgaaaccattgaccgtaggggaaaagttttgaggctgaaactgagtgtgtatgtggatgacatcaccctatcaggggatgctatcccccgatccctggccgatcaaatagaggggattgtcaagtcccacgggcacaagctgagcggccataagactaagatctttggtcctagccggccaaagcacgtcaccggcgtcgtcataaccgggcagtcgctgagagtgcctcatgccagattccacaaggcccgcgctatcagaatcgccctgtatgctgagaaagacagccgtaaaagagttctgctggctgcgaaattatgcggacttctcggggaagctgccttcttggatcccgcatacaaaagaatggcaagtgacagcgtaaagctcctagcagcagccaaggctcaggtggcccccagactgtcaaggagtataggaggcccacgtcgcaagaggggtcgatctaaccctcgcaccgttgctacaatggggggcgtgcagcttagagagcaattggatctgagcgacgcccctactaactga

SEQ ID NO: 10297 - RNA, 984 nt, synthetic construct
  source 1..984: mol_type = other RNA
atggccgctaaaaggctcaaatcataccctctcgaccagtgtgcactgtataaagttggtagcaagaaaagacttgcgaagattctggacgtagatctccccaagttggtgaggctgtctgcagaccagggtaattttcaggtctttgaaatcccagaagaggtgtgcgagttcacaggcgccaagaaaaaggcacgatgggttcagaaccctgtgccagacctgaaagcaatcctaaagcggatcgctgggctacttagccgcgtacaggtccctgattattgtcatggcgcgatgaaaggccggagctaccggtctaatgctgccgtgcacgtggaggaggaatcagccgccactttcgacctgaaagatttctttccttccaccacgagcgcacaggtgtttgctttcttccggcacaccctgcaatgtgcgccggacgtggcagggttgttaactgatctttgcacatacggcaaaatcttgcccaccggagctccgtccagtcccatcctggcttactgggccaaccggaagctgttcgacgttttggaggggcgtgggagggatctgtctctgaaactcagtgtgtatgtcgacgatgtgactttttccggagacgccattcccaggtcactccctgaacaggtggacggcatagtcagtaagcatggccagaagctgagcgcccataagacaaggatattcggaccagggaagccaaagcacatcaccggagttgtcgtggccggcggaaggttaggtgtaccccacgcacgtttccgaaaagccagagctattcgcgcggccttagccgcagccaaagatgacgagcaaagagagcttctggcctcgaagctttgcggactgctgggtgaagccgcctttctcgatccacgatatcgccgctgggctgaggattccgcacgccaactcgcggcaattaaggccgctagattgtctgctaagagagctgtcaagtga

SEQ ID NO: 10298 - RNA, 1002 nt, synthetic construct
  source 1..1002: mol_type = other RNA
atgaaaaataaacgacccccgaagagcaaagataaaaaatacgagatcaaccagtgtgctctgtttaaagtcacgacgaaaaaacgcctcgcttccattttgggggttgacaccggcacactgtctaggctgagcatagacgaaagaaattataacgtgttcgagatcgccgaggagaagtgcgaattcaccggaaaaatcgtaaaggcacgattagtgcagaatccagttcccgagttaaaggatatacaccgtcggatccatgacttgctctcccgggtggtggcacccgattactgcttcggcggggcaaagggtcggagttacagatcaaatgccgcagcgcataccgactctgtggcagcggccacctttgacctgaagagcttctttcccagtacaaagtcagcccaaatttttggattcttcaaagacaagctgctgtgtgctccggacgtcgctgggattctcaccgatctgtgcacctacaagggtgcacttgccactggctcgcctgccagcccacagcttgctttctgggctaatctccctctgtttgaagtcctggagacaattgctcaccggtataacctaatcctatccgtttacgtggatgacatcacaatgtctggtcctagggtgccagctcagctgcagcaccaggtgaacgaggtggtacaaaagtatgggcacaagctgtcacctggaaaaactaagatttttcgcaggggcaatcccaagcacataacaggggttgtcgtccataacggcttcttgcgagtaccaaactccaggatgaaaaaggcaagagccatcagcgaagcccttactcgcaccagcgctactgatctgactcagcgggagcatctcgccagtaagctctccggcctgcttggagaagccgcccacatcgattctcgctatcgcccctgggcccaacgttcatacagagacttgaggttcttacagagactcgcgaacgtgcctccaattgccttttga

SEQ ID NO: 10299 - RNA, 1107 nt, synthetic construct
  source 1..1107: mol_type = other RNA
atgaaggaagaattcaaatccaagaagaagcggaagctttactcgctggaccaatgtgcacttttcaaaattgggtccaagaaaagattggcggccattctgcgagtttcccaggatcggcttgaaccgctgggggtggacaagggtaactatttcgtgttcacactaaaagagcagatttgcccttttacaggtaaggtgaagggagcccggagggttcagaacccccttccagaactgaagctggtacagcggaggatcctgtccctcctcgcccgtgtggaaatgccagaattttgccatggagccaaacaagggagtagttacaggtcgaacgcaaaagctcatgtggatgcaaagaatgtcgcgacttttgacttaaaatcatttttccccagcacaagcgcttctcgcgttttcagtttctttagaaatacgctgcagtgcgcaccggacgtcgcaaggatcctgacaaagctctgcgtttgtcacggagctttagctaccggctcccctgtgagcccaatcctggcctactgggcgaattgtgagctctttagagtcctgaaccgcctggctgaggagaatcacctcttaatgaccgtatacatagacgatttcactatctctggcgacgtgttgcctcgcaatattgtgtggcaagtgaagtctatcgttgagaaatatggccactccctcagtctgtctaagactaaaatatttcgggagaacgaggctaaacatgtcaccggtctggtcatctacgaggggaatcttaccgtcccacacattagattcaagaaggcccgcgcaattgaaaaggcgatagctgtggctagcaacgacgaggaaaggttggatttgatgcgaaagatgggcggcctactcggagaagcagcttatgtggataaacgttataagagctgggccttcaaaatttacagcaaaatctcacaggcccagtcagtgctgcgaagaaaagaggcctctgccagtgagaaacgcaaatttgaggaggcctgtgtccctgatgtaatgcccgacaaggcctcatggtccgacatcagccccaaggcccaggataactccagctctatgaagtcatga

SEQ ID NO: 10300 - RNA, 990 nt, synthetic construct
  source 1..990: mol_type = other RNA
atgcagcctaaaaaaaacacccgtaagaagaggaagccggataatcagctgcccatccaccagtgtttcctttacaaaattggctctccaaagcggctcgctgaccttctgaacgtttcagccgccgagctggaagacactctcagatctgagaacaactacaagctgttcaataagctcttaagccccaacccttttacaggaaaacttaggaagaaaagagcagtgcaagaaccaaaaagccggctgagaaagatgcatgagcgaattttggcgcttctgagaagggtgcaatacccatcctatgttcagggcggagtgaagcataggtcctaccagacaaatgcagcaactcacttgggagcccgtcagacagccaccttcgatctgaaaaatttttatggctcaactcgctactgcctcgtccacgatttttttcacaagtccctgtgctgtccgaccgatatagctggccgcctagcatccctcacaacctggaatggggtgatgccaaccgggagtcctttatctcctctcctaagtttctgggcagccaaagggttttttgacaagtgtgaaactctggccgccaagtatcggctgaactttacatgctacattgacgacctcacgttcagtggtgataaaatcagcggtaagttccaatcagaactggagatcatcgcgagccgctttggctatgaattagctaaagagaaaaccaaggtcttcaggttcggaatacccgcacacatcaccggcgtgatcagccataaggctaaactgtcggtcccccactctcgcttgaaaggtgctagaaagatccaggatgccatagagggccgaggggaggcctatgggttcactactgcccagttgaaacagaagctggctggaacaattaatgaggcagctacgattgacgccgtaaagtacgaaaagtgggcgacccatacgcggaaggccgctgaagacaacgagaaagagtga

SEQ ID NO: 10301 - RNA, 990 nt, synthetic construct
  source 1..990: mol_type = other RNA
atgcagcccaagaagaacatacggaagaagaggaagccagacaacgaattgcctatccatcaatgtgcactgtacaaagtgggaagtcccaagcgcctggcagacctcctgaatatttccacaatcgagttagaagtcattcttcagtccgagagcaattacaagctgtttaataaggttctggcgccaaatccattcacgggaaagtcccgtaaaaatagagcagtgcaggagcccaaatctaggcttagaaagctccacgaacgaattttaagcatattgaggcgagtccagtatccgggctacgtgcaaggcggggttaagcaccgcagctaccagacaaacgccgctatacacttaggggcccggcagacagccacctttgacctgaagaatttttacggaagcactcgctattgcctggtgcatgatttcttccataacacaatgtgctgcccaactgatatcgccggacggttggcctctttgactacctggaacggtgttatgcccacgggctcacctctatccccgctgctgagtctatgggctgccaaaggacttttcgacaaatgtgaagtacttgctattaagtatggcctgaacttcacctgttatattgacgacctgactttctccggtgatcaaatctctggaaaattccagtcagagctcaaaatcatcgcatcgagatttgggtacgaactggccaaggagaaaacaaagatttttagatttggggtacctgcgcacatcaccggcgtgattagccacaaggcgaagctctcagtgcctcatgccaggctcaaaggggctcgtaaaatccaggatgctatagatgggaaaggcaaggcctatggtttcaccgaggcacagctcaaacagaagctggcaggcactattaacgaggctgccaccatcgacgctgtcaaatacgagaaatgggccatctatagtcggaaagatgctggcgacgaactctctcaatga

SEQ ID NO: 10302 - RNA, 987 nt, synthetic construct
  source 1..987: mol_type = other RNA
atgcagctgaagaagtcaacccggaagaagagaaaacctgacaatgagctgccaattcaccaatgtgggttgtacaaagtaggaagtccccgcaggctagccgagctcttaaaaatcagcgagatagagcttaagaaattcctcgagtctcagaataactataagatcttcacgaaggtacttgctcctaacccgtttacaggcaaatttaggaaaaagcgagccgtgcaggaacccaaataccgcttaaggaagctgcacgagcgaattctctgtatgctgcggagagtccagtacccagactacgtgcaaggcggagtgaagcatagatcctaccagaccaacgccgctattcatttgggcgcgaggcagacagccacttttgatctgaaagacttttacgggtccaccaggtactgcctcgtccacgattttttcctggacgtcatgtgctgtcctacagacatcgcaggtcgtttagttagtctgacgacatggaacggagttatgcccaccggaagcccactttcccccctgctctctttctgggccgctaaggggctctttgacaagtgcgaagaactggcagtgaaatatggtctgaatttcacttgctatatcgacgaccttacatttagcggcgatcagatttctggagggttccaggcggagctaaagattttggcaagccgtttcggatacgaaatcgcaaaggagaaaactaagatctttcggttcggtgtgcctgctcatatcactggcgtcatctcacacaaagccaccctcagtgtgccacactcaagactgaaaggtgttcggaaaatacaagatgccattgatggccgcggcgctgcttatgggttcaccgcagtgcagctgaaacaaaagttggctggcgccatcagcgaagccgcgtcgattgacgccgtgaagtatgagaagtgggcattctattcccgcaaggatatagaaggggatctggtgtga

SEQ ID NO: 10303 - RNA, 996 nt, synthetic construct
  source 1..996: mol_type = other RNA
atgcagcctaaaaagagtgaaaaacctaaacggaaacccgataacgaaattgccatcaatcagtgcaggttatataaggtcggcagcttccgcaagctgagtgacatcctgaaaacttcccctgccgaaattatggacctactcgtgtctgataaaaactacaagaaattcacggtttcgcagagcgctaatccgttcaccggtaagccacggaagcagagagaagtgcaagagcccaaaagtaagcttcgccgtgtgcacaacagagtgctggccctgctacgaagggtggggtacccggactacgtacagggcgcggtgcgatatcgttcgtaccagaccaatgctgctctgcacatcggttccagacaaaccgcgacttttgatatttccgacttttacggatcaaccaagcggcacttagttcatagttttttccatgacgtcatgaagtgtcccaccgacatcgcaggaaaactggccaggttgacaacttgcgatggcgtcatcccaactggctcacctctcagccccctcttgtccttttgggtagctaaggggctctttgatgagtgcgcagctgtggccaaggagtacgggatgaagtttagctgttatattgacgatctgacgttctcaggggatcggatccccagggagttgaagagccgcctgaagattatatgtcggcgctaccgctatagactgaagagcgaaaaaacaaaggtgttcaggttcggagagcctgcacacatcaccggcgtcattaaaatggacgctgttctgagcgtgccattcgcccggctgatggcagtccgaaagcttatggatgcaatagagggaagaggggactcatatggttatacagtggaggagcttaagagaaagctcgctggaacagtttctgaagccgcctctatagatggccaatttaaaaaatgggcacttcatgccaaacaggacgccaaatcctcttctaggccatccgcgtcttga

SEQ ID NO: 10304 - RNA, 978 nt, synthetic construct
  source 1..978: mol_type = other RNA
atgcagcccggcaaatcaaaacgggtggagagaaagcctgataattcacttgagttagaccagtgccgactttacaaaattgggtccgaaaagagattagctgaaatattgggattgtctctgcaggaccttaggctcctgctgcggagcgaatcaaactacaagaagtttaccataagtcagagcgagaacccctttactaagaagccacgcaagaagagggctgtccaagtgccaatgaatagactaagacgggtgcatgctaagatcttttcatttctccgtcgtgtgaaataccctgattatgttcaaggtgctgtgaagggacgcagctatcagactaatgcagccttccatgctcggagcaggcagactgcaacgttcgacatttccaagttctatgagtcgaccaagtatcacctggtgcacgaattctttctgggtgcactgaagtgcccaactgatatagcgggcaaactcgccaggctagtaacctgtgacggggtcatgccaaccggaagtctgctgagccctttactctccttctgggtggccaaaggcatgttcgatgagtgtgcggcccttgcagaaacatacgacttgaaattcacatgctacattgatgacttgacattctctggcgaccggatcccccgagagctgaagtccaagctcaaaattatcgtttctcgctacggctataaactggccatcgagaaaacaaaagtcttccgctttggtgccccggctcacatcaccggggttgtcaaactcaatggagagctggtggtacccttcgcccgcctgatggctgccaggagaatctccgatgcactggatggcaagagtcctgactacgggtatacgaagaacgagctgaagcgaaagctcgcggggaccattgcagaagccgcaaccatcgacggaaacagattttctaaatgggctgcctttgcccagaaagaagccagggattga

SEQ ID NO: 10305 - RNA, 1005 nt, synthetic construct
  source 1..1005: mol_type = other RNA
atgcgaatagagatgcaaccaaagaagaatgagaaaacgaaaagaaagcctgacaaccagatccccattaaccagtgcagattgtacaaagtcaccagcccaaagagacttgccgaaatactgaatctcgacatgacagggctcctggaactcctgaattgtagcaccaattatcgcttttttgacattcctctcagcattaaccccttcaccggcaagtcccgcaagaagcgatctgttcaagagcccaaacagaaactccgtagagtccacaaaaggatcctacttcttttacgtcgcatgtcctacccgaactacgtgcagggggccgtgaaacacaggagctaccagacaaatgcagaggtgcacaaggagagtagagaaaccgcaacgtttgatatccgggatttctatggttccactaagtatcacctggtgcatgactttttcctgcgggtaatgggatgtcctaccgacattgctggcaaattggctaacctgaccacatgtaatggagccatgcctacaggatcacccctatcacctctgctgtcattttggattgctaagaagatgtttgacgaatgccatgccttggccgagtcccacaaactgaagttcacttgctacgttgatgaccttactttcagtggaaaccacatcccacggatcctgaagtctaagatcaaaataattgcgtcacggtatgggtattccatagccaatcataaatcgaggcacttcaggttcggtcagccagcacatatcactggcgtgatctctttagataaaaagctccatgtgccctttagccgcttgatggcagtcaggaaggttactgatgccatcgatggtaacagtgacaccttcggctttactaaaacagagctgaagaagaagctggctggcatggtatccgaggctgcgaccattgataatcggttcgggaaatgggccatctacacgcagaacgaagtgagtgacagctctacaccgtctgattga

SEQ ID NO: 10306 - RNA, 972 nt, synthetic construct
  source 1..972: mol_type = other RNA
atgcaacaaaagaaaaaggagaaaaacgagtgtaagactgcaaaaagctatcccatcgaccagtgtagcctctataaggtgggaagtgccaagcgattggcggctgtattggggatagagctggacaaactaaagaagctgttactgtccgattttaactacaaggtcttcgacatcgcgggcagcgttgatccattctcaggcaagatattcaagaccagacacgtgcaggaacccaaagatgacctacgcgctgtgcattcgcgaatccttcggctgttacagaacgtgtctattcccccttacgtgcatggggccattaaaggtcgttcataccagacaaatgccgccgcccacgttaaaggcaaacaggctgctacttttgacatccataatttctacgggagcaccaagtctaatctggttcacgatctgtttcatgacgtgctggcttgtccgtcagatgtggcgggaaagctcgccaggcttgtaacgtacaaggggatgatgcctactggctctcctctcagccctctgttgtcctattgggtggccaagccaatgttcgacgagtatgcttgcctggcaaggcagtatggtctggaatttacatgctacatcgacgatcttaccttcagtggggaccgcattccaagagatctcaggtaccgggtcggtattattgctaggcgctacggatatcgtatctccaagaagaagacacggttattcgtccaaggcaaagtgaaacacattaccggggttgcagtcgcagaaagcggactcatggtcccctttagtcgcctgaaagccgcaaggaaaatcatgggagcaatcgagggttctggcgagtcccacggcctgtccagtgaaaagttgagacagaaactcgccggccttataggcgaggctgccacaattgaacagagatttggaaaatgggcccggaaggcaagaaccgcctgctcatga

SEQ ID NO: 10307 - RNA, 1002 nt, synthetic construct
  source 1..1002: mol_type = other RNA
atgcagcggaaacctacaaagaggaaacggaaactatttaagcgttacccagtcaatcagtgcgccctgtataaagtgggatccatcaagaagatctgccagctcataggaataaagaagtccaacttgaactcgatcttgaagaatccgcttcagtatagagagtttgtaaataaggagtcattcgatcacttttctcttaaaaccagcaaaacccggcagatccaggaacctactggcaacttgaaaaaaatccacgagagaatcctgtacctgctggagccagttgagcttcctaattattcacacgccgccgtgaaaaagcgatcttacaggagtaatgctgcatctcacgtgctgtctaagaagatagccacatttgacctggagaacttctacggaagtacgaagaaccatcttgtgtataacttcttcctcgataagctgaaactcccacatgacattgcaaagaagctgaccaagatcacgaccttcaataatagtatgcccactggtagccctctttcaccgttgctgagcctgcatgctgcaaaacccatgtttgatgaactcgaatccctggcgcaaaagtacaatctgatcttcacctgttatattgacgacctgaccttcagcgggtccactattcccaaatcattaaaccggcaaatcgttcatatcattaaccgctacggctataatctatccaaccataagacacgtatttttaacgagtctgaagtgaaacacgtcactgggataattattaataaggagaggctccgcgctccctatagccgatttatgaccgctagaaggattaaaaaagccatcgatgggaaggccccaatgcacaacttctccaagatcaaactgctggagaagcgcgctggtttgctcggcgaaacagcctacctcgaccccacatacaaaagagcagcgaaaaatgcccagattgaattaaagaacgcacgcaaccaaataaagaagagcactttatga

SEQ ID NO: 10308 - RNA, 981 nt, synthetic construct
  source 1..981: mol_type = other RNA
atgctgcggaaacctacaaagagaaagttgaaatacctgaaacactatcccataaatcagtgcgcattgtacaagattgggagtataaagaagatctgcgacatcataggcatcgagaagaacgaacttaatctgatcttgaagagcccacccaagtaccgacagttcgttaataaagagtctttcaaccactttagccttaagaagtccaaggagcgacaggtgcaagagcccgtgggtgacctccgcaagattcacgaaaggatcctcgaccttctaaaaccagtagaacctccagactatagtcatgcagctgtcaagaaacgcagctatcggacgaatgctgcagcccatgtgttaagcaaaagaattgccacctttgacctaaagaatttttacggatccaccaaaaaccacctcgtgtataatttcttcctggatcagctgaaactcccccacgacatcgccacgaaactgacaaaactgaccaccttccataatagcatgcccaccggctctcctctgagtccactgctgtcacttcacgcggctaaaccgatgtttgatgagttagaatctcttgcccaaggatacaacctgatcttcacctgttatattgatgatctgacttttagcggctcaactattcctaagtcgctgtctaagcagatcgtccatatcataaagcgttacggctacaacctatccaaccataaaacaaggattttcaatgagtcagaggtgaaacacgttacagggatcattattaacgaagagcggttgagggccccttacagtaggtttatgactgcgagacggatcaagttggccatcgatggaaaggcatccactcacaactattccaaaattaagctcttagagaagcgcgccggtctgctcggcgaaactgcatatctggatccgacatacaaagggctcgcccagaaagctcagctggacctcaagaccgctagagggtga

SEQ ID NO: 10309 - RNA, 1041 nt, synthetic construct
  source 1..1041: mol_type = other RNA
atgttaaagaagcctaccaaacggaagaggaagtgcctgaaacgctactccatagaccagtgttccctgtataaagtcagatcagctaagaggctctccgaaatcctgggtgtagagaaacagcggcttgatagtatcctgaagtcatcagccaagtatcgggaatttactatcgaagaaaccaccaatcctttctcttctaagtttatcaagtctcgccaagtacaggctccatccgacgaactgcgacggattcatgagcgaatactgtacctcttggagcccatcgaacttccaaactacgcccacgccgccgtgaaaggacgctcttacagaagcaatgcagccacacatgtgaactccgcaaggatggctacgttcgatctcaagaacttttatggctcaacccagaggtacctggtctatagcttcttccttgacaatctcaaatgctcacccgacatcgccgggaaattgacagaactgactacattccgtaacgctttgcccacaggctctccgctgagcccactgctgtccttgcacgcagcgaaaccgatgttagatgagctgagtaagctggctcaattacacgacctcattttcacttgttacatcgacgatctaactttcagtgggaaaaaaattcctagatcgctagaaagacgagtttctcggattgtcggaaagtacaatcatcaactcagcattcacaaaacgaagatctttgacgaggataagcctaagcacgtgaccggcgttgtgattaataagggtaagctggctgtgccccacagtcgtttccttacagcaagaaaattggagcttgcgatagccggcaagtttcctatgcatggaaacagcatgctaaaactgtgcgagaaactggccgggctcctgggagagacagcatgcattgacccaacctataaaaagtgggccgagaaggcgcaggaggatctccgcaaggccaggaccaaagacagcagcatagtggggcccgatagtactgattttggctcctgtcagcagatcgactga

SEQ ID NO: 10310 - RNA, 1083 nt, synthetic construct
  source 1..1083: mol_type = other RNA
atgtggcccaaagggttaagtcaatacttaaacggcatcaaaactgaaatgaggccccagcagtcttcggccaagaagcgcaggagctttaagttatacaccatcaaccagtcagcgctatacaagataacaagcccgaagaaactgagcaacgcccttaatcgaagcgaactcgagattgatgtgctgctgggctccgacgaaaactacagggagttcaccctacttgaggaactgaaccctttctcccacaaaagaaaaaaggcccgcttggtgcagactccgaataaggatttgcgatctgtgcacgaaagaattctcaaactgctccagagaatcgagtaccctgagtatgcccatgctggtgtgaagaagcgatcctatcggtccaacgctcaggctcaccaaaagagtaaggaagtggcaacttttgacctgtccaattactacggctcggtcaaggcacaccatgtctatgacttttatctcaaacagctgcagtgtgtgcgtgacgtgtcaggaatactgacccggctgtctactcacagaaattgcattccaaccggatcacccctcagccctctgcttgcccttcacagcagccggacaatgttcgactctctggactgcctggccaaaaggtatggactagttttcacatgttatgtagacgatcttacttttagtggcgatgcaatcccaccatctttggagagggaggtcgttagtatcgtgcgccgtaatgggcattccattaacaaaaagaagacgcggatattcagagcacaccaggccaagcatgtcacggggaccgtgatcattaatggcaatattaccgttcctcatgctcgcctggtgacagttaggcggctggaggatgccatcaacggaaagatggacagttttgggttttccgaaacaaaattgatggagaaactcgctggtgtcctcaacgaggcaagctacctcgattccaaattccgctcaaaggcgttggctgctagatccaatctgtctagcccctctccttcaccctctcccagcccatcacctgcaccacaagtagccgatgccagtatctga

SEQ ID NO: 10311 - RNA, 1002 nt, synthetic construct
  source 1..1002: mol_type = other RNA
atgaatggcattaaagccgagatgcgccaacccaagacttcagctgggtcccgtagaacttccaaactgtaccccatcaaccaatgcgccctttataagttgacctcgcccaaaaaattgtgtgaggctctcaagattgaaaagtccctgctgtctgacgtcttggagtctgatgaaaactacagagagtttacgctgctggaagaagtggatccttttagtcgaaagataaaaaagaagcggctcgtacagactccgaacaaaaaactacgaaatatccacgagcggattctacagctgctacagcgtatcgaatatcccgactatagccacgcaggtgtgaaaaaaaggtcttacagatcaaatgccttagtgcatgtcaattctaagaccattgcaacatttgacctgaaaggcttctacggggctgtgaagagttaccacgtcaatacattcttcagcgagcagctcaactgcgtgggagatgttgccggaattctgaccaaacttacaactttccggaactgtgtcccaacaggcagcccactgagcgctctcctcgcactgttcaccagcaagccaatgtttgatgacctggacgccttagccaagaagcacaaactgaagtttacttgctacgtggacgaccttacattttcgggtgacagcattcctagttcactggagagagatgtttccagcatcgtgaggaagcatgggcactctctgagtatcaacaaaaccaagatctacagggaaaatcagcctaaacatgtcacagggaccgtaatattaaataatcgcatccacgttcctcatacccgccttctggctgcccggaggttgcagtctgcgatcaacggcgagatagagtccttcggattcacggaagagaagctcattcagaagcttgccggcatgctcaacgaagcgtcatatctcgatgtgcgcttcaagtataaggctttgaccgcaaaagcaatgctgaagtccgccaagtga

SEQ ID NO: 10312 - RNA, 1008 nt, synthetic construct
  source 1..1008: mol_type = other RNA
atgtgcgcacagaaaaccaaggtaggagcggttcgggcttctcaccagcggtaccccatctctcaatgttgcctttacaagatcggaagcagatcaaggctcgccgacttactctatatagagaaggtcgaccttgtgaccctgcccggtgagcggtcgtataaggttttcacgctcccggaaaaacgagatgaatttagcggcaagatcaagaagaaaaggatagtgcaggaccctaaacgcccactgcgtcgcgtgcacgatcggattttgtacctcctgaacaagattgaactgcccgagtatgtccatgcagctgttaaagggcgcagctatcggtccaatgccgcggctcacacaactgcggcccatgaagtgctcacgttagatatcaagtccttttaccccagtgtgagttacctgctcgtgagggaattcttcagatacaagatgaaatgtgcctctgatgtcgcgacaacattggccgatttgtgcacatacaagggcgctctgcctactgggagccctctgtcaccacttctatcctattttgcatgtggtgatatgttcgacgagctgaatagactcgccgtggagtgcggactgaaatttacatgctacgtcgacgatcttaccttctcaggggagaaaattcctggcgatctagagagtagagtcaagtcagttctaaggcgctatggccatcggttagcagtggacaagactatcagatacaggccgcactctccaaaatccgtaactggttgtatcttgcacaacggagctattcacgtgccacattcccgatttaggaaagcccgcatgttggccgccgccattgctaccacagacgaccccgctctgactcataagctttacgaaagacttgctgggctcctgggagaggcagcctatctggacggccgtttcaccagctggaaagaggacaccgcacgactgctgaagctggctacccagaagctgggcgcagccaaagaagccacctga

SEQ ID NO: 10313 - RNA, 939 nt, synthetic construct
  source 1..939: mol_type = other RNA
atgaaaaagcggaaaaatctgcaactgaagaaggacatcccactggatcagtgtgccctgtataagatcaggagtaagcggcgactatgccagatactgaacatacccatctcctctctcaagggcttcatgaacgatgatcgaaattaccatacagtagacatcgaggaattcttcaacgaattaaccggtaaacgtaagaaagcgaggactgcctctgttcccaactactggctgaagaaactccattcgcgcgtgcataggcttcttagcagtatagctgccccattatatgcgcacggaagcattaagtcccggagttatatcactaacgccctggtacacgtcggctctaaggaagtccttactatggatcttagagacttttttcgctctgttaagcgccaccatgtgtacttcttctttaaagacaagctctgttgtagtcctgatgtggccggggtcctgagcaacctcttgacctatcagggtgcattgcctgtcggctcaccagcttctgcgattattgctatgtgggcctgccacaccatgttcgagaggttaaaccaactggcttcagagtaccgcctcaaattttcagtttttgtcgatgacctcacatttagcggcgaggtggtacccagcggatatcagtccttggtggagcgtatctgcgcacagagcggtctgtcggtgcgggaagacaaaaccgtgctgtataaacatggcacagccgcctcagttacaggggtgattatctacgccggagcaattaagccccctcactccaggtaccagaatctgagaaaactctctgctattctatcccaacagggggcacacgcaatcgtgaatggaaagcacgctaaatactccttccagggcgggagaaatgagacgatgctgttgagaaatattagcatcccgcacgtggactga

SEQ ID NO: 10314 - RNA, 948 nt, synthetic construct
  source 1..948: mol_type = other RNA
atgaaaaagcgaaagtccagtccccccgacaagtcaataccactggatcaatgcgcattatttaaggttagatcaaagcggcgtttgtgcgaaattctgcgcgtccctttatctagccttaaagggttgatggatgacgaccagaattaccatgctgtggaaattgaggagttcgtgaatgagctgaccggaaagagaaagaaagctcgaatcgcgtcagtcccaaacttctggctcaaaaaactgcacctgagggtgcacgatcttctgtctgccatcaccacgcctatctatgcacatggcagtattaaaaagaggagctatatcacaaacgccctggtccacgtggaggcaaaagagtttctgactatggatctcagggatttcttcaggagcgtcaagcgtcaccatgtatacttcttctttaaggacaagatggcgtgctccagtgatgttgccggcgttttaagctatctgctcacctaccaaggcgcactcccggtgggaagtccagtaagcgccacactagcaatgtgggtgtgtcacgccatgtttgaacagcttaataaactcgcctcctcttatgccctgaaattttccacattcgtcgatgacctgacttttagcggggacgtggttcctagtaagttccagctgctagtggagcggatatgtcaacagtccggactttcaatccgggaagacaaaacattcctgtataagaacggaatggctgcttcggtcaccggtgtgattatacataatggttctatcaaacccccccatagccgctaccagaacctccgcaagctctcaactgtgttgtctcagcagggcagacacgctgtgattaatggcaagtacgcccgctactcctttcagggggggagaaacgaaaccagactgttgcggaggattaacaacgtacagtccaatgactctatctga

SEQ ID NO: 10315 - RNA, 948 nt, synthetic construct
  source 1..948: mol_type = other RNA
atgaagaaacgcaaaaatcttcttcctaagaaaagcattcccctggaccagtgcgccctgtacaagattcggtccaaacgacgactctgtcaaatactcaatatcccgagtagttctttaaagacactgatggacgaggactctaactaccatctggtggagatcgaggaatttgtaaacgagttgaccggaaagagaaagaaagctagaactgcgagcgtacccaacttttggctgaaaagaattcattctcgtgtacattgtctcctgagtgcaattgtggtgcccgtctacgcccacggctctatcaagaaaaggtcctatatcactaacgcactggtacacgtgaatggcaaagaagttctgaccatggatctgcgggacttcttccgctcggtcaaaaagcaccacgtgtatttcttcttcaaggataaactatgctgctcccctgatgtcgccggcatcctgtccaaactgctaacataccagggagctctccctgttgggtcccctgtgagtgcgcttttagccatgtggacctgccactcaatgttcgatgggctcaataagctggcctcagaatacaagttgaaattctccactttcgtggatgatctcacattttctggggaactagtgccctccggctttccactgttggtggacagggtctgtatcaagtttggattgagcatcagggaggacaaaacggtgctttataaaaatggcgtcgctgcttcagttaccggtgttattgtgcatgagggtaacataaagccaccatatagccgctatcagaaccttcggaagctcagcgtggtgttgagccagcatggagcccacgccgttgtcaatggcaagtacgcaaagtactctttttgcggtgggctgaacgaagcaagactgttaaggaagtttaatgaggagaagtgtagcctcgtctcatga

SEQ ID NO: 10316 - RNA, 954 nt, synthetic construct
  source 1..954: mol_type = other RNA
atgtcccagaagagaagaaaactgcttcacaaaaagcgctacccactgaaccagtgtgccctctacaagttgacatctaagaagaaactgtcagccattctcggtgtgtccctggcaaatattaagtctctgtgcgacaacgatagaaattaccacctggtcgagatcgaagaggaattcaacgagctgactggcaaacgcaaaaaggcacgccaggccaatgttcctaacttcttcttgaagaaagttcattcccgggtgcacaatctactatctaggatccagacacccggttatgcccacgggtccatcgttgcccgaagctatgtcaccaacgctcttgctcatgtcgagtcatgggagttccttacgatggacgtgcaagattttttccgaagcgtgaagagggagtttgtgtactacttcttcaaggatgctatgttttgctcgccagacgtcgctggaatactctcaaatctgctgacttataagggagcacttgcggtggggagccccgtatccagcctgttatctatgtggacctgcaaggaaatgtttgacaggttagactctctcgctattaagaataatctcaccttcagcacttttgtagacgatctgacgttttcagggctcaaaataccggcctccttccatgaagagatcgagagtacatgtagacggtatggcttgtcaatccggaaagataaaaccaagttttacaaaaacggcatgcctgcattgatcacaggggtgattgtggttagtggcggcatagaagccacttattcgcggtttcgttctattaggaaactcagtaccatcctgtccgaagaaggcgctcacgcggtcgtgaacggaaaatacgcaaagcgtagtctgaggggcggacttttagaggcccgcagaatcggacatattagcgatagccggctgcaaagtagcggtgggtga

SEQ ID NO: 10317 - RNA, 1053 nt, synthetic construct
  source 1..1053: mol_type = other RNA
atgagacggaaactggtgcggtcctcaatcgaacgatacgacctggagcgaagtcctttcgcccagaggccaactcagcgcgacatcggcgatctactgggcacaactagaaatcacctacgctacttagtaacccacaaggagcatttcatcgtgaggagacaagaggagattgggaagaaaaagaagttgagagaactgaagttccccgtcgctgacttgaggggggtacacgaacggctgaagtatcatctgaataagattcgccagcccagctatttgtttagcccccgccgtcatcgaggccaacgggataacgcagcacttcatctggggcaaaaccagtaccttacgcttgacctgaagcagttctacccctcaaccaccgctaccatggtgagacgttggttccaagacgagatgggcatatatcctgacgttgctggcttactcacgcacttggcgaccattgatgatcacgtttcttttgggagccccctaacaccagtcctttgcaccctgattcaccgccctatgtttgataagattgcggacctctgcggtagccacggactgcgatactccctgtgggtggacgacctgacaatctccggccggtttgtgcatggagatattgtgtgtgagatcaggaagataatagcggacgctggtctgagaagtcacaaaatccggtttagaacaggttcgaggccggtgtatatcactggcatcggggtggtcggaagggagctcgttgctccgaactctttaaatctccggattaaagaattgtgggaggcactccacctggcagaaacactggatgagcgggatgattgcatccaggccctccttgcccagctgggtactcagcgccatatttgtggggcatcttccgccatcggaagaaaagctgccgatcagatgaacgccctcaggcagaaaaggcgtaaaatgcatctcgaggccgccgaaaaagctgctgccgacaggttgccacgcagtgcaactatagtccaggcccctgaagacgccccattcgatctgggatga

SEQ ID NO: 10318 - RNA, 1053 nt, synthetic construct
  source 1..1053: mol_type = other RNA
atgaggagaaagctgttccgaccccccgtggaacggtatgacctggtgcgttccccgttcgcacaaaggcctacccagagggacttaggggatttgctgggaactacaagagatcatctaagatacctcgccacccataaagaacatttcgtggttaggaggcaggaggtgattggtaaaaagatgaagctgcgcgatctcaaataccccgtcgcggatcttcgaggagtgcatgagcggttgaagtttcacctcaataagatcaagcaaccaagttacctatttagtcctaggaggaaccgcggacagcgagataacgctgccctccacgtgggtcagcaccagtatttgaccctggacttaaagcagttctaccccagcactacagccgacatggtgcgtcgctggtttcgggatgagatggggatgtacagcgacgtcgctggcctgttgacacacctgtgtaccattgacgatcaagtctcttttgggagtccgctcaccccagtgctgtgcacgctcattcaccgccctatgttcgacaagattgcagacctatgcgagcgtcacggcctccgctgttccctgtgggttgatgacctgactatctctggtcagtttgtccacggaaatgtgataagagaggtgcggcagatcatcgctagcgccgggctgagatcccacaaaatccgcattagaacgggatcgcgacctgtttatattaccggcatcggcgttgtaggccgggaactggtcgctccaaatacattgaaccttcggatctccgatctttgggaaaattaccaccttgccgagactaccgaggaaagggatgcctcaatacaggcgttactggcacaactgggcactcagcggcatatatgcggcccttcatctgaccttgggcgcaaagctgccgaccagatgaacagcctgaggcagaaacgaagcaagatgtatagagagacagcggccagagctacagcagcacggctgtctagatcactggccctcccccatgccccagaagatgctccattcgacgtagtatga

SEQ ID NO: 10319 - RNA, 1053 nt, synthetic construct
  source 1..1053: mol_type = other RNA
atgcggagaaagaccgcaaggccccctattgaaaagtacgaacttccccggtcgccattcgcacaacgccctacccagcgagacattggaaaactgttgggagcctcacgggatcatctcagattcctggccacacataaagaacattttattgttcgccgccaagaaaagatcggtaaaaagcaaaagctcagggacctgaaatatccagtcagtgacctgagaggtgttcacgagcgcctcaagttccatctgaataagatccggcagcccagctatcttttctctccaagaaggaaccgtggccagcgagacaacgcagctctccacttaggacagcatcagtacctgacgcttgatctgaagcagttttatccctcaacaaccgcagatatggtgaggagatggtttcgagacgaaatgggaatgtatccagatgtcgctgggctgctcacacacttatgtactatcgacgatcaagtgagtttcggctcccctctgacccccgtgctatgtaccctgatccatcgtcctatgttcgatcgaatagctgatctgtgcgaacgacacgggctgcgttacactctctgggtcgacgatctgactatctccggcgagtttgtgcacggcgatgtggtgcgggagatccgccagataattgccggggcaggcctgcgctcacacaaagtaaggttcagaacaggtaatagaccagtctttattaccggcatcggggtagtggggagagagcttgtggccccgaacgctatgaatttgcgcatcaaagaattgtgggaggtgtaccacctagcagagactgtcgacgagagggacgcttgcattcaggccctccttgcgcatttgggcacacagcggtacattagcggaccgtcttccgatctaggtaggaaggcctccgaccagatgaacagcttacggcagaagaggaataaaatgcacatagaggcgtctgccaaagctttggccgacagcctgatgcggagtctgacggagcaacactctgaccaggacgccccttttgatctcgtttga

SEQ ID NO: 10320 - RNA, 1050 nt, synthetic construct
  source 1..1050: mol_type = other RNA
atgcccagaaaaagaaggccacctatcgagatatatgaactgccctcctctccattctctcaacggccaactcagagggatattgggtcactcgtcggttgtacccgagatcacctgagattcctagctacgcacaaagagtcctttatcgttcgacggcaagagataatcggcaagaagcagaagctgcgggacctgaagtatcctgtagcggaccttaggcgcgtgcatgaacgtctgaagtttcacctcaataagattgtccagccgtcctacttgttttccccccggcaaaaacggagtcagagagacaatgccgagatccacctaaatcagcagcaatacctgacccttgacctgaaacagttttatcccagcacctccgccgggatggtccatagatggctgcaggaaaaaatgggaatgtacgaggacgtggccggcttgctcactcacctgtgtactgtggacgggtttgttagttttggcagtcctctcaccccggtcctatgcacattggttcaccggaagatgttcgatgaaatcgctgatctgtgcgctaataacggcctgaactatagcgtttgggtggatgacctcacaatcagcggcaagttcgtgcatggagatatcgtatcggaaattcgcgacataatctcaagagcaggactcaagagccacaaaatcgcctacaggacaggaaaccgcccagtgttcctgaccgggatcggggtggtcggcagaaatctcatagcacctaatattctgcatttgcgtattaaggagctttgggcatcataccatacggccgagagctacgaggaaaagaacgcgtgcatccagtctcttttagctcagcttggtactcagcgctatatttgtggagcaaaatccgtgttgggtcgaaaggcctctgatcagatgaactctttacgccagaaacgcagtaaaatgaggcgtgaggccattgaacaatcaattagcaacagggcattaaggattacaaaggaggtgggcctgaaagaagacgcccccttcgatctggcttga

SEQ ID NO: 10321 - RNA, 909 nt, synthetic construct
  source 1..909: mol_type = other RNA
atgcctcgtaaggctagagccaccttctctgaacggtatcctattgagaggtccccttttgctcagaggccgacccaaagggaggtggctgcccttctgggagagactagggacgacttgcgcttcctcgccactcataaagagcactttatagtaagaaggcaggccatccttggcaagcagaagaaagcgagggacctgcggtatccagtcagtcgattgagagccattcatgaaaggctgaaattccacctgaataagatcaaacaaccttcctacttgttcagtcccagaaaaaacagggggcagcgagataacgcggctctccacctgggacaacgccagtatctgacactggatatcaagcagttctaccccagcaccaccgcacaaatggtgagacgctggtttcgggatgaacttggcatgtacgacgacgtggcaggcttgctaacgcacctgtcgacaattgacgatgtcgtctcctttggcagcccccttacaccagttctatgtacgctcgtgcaccggcggatgttcgatgagatcgcagatctgtgcgagcagcgaaacctcagatactccgtctgggttgacgacctcaccatttctggagattttgtggtccgggactttgtgagagagctgcgggatatcatacgccgctatggtctgaagagccacaagattcagttccgcacagggaataaaccagtttacatcacaggcataggagttgatggggaccaggtgattgcccccaattctctcaacctccgaatcaagactttatggcatgaattaagccaggcaaagaccatcccggaacgtgacggtcttattcaaccattactggcccagctgggcactcagctgcatgtggtggggaattcatcaaaagtaggttga

SEQ ID NO: 10322 - RNA, 1053 nt, synthetic construct
  source 1..1053: mol_type = other RNA
atgccaagacggccacgcagacccgtcttcgagaaatacgacataagtaaatccccatttgcccagaggcccacccagcgagatctcggagaactgctgggcgagaacagaaacaacctgaggctgttggtggactacaaggaacagttcgttgtgcgacggcaggaggtgattggcaagcatcagaaggtccgggatctgaaataccccgtcagccgtcttcgcgccgtacatgagcgtctgaagtttcacctcaacaagattaagcaaccctcttacctgttctcacctcgcaagaataggggccagagggacaatgcactcaggcacgtaaaccaagatcagtatttgacactagatctcaagcagttctatcctagcacaactgccactatggtccggagatggtttcaagatgaactcgggatgtatcctgatgtggccggtctgctgacccacttgagtaccatagacgacagagtctccttcgggtccccactgacgccggtcttatgcactcttattcaccgcgctatgttcgacgaaatcgccggggtgtgtgaacggaggggacttaggtgtacactatgggtggatgacctgactataagcggcaagtttattcccggcgaactggttaacgagatccgtgaaatcatccgcgcagcgggtctacggagtcacaaggtgaggtatagaaccgggaatagacccgtgtttatcaccggaattggcgtggttgggaccaaacttactgcgcctaatgcggtgcatttgaagatcaaatcactgtgggacgactaccatcaagcagagacattggaggagaaagaatcatgctctcagttactcctctcccagctcggttctctgaaacatattgtgggagccgctagcttagccggacggaaagcctctgaccagatgaataccatccgccagcaacgccgacgaatgcacgtagccgcaacggctgctgctgctgcaacacggctgagcagagcccttatgccgaaagagtcgccagaggatgttccttttgagatctcctga

SEQ ID NO: 10323 - RNA, 1032 nt, synthetic construct
  source 1..1032: mol_type = other RNA
atgagacactcccgtaaaccgcacccctacgagatctatgggttagagcggtcccccttcgcccaacgcccaacacagagggaggtcgccgatctgctaggcgagacaaaggccgatctcataaggctagcgaattacaaggatcagttcatagtgaggagaagggagaatatcggcggaaaagatagagacttagcatatcctgtgtccagactgaggggcgtgcacgagaggctgaagtttcatctgaataaagtccagcagcccagctacttgtttagcccccgtaagaagcgcagccagagagataacgccgccttgcacctcgatcaggaccaatatctgaccatggacgtaaagcaattctacccttccaccacagaagaaatggtgtatcgctggttcgtggatgagctcggtctgtttgaagacgtcgctggcctcctgacaaggttatctaccatcgacggtaaggctagcttcgggagtccgcttactcctgttctgtgcacgctggtgcaccgaccacttttcgaccgcattagtgacatctgtgggcatcgcggcttgcggcactctctgtgggttgacgatctcacgatctcgggtaaatttgtcccaggacaggttgtgacttctattcgggaagttatccggcaacgaggcctgcgtagtcataaaattcgataccggacaggaaataggcctgtgatgatcaccggtattggagtggtaggccgagatcttcttgcacccaactcactgaacctgagaatcaagcaatactggcaggacctccatgacgcaatgaccgcagaagagcgcgcttcatgcgcccagcggctcttgtcccagttggggactgtgagacacattgtaggaactaaaagcaacgtcgggcagcgggcgagtgaccagatgaacatgctgaaacagaaaagagataagtggatatctgaagccagccaggaggcctcaaagaagtcagctgatgaagctgcacctatggaacatgaggacattccattttga

SEQ ID NO: 10324 - RNA, 1032 nt, synthetic construct
  source 1..1032: mol_type = other RNA
atgcgccggaactctaagcccccacagtacgagaggtacgatcttgaaaggtcgccctttgcccagcagcctactcagcgagatgtggcagccctgcttggcgaaaccaaagccgatctgcagcggcttatcaactataaagacgagtttatcgtgcggaggcaggagaaaatcggtggcaaggtacgtgacttagcttatcccgtcagcagactaaggggtgcccacgagcgcctgaagtttcatcttaataaggtgcgccaaccgaattacctattctctccaagaaagaaacgctcacaaagggataatgctgaactgcatttggaccaggaccagtatttgactttagacctgaagcagttctatcctagcaccacagagactatggtctacagatggttcgttgatgaattggggatgtatgaggatgttgcgggcctgctcaccagactcagtacagtggacgggattgtgagctttggaagtcctctgaccccagtgctctgcacgctggtgcacaggccgatgttcgacaatatctccgatatctgcgatgcgcgagggctgcggcacagtttatgggtggacgacctgacagtgtctggaaagttcattcctggaaaggtcgtaacaagtattcgcgaggccgtccgggagagaggtttgcgttcccataaaataaactaccgatccggcaatcgaccagttattctaacaggaatcggcgtggtgggacgcaatctcctgtcccccaacagcctcaatctgcgtattaagcggtactggaaagacctgcacgaggctgaaaccaacgaagaaaaggtggcttgtgcccagctgttgatgtcccaactcgggaccgtcagacacatagtagggcaaaaatcagacgttggcatgagagcagctgatcagatgaacatgcttaggcaaaaacggaacaagtggctgcaggaaaccagcgtctctctccctgcaccagaagagactgagacggcatcagccgatactgagaacatccccttttga

SEQ ID NO: 10325 - RNA, 1023 nt, synthetic construct
  source 1..1023: mol_type = other RNA
atgaggcgcaacaaaaagccagcctatgaaagatacgacctcgatagatctccatttgcacagaggcccacacaacgcgacgtggctgacctcttgggtgaaacaaaagctgatctagaacgccttatcaactacaaggaccagtttgttgtgcgtcgccaggagaggatcgccgggaaggatcgtgatctcgcctatcccaccgcgaggctgaggggaattcatgagcggctgaagtttcacctgaataaagtaagacagcctagctatctcttctctccccgtaagaagcgatcacagagggacaatgcagagctgcacttagaccaagaccagtatctgactctggatattaagcaattctacccatctacgaccgacgccatggtgttccgatggttcaaggacgaactgggcatgtacgacgatgtcgccggaatgctgacgcatttgtgcactattgacggcaaggccagttttggaagcccgctgacccctgtgctctgtacacttgttcaccgccctatgttcgattccatctccgatatctgtagcgcccgcgggcttagacattccctctgggtggatgacttgaccattagtggaagatttgttcccggcaaagtggtcacttcaatcaggacagtgatccaggattgcgggctgaggagccataagattagataccggtccgggaatagacctgtggtgataaccggtataggcgtggtcggacgggatctggttgccccaaatagtctgaacttacgcatacgacggtactgggatgatcttcacgaggctgtcaccgcggacgagaaagcggcctgcgcacagttgctgatgtcacagctaggcacagtgcggcacatcgtcggtgctaaatcggacgtaggccagcgagctgctgatcaaatgaacatgctcaaacagaaacgggcaaagtggttacgggaggctaacgcagtcactcccgccagacagcacgacgcatctgtagacgccgaagacatgccgttctga

SEQ ID NO: 10326 - RNA, 1032 nt, synthetic construct
  source 1..1032: mol_type = other RNA
atgccccgtaataggcgtagtccagtctatgagcgctacgatctctccaggagcccttttgcacaaagaccgacccagcgcgacgtcgcccaattactcggcgaagctaaggccgacctgcaccgcctagttaattacaaagaacagttcatcgtgcgccggagagagatcattggtggaaaggtgcgggacctggcataccctgtgagccgcctgagaggagtgcatgagcggcttaaattccacttgaacaagattcgacaacctagctacctgttttcaccgcgaaagaaacgctcgcagagggacaacgccgctctgcatttggaccaggaacagtatctgacattagacctcaagcagttctacccatcaaccactgaggcgatggtcttcaggtggttcaaagatgagctgggcatgtacgaggatgttgccggtctgctgactcacctctgcaccatcgacgggaaagcctctttcggctcacccttgacacccgtcctgtgttccctcatccacagacctatgtttgacgagatttctgaaatatgtactaagcggtggctacgacattccgtctgggtggatgatttaacgatcagcggacggttcgtacccggacaggtggtggaggaaattaggagtgtaattaggtccgcaggactgcgttcccacaagattagatatcgatctgggaacagaccagtatttatcaccgggataggcgtggttggcggatgcctactcgccccaaacagccttaatctcaggatccagaaatattggcaagatttgcgggaagcgggcactgtggacgagaagatctcatgtgctgagcttttgctgagtcagctgggtaccgtgagacacattgttggggctaggtctgacgtcggccaacgggtggcagatcagatgaatatgcttaagcagaaacgcggtaagtggctgcatgaagcccttcatctgacgcagctcaaagagagaacagaacctacctttacaggggtttgcgatatacccttttga

SEQ ID NO: 10327 - RNA, 1041 nt, synthetic construct
  source 1..1041: mol_type = other RNA
atgcgtcccaggaaagctcgggtgcgctttgagcggtatgagattgaacgttctccattctctcaaaagcctacccaaagagagatcgccaaactgctgggtgaatcaagggacggactcaggcgcctgatcgaggacaaggagaactacattatccggcgggaggcttttgtgggcaaaaagcagaaaaagcgcgacttgcgctacccaatccgacgtctgagggccgtccacgagagactgaaatttcacctcaacaaggtgaagctcccctcctatctgttcagtccacggaagaatagaagccagcgcgacaatgcggccctccatctagatcaggacgagtatctgacccttgaccttaagcagttctaccctagtaccactgctcagatggtaagggggtggtttcgcgatgagctgggcatgtacgacgacgttgctggaatgcttacacatttaagcacaatagatggtgctgtagccttcggctctccggttacacctgtgttgtgcgccctaattcataggcccatgtttgatagaatttcggagatttgcgatgaccacggattgcgatattcactgtgggtcgatgacctgaccatctctggtaagcaaattactggggaggtggtggaaaagattaggaaggtcataagagacgctggcttaaaatcccacaagatccggatcttccgcggaaaaaaacctgtgttcatcacaggagtcggggtggtgggggccaatctcgtagcacactccagcttacacctcaggcttggcgccgcatgggcggaatacgatagtgcagaaaccttggaagagcgagatcattgtactcaaacactgctttcactcctggggacgatccgacatatagttggcgcacagtccgaagctggccagaaagcagcgaaccagatgaacactctgagacagaagctggccaagagcagagccgaagctgcagttgccaatgtcaaacggcggatgttggcagtgcagaccacggaacacgccagagatgccccctggtga

SEQ ID NO: 10328 - RNA, 1044 nt, synthetic construct
  source 1..1044: mol_type = other RNA
atgaggagaaagaaggtgcgtgatcgctttgagcggtatgaattggcccgctctccattttcacagaaaccgactcagcgagacatcgccaagctgttgggcgagagcagggacgatcttcgaaagttgattaactacaaggagcaattcgtggtcagacggaaagccataattggaaaaaaacagaaggagcgggatctgcggtatcctgtgtccaggttgcgcgccgtacatgagcgcctcaaattccacctgaataaggtgaagctaccctcatacttattctcccccaggagaaatcgcggacagagggataacgcggtgctccacctggatcaagacaggtacttaacgctggacctcaaacagttttatcccagtaccacagctcagatggtgtggaagtggtttagagacgacttaggtatgtacgacgacgtggctggcatgcttacacatcttagcaccatcgatgagaaggtcagtttcggctcccctctaaccccagtactgtgcgcgctgattcatcgacccatgttcgaccgcattgctgaaatctgtgacgaacacgagctccgttacagtctgtgggttgatgaccttactatctcggggcggcatattagcgtcgaaatccttaagaaaatccgggctgtcgtgcaggaggctggtctaaaaacccacaaaatacgttttcattctgggagaaagccaatctttatcacgggaatcggtgttgttggcgcccatttggtggccgccaacagcctgaacctgcgactgaagactgcatgggctgaatatcacggcgcgcagacaataaacgaaagagatcactgcacccaggttctcctggcccaactgggaaccctcaggcacattgtgggggccaagactgatgcagggcagaaagcagcaaatgaaatgaattccctgaggcagaagctcaagaagcacagagtccaggacgctaaactgcaggcagcaaaacggcaaatagccgcctctcaaacaattaccgaggctgcagatgcccctttctga

SEQ ID NO: 10329 - RNA, 1056 nt, synthetic construct
  source 1..1056: mol_type = other RNA
atgagcggcaaaatagctcgaaaaaacttcgaaagatacgggatcgagaggtcgcctttttccctccggccaactaagcgcgacctggcagcgttgctgggggaatctgtaaaggatctgaagaccttggccattcctagctttaaggagcagtttgtggtgcgcaggcaggcagagacaggcaccaagaagaagaaaatccgggacctggtatatcctgagtcccgccttagagggatccacgaacgtctcaaattccacctcaataaagttaggcaaccaagctacctcttcagcccacggaaggaccgcagtcagagggacaacgcggctatgcatctggatcaggaaatgtacctgacattagatctcaagcagttttatccctctactacttcagcaatggtgagaaagtggttccagaatgagctcggcatgtttcccgacgtcgccagattgcttaccgatctgagtacaatcgacgaaaaagtctcctttggttcacccctgactccggtcctttgcacactggtgcacagagagatgttcaacgaaattgctgacgtgtgtgagctgcatgagcttaggtatacactatgggtcgatgacctaaccatatccggtcgaagcatccctgccatcgtgttagagcggatacgcgaaattatcaggaagcacggtctaaagagtcataagatacgattccacaaaggaagagatccggttttcatcaccggcattggcgttgtgggccggaagctgattgccccattctctctgaatctcaaaatcaagaaatgttgggcggagtaccacgccgccaccacgacatcagagagggatcaatgcattcagaccttgcttgctaatttaggaacggcaagattcatcgtcggggctaatactttggccggacaaaagctctccgacgaaatgaacgctctgcggcagaaaaaagccaaaatgtggcgtcaagacgtgaagcagtcactggcccgcaacatgcatctgtctggaattagcgatctggcacccgcaggagatgcccccttttga

SEQ ID NO: 10330 - RNA, 1056 nt, synthetic construct
  source 1..1056: mol_type = other RNA
atgtccggcaaagtggcacgtaagaacatcgaacgatatgatatcaagagatcgccattctccctccaccccaccaagagagatctcgccgttcttttgggagagactgtcaacgatctgaagaccctgagcattccctcttttaaggaacagttcgtggttaggcgtcaggccgagacaggcaaaaagaaaaaaaagctcagggacctggtttatcccgaatctcggcttcggggtattcacgagcgcctgaaattccatctgaataaggtgaagcagccaagctacctgttttctccgcggaaaaatcggagccaaagggacaacgccgagacacatctagaccaagatgtatacctcacactggatctgaagcagttctatccttcaaccacagccgcaatggtcagaaaatggttccaggacgagctgggcatctacccagacgtggcgagactcttaacggacctgtcaactattgatgaaaaggtgtcctttggatcacccttgaccccagtcctttgtaccttagtacaccgcaagatgttcgacgaaatcgcagacgtctgcgatgcttacgagttgcggtatactctctgggtcgacgacctgaccattagtggccgctctattccggcagagatactggacaagatcaggcaaattattcggaaccacggactgaagagccataagatcagatttagtacagggcgacgccctgtgtttataactgggatcggtgtggtgggtagaaaactgatagccccttacaccttaaatctgaagatccaggaatgttgggccgattatcacgccgccaatacggtggccgaaagggaccagtgcatacagaccctattggctaatcttgggactgctaggtttatcgttggccccaaaacagctgcgggacaaaaactatccagtgaaatgaactcattgagacagaaaaaagctaaaatgtaccgcgaggatgcggctgagagtctcaagcgccgaactgaggcaaggtcccttatcgggagcagccagattgccgatgtgcctttctga

SEQ ID NO: 10331 - RNA, 1038 nt, synthetic construct
  source 1..1038: mol_type = other RNA
atgctgcctcggagccagcagcgagagcggtacgaattagagcggtcacccctcgcacaaaaacctacccaacgcgacgtggcccagctcttgggagaaaccagggatgacctgagacgactaaggaactacaaagagcactttattgtgagaaggacagccatcattggcaaaaaggggaagatacgtgagttggcctatccagaaggaagactgagggccttgcacgagagactcaagtaccagctaaacaaggtgaaacagccgaactatcttttcagccctcgccttcgcaggtcccagcgtgacaacgcggcattacacctggagcaaaatcagtacctgacgctggacctgaagcagttttatccatctacgaacgagagtatggtacgctcctggatgcgggaccagctcggcatgtacgaagatgtgtcaggtctgctgacagatctctgtaccgttgacggcaaagtgagctttggcagccccttgactcccgtgctgtgttcgctgatccataagagtatgttcgatcagatcgctcgtatctgcgataatcgcggactcacttatagtgtttgggttgatgacctgacaatctcggggagatttatcccaggcgaagtcctcaacgagattaggtgggtcgtgcgggatgccggtttgaagtctcatgcggtgaagtaccgcaacgggaatagaccagtcttcatcaccggcatcggggtagtcggaaggaagcttatagccccctcatccctaaatcttaaaattcgagtcgcttggagtgagtaccacactgctctgtccgatgacgaaagagatgaaatatgccaacgcctgctgtcctatctgggcacactgaggcatatttctggttctacttcagaaaccgggcggaaaatttccgaccagatgaatagccttagacagaagaggtctgctcggcgattcgcaagcgaggcaactcggaatgaggtgaccaagagccctcccgctccgaaaatggccgacccattaggactcccttggtga

SEQ ID NO: 10332 - RNA, 1050 nt, synthetic construct
  source 1..1050: mol_type = other RNA
atgaagagtcagaccctcaggaatcgtactcccactcatgagcggtacgacctgagcaggtccccctttttccagaaacccacacaacgcgaagtggctgaactgttgggggagactagggacgacctcaggagacttattaactacaaagaggagtttgttgtccgccggaccattgtgacggggaagaacgacaaagtccgggatctagcctacccagtgagtagatatcgggcgtgccacgagcgactgaagtttcatctcaacaaagtgcgccagccatcctatctgttttctccgcggaaacacaggtcccaaagagacaatgcagcgctgcatctcggcggcctgcagtacctgacactggacctcaagcaattttaccctagcacaaccgatacaatggtaagacgatggttcagggacgaacttggtctgtatgaagatgtagcagggctgctaacccacctgtgcactatagacggtaaggttagcttcggtagccctgtgacccccgtcctgtgttctttgattcatcgcgaaatgttcgatgaagttgctaggctttgtgaggttcgcggccttcacttttcggtgtgggtggatgaccttacaatcagcggcctgttcgtcccaggagaactcgtggaccagatacgggccatcgtgagggctgcaggattgaagtcccacgccatccggtacagaactggaaacagaccggtgttcatcaccggcatcggcatcgtcggttctaaattggtggcgtccaacgccctcaatctcaagctaaagcagggctgggcagactatcatgatgctgagacggatgatgagaaggatttcctgacacagcgcatgttaagtttattagggaccgtccggcagatttcaggagcaggaagcgacagagggcgaaaggccgccgatgaaatgaatagtctgcgccagaaaagaaatgagcgtcaacgaagggcccgtgcttcaaaatctgccctgcgacacgtgtcagacccagctgagttggtacctgccgatgcccctttctga

SEQ ID NO: 10333 - RNA, 1059 nt, synthetic construct
  source 1..1059: mol_type = other RNA
atgccacggtcttcacagaaagacaaaaaatttgagaggtatgagctgtccagatctcctttcgcccaaaaacctactcaacgcgatgttgcgaaactgctcggagaaaaacgagatgacctccgacggctcgtaaattataaggagcagtttatcgtgagacggcaggccaaaaccggtaagaaagagaagttgcgcgatctggcttatcccgaaaaccgactcagggcagttcatgaaaggcttaagtttcacttaaacaagatcaagcagccaaattaccttttttccccaagacggaagcgagggcaacgcgataacgctgcccaccacttagatcaggaccagttcctcaccttggatctgaagcagttctacccaagtactacagacaaaatggtacgcaggtggtttagagatgagctggggatgatggacgacgtggccggactgcttatgcatttatgtaccatcgatgggagggtcagcttcggatccccgctgacacccgtgctttgcagccttatccaccggccgatgttcgataggattgccgaggtttgcgatacttatggcctgcagtactcagtgtgggtcgacgacctaacgataagtggcagatttgtgcccggtgacgtcctgaataagatacggcagattgtgcatgcggctggcctcaagatgcatgacatcaagtttaggagtggcaaccgtcccgtgttcatcaccgggattggagtggtcggtgctaatctggtcgctcctaattccctccatataaagatccgcgactgctggactgagtaccactcggcaattaccgccgatgaaaaggatgcagttagccaacagctgttgtcccacttgggaacactgagacacattacgggcagcagttcagaggccggccgcaaagcagcagaccagatgaactctctacggcaggagagagacgccaggcgcaaagccgaacaaaagtgtcgtcaggcggaacgtaacgcaagagctagcgtggagattttcgacctgtctgacgcccctttcgaaatgacactgtga

SEQ ID NO: 10334 - RNA, 1047 nt, synthetic construct
  source 1..1047: mol_type = other RNA
atgccacggaaatcaacagcggccagccactacgaacgctatggcgttgaccgctctccatttgcccaaagacctactcagcgggacctggcgtcacttgtaggagaaacgcgagacgatctgcggcgattagccagctacaaagagcagttcattgtccggcgacaagtcgagacaggaaagaaggccaaactgcgcgacctcgcctatcccgagggtcgtcttcggggagtgcatgagcgcctgaagttccacctcaacaaggtgaaacagccctcatacctattttctccgcgtaaagggagaggccagcgtgataatgcgctccaccatctcgatcaggatcagtatctgactctggacctcagacagttctacccctccactagctcccaaatggtgagggagtggtttagggaccatctgggtatgtatgatgatgtggcaggactattgacgcacttatccaccattgatgacaaggtcagcttcggcagccctctcaccccagtactgtgcagcctcattcacaggccaatgtttgataggatagcagatatatgtgaggcacgggggttgcgatattcggtctgggtggatgacctgactatctccgggagattcgtgcctggagaagttttaaggcagatcagggaggtggtacagcaatttgggctgcagtcccataagattagttacaagaccggcaaccgcccggtgtttatcaccgggatcggagtggttggcagtcgcctggtggcacccaacagtctgaatctgaaagttaaggaagcctggacaggttatcacaatgccgtcacagacgacgaaaaagacgccatgtgccagcggctgctttcttaccttggcaccttgcgccagatcgtgggcggcaaaaccgaggctgggaggaaggccgctgatcaaatgaactcattgagacagaagagggacgcaagacggaaggccgctgcagaagcctacagaatcgaacgagagcagagacaggctgtgccctctgctgtcgctgctgacgctcctttctga

SEQ ID NO: 10335 - RNA, 1065 nt, synthetic construct
  source 1..1065: mol_type = other RNA
atgcagaagcgtgccgataagcggaatggagaaagatatccattgaatcggtcccccctcgctcagaacccatcccagtcagacctggcaatgctggtgagggagacaaaggcggacctaaatacattagctacaccagagtttaaggaacagttcctggttagacgtaccattgagacgaacggaaagactcgcaacctcgtttaccccgagggtcgtctaagagcagtccacgagcgcctgaagtttcacctgtcaaaaattgtacagcccagctacctcatgagccctaggaaaaggcgctcccagcgggacaatgcagttgcacacctcgaggcaacccaatatttaacgctcgacctgaaacagttctatccttccactactagacaaatgatccggaacagtctggtagctcagttcggaatgcaggctgatgtcgccggcctgatcgcccatttagcgacagctgatgatcgggcatgctttggcagtcccttgactcctgtgcttgcctctattgtgcaccgaccaatgttcgatttgatcgccgggcgatgtaacgtcgatgggctgtcttacaccgtgtgggtggacgaccttaccattagcggccctcagattaccggtcagttcagaagcgacgtgcgcggcatcatcgctcagaacggcctgaggagccacaaactgcggagccaaaccgggaatcatccggtctttatcaccggcattggaatcgtgggtgccaatcttattgtgcccaagcgaatagaactgcgatccaaagagctgtgggctgaattcaaggcatctcaaacttttgaagagcttgattcttccgctaccagactgctctcgcatctcggcggggtaaaagccgttgtggggccgtcaacaatcagaggacagaaattgagctctgagatgaatagtgtccgccaaaagagggaaaaggccaggcgcttccatcaagcctttgtggccgagcagcggacaaggtcgagtcaggcctgctgtatacagaacggggacggagtgggcgaacaggcggaaatatcattctga

SEQ ID NO: 10336 - RNA, 1056 nt, synthetic construct
  source 1..1056: mol_type = other RNA
atgcgaaaacggtatagattgaaatccggggaaaaatatcctttagaaagatctccgttcgcccagaagccatctcagcgcgatattgccgaattggtgagggaatcaaaggatgatcttaatcgtctcgctaccccacgctataaagaacagttccttgtgcgaagaaccattgagacgaacggcaagacccgggacttagtgtaccctgagggaaggctgcgatcggtgcacgaaagactgaaataccatctcagtaagattgcccaacctagctatcttatgtcaccccgtaagggacgagcacagcgggacaacgctgttgctcacctggaggcagcccagtttctcactctggatctgaagcagttctacccgagcactactcggcaaatgatcagaaactccctgatggagcagtttaagatggaggcggacgtggcaggtctgatcgcacatgtagcaactgccgatgacagggcatgctttgggtcaccactgaccccagtattggctagtcttgtgcaccggcctatgtttgatcggatcgcggaccgctgcgtggaagacgacctgtcttacacagtttgggtggatgaccttacaatatctggactgaggataacgggcaacttcagggccgatgttaggaagctcgtggcccagagcggcttgaaaagtcataaactgagaacccagaccgggaatagacccgtcttcgtcacagggattggtatcgtcggcgcaaacttgatcgtccccaagcgcctggaactccggagcaaagagctgtggacagaactaaaggccgctcagacacaggaggaaatggaggcctgttctgtccgcctcctgtcccacctgggtggaatccgcgccgttgtaggcgcctcatcccacaggggccaaaagttagctagcgagatgaacagtattcgccagaaactatccaaggctcgtcgggaaaataaggccagactcgctgaggagaaagcggccgctcaagagataagcagggtggaccccgacaatgagaaggagaatatccccttttga

SEQ ID NO: 10337 - RNA, 1068 nt, synthetic construct
  source 1..1068: mol_type = other RNA
atggcagtgagaaaaaggcgggtccgtaaggcctatgaacgttatgaaattgaccgatcaccacttgcccagaggcccagtcagagagacattgcatcactgatcagcgagaataaaagcgacttaaacaggctggccactcctcagttcaaagaacagttcctcgttaggagaagtatcgagtctggaggaaagacacgggacctggtgtaccccgaaggaagactgcgagctgcccacgagcgactcaagttccacctgaataagatagtccagcccagctacctgatgtcgcctcgtaagaacaggagtcagagggacaacgccgctgcacatttggatgctgcgcagtacctgactctagatattaagcaattttacccaagtacgaccaggggaatgattcggaactctctggtggatttgtttggtatggaggccgatgtggccgggctgattgcccacgttgccactgcagacgaccgcgcatgttttggttccccactgacccctgtactggcatccctcgttcacagaccaatgttcgatgcaattgcggatctttgcgctagctacgacttagggcacacagtatgggtggacgatctcactataagtggtaatcaaatcccgggccgctttgtgtctcaagtgcgcgccatcgtcgcttctcatgggctgcgctcccataaattaaaatatagaaccgggaacaaggctgtgttcataacgggcattggcgtggtaggatccaatctggttgtcccccgctccgttgagcgacggagcaaagacctttggcgggatttccagaaggctgacaccgtggatgaaatcgacaccgcgggcagcagattgctctcccatttggggggcatccgacacgtcgtgggcaaatcaagcaaacggggccagaagatctcaagcgagatgaattcggtccggcaaaaaaggacaaaggcgcttcggataggttctgagaagtccgcctcaacctctaacctacgctatctcacagccgaagagcaggaggaacgcagagatgagatcgatgctatccctttttga

SEQ ID NO: 10338 - RNA, 1041 nt, synthetic construct
  source 1..1041: mol_type = other RNA
atgtacgaaagatacgaacttgaacggagtccctttgcccagaaaccaacacagcgcgacatcgctgccctggtgcgagagaataaggaggacctgaacaagttaggcaccgacagatttaaagagcaattcctggtgcggcgaacaatcgaaacaagcggaaaagaaaggcggttagtgtatccagaggcaagactccgggccgtacatgagaggctgaaataccacttgaataaaatcatccagccgtcctatcttttcagtccaaggaagaataggtcccagcgcgataacgccgaggttcacctttctgcctttcagtatttgaccctggatataaagcagttctatcccagtacgacccgcaggatgataagaaactccctggctgtgcagtttggaatggcgggtgacgtcgccggcctgattgctcatgttgcgactgccgacgatcgtgcctgttttggctctccccttactcctgtcttggccagcctggtccacagacctatgtttgatgagatcagcgatctgtgcgtgtcatacggactcagccattccatttgggtagatgacctcactatttccgggcccaagatacctggcgcattcattgcagaaattcgtcggattatcgcttcatatggcttacgcagccacaagctgaaatactacactggtaataaagccgtgttcgtcaccggggtggggattgttgggtctaatctagtggctaagaagaaagtggagctgcgatctaaggaactctggcgtgcgctcaagaacgcagagacattggacgaaattgacacagcaaccacgcggctgctggctcaccttgggggaatcaagcagatcgtcggaaaatcgtcaaagcgcggtcaaaaactcagcaacgaaatgcattcaatcaggcaaaaaagagagaaggctttcaggaagaataccgagaggctgataaacgaagcctctggcttgcggcgactaagtccagaagagcaggaggctagacgcgaggagatcgatgcactccctttctga

SEQ ID NO: 10339 - RNA, 1002 nt, synthetic construct
  source 1..1002: mol_type = other RNA
atgcctcgcattcagagacgtctcaaccaggtcgagcgttatgaactggctcgctctcccttatcgcagcggccaacccaacgtgatttagcagcgcttgtgggcgaaacgagggacgacctacgaaggctagtaaattacaaagagcaattcattgtgcggcggcagactgaaacaggtaagaagaagaagctgagaaacctggcttatcccagcggtcgactgagggctgtgcatgagcgcctcaaatttcacctgaacaaggttaagcagcccgactatttactgtcccccaggaagggtaaatcccaacgcgataacgccgcagcacatgtggggcaggatcagtatttgacgctcgacctgaaacaattttacccaagcaccacaggagggatggtgaaaaggtggctgcacgctcagctaaggatggaggaagatgtcgccggcctgctcgctcatctcgttaccgtcgatggcaaagtctctttcggctcaccgctcacacctgtgctgtgttccttggtgcacagacctatgttcgataaaatagcaagcttgtgccgacaccggggactgaattacaccgtctgggtagatgacctgactattagtggaagattcgttccatccgcccttcttgtccaggtgaggagaatcatccaggaccatggactcagaagccatgacatccgcttccgcagtgggaatcggccagtatttatcacaggaataggcgtgctggggcgaaacttggttgcccctcaggcgttgcacctgtccattcggtcatcatttgaagagtaccacgccgccatcaccgacgtcgagagggacagtgttgagcaaaagcttctgagccagctgggcactcttcgccacgtggtgggggtgtcaagcaaggcgggccagaatgccgccgaccagatgcactctatcagacagaagcgggataaactcagaaccgctgagcaatactctactacactggcagccggttga

SEQ ID NO: 10340 - RNA, 1047 nt, synthetic construct
  source 1..1047: mol_type = other RNA
atgcccaggagagcacctgctaaaagcgagagatatcagctccaccgctcacctctagcacagcgacccacacaacgagatattgccaagctgcttggagagactcgggacgaccttcggcgcctcgtcaactacaaggaggaattcgtccagcgccgcaagatcgagtctgtgaaatcgggaaaaatccgcgaactggcttacccagttggtcgccttaggggggtgcatgagaggcttaagtttcacctcaacaaaatcaagcagccgagttatctgttctctccccgacggggctttggtcaaagagataatgcggcgtaccacatccggcaagaccaattcctcacgctggatctgaagcagttttatccaagcaccagcggggccattattaaacgttggctatgggaagacttgggcatgcctgaggacgtagctggcctgttaatgcacctggtcacagtggatgagaaggctagtctgggttcccctgtgactccggtgttgtgctcattaatccataggaaaatgttcgaccgaattgcggaaatttgtgacgcacgggggctcagatactccgtttgggtggatgacctcacaatcagtgggcggttcgtccccggagatgtattgatgcaggtcagagacataattcgcacctccggactgcggtcacacaagatcaagttcagaaccgggtcccgtcctgtgtttataactggcatcggcgtagtgggaccacatttggtggccccaaatacactgcatctgagaatccaagccggatgggccgattaccatgacgccgtgaccgacgatgagaaggacgccgcctgtcagactttgcttagctttctcggcacgttacgtcacatttctggtaggaagtctaaggccggccagaaagtggcagatcagatgaatgctctaaggatggaaagggaggttagacagaaatttgctatacagctggataaagagaaggcagaactgagggtccagaccaactattgcgccgttgaagacctgcccttcgatctgtga

SEQ ID NO: 10341 - RNA, 1029 nt, synthetic construct
  source 1..1029: mol_type = other RNA
atgcccgtgaccaagaaagtgcaaagggccgagcgttatccaatcgcccggagcccattcagcatgcgacccacacagcgcgaagtagctcggctgctcggggaatcaagggacaatctccgccgcttggtgaattacaaggagcaattcgtgcaacggagggatcttgaaatcaacggaaaactgcgacacctggcttatcctgaatctcggctccggtccgcacatgaacggctgaagtttcaccttaacaaaattcagcaaccggcatacttgttttctcctcgccgcggaaagtcccagagagacaatgctgcactccacttagagcaggtccagtatctaactctggacctgaaacaattctacccttccacgactagtgccatggtgagaaggtggtttattaatgacctgggcatgtaccaggatgttgctggccttatgacccaccttgtgacgattgacgacaaagtgtctttcggttccccgctgacccctgtcctatgcactatggtgcatcgacgcatgttcgatcagatcgccgatatttgtagggccagaggacttaacatgagcctgtgggtcgacgatctcaccatctcgggacagtttgtaacaagagaggttctcagggaggtcaggacggtcgtgagggctttcggcctgaagacccacaaaattaagtaccgcactgggaaccgacccgtttttatcaccgggatcggcgtcgtgggcagtaatctggtggcgccagccaaaatgaatttaaagatcaaggccgcctgggaggcctatcatgcggctcagaccgatgcggagcgtgatgcttgcgctcagcacttactgacactcttgggtacagtgcggcatatagcaagacgagggtcacccttggccagaagagtagccgaccagatgaactcactgcggcagaagcgtgcagttctgactgttacaacaactaccagaagcgcacaggcgggtgccgctttgatagccaacgacgcagtcggcgatccattttga

SEQ ID NO: 10342 - RNA, 960 nt, synthetic construct
  source 1..960: mol_type = other RNA
atgaccaagcgaacccacgagaggtacgccctgacacgttccccattggcgcagcgtctgacgcagaagaaactcgcaaaccttcttcggcggccgcttccccagttgaaaggcctgataaaatacaaaaagagcttcgttgtcgccgaagtgagagagatcgatggaaaagccaggcccctgtgctatcccagaggacctttaagaagtgtgaatgaggcactgaaatatcagctctcgaaaatcagactgcctgattacgtcgcatcaccaagacgcggaaggggtcaacgcgagaacgctgccgtccatgtggacgccaaacagattttgaccctggacctcaggaagttctacccaagcgtcagtagacggtacatcgctaggtttttcagggaagagttctccatgcaccctgacgttgccggcctgatcactgaactattaacctttgaagggcgtgtcctatacggggctccggctacgcctgtgctggtaatgcttgctcacaggaagatgtttgatcagattgacaacgcctgcctcgcttttgggacaaagatgtcattatgggtagataatctcacaatttctggcgctgaggtaccaggagctttgctcgttcaggtgcgggaaattatcgcgagtcatggctataagacccatgacatagcattcgtgactaccaaccgagatagcactgtgacaggtgtcgtggtgcgatgtggggaactgcaccccgccaattcttctaatctggcaattcgcgatctggaggccgcgctgagaaactccgttgaccccagcgagtatgaggccaaggcaaataggttgctgtcacggctcggcgggcaactgcacatccttggcactcagcgcgaatggggtcagaagatcgcccgccgaatgaacgtgataagacaaaagcgcgacaaacgggtgcggtccaattctaagtga

SEQ ID NO: 10343 - RNA, 987 nt, synthetic construct
  source 1..987: mol_type = other RNA
atgacaataaagcggaaagagccatcccacagaagcgaccggtatgaactggaagccagtccactgtatcagaagcctactcaaaaacagtttgctgagttggttggactgtcaaagtctaaattacgaggccttatagatcacaaaaagcagtacattatccgtcgagacgcagaaatcaacggcaaaaaaagaaggctggtctaccctttcggtaaatttcggagtgtccacgagaagctcaagtttcacctgaacaaaattatccagcccgcatacctctacagcccccgaaagggaagaaaccaaagatccaatgccgtcttccatctgggacagacccagtatcttaagctcgacatcaagcagttctacccctctaccagttcggaacatgtttttaggtgggcaaaatacgacatgcgcatgtctgacgatgtggcagggctcctggtgcatattgcgaccattgatgatgtagtatccttcggcagccctcttacgccggtcctagctacccttgtgcataggcgcatgttcaatgccatagccgaagaatgttcagcccgtgggttacgaatcagcttgtgggtggatgatatagttatctctgggaagtttattcccggcccactggtatcccgcattagagacttgacgaggagcaatggtctaaagagccataaactggagtatttcacaggctataggcgcgtgactatcactggagttgtggtgaaaggggacgagattcactcccctcggaagctgcacacagagatctcaaacgcttatggactcgccatccaatctaactccaggattgaggctgaggccgccgtcgatcggttgctcagtactctgggccggtacagggtgatggtgggcaaggggtcaccaatgggtcgtagggcgtccagccggatgaatgctatccgccagaagagagtgcgctttgtgtcggagagatgctctaccacagactga

SEQ ID NO: 10344 - RNA, 1041 nt, synthetic construct
  source 1..1041: mol_type = other RNA
atgacagtgaaacgccacaaacagaataagtatgaacgatacccattcgagaactctccatggactcaggacctgacccagcgggacttggccgagttgttagggtggaagaagcagcagttagaggcgttggttcgggacaaagaccgctatattaagagggggcccaagcttatcggaactaaaaccagggagctggccgtgcctacaggaaaactccgtaccatccacgagcggatcaagatacacttgaacaaaatcaagcagccggaataccttttctcaccacgcaagggccgcgctcagcgtgataatgccgaacatcacgttgggcagaatcaaatcctgtctctggacataaaacagttttatccctctacgacggacgaacatatttttagatgggcataccatgtggctggactgagggctgatgtggccggtctgttcaccaagctagtagctgttgacggcaagatgccttttggcagccctgtgagtcctgtcctgactactcttgtccatagacaaatgttcgatgccatcagtgatatttgcaaagagcaagatctcaagatgagtctatgggtggatgacctcgtgatttccggctccttcgtgagaggcaaggtcatggaggatgtcagggcggcaattcggcggtttggctttcaaacccacaaaattcaattccgctcaaccgcccgacctgtcccgatcacaggagtgcccgttaccaagacatcaattggcgcacccctgtcgctccataggcgaatacagagcgggtatgccgagctgagacagcgcttaacagacgcccagagaacccaggcgacagataaactgctcgctgccctgggtacctaccgttaccaccttggtgcttccagcgaacagggaagactggcagccaaccggatgaacgcactcaggatgaggcgagctcggctgaagcccagatatgtgacttacccagtagggagcactcctgacgagacgtccacagaaatcgatgacggaactcccccatgggaatga

SEQ ID NO: 10345 - RNA, 1041 nt, synthetic construct
  source 1..1041: mol_type = other RNA
atgacgcggcgtaaacaacccccctacgagagataccactttgaccagtccccttgggtgcaggatctcactcagagagacttggccgccctgttaggctggaagaaacagcagctggaggctcttattagagacaaggaaaggttcatcaaacgggaagccaagctagtgggtacgaagatgcggaatctggctgtacctaccggcaaactgcgcaccatccacgagaggctcaagttccacctgaacaaaataaaacagcctggatacctcttcagtccccgaaagggtagagcccaaagggataacgcagagcatcatgctggccagactcaattcctgagcctagatatcaagcagttctatcccagcacaacagatgagcacatttttaggtgggctcatcacatggccggtttgagggccgatgttgccggcctgttcaccaagcttgtggcaatcgacgggcggatgccgtttggcagtcctgtctctccagtgcttactacccaagtgcatcgtacaatgtttgacgaaatccacgccatctgcgaggccaaccgacttcacatgtccctctgggtggacgatttaaccatctccggagtgtttgtccgcggggccattgccgaagaaattagggcagtaataagacgccatggattccagactcacaaggtcgcttttagaaatgcacatcggccggtggtggtcaccggagtgccaataaagaataagcgggtcgtagctccacgcagcctccataaacgcgtccaggcagggtatcaagcgttacgagagtcacgtacagacattgagcgggggattgcgatcgacagactgctgtcagcgctcggaacttatcgataccacctgggtgcctctaccgcagagggcaggacaacctctaacaggatgcagatgttgagagttcggcgcgctcgcctgaaaatgagcgcaattactgttccaacggtgggacctgcccaggcgacatcggttctggctggggctgaaggcttggacctgccctgggattga

SEQ ID NO: 10346 - RNA, 1032 nt, synthetic construct
  source 1..1032: mol_type = other RNA
atgaagcagcataaacagagatacgagaggtatttgtttaaggattcgccctgggtccaggacttgactcaaagagacttagcggagctgctgggatggaaaaagcaccagctcgaggccctgattcgggacaaagagcggtgggtgaaaagagaaccaaaacagatcgggcttaaactgaggaatcttgccgtgcccactggaaaattacgtaccatacatgagcggctcaaatttcacctgaacaaaattaggcagcctgaatatttgtttagtcccaggaagggccgatcccaacgcgacaacgcggagcaccatgctcagcagacacagttcctgtctttggacatccagcagttctacccaagtaccaccgacgaacacattttccggtgggcatttcacgtagccggcctccgatccgatgtcgcagggctattcaccaagctggtggcaatcgataggaagatgcctttcgggtcaccagtgtccccggtgcttatcacacacatacatcgtgccatgtttgatgagatcttcgcgatctgccaggccaatgggctgcgcatgagcctgtgggtggatgacctgacgattagcggaaccttcgtccggggcgagcttgtcgaacagataaggggtataatccgccagagggggtttcaaacacataagatcgagttcaggagcgccgctagacgggttattgttacaggtgttccaattgaacgacgccgcgtgatggctcccagagcccttcaccaacgcattcaaaatggctacgccgctctccggggcgacttaacagacgtagaacgtggcaaggctatcgataagttgctgtctgcactgggaacttatagataccacctcggaccgtcagaacctggcggtcgaaaggccgccgatagaatggaggctctgcgcgtgcggagagcaaagctcgatatgactatggtgacgctacctgcagttgagaacgtcatcaccgcttcttccactctccccggtagcgagctgccttgggaatga

SEQ ID NO: 10347 - RNA, 1047 nt, synthetic construct
  source 1..1047: mol_type = other RNA
atgaagcgcagaaaacaacaggaatacgagagataccccttcagtgattctccttggactcaagacctcacccagcgtgacctggccgagcttataggatggaagaaacaccagctagaggcacttgtgcgtgataaggaacgctatacgcggagaaaaacagagttaatcggcagcaagttgcgagatctcgctgtcccgacaggtaaactccggactgttcatgaaaggctgaagttccatctcaacaaaataaagcagcctacatatcttttctcacccagaaagggaagatcccaacgggacaatgcggaacaccatgtggaacaggtgcagttcctgagtttagatatcaagcagttttacccaagcacaagcgatgaacatatttttaggtgggcctattacgtcgccggtcttcggagtgacgtggcagggctgctggtcaagttgattgctatcgatgggaaaatgccctttggctccccagtctctcccgtgctgaccactcacgtgcacagaagcatgtttgacgagatctacgagctctgccggtcgcagggtctaaagatgtcactctgggttgatgacttgaccgtgtctggccagttcgttaggggggagttagtggaggccatccgcgtaattattcggcggcagggctttaagacacacaaaataaaattccggtccgttggacgcgcacagggaggaaggcctgtcgtggtgaccggggtcccagtacgcgctagacgagtagacgcgcctttttctctgcagaagcgagtgcaggatggttatgccaagctgcgtccggacctgactgacgtagagagagcccaggcaattgactccctgctcagcgctctgggcacctataggtaccacctggggcgcagctccccagaaggaaggaaaaccgccgaccgcatgcaggccttgcgacaacgaagggctaagctggatctgaccgttatcacccaaccctcaggccctatcaaaccctggggcactacaacgagggactcagatgtgccatgggagtga

SEQ ID NO: 10348 - RNA, 1047 nt, synthetic construct
  source 1..1047: mol_type = other RNA
atgaagcgcagacggcaacagaaatacgagaggtatagtttccgggatagcccttggactcaggatctgactcagagagacttagcagaactcattgggtggaagaaacagcagctggaagctcttgtaagagataaagagcggtacacaaaacggaagcgcgagaaaatcgggagcaagatgagagacttggccgtccccgtcggaaagttgcggacagtgcacgaacgactgaagtttcacttcaacaagatcaagcagcccccatatctgttcagcccacgcaaaggccgatctcagagagacaatgccgaacaccacgccaagcaaatacagttcttatccctagacattaagcaattctaccccagtacaaccgacgagcatatatttcgatgggcttactacgtcgccggactacgatctgacgttgccgggctcctggtgaaactgatcgctatcgacggcaggatgccttttggttcaccggtgtcacccgtgctcaccactcatgtgcataggcatatgttcgatgagatttacgatctgtgttgccgaagggggcttaagatgtctttgtgggtggatgatctgacgatctccggacagttcgtgaggggcgagttggtggacgccgtaagagctgtgattcgccgtcagggtttcaagacccacaaaattaaatttcgctcggttggacgcgcccaagggggcaaacctgttgtcgtgacgggcgtgccacttagggcaggacgggttgacgcgccgtttagccttcagaaacgtgtccgggacggatatgctctgttgcgcacagatctgacagacgtcgagagggcaaaagccatcgattccctgctctctgccctgggtacctatagatatcacctgggccgtggctccccagaaggcagaaaggcggcagatcgcatgcaagcgctccggcagaggagagctaagctcgacgcaaagggctacgtaaccgggcctaaggcagaaggttcatttgaggacagggttaccactagtgatgtgccctgggattga

SEQ ID NO: 10349 - RNA, 954 nt, synthetic construct
  source 1..954: mol_type = other RNA
atgaagaccacaaagggacgtctggagtggctcatcgagaataaagaacggtttaccaagcgggaagaccgacagattggcaggaagaccagaaacctgtgctaccctgttggtaagctcaggggcgtgcacgagttgttgaagttccatttcaacaaaattcgacagcccccttacctcttttcccctagaaagggccgttctcaacgagacaacgccgagcaccacgcagataaagtgcagtttctgagtttggacatcaagcagttttatccgtcaactaccatcgaacacgtttttagatgggcttatcatgaggccggtctgaaagccgatgtggccggcatgcttgcgcacctgatctgcattgacgggaagcttccatttggctctccagtcagccccatagccgctacacacatacatcgctctatgttcgatgcagtttacgatatctgtctagagaatgatctccagatgagcctctgggtagacgatctgacaatttcgggggccttcgtacgcggggaactgatcgaacagattcgcagtgtgcttcgtcggcacggattccaaacgcacaaaataaaattcagacaaagcgacaaaccagtgatcgttaccggcgtcccagtcaagaataggcgggtgatagcacctcggtctttacatcagagggtcgaagacgggtatgctgagctaaggggagcagagtcagataatgctactgtctccgcgattaaccagctgttgtccgccctgggcacaatgagataccactatggagctcagagtgtggaaggacgcaaagccgcggaccggatgcatgcactgagaaggcgcagagacgctatccagcaagccagcagcaggcagattccctcagacctgtccatccgcaagcaggatgaggccgtgactggggatggtcatttaccctgggtggctgactga

SEQ ID NO: 10350 - RNA, 1038 nt, synthetic construct
  source 1..1038: mol_type = other RNA
atgcggcagaggaagccaaaaaggtacgagcgatatgcccttgaggattcaccatgggttcagaacctcactcagcgagacttagctgagctgctcggctacactaaaacccaactagaagccttaatcagggacaaggacaactggattggcaggagaactgagatgataggcagtaagctcaggaacttagctgttccccgaggaaagctgcgcgcggtccatgaaaggctcaaattccacctcaataagatcaagcaacccgattacttgttttccccacgcaaaggacgggcacagcgggacaatgccgagcaccacgtttcccaggggcagttcctgagtcttgatatcagacagttctatcctagcacaacatctgaacacatcttcagatgggctcatcacgagctggggctgagaacagatgtggccggtatgctggtccatctggtgtccgtggatggcagaatgccattcggatcaccaatcagccctgttctcacaactttggtgcaccggtcaatgtttgacgccatcaaactgatctgcgacgcccatgatctgaggatgtccctatgggtggacgaccttaccattagtgggcgggccattcctggtacgctgattgaggacgtgcgggctgaaatgcgacagcgctcgtttcagacccataagatacagtttaggagcggtaaccgtcccgtaatagtgactggcgtcccgattgatggggaccgtgtagctgctcctcggtccgtccacgagagagtgagaacaggctacgcagcccttcgagtccctctagcggatccggaccgcgctcaacaaattgataagctgctgtcagcccttgggaccctccggtatcacgtaggacgctccagccccgaaggaagacgtgccgcaaatcgcatggatgcattgaggcgccgccggagctctttgagtaaatctgtgacgaccctgcctacactgaccgacagagaagcatctgcggagctgcccgtgtctaccagcagcttgccctgggaatga

SEQ ID NO: 10351 - RNA, 1038 nt, synthetic construct
  source 1..1038: mol_type = other RNA
atgaaacgtagaaaagtcagtaggtatgagcgctacgcatttgaagattccccttgggtgcagaagctcacacagaaggagctggcaacacttctggggtataccaaagatcagctcgaggctctcatcagggacaaagataagtggatcggacgccgggctgaagtgatcgctggcaagaaacgcaacctggcggttccttatggacggttgaggggcctgcacgagagacttaagtttcatctcaacaaaatccggcagccagattacctcttctcgccgagaaaggggaaggctcagagagacaacgctgcccaccacgtgggccagacacaattcctgacgctggacattaggcaattctatccaagtaccaccggggagcacatttttcggtgggcgcatcatgaagccggcttacgccccgatgtagcagggatgttggtgcaccttgttgcggtggatggcaagatgccttttggtagccccatttccccagttctgactgctttagttcatcggcctatgttcgatgccatctccgggctgtgcgccgagagagacttacacatgtctctgtgggtcgacgacctcaccataagcggacgagaggtgggcggtgacctaattgaccaggtaagggccatcatgaggaaggccggcttccagacgcacaaaatcagatttaagatgggtaacagacccgtggtcgtgacaggtgtacctattgatggctctcgagtgactgcaccccggtccgtcaatgaacgtgtccggatagggtacgcaaatctgcgtgtggctgccaatgataatgaacggcgacaagccatagacgccctgctgtcagcccttggaacctataggtaccatatgggccgcggaactgctgagggacgaaaagcagcgaacagaatggacgccttgaggaggcgccgctcagccttgagtaattcataccgaagcccggccgaagtggagctagactctgctagcgaggcagcagcttacgatggggaagccccaccctgggaatga

SEQ ID NO: 10352 - RNA, 981 nt, synthetic construct
  source 1..981: mol_type = other RNA
atgtgggcgcagaatccaggtcaacgcgatattgcttcgctgattggcatgacaaagggccagcttggagctattgtgcgcgacaaagagaggtatattagaagggacaccatcgacattaatgggaagctgagaaatctgaccgtgccaaccggcaagcttaggatggtacacgagcgcctcaaatttcagctgaacaaaataaagcaaccaccctacctttgttcccctaggaagggggtaggacagcgggacaacgctgagatgcatgtggccggccaccagctgctgaagctggatattcggcagttctaccccaaaacgatgcaggaggatatttggcggtgggcccattactctttgggcataatggacgatgtggcaggcctatttgcaaaattagccgctatcgacgggagaatgccctttggtagtcccatcagccctgtgctcacctccctggttcacaggggaatgttcgacaaggtctacgcaatctgcggaagccatggcctgaagatgagtttgtgggttgacgatttaacgatcagcggagcagaagttcctggaggggccgtgactgatatccgtcaggccatccgagcaggcggcttccaaacacacaagattgaatatctgatgactgcacgccccaccgaaataactggagtgccgatcgccaaagggagagtcctggccccgcatgctatccaccgccgaattaaggagggctatgaagccctcaaggtcgccgcgagcgatacagaacggtctaacatcatcgataaactcttgtcagcactagggagttacagatatcacttgggttcctcaactccagagggtcggcttgccgctgatcgaatgcaatcactccgtcagaggagagctaaaatgaccatcgtcgcggagactcctcagacactctcctctatacaggccgtgaccttcggggctcctgacacactgccatgggactga

SEQ ID NO: 10353 - RNA, 1026 nt, synthetic construct
  source 1..1026: mol_type = other RNA
atgaagcggccgagggatagaagatatgagcgctttgggttggacgcgtccctttgggcacaggaccccacacagcaggacgtggcacggctcctcggcatgactaaagaccagctcgaagccatcgtgcgggacaaggaacgttacacgtcccgccgaaccctggaaataaacggcaaactaagaaatttagccatccctacaggcagactgaggcggatccacgagaggttgaagttccagctgaacaaaatcaagcagccaccttatttatgcagccctaggaaaggcatagggcaacgcgataatgcggagcgccacgttgatggtgcccagctccttaaaatagacattagacaattctaccccagaactatgcaagaagatatttggagatgggcccaccatacaatgggcattcgtgacgacgtagccggactgatggcgaagctggtggccattgacggtcggatgccattcggatctcccgtgagccctgtactgacgacacttgtccaccgacccatgttcgatagaatctacgaggtgtgtggggtgcgcgctttagccatgagcctgtgggtggatgatctcactctgtctggaactgagatcaccgctaacaccattgtcgctgtcaggcagatcatcagggatggcggttttcagacccataaaatcgaacatttggccactgcacggccagttgacatcaccggagtgcccattgcagccggaagggttttggcccctctggcacttcaccgtcgaattcaggagggttttacagctctcagagctgccacaaccgatgcggaccgagcatcaataattgacaagctgctgagtgccctcggcacctaccggtatcatctggggacttccactctggaagggcgcagggccgctgataggatgcacgctctaaagcaacggcgagctcgcatggcaatcaccgctgtgaccgtcccggcaacaacgaccgtccatgaggctaagtcaagtgccgccctgccatgggagtga

SEQ ID NO: 10354 - RNA, 1152 nt, synthetic construct
  source 1..1152: mol_type = other RNA
gataggaagagagctgatctcagaccgaggcgcccctctagatctagaagcaggcgcgcagcagatcatcacgtgtgtggcgccggactgtccgcagtacctaagaatcgactgcgacagcgggctgcaaaaaggccccgctatgaacgctacgaactggccgactccccttggacaaagaaactgactcagcgggatcttgccgtcctactcgggaccaccaaggaccggcttgaagccttggtgagggatcacgaaaactacgtccatcgacgcgatgaaaatatcaagggcaaactcagaaagctggctatcccaaggggcaaattacgagcagtgcacgagcggctgaagggtcaccttaacaaaattaagcaacctccctacctgtattcgccccgtaaaggacgcggacagcgggacaacgcctttttacatgcgagtagcgcacaggttctgaaagtggacattagccaattctacccgcagaccacagtcgaggacatctggcgttgggctcactatacggtagggatgcgcgaggacgttgccgggttgttcgctaagctcgtcgccatcgatcggaagatgcccttcgggtcaccaattagcccagtgttaacctccctgatccaccggccaatgtttgacagagtgtaccagctggtccgtgaggcgggatttgagatgtctctctatgtggacgatctaaccatatccggacagggaattactggtgagtttcttgctgccgtacgcagcgagatcagaagcggggggttcaacacgcacaaaattgaattcctggaagccgcccgccccgtcgttattactggtgtgcctatagccggcaaacgggtgttggcccctacagctctccatcaaaggctgagacgaagttacgcggacttgaagtcagctaggtccgataaggaaagagcagaggtgattgaccagatcctgatcgccctgggcacttatcgtcattttgtcggcgcaagtagtgacgagggccggaaggcggccaatagaatgcacgctctcaaacagaggaggcgaaatctgtctatagagcttgtgaccatgccgacagttgatttcgtgccaacagctactttgtcacccgctgcaccaggcgttccttgggcctga

SEQ ID NO: 10355 - RNA, 1065 nt, synthetic construct
  source 1..1065: mol_type = other RNA
atggcaaagccaaccgataagaccataagcgaacgctatgccttcagtgaatcaccgctcgttgggctctccacccagagaaaactggcacaactgctgggctccagtaaatcgaggctgcacaaattggtggctgctgtggaatccgatccctctaactgctacaaaatcgaggatagacaggtgggagagaaactacgcaccttttctgtacccgtggggcagatgcgtaagattcatgagcgcatgaagattctgctgggaaggatctctctgccagagtatgtcatgagcccccgtcgaggtaaaaccatcgccactaatgccacagctcaccggcacgccgcggagttactgaaggtggatgtgaagtcctactatccgtccacgacagacgagctggtgttccgcctgttccatcatagatttgggatacctggcgatattgcaggcctgttaaccaagttattgactgtcaacggcagagtgcctattggaagccctgcatctccaattcttgctttctgggcttcaaaacccgcctttgacaaaatcgccagtgccgtccaatcacggggcctcaagcctactctgtgggtagacgaccttagcatttcaggccgccacgttccacgtgagatcgccgacgtcgtctcgtacgaactaggaaagctcgggtacatgggacacaaggtgaaatttcagtcccgacggcgaggcttttctatcacaggagttaggatcgacagcaggggacccggccccacaaatgctatcaacctcaagataagagatggcctgcggcggcttgagcgcaagagtaatacggacgaagaaacttcaaaattgctagctcagcttattggtttgaacgggcaccggctcggtacaatggctaaagatcacccagccgcacctagggcgaggaagctgcagcaacatttgcaccagagacggaggcgacatctcatgaccatgcaggagactctgtctagctccggtcaggcagacagcaaggggcttagcgcctctgccgcaagcagagccttcaggagtgcgtcctga

SEQ ID NO: 10356 - RNA, 918 nt, synthetic construct
  source 1..918: mol_type = other RNA
atggccgagacaaacaccctgcctcttagccagtccgcactctacaaagtgcagagccgggcccgcctcgccaaaactttgcttatttccccccggcatttaaaatttctcgctcgcggcacccagtataagctgacatcgattctggacaagaatgtaaagccgagaatgctgcaagtgcctcagggcgatctgcggaaagtgcacgatagagtaaggtatctcttcgcccagctgaaggcgccagagtaccttcacagcggagtgaaaggtagaagtcccgtcacgaacgccaaaaagcaccgtagcggggccgctggaatgagggtggacgttcgaaagttttttccatcttgcagcaggctgagcctcgctaagttcttccatcatgacatgggtatggcaggagatgttgcgcatcagctatcactgttgtgtacatgcgatggcgcacttccaaccggcagtcccttgtccatgtcactcgctttttggatgcaccgacgagtgttcgaccggatagagcgtatggccagagagcgcggctacgtgttcactttattcgtcgacgatgcaaatttttccgccgatctaagtatccccagagaatttgaactggccgtcagatcagagctcaggcgagtccggttacgggctcaccctcgcaaaacgtctcgggttgcgcccggtacagctaggcaaattactggcgtgatcttgcctaattcagacgagatcagggtgccgaacgcacagagactgaagttcctgcgcgggctggaaaccataaagcagaattctgcacttaaagccgaaagggttaactccctgagaggactgctagcctggatgcgccaaatcgaaccaaccatcttccctcgtgctgggggggagttgactaggctgaactctaagtga

SEQ ID NO: 10357 - RNA, 1029 nt, synthetic construct
  source 1..1029: mol_type = other RNA
atgccaatgaaaaatccttcacaccggcgtgaaaaggccttcgggcgtgccaggctgcgcaagaacaagtcggcccgatatcccattgaacgctcacccttctggcggctgtcctccatccatcagttggcagcattgctggacgtccctgtggaagacctggaggccacatgcatggccccgagctacaatcgctttgacgaccagccaaaacctggcaaggaggctcggcacatccaggagcccactgaggcaaccctaaaaatccattatcgcatcgcacggcacctagatagtatccagaggcccgattttctgcacagcgccaccaagtgcaggagccatgttactaacgccagagcccatttggcgtcaggaggcgcagtcgtggccatggacattcggaaattcttcgaatccacaacataccaccacgtcaaggcttttttttacaaggacctgggctgttcccatgatgtggcgaggctgttagccacggtgtgtaccgctgatggacacctgccaaccggcagctgcatatctcccctgctgagttatttcacccatcgacagttatttgcagaaattgagaaactttgtgtggtcacgaatgtgattatgaccctctatgtggacgacctgactctgagcggtatccacgccacaaaatccatgctttaccggataaaagcactcattgtacgccatgggctgcagactaaaagtacaaaggatgccgttttaagaccgggtaagtctgctatcatcaccggcgctatccgggcgggagatcaactccgactcagaaacaagcaccacggggcaatagttgaaattcaagaccagatgtcacttggccgcactccacctcttgaccagctccgaggcagaatagcttctgccagggcggtcgatcctcaagctgctgctaggctggaggccagactcgagaggattgtgagacgtggtcagctcgctaacggagagggagatttgtctgggattgtaagaaaaaagccagggatctga

SEQ ID NO: 10358 - RNA, 1002 nt, synthetic construct
  source 1..1002: mol_type = other RNA
atgaaaaaccctctccataagagagagaaggccctaggccgggcacgacttaggcggaatcaatcagcccgctacccaatagagcgtagtcccttttggaggctctcgagcatccaccagctggccatgttactggacgttccagtccaggagataaaggctacgtgtatggagccgtcctacaacagattcgatgatcatcctaaacccggcaaggaggctcgccatattcaggaacccactgataggactttgaagattcactatcgcatcgcccgatatctggacagcattgaaagaccggaatttctgcactctgccaccaagaagcggtcccacgtgacaaatgctcgcgcacatcttccttccggtggggccgtcgtggcaatggacatcaggaaattctttgagagcaccacttaccaccatgtcaaggcattttttcaccgcgacttgggatgctcacacgatgtcgcgagattgctcgccaacgtgtgtaccgccgacgggcatctaccaaccggaagttgcatctctccattactgtcctatttcactcaccggctgatgttcgctcaaattgaacggctgtgcgttggtaaaggggttgtgatgaccttgtacgtagacgaccttacactgagtggcatgcatgccacgaaaagcatgctgtatcagattaagaacctcattgtgagacacggactgcagacaaaggccacaaaagacgctgtagtgaggcccggcaagagcgctattatcacaggggtgatgagggctggagagcagcttaggctccgtaataaacaccacggagccatcgtcgcgatccaggatcagatagccgctggcgaaaccgaatcattccatcagctgagaggtcggatcgcagccgccagagcagtggatcctcaagcagcgacacgcctggaggcgcgaatgaaacgtctcgcacacgccacttctggggatgtggctaccggcgaggacgctcgatcttga

SEQ ID NO: 10359 - RNA, 990 nt, synthetic construct
  source 1..990: mol_type = other RNA
atgaaaaatcccagtgaccggcgtgacaaagcagctggacgggctaggctacgaaagaacgagactggacgctaccctgtcgaacgctctcctctgtggcgactctcatctatccacagattggccgttcttctcggggtgcctgtgcaggaacttgaggcggcctgtatggcgcctagctaccatcggttcgttgatccaccaaagaaaacgggcaaagaggcaaggcacatacaggagccaaccggcgccacactcggaattcactatcggatcctgcgccacctggattcgatccagaggccagactttctccatagtgcgaccaaaaatagaagccacgttacaaatgcgcggtcccatttagccagcggtggagctgtccttgggatggacatccgcagattctttgaatcaaccacatatcaccatgttaagaccttcttccacaaggacctggggtgctcacatgatgtggcccgactgttagccacagtgtgcactgccgatggccacttgcccaccggttcctgtatctcccctctgctgtcctattttactcataggcgtctgtttgcagagattgagggcctgtgcgtcgagaaacgggtgataatgaccctgtacgtggacgaccttactttgagtggcgtgcacgcaaccaagagcatgctccatcagataaaagcattgatcgccagacagggactgagaacaaagccctctaaggatgctgtagtgcgcccgggtaagccggccattattacgggtgtcgtccgggatggggaccagctgaggctgagaaacagccatcacgatgccattgtacaaatccaggacttaattgctcacgggaacgccccaagcctccacgagcaactaagaggccgagtggcatctgcacgtgctgtggaacccactgctgctgctcgccttgaagccaggctcatcaggctgatgtccggcgaaaggcccgccgatagtaagtga

SEQ ID NO: 10360 - RNA, 987 nt, synthetic construct
  source 1..987: mol_type = other RNA
atgaccagagacgcacataaacgcgataagtctgcggggagggcaaggctgagaaaaaacaagtctgccaggtatcctatagaatcctcccccttgtggtccctgtctagtatccaccagctggccgtcctcattggtatcccggtcgatgaactggaggtgacctgcacctctcccacctatcataggtttgatgaggccgcgaaggagggtaaggaaccccgccatatccaagagcctaccggcgcgacactccgagctcactaccgactggtgaggcacttggattccatccagcgtccagactttttacactcagccaccaagaaacggagtcatgtcactaacgcacgtgcacatgctgaaagcggcggcgctgtggttgccatggacatccggaagtttttcgaatcaacaacttaccagcacgtcaaacgtttcttccataaagatcttgggtgttcacatgacatcgctcggcttctggccaatatctgtaccgtggatggccacttgccaacaggttcctgcgtgagccctcttctgagctattttacacacagacatctcttcgcagacattgaacgccgctgtgtggagagaggggtcactatgacgctgtacgtagatgacctgacattgagcggccctcacgccactaaaagcctgctattcgccatcaaggctatgatcaaacgatgcggactcaggactaaagatgccaaggacgctgtggttagacccggaaaagctgccattattacgggagtggttcgctcggatggcggggtacggttacggaataagcaccacggagccattgtggctatacaagacagtatagctactaccggagacaataacgacgacgtgcttagaggccgactcgccgctgccagagcagttgagccaaatgcagcgacacggctagaggagcggctgaagcgcattattgggaaccagcagaggaacgcatcagccaagtga

SEQ ID NO: 10361 - RNA, 987 nt, synthetic construct
  source 1..987: mol_type = other RNA
atgaaatctctgcaacatagagtagacaaggcagcgggacgtaagcgactgcggaaaaataagagtgctaggtatccaatcgagcagagtcccttttggggcctggctagcattcacacgctcgcttcccttctcggggttccggtcaaggacttggaagccgtgtgcctgagccccgcatacaacaggtttgatgaacccccaaaacccggcgccaaacctggcaaagaacctcggcatatccaggagccggttgacgctactctaaggatccactatcgcatcgtgaaacatctggattcaattcagaggcctgactttctccattccgcgacaaagcagagatcacacgtgacgaatgctcgcgctcatgtagatgccgggggagcggttgtggccatggacatcagaaagttctacgaatccaccacataccatcacgtcaaggcgttctttcatagagacttaggatgcgccctagacgtggcacgcctcttggccactgtgtgtactgccgatggccacttaccaacaggtagctgtatttctcctcttttgagctatttcgcacaccgcaagatgttcgccgctgtggaggccctgtgcgtcgagaagcaggtcaccatgacattgtacgtggatgaccttacactctctggcgcccacgccaccaagactatgctgtatcaggtcaaggcacttatcaagcagcagggtcttagaacccaacctaccaaggatgccgtggtgcgaccagggaaagctgctatcataaccggcgccgtgcgtgatgggcaacagattcggctgcgcaataaacaccacaactcgattgtcactctgcaggataggatagcttccggagacgacgtttcattcaaccaactgaggggtcgagtcgcagccgctcagagtgttgagcccgtggcagccgcaagactcgtagcacggctggatcggatactgtctaacgacaaagcggcctga

SEQ ID NO: 10362 - RNA, 996 nt, synthetic construct
  source 1..996: mol_type = other RNA
atgtcaaacgctacaaacaataagcaccgtcgccagcgcctggcactgaagagggagaaccgacggtccccaagtgaaaagtacccgcttgagagatccccggtcttcgagctaggaggtcccagggagcttgctacattgatgcagctgtccatcgagcagataagggcgatcgctgccaacccagagtatcacttttttgacgaagagcctaaacgcgaaggcaaggcagcgcgtcatatccaagaccctcggggcgacacgcagacgctgcattacagatttgccaaattcctcaataggattgaacgccccgcatttttacacagcgccacacgagggcggagccatatttctaatgccgcagtccatagaggcacttatcctgtggtgtgcgccgatatcgaaaaattctacgaaaacaccacccgggcccacgttaaaggattcctgttccgcgagctgcactggccaatggacctggcagctctcatggcggatgctttgaccgttaacggacacctccccactggctctgctgtttcccctatactctcatatttcactcaccggaggatgttcgcggagatcgaagccatgtgcattgcaaccgggtgtaccctgaccctctttgtggatgatataactgtctcgggtgcccgggctagtatgtcacttttgagacagatcaagcaaatcctgctggggcgaggcctacgagctaaggcaaataaagacaagagtgccccaacagggagcgccgtggtcattaccggagccgtacggcaaggggataggctgcgcattaggaatgagcataggaagggtatcgtggaattgcttgccagatacgaggccggcgagggtgctgttgaggaacagctcgtgagcaaaattgctgcagcaagatgtgtggacagcgccggagccgtgcccttagaaagaagatttacacagctgcgttctgtagctcgctcatccgcctctggcgtgtga

SEQ ID NO: 10363 - RNA, 978 nt, synthetic construct
  source 1..978: mol_type = other RNA
atgaataaaaagcgatcagcgttaaagaggagactgcgagcaaatcagtcatgccgttacgagctgtctagatgtgccctgtacggcgttaggcagttgagcgtgcttacagaccttctgcagaccactaacaaggccttaaggcagtccgcacaagcccccgaatttgccacctgggtggatcgatcccgcccagagaaacccagagacatacaagatcctcgggggacaaccgaacggctacactaccggatttgcgagctgctggatcgcgtgattcgtcctgagttcttacacagtgccacccgcaagagatcatccatcactaatgctagccaacacgttagccacggaccgtgtgttacaacagacatgaaatcgttttatgaagctacttctaccaaacaggttgaggagttcttctcagatagtctgaacatggcccctaacctcgcacgcaagctcgcaaatctctgcacaacggatggacatctccctaccggatctcccctctcccccctgttgagctattgggctcatcaccagacctttgataagatccacgagcttgtagtcgagcgcggggtggtgatgaccgtctacgtcgacgacatggccttttctggcgcccatgctagtctggctcttttgaggcaggtgaaacataagctgcgcctccggggcctggaaacgcacaaagataaaagcttcggcagaggacagtttaaacacatcactggggcagctgtgaatgggagaggaatccatgtaccaaacaggaggctgaaacaaattgtcgacgaccagggcgtcctagccaagggtgaattcgacgcagaaactgtggcttccctccggattaagttgtccgggcgtatcgccagtgccagcgcaatatctcggaagactgcggcgtggctgaagaggcgggacgtgtataacccaaagggtagacgaggcgccatcacagctggttga

SEQ ID NO: 10364 - RNA, 963 nt, synthetic construct
  source 1..963: mol_type = other RNA
atgaataagcgcagactggcactgaagaagagactgcgagcaaacaagcaggctaggtactcgctggagggctgcgcccttttcggcgtcaccgaaatgagcgttctcagcagactcctgcaggcagataataaaagtctccggctcacctgtaaagctccagagttcgccgtgtgggtcgataccactaaacctttaaagcctcgtaatatacaagacccgagaggtattacagagaggcttcactatcgcttatgcgaactgctagacagagtggtgaaaccagatttcttgcactctgcaacgaggaaacgcagcgctatcactaacgccgcacggcacatctcaaaggctccttgcgtgaccactgacatgaaatctttttatgaggtgacaaccacgcagcaggtcgcggcgtttttccgggaggacctccacatggcacccgatctggcactgaagctggcacagctgtgtaccgttaacgggcacctccccacaggcagtcccctatcacccttgctggcttactgggcccatcggcggacattcgggcagctgtatgagatgtcttggtcagcgggcattgtcatgactgtgtacgtcgacgatctggcctttagcggtgaacacgcttccctggcctttctccatattgtgaagcagatccttcggcgcagaggacttcatactcataaagacaaaagttttggggctggacaattcaaacatatcacaggggccgctgtgagctcaaagggattgcacgtgcctaatggtcgcctgaagaggatagttgacggcattgatgaattaaccgtagtatccgacccagcccagcaggccgatttgcgaaggcgtcttgtgggacgcattgcctccgcttccgcgatctctaggcaaatcggcaacgccttgaagcgacgtcacatccaaagcgccgaatccgccgttacagactga

SEQ ID NO: 10365 - RNA, 939 nt, synthetic construct
  source 1..939: mol_type = other RNA
atgaatactccccgtgatccttacgccctcgaaagctctcctttctttcgattgacttccatccacgagttagcgaagctcctccgccttactgtaggccagctgcggcaagagtgtctgcaccctgccttcgcgcccatgagagtggtgagaaaaccgggtccacggagtaaaacaaggaatgtcagcccacctctgaaaaccacgctgctgctgcaccagaggttgctgcggttctttgatcgagtcaggcgccctccctaccttcattcagcaacacggagaaggtcacacgtaactaacgcagccgctcacagcgggcagaggcatctcgtcaaagcggatatccggaagttttacgagagcaccacatattcacatgtcgtggccttcttccaccatgagttgcagatggccggtgatctggcacgattattagcacggctttgcacccgcgaggggagattggcgatgggatccccactatccccgctgctcagcttttgggtgcacaagaagatgttcgaccgcctggacgccctgagtagacagcacaggcttcgctttaccgcttatttcgacgacttgactatttcaggcaaccgcataaccgagagctttttccagacaatccggaggagtgttgctattcaagggctggaactcaaagaacagcgtgcctccgttgtgagggtgagagccggagttgaagtcaccggggcttggttgtctagaggcgcactctttgtgccacagcccgcctatctgctcgcacgccaagcaatcgctgccgtgagttctgctgaggccgacgagctagctacggccatccggacagcagaaggccatgtgtctgcttcctcggctatacgaagaggagccggcaaggccctgaaccgtcttatggctagggccattcatgcaaagaagcccctgtga

SEQ ID NO: 10366 - RNA, 1026 nt, synthetic construct
  source 1..1026: mol_type = other RNA
atgataggccactcccagataatgattctgagtaaaacccgcgccgatgaggatatcaagatatcgaagctatactttgttggcacgaagaagcgtcttgccaccgtgctgaaatctaacccttctgtcctgcgtcgccttgcaaagacaggcgacgccaattatcagcatatttttgtgaccagcaggggcaaaaaacgagccgttcagaatccaaatcctgagctgaaagagatccaagtacggattaatcagcttctgcagcgaatcaattacccggaatacatgatggctgggctgaaaggtctgtcttacgagaaaaatgctagtgcgcatcttgggttagagtccacaagggtgtgcactgtggatatcgaaaagttttatcccaactgccaacggggagcagtcattcggtctttggaaaagtggtttaaccagaagcacgacgttgccgtgcagctcgctgatctggtctgtttgaacggtcaccttccaaccggtgggccagcctccttactgttctcattctggtcaaatagggatgtattcgacgaaatcaagctggcggccgacgcgcacggactgaaaatgacagtgtacgtggacgacatgacattctcaggggaaaacgctggcctcaagttcctgcatgattgtgtcctccccgtcctcaagcgcgcaggactcagaggtcataagatcaagagctatcacaaaagttgccctcaagagatcactggcattattctgaacaagggaaagctgtgtctgccatataggaggtttaaagacatcgacaagaatattctagctttgaacgccgcaagaaagcccgttgcaagactcaagttgatcaacagcctggtgagcagattatactcagtgtccgccttctttcccaaatgcaaaaccaaggccaaagctatgggcaaaaagcagaaagcattgctaagcaagttcccttatctcaaacttagacaccggttcgggaaacaggctgcctccctcaagactggacgctga

SEQ ID NO: 10367 - RNA, 942 nt, synthetic construct
  source 1..942: mol_type = other RNA
atgcctaagacacagcccgaggaaggttatcagctgaaagattccccctttttcaggctgcggagtcgcaagcagcttgcaaagctgctgagggtgtcagctgacacactggatgaaatttcccacaggcacgatttgtatgtgagacgatggaaacataaaaaacttaaggacgatgagaagggagcttggctcaaacaccccccaactccagagcaggctgagaattacagacctattgacattcctgacccacaactcaaggccatgcaggggagaatcggagatctgttaggcagagtgaaggcgcccgaattccttttctccccggtcaagggcaggagctacgttgagaatgccgcacaccacaaggaggccaaggcgttttggctgctggacgtggctgattattttccaagctgcagcgccaataacgttgcccggttcttccaccgggaactagaatgctctcgcgatgtaacggccgtgctggtccatgtggctactttgggcggatgtttaccgcaagggtcgccctgttcccctatacttgcctactatagtaatagccatatctggttggccgtcgaaaaactcgtgcgcgccaaaggttgcaaactcagcctgtacgcagacgacataacaatatcaggggatgttgtccctaaggccttgatctgggagatcaaaaagttaatctttggcaacgggctacggctcaagacctcaaaagaagtatctcttattaacgctccagctgacatcaccggagtgattgtcaaggacggtgcaactcatctgcccaatcgccagctcaagaggctggcagagctcaagcaggagagagcaaacaccacaaacccaaagctgcagcagcgtatcgacaatcaaattgccggccgactgtctcaacgtaaacaggtggagaaccctaaaacctga

SEQ ID NO: 10368 - RNA, 942 nt, synthetic construct
  source 1..942: mol_type = other RNA
atgcctaagaaacagtccgatggcgggtatcacctgaaggacagccccttctttcgcctgagatccaggaaacagctggctgaactgcttcgcgtatctgcaaacacacttgacgaaataagtcacaggtcagacctctatgtgcgtcggtggaaacacaaaaagttgaaggaccacgagcgaggagcgtggctgaagcaaccgccacccccagaaaaagcagagtcctacagaccgattgatatccccgatgtgcagctgaaagccatgcagaaacgcattggagacttactgggcagggttaaggccccagaattcttgttttcacctgtgaaggggcgttcgtacgtggagaacgctgcccatcacaaggaatctaaggccttctggctgctagacgtggctgattatttcccttcctgctctgccaacaatgtggctcatttttttcatagagtcttggaatgctcaagagatgttaccgcagtactcgtccacctcgtcacactaaatgagtgtttgccccaggggagcccctgtagccctatactggcctattactctaacagtcatgtctggctggccgtggaagagctcgttaaagcgcgggactgcaagctgagcttatacgcagatgacataacaatctccggcgatgttgtgcctaaagctctgatctgggatattaagaagctcattttcggcaatgggcttcgattgaaagatagcaaggaggtaagccttatcaatgcaccagccgacatcactggtgtgattgtcaaagagggcggtacccatctgcccaacaggcaactcaagatgatcgccgagttaaagcagcttcgggctcggactacgaacccaaaactgaggggacggctcgacgagcaaatctcaggacgcctgagtcagagaaagcaggtggagaatcctaagacctga

SEQ ID NO: 10369 - RNA, 930 nt, synthetic construct
  source 1..930: mol_type = other RNA
atgagaaaaacgcagttgaaggacgggtaccagttgagggactcccccttttttaggctggcaaatcggaagaaattatccacactgcttagggtgagcgaggaaacactgaaggcgctctcaaccagccaggatctctacacaaggcgatggaaacacaagacgaaaaaggacaaagaggtggacgcctggaaaaattatatccctgagaacgcagacgaatacaggccaatagacattccgattcctaaactgaaagccacccaaaatcgaatctctgatcttctgtcccgggtccaggctcccgacttcctattctcaccggtgaaaggaagatcgtacgtagagaatgcgagccatcatgttgagggaactgctttttggtctttagatgtggccgactactttccaaactgtaaggctaacaacgtagcccgcttcttccgccgtgatctggaatgcagccgggacgtcaccgccattctcgtggctctaaccactttgaacaaatgtttaccacaggggagtccttcaagccccattctcgcatattatggcaattcccatatgtggctgaaggtcgcagatctggttgcaagttactcctgcaagttcagtctctatgccgatgacattaccatctctggacctatcatcaagaaggagcttatatggaagattaagaagataatccacgccaacggttttcttctgaagccctctaaggaaatcagtctgatccacgcccccgctgatatcacaggggttatagtcaagcagggtaaaactcacctccctaatagacagctgaaaagattggccgagctgaagaaagaaagagcccacactaagaatccagctagccaggcggtgctggataaccagatttcaggccggctaggccaacgtcgccaagtggagcgcgtgtga

SEQ ID NO: 10370 - RNA, 927 nt, synthetic construct
  source 1..927: mol_type = other RNA
atgccactgaagctcggctatcggctcgtggacagtccgttctataagttgaagtctaggtccaagttagctagactgcttagggtatcaaccgagacacttgatcaattgtcttccggacgcatgctgtacgcgcgaagatggaaacataaaaaactagagaagtggctgtgccagcctccttcagaagacgcagcagacatctaccggcccatcgatatcccggatccatgtttaaaggctgtccagtctagaatcgcttcgctgctctccaggatccaccccccagactttctcttcagccccgtaaaaggtagatcctatgtggagaatgcagcccgtcacgttggttcagaggcattttggttgctcgacattgccgactacttcccaagttgcgccgccaataaagttgctaggttcttccgcagcgatctggactgtagccccgatgttagcgccgtgctggtccggttgaccacccataatgagtgtcttcctcagggcagtccttgctctcccatactcgcctactattgtaatcggccaatgtggctggccattgaaaagattgtgactgatgctgggtgcaagctgtcgctgtacgccgacgacattacaatctccggcgatgtggtgagaaagagcatgatatgggaggtcaaaaagatcgtgcacggaaacgggttaaggctgaaagcgtccaaagaagtgagtttgatcaagtcagcagctgatattaccggagtgatcgtcaaacctgacgggactcatctgccaaaccgccaatttaagaagctagccgagcttaaggccctgcactctacaacggtcaaccctaaagataaagcgcgcattgaaaaccagataagcggccgtattgctcagtggcgacaggttgaaagctttcggatagcacccgactga

SEQ ID NO: 10371 - RNA, 936 nt, synthetic construct
  source 1..936: mol_type = other RNA
atgcagaagacccctccccggcaagcctatcagatcaaagattccccattttacaagctctctagcagacgcaaattggcctcactgttgcgcacttctagcgatacgctagccgagctggctagtggaaaacctatgtatgtgagacgctggaagcataaaaagttggaccagtggttacgggaagcccccagtaccacggacgcagacgtatacaggcccattgatatcccggacccccgccttaaggcagtgcagtcccgtatagccgcacttctcgctcgaatcgagcccccagacttcctttttagtccagtgaaggggcgtagctacgtggaaaatgccgcaagacacgtgggttcaaaagctttttggctcctcgacgtggcagactattttcctagctgcacagcgaacaatgtggcccggttcttccaccgagatctgctctgttccgaggatgtcacagccgtcctcgtgaaactggttactctgagagaatgtctgcctcaaggatcgccctgctcacctattctggcttactattgcaacaggccaatgtggctggcgatcgagagctgcgtcaaagctagtgggtgtaagttgagcctgtacgcagacgatatcactatatccggcgacgtggttcggaaagagatgatctgggagattaaaaagatcgtccatggatctgggatgaggctgaaagcgtccaaggaagtctcactgatctctgccccggctgatattaccggtgttatagtgaagccaacaggcactcacctgccaaaccggcagctgaagaagctagccgaacttaggaagttacataccttaacaaccaatgctaaagataaggcccgaattgagaaccagatttccggccgcgtagctcaaaggagacaggttgaatctttccagcctagcaatgagtga

SEQ ID NO: 10372 - RNA, 936 nt, synthetic construct
  source 1..936: mol_type = other RNA
atgcccttacgtcacagcgcaaccccatacacacttagagactcccccttcttcaggctccgcacccggaaaaaactggccaccttactgcgagtgagcgaagcagcactggctgatatatcagccagaaatgacctatacgtgaggtgttggaaacacaaaaaagacaaggacatatggctccgagagcagccagctcccgatatagccgctcattataggcctatcgacattccggatagtgggctgaaagccgtgcagagtcggatcgctggtttgctgagccgcattacaccgccagattggttgtttagccccgttaagggacggtcttacgtcgacaatgcggcatcccataagggggctcgggcctactggctcctggatattgcggattactttccttcatgctccgccaataacgtggcccatttctttaaccgcaaactggagtgctcccctgacgtgactgcaatccttgttcacctgacgacttggcaacagtgcctcccacaggggtcgccatgttcacctatcctcgcatatttttctaatctggatctgtggcaggaaattgagcagtcagtgatgcaagccggccttaagcatagtgtctatgctgacgatatcacaatctctggccaaatgattcgtaaagagctcatttgggaagtcaagcagagcgtacacaaacacggcatgaaaatcaaggcggacaaggagctttccttgattgatagccctgccgacataaccggagtaatcgtggttggtgatcgaactaagttgcccaaccggcagttaaagagactgttcgaactaagagccgagaggcaccgcgctagagacgcaatcaagaagcgcctgctggacaaccagatctctggaagggtggcccagaagaggcaggtcgaacaagcctataacgctaagtga

SEQ ID NO: 10373 - RNA, 924 nt, synthetic construct
  source 1..924: mol_type = other RNA
atgccgacaagacatcgggctgttccatataccctgcgagatagtccctttttccggctgcgccggagaaaagatttggccaaactattacatgtgagcgagacaaccttggctactatcgcctccaggaatgacctttacgaaagatgctggaaacacaaaaagctgaagaataattggctggatgacgagccatctgccgatattgcacatctctaccgcccaatagacatccccgatggcgggctgaaggcaatccaatctaggatcgctaacctgctgggtcggattacccctcccgactggctgttctctccagtgaaaggaaggagctacgttggaaacgcggcgtgtcaccgcggctcaaaggcattttggctgctggacatcgccgactatttcccttcatgtactgcaaacaatgtggctcacttttttcaaagaaagttggaatgttcccctgatgtgaccgctattctggtgcatctcacaacgttgcagcaatgcctaccgcaggggagtccttgcagccctgtgcttgcctacttctccaaccttgacatgtggcgcgaaatcgagcagagtgttagcaaggcggctctcaaacactctatctatgccgacgacattaccatcagcgggccaattgtgcccaaaaaggtcatctgggagattaagcaggcaattcataagcacggcatgaagataaaagccgataaagagctgtcattaatagactcccccgccgaggtcactggagtaatagtggtcggagatcgtacaaagcttcccaaccgacagtttaagcgcctgttcgagttacgtggcgaaaggcaccgagagagatcgaagacgctcatgcggctcctcgatggccagatcgccggtagagtcgcccagaggaggcaggtagaacagttctga

SEQ ID NO: 10374 - RNA, 903 nt, synthetic construct
  source 1..903: mol_type = other RNA
atgagctatgaattgagagactcccccttctttaggctaaagactagaaaaaagctggccgctacgctgaagattagcgaaatggccctgaacaccttaactgttaggactgatctctacgtccgaaaatggaagcacaagaaggaaaaggacaagtggctcgagacacctccaccacccggtgagtcacacctgtatagatccattgatataccagactctgacctgaaagccgttcagagccggatagctaaactgcttagtcgagtgacccctcccgactggctattttccccagttaaagggcgctcttacgtggataacgcagcacgccaccgtggatcaattgctttctggctcttggatattgcggactattttcccagttgcaccgctaacaatgtcgcccacttcttccggacacgcatggagtgttctcctgatgtgactgccatcctggtgcatgtcgccacatggcatcagtgtttacctcaggggagcccgtgctccccgatccttgcatacttttctaatctcggtctgtgggaagagatcgaatcggccgtcatcgaggcgggccttaagcatagcatttacgctgatgacattacgattagtggggccatcgtaaggaaaaaagtgatatgggaaattaagcgcagcatccataagcacggcttcaagatcaaggccgagaaagagctgtcacttatccataggcctgcagacataaccggagtgatcgtggctggagacgacacaaaactgcccaatcggcagctgaagagactctttgatctgcgggcagagcgtcacaaggcgaaaggcaaattgttgatctcacagatcgataacaagatttccggccacctcgcccaaaaaaggcaagtagagagaacctga

SEQ ID NO: 10375 - RNA, 942 nt, synthetic construct
  source 1..942: mol_type = other RNA
atgctgccactccccaacgggagccagtatgccttaagagatactccttttttccggcttcggtcaagaaagaaactcgccgagattctcttggtcagtgacgcagccctgcagcgggtgctgaacgaggagaatttatatgagcgcagatggaagcacaagaaagaaaaggattcctggctcaacttcgaacctaaaccggaagtttctcatttctaccgtccaattgacatacccgataagggactcaagagcatccagagtcgcattgcgaagctgtttgctaaagtgacaccaccggattggttgttttccccagtgaaagggcgttcctacgtgaataatgcagcccgacatgtgggagcgagggctttctggctgcttgacatagctgactactttccttcgtgtactgataataatgtagcgcacctcttccatactcgccttgaatgctctcctgacgtcaccgctatcatagtcaagcttatcaccctgtgtggctgcttaccccaaggttctccatgcagccctatcatggcctattactccaaccacacaatgtggctgaagatctcagagattgtgacagactctggcctgacacatagcgtatacgcagacgacatcaccatcagtggcaacctgatcaaaaaggaagtgatctggaatattaaggccacggttcacaaacatggtctacggattaaagctgagaaagagctgtcaattattgattcacccgctgacataaccggcgttatcgtgaagggcggacgaaccatgttgcctaacagacagctaaagaggctgtttgagctcaggggagaacgccagagggcaaaggggagcctggccaaagcagccctggatagccagatcgccgggagattggcccaacagaggcaagtcgagcaccagtatcggcaccccccctcctga

SEQ ID NO: 10376 - RNA, 939 nt, synthetic construct
  source 1..939: mol_type = other RNA
atgctgaaagaaacgactattaatacttactccttgcgggactcccccttctttaggcttaggtctaggaagaagctagcccagctcctgagagtcagccccaaaacactgtccgagatcagccaacgggaggacctctactccagatattggaaaagtaaaaaaggggacgtttggctgaagtctccccctgatgaggtagacgctgataaataccgacctatcgatattccggtccatcgcctcaagtcactgcaggctcgaatagccaagctgctgtcccgtattaccccaccagaatggctcttttccccggtgaagggaaggtcatacgttgataacgctgcttatcataagggagcaaaggcctattggcttttggacatcgagaacttcttccctagttgctcgggcaacaacgtggtgcatttttttagcagcaaactggagtgcagtcccgacgtcaccgccattttagtccacatcaccacaatcttggataccgacacagatcgcgtgggacttccacagggagccccctgtagtccaatcttggcgtatttctctaatctcgatatgtgggcagagattgaatcaattgtgaagcgcgcgagcctgaagcatggggtgtacgcagacgacataacaatctctggtggcatggtgcctaaagctgctatctgggaaatcaagaaggcaatacacaaacacggccacaagattaaagcagccaaagaagtgtctctgatccacgccccagccgatataactggcgttattgtggcagagggtaaaaccaagttacctaatcggcagtggaagaagctcaacgagcttagagccgcgcgttcagtcgctaagggcagcaaactaaaacagagactggacaatcagatcagcgggcggattgcccaaaagaatcaagtagaacagtcgtga

SEQ ID NO: 10377 - RNA, 933 nt, synthetic construct
  source 1..933: mol_type = other RNA
atgcctcggaaagcctttccctttcacaagctcgaggctagcgcattgttcaatgtgaggacaaggaagaagctggcggacattctaatgtgcagccctgcccatctgaagtccgtggatgcaattgaaatccgatacaaaaagcgatggaaaccgaaagactctgacaccgccccttggttgaagcaaccccctccagctgagaaggctggcaactacagaccaatagacattcccgtggatccccttaaaaagttgcagaccagaatcgctaatctcctgtcacgcatagagcccccaagctacctgtgttcaccggtcaagggggtttcctatgtggacaatgccagaaggcacgtaaattcgaacgccttttggttattggatatcgccgattatttcccctcttgtacagctgaccgcgtggcatggttcttctctaccgttatgaagtgcgccccagatgttactgcggtgctcgtgtccctggtgaccgactctggaagactccctcagggtagtccttgcagcccgatcttagcctacttttcaaacaaaaagatgtgggacgacgtcgccgaagctgtggctagtgcggggtgtattctgtccgtctatgcagatgacattacactgtccggcactaccgtgccaggagcactcgtgtgggaggtaaaacaaatcatcgtgaaaaacggcttcaaactaaaacgggagaaggaagtcagtctggttgggagccccgccgatatcacgggcgttatcgtccgcaatggaacgcttaagctgccaaacaggcagctgaagaaacttgcagagactaagaaacttcacaaactggccactgataaggtcacattaataaagctcgaacatcaggtaaaaggtcggctggcacagcggcgtcagattgaagaggctctgaagccttga

SEQ ID NO: 10378 - RNA, 924 nt, synthetic construct
  source 1..924: mol_type = other RNA
atgagacggaaggccttcgagttccacaatctcgaagccagcgcactgtttaatgtaagaactagaaagaggctggccgaggtgctgctatgtagccctgcccacctgaaggcagtgtgcgaaatagctattaggtacaaaaaacgctggaagccaaaagactccgatacagccccttggttaaaacagcccccccccgctgaacagacagcgaattatcgccccatcgacattccaattgacccactgaagaagcttcaggctaggatcgccaacctgctgagccgtattgagccgcctgaatttttgtgctcacccgttaagggtgtgagttacgtggacaacgctaagcggcatatcaacaacaacgctttctggctgctggatattgccgattattttccgtcttgttcctcgaatcgcgttgcatggttttttaatacggtcatgaaatgcgcgcctgatgtgaccgccgtacttgtctccctggtttccgagaatgactctcttcctcaaggctcaccttctagcccaatactcgcatacttcagtaataagaagatgtgggatgacgtggccctagccgtggcgaactcagggtgtactctgagtgtttatgccgacgatgtgaccttaagcggtaccacagtgcccggggctttggtctggcgagtcaagcagatcatcgtgaaaaacggcttcaaactaaaacgcgagaaagaagtgtcccttatcggctctccagcagacattaccggagtcatcgtaagagatggaaccctcaagctgccaaaccggcaactcaagaaaatcgctgagataaagaagctccatactaacgccacaaactcacggttggcaattaaactggagaatcagttgaaagggcgtctcgcacagcgaaggcagatcgaggaagcttga

SEQ ID NO: 10379 - RNA, 930 nt, synthetic construct
  source 1..930: mol_type = other RNA
atgtcacaccgagccgttaaatctcatgacctgagagatagcgcattatttaatatcggcactcgtaagaagctcgctagcgtcctcctgtgcagcccagaccatctgaatctggtgcagaagctggaggtgaaatataagaaacggtggaagcccaaggattccgacactgctccctggcttacacagccacctgccccacacgaagctgactgtttccgccccattgatatccctgtggatcccctcaaaaaattgcagggcaggattgcagacctgctgtcgcgcgtaaaggcacctccgtatctgtgcagtcccgtgaggggtgtgagctatgttgacaacgcccgggctcacatcgaaggcagcgctttctggttattggatatcgccgattactttccctcctgtaccgcaaacagagtggcctggttttttaggaccgtaatgaagtgtgcccctgacgtgacggcaatcctcgtggccattgtaaccgacagtggacgactgcctcaaggctcaccatcctctccgatccttgcgtacttctccaacctgaaaatgtggggggaagtggctgcactcgtgcatcgcgccggctgtatactgtctgtctacgctgacgatattactatatctggaaaaaccgtccctggtgcccttgtctggaacgttaagcagactattgtgaaaaacggattcagactaaagagggagaaggaggtcagtttggtgtgctgtccagcggacattacaggggttatcgttcgcaatgggtccctgaagctaccaaatcgtcagttaaaaaaaatcgtcgagacgaagaagctgttgagggcatcaacagataaaatgacagccgataagctcaaaacccaaattgcggggcggcttgcccagcggagacagatagagtgcgctagttgctga

SEQ ID NO: 10380 - RNA, 927 nt, synthetic construct
  source 1..927: mol_type = other RNA
atgcccaggaaaagttttcggttccataagatcgaggactccgccttgttcaacgtctccacccgcaaaaagctcgctaacgtcctcatgtgctctcttcctctgttaaaggcagtagaaggcctcgatgtgcggtacaagaagcgctggaagagaaaggactcagatacagccccttggttgactcaaccccctccaccagatcaggccactcaataccgacccatcgacattccagttgatcaactgaaaaagttacaggcacgcattgctgacctgctctcacgcatcgagacgccccctttcctctgcagtccggtcaaaggcgttagctatgttgataacgcgggtcggcatgtgaacaatcgtgccttttggctgctggacatagctgactatttcccttcttgctctgccgacagagtggcgtggttttttggcactataatgaaatgtgctccagatgttaccgctgtgctggtcagtctcacaactgatatgaatagactaccacagggaagcccttgtagccccatcctagcatactattccaatatgaaaatgtggcacgacgtggccaccttggtggcaggtgcagggtgtattctgagcgtatacgctgatgacattacaatcagcggaaaaacagtgccgggctctttaatttggcaggtcaagcaggtgatctttaggaacggcttcaagcttaaacacgagaaagagctgtcccttatggcttcacccgccgatatcaccggagtgatcgtgcgagacgggaagttgaaactgccaaataggcagcacaaaaagatcgtagacctgtccaagcagcaaaagatcgccacggataccaagcttctggccaaaattgaatcgcagattcgtgggcggctggcccagaggagacagatagaagaggcaatatga

SEQ ID NO: 10381 - RNA, 927 nt, synthetic construct
  source 1..927: mol_type = other RNA
atgcctccaaagccgaggcaatttcataaactgaatgattcagccctgtaccaggtgtctaccaggaagaaactagccgaggtcctgatgtgttcaccccaagacttaaaagatgtccttgctctgtctgtgcggtacaagaatcgctggaaaagaaaagattccgacaccgctccatggctcacccacccacctgcacctgacgaggcctccaattaccggcccatcgatatccctgttcctccactgaagaagctgcagggacgcattgcggacctgcttagtagagtggaaccccccgaattcttgtgttcaccggttaagggtgtctcctacgtggacaacgcccgacgccacattaactctcatgctttttggctgctcgacattgccgattattttccaaattgtcgtgccgatagggtcgcatggttcttcaggacgaagatgaagtgcgccccagatgtgaccactattttagttgcgctaactacagataaggacaggctgccccaaggtagcccttgcagccccattctcgcttatttctccaacatgcgcatgtggcgggatattagcactctggtaacaaatgctggctgcgtactgagcgtttatgcagacgatatcaccatcagcggctcgaaagtgccgggggggttggtgtggcagattaaacagacgatacacaagaacgggtttaaactcaagagagacaaggagcttagtctgatcgcctctcccgcagatataacaggagtgatcgtgcagaatggccagctcaaactgcctaacagacagcggaaaaagcttgtggagttggtcagtcagcaaaaagcaacatcagacaagaagttgttagccaaactcgacaaccagatccagggaagaatcgctcagcgacgtcagatagaatccgtagactga

SEQ ID NO: 10382 - RNA, 930 nt, synthetic construct
  source 1..930: mol_type = other RNA
atgccgccaaaacagcagcgtcacttctataaactccaggattcagccctatacaatgtgaccactaagaaaagactcgcggaagttctgctctgcagtcccgacgatcttaagaatgtcctggcaaccaaggtcaggtacaaaaatcgctggaagcccaaggattccgacactgctccctggcttacccagccaccaccccctgaagaggccgcaaattatcggcccattgatataccgatcccttccttaaaacgcctgcaggcccgaatcgcatatctgttaagtcgcatagagcccccttccttcctgttttctccagtgaaggggttaagctacgtggataatgcacggagacacgtggggtcgagagcgttctggctgctcgacgtagccgattactttccaagctgtagggcggacagggtcgcctggttcttccgcacagagatgaagtgcgctcctgacgttgccgctattctggtagcattgacaacagacaaagaacggctgccgcaagggagcccttgttctcccatcctggcttatttttgtaatatggtgatgtggaacgacatcgcaaccactgtcgagaacgccggctgcgtgctgtccgtctacgctgacgacatcacgatttcaggtgccaacgtacctggccagctaatatggcaggtgaagaaaacaatccataaaaacggatttcgattgaaaagggagaaggagctctctcttctggataggccagctgatattaccggtgtgattgttagaaacggccaactcaagttgcctaatagacagcttaagaaactggtggagctcgttgaaaagcataaaagcgaaacgaagaagaaggaattggccaagctgtttaaccagatccaaggacgtcttgctcagcggaaacaagtggagaacgccaactga

SEQ ID NO: 10383 - RNA, 927 nt, synthetic construct
  source 1..927: mol_type = other RNA
atgcgccctggccaccgcatagttgactccgcgctttacaaggtgcgaaccagacggaggctggcggaactgctctttacagaagtgggtttcctggagagcctagaaaaaaatcagcccaagtacgttgtgaaatataagcctaagtacgatgacaaggctccctggttagctatgccacctccgccggagctggccgataactacaggccaataagcctgccacctactgccctgaaaaggctgcaggcccgtttagccaagttgctggggatgatcacggtaccaccttatgtctttagctcagtgaagggcgtgtcatacgtggacaacgcagccgtgcatgttggcgcacgcgccttctggctattggatatcgaggcctttctgccctcctgcaccgccgagagacttacttggttcttccgagacaaactccagtgtagtcccgacgtcgcggccatcctcgtggagattgttacattcgatggctgccttccccagggatctccttgttcgcctatattatcctatttttgcaatgctcgcatgtggagcgatatctaccagctcgctggggagtatggatgtaccctgagtatctatgcagatgatattactctgtctggagccgtagtgcccaagaaacttgtgtggcgtatcaaagaagtcctgaagaataatggtttcaggacaagtagatcaaaagaggtcagcctggtgaacgcaccagctgacattacaggggtcattgtccgggacaacaagttgtttctcccaaaccggcagtttaagaaactcagggtagagttggcaaagagaagagacgcaaaaacctccatcgaaaaacgaaaaattgacaatcggattgctggccggaaggctcaagcccgccaaatcgaaaagcactctaagtctgggaggtga

SEQ ID NO: 10384 - RNA, 918 nt, synthetic construct
  source 1..918: mol_type = other RNA
atgaaggtggcttcccttcgcggtaatgccctctttaggatctcaaaccgtagattgctggccgagcggcttctcctgaagccagaggccctggccgcagctctcaacctggacctgccctatgtgcgaaggtggaaatctaaaaaaggagacgaatggcgatccgaagaaccagacgcagacgaagcaagggctttccgtcctatcgatattccccatccccacttaaagcaggtgcagcgccgaatcgggcggctgttatcttccgctcgccctccggattggttgttttcacctgtcaagggacgaagctacgttgataacgccgcccgtcatcttggcagcacggcgttttgcatgttggatattgcagattacttcccaagttgtactacctctgcggtcgcagggatgttcctgaatgagctccattgccctcccgacgtggccagtatactaaccagtctggtaacaaaagacggctctctaccacaagggagcccgtgtagcccagtcgtggccttttattccaaagtgggaatgtggaatgagatcgcgcgcttggtggatgaacgggggttaatccactcagtgtacgctgacgatctgactatttccggccccgtgattcctggagaagctgtatggggtgtcaagaagattgtgcacaaacacggcatgagacttaggcgggacaaggaggtcggactgttctgccggcccgcagacattacaggcgttatagttaccaacggtggactcaggctgcctaatcgccagttcaaaagactggccgagctcagagcccagagacaggcttcgcgcgaaaaggagagggagatgatcgatcggaagatcgccggcaggatagctcagagaagacaggttgaggggcacgacggccaaagcgcaccatga

SEQ ID NO: 10385 - RNA, 951 nt, synthetic construct
  source 1..951: mol_type = other RNA
atggctagctcaagcaacgctactgaaaatgcctcgtctctctttggctgccagagaaagagggacttcgctaagattctaggaattactaggggccggcttcgctggttggcgaaccaaaagaatgagtaccccgagggcaagaccgccaattccctgtacacaagactgtggaaacccaaacgtggggaaggcaagtggctgagggtcgaaccactccccgaggtggcaagcaactaccggcctatcgatgagctaaaggtcctgcagcgacaccttcacgacgacctgtctaatatcgaggttccggcatggcttttcgctcctgccctgggaaagagctacgtggacaacgccgccgcacattcaggctccagtcattttcatctgttggatctggaggcttatttcccgtcctgtcggagccaccgcgtgtatgatttctttaggagaaagctccactgttcttccgacgtagcggagttactgacacatgtgtccacgttaggtggatctcttccccagggtagccccagctctccaatcttagcctacctgagcaatgtggatgtgtggaacaacatagccgatttgtgccggtcggaaggagtcaccctcagcgtttatgccgacgatattaccctgtcatcccacaaaagtatatctggggagctggtgtggaacatcaaatccgctttgtattccaaggggctgggcacaaaaaagagtaaggaagcgagtatggtacacaaagccgctgacattaccggggtcatcgttggaaagcagggtgtgaggcctccaaatcgacaggtcaaacgcctcaaagaactggaagaggtggcctcacagcgccctaacaatgaggttctcgtgagaaaaatccgggggagacgtgcacaactcaaccagattgcatcagcctctagtaatccagcagctaaaaagtga

SEQ ID NO: 10386 - RNA, 975 nt, synthetic construct
  source 1..975: mol_type = other RNA
atgaacccaaatatgggctacacggagcgagagagtccgttcttcaggttaaactctaaaaacaagctcgccaaactgctgttcattggcctgccaaagctaaaggagcttgccgcaggcgcggatctgtattatagctttcagaaggtcaagaagtcaggaggtatgcggatgatttctgcacctcgcgatgacctcaaaaaagtccagaagcgcatctcggatctgctgcaacggattgccccccccgatttccttttcgctcccgtgaagggacggtcctacgtggataatgcagctgtgcatatcggggccactgcagtgcaccttctggatatcgaagattttttcccctcctgcactgctaacaaggtcatttggttttttaagaccagattcgagtgtagtccggacattgccgttatcctgaagaacattgcgacaaggaatggctccctccctcaggggagtccatgtagcccagctctggcctacttttgctacgtggacatgtggaaagaaatagaggcccacgtgaaacaaagagggtgcaaactatcagtgtatgctgacgacttaaccatatctggcgacgtagtgcctggcgagttggtctttgacatcaaagccacaatgttgcgccatggacaccaatatagcgcaaaaaaggaaaggagcaagatcatgaagcccgttgagatcaccggtgtaatcgtcgccaacaaccagctgcttattcctaatcggcagcatagatccatcgttattgctcaacgtaaactcgggaaagaaaagaaattgagggagaggctcaagatcacaaatgaactgaaggggcgtaatgcccagaaaaatcagataaagaaccaccctggtcagcccaccacagacgcgatacctactccaacgggatactaccagagcaccacacgctctacctctagctcagtgactagttcagacagacgatcctga

SEQ ID NO: 10387 - RNA, 927 nt, synthetic construct
  source 1..927: mol_type = other RNA
atgagaaatccaaggcggcggaagaccacagatatggccgtgaaggggggctatcaggagagagactccccattcttcaggctaaaatcaaagactaagcttgccaccttcctgttcatcgggagccagaaactgaaagatctatcagacggacgagacttgtacagaagtttccaaaagctgaagggaaacggaaagacccgggaaatcaatgcaccgcgggacgatctcaagaaggtacagagacgcatagcagatctgttgcagcgcattcaaccccctgactacctgtttgctcccgtgaatggcaggtcgtatgtcgacaatgccgctgtacacgtcggcgccaacgccgttcatctgctcgatatcgaggacttttttccatcctgcacagccaacaaagtgatttggtttttcaaaacacggatggagtgctcagccgacgtgtctgtgatcttaaagaacattgtgactcgtaaaggttgccttccccaaggctctccctgttcccctattttagcctatctctgttacgcagatatgtggaacgagatagaagaggcagtgagaaggcatcactgtcagatatctgtgtatgcggacgatctgacgatctccgggaaggttgttccgcagcagctcgtgtgggaaattaaagctaccctcagaaagcatggacatgtcattagcgctcacaaggaacgaagccggtttaaacgtcctgttgaaattactggcgtcgtggtgacaaatgggaggatgagcgtacccaaccgccagttgaaacgaatcgtggagacgagggataagctggcgaatgaaaaaaaaccaaaggctgtcgagaaacttcaaaatgagctgaagggtcgcatcagtcaggtcacccagatcaagaaccaccctcgccagcctgcacactactga

SEQ ID NO: 10388 - RNA, 915 nt, synthetic construct
  source 1..915: mol_type = other RNA
atgttgaggaaaaaacctgtcctgaagagtaaatcaaagaagtatcacaatgagcgcgatagcgctttctttcggcttcgctccaaaaacaatctggcccgactgcttttttcttcggaaaaaaagctctctgacattgcacgggaggatggactctacaaggacttcgagaagctaaaaaagaacggaaaggatactcgcacggtttccgctcccagagcggatctgaaggcggtgcagtcccggatcagtgacctgcttatgcgcatccgtccaccggactggctgttttctcccgtcaagggcagatcatatgtggacaatgcccgtccacacgctaacgcagcctccgtccgactcctggacattgaggacttctttccttcttgtaccggaaataaagtagtgtggttctttaaggaaagaatggagtgcagcccagacgttgtggctatattaaaggggatcgtgacaaaagacgatgctctccctcaggggagcccatgttcccccatattggcctatttgtgctacattgatatgtgggaagagattgagagcctggtgaataaggccgaatgcgatttgagcgtatacgcagatgacctgacaatcagtggtgagaaggtgcccgaaaagatgatttggggcattaaacagatcctaaaaagacatggccattcataccacgccggtaaggaaagaaagaaatggcataagcctgccgaagttaccggcgtgatagtcaggggagatgggctgctgttcgtcccgaacaggcagcaccaagccacagcaaaaatcaggaaaaaactcgcgagcaaatgtagtatcaaggagcgggccgctctgcaggcacaattactcggcagggagtcacagatgaagcagatcaccactcttaacgacttctga

SEQ ID NO: 10389 - RNA, 909 nt, synthetic construct
  source 1..909: mol_type = other RNA
atgacagatagacgcaagtactccctgagggacagtccattttttcggctgcggagcaaggctaaactagctagcctcctctacgtcagtcgggagaaattgcaaactttgtccgagggtgaacagaggtatttcgagtttacaaaacccaaaaagtcaggcggagtgcgcaagatttcagcccctaatgcacccctgaaagccgtccagagtagaatagccgaccttctgcggagagtgaccccgcctgactatcttttcgccccagtgccagggcgatcttacgcggataacgcagccttccacgttggagccagatccgtgcgactgctggacattgaggacttcttccccagctgtaccgttaagaaagccatttggttttttcgtacaagaatggagtgctctgaggacgtggccgcgatactggccaacattgtaactttcaagggcgcactaccacagggaagtccctgctcgcctattctggcttatctttgttaccttgacatgtggggtgaaatcgctaaattagtggaagacggcggttgcaagctctcagtgtacgccgatgacttaactatcagcggagtatcagtccctgaggcccaaatctgggaaatcaagaaaaccctgtataggcatggccacaggtacgctcgctctaaggaacgatccgttagggataagagcgtggaggtaacgggggtggtgttgttgagggggtctgtggtcgcgcccaatagacagcacgccaagatcgccaaggttcgcgatgagctcacaaggaccgctagcgccgatcatcgcaaagcactggaatctcagctgagaggccgtctcgctcaagtcgggcagatcaaagctgcagatcagcggcggcgcgcttccgaagcagcaaagatctga

SEQ ID NO: 10390 - RNA, 912 nt, synthetic construct
  source 1..912: mol_type = other RNA
atgaaaaaggtcgagtcacaaggatatgccctgagggactgtggattgtacaatatccagaccaaggctgtccttgctaaacgcttactggtgtccccttccaggctgaccagactcacgaataaacaagatagatatagatgctggacagaacccaaaaaatccggaggcaccagagagatcgaggcacccctcgacgatctgaaggacgtccagaaacgcatttcggagctgctcggcagggtgagagctccatcttatctaatggccccagtaaagggccgctcttacgtcgataacgccgccattcatgttggctcacaatgcttcaggctgctcgatattgaagacttttttcctagctgcacagagaagagggtgttctggttcttccgaaccgtgatgcgttgttctgtggacgtggctgccgttttggcacgcttgagcactcggaacggaaggctgccacaggggagtccttgtagcccgatcctcgctttctatgcgtactttgatatgtgggaaaccatcaacgccacagtggaatcccgaaagtgctacctgactgtatacgctgatgacatcacaatcagcggtgaaagtattcgcgaattcgacgtttggcgaataaaacagaccctatttaagtttggtcatcggtacaatcggagcaaagagcgggccataattaacagacccgccgacataactggggtgatcgtccggggggacatcctgttacttcccaaccgtcagcacaaggcactgacagaggtgatcaggaagcgttcttcagcaggcactagtctggagagaaatgccatcgatcggcagattcggggtcgaattgctcaggcaggccagatcacgcgccaccttgagaagataggggccaagattgcatccgcgtga

SEQ ID NO: 10391 - RNA, 903 nt, synthetic construct
  source 1..903: mol_type = other RNA
atgtctaaaacaaagaagccttggcgcagaaaggcgaaaaaattttaccctctggaggcctctccattttacaaactgcagagcaagaagagactcgcaagtctactgttcacctcattaacagcccttagagggatggctgataaatcagtcccccactatgaatactgggaggaacagaaggctgatgggagcatgaggccgttatgccggccccatgaaggcctagacaagacgcagagccgcatcgcctacctgctcgcctgtgtgcaaactcccgactatgtgcatgccccggtacccgctaagacatatgtcactaacgctgcatcccaccaaggcgctcgcgccttttccttgctggatattgagtcgttctatcctagctgcaaagaggagaaagtactggcattcttccgccaccgaatgaagtgttccattgacgtttccactcttcttgccagactctgctgtgacaacggtagcttgccacagggcagttcttctagcccaatcctgtcctactgggcatacgcggaaatgtgggatgctatctatactataacaagcaacgcaggaaataatttcaccctgtacctcgatgacctcacgatctcaggagacagggttcttggaaataccctctggaggatccggcagcagatacataaacacggtctgcagatcaaggagagtaagagtcgaaggattatcgacaagcctgccgatgtcaccggggtgattgtgaccaaccaaggtctgcgtctgccaaatcggcagcatcagaaattggcgcacgccaagtcagacttttctaagcccggcgggaatcgtaaacggaaaggaaacgtgctgagaggcaggaatgcccaagctgtgcagattttgaaccacaactcctga

SEQ ID NO: 10392 - RNA, 939 nt, synthetic construct
  source 1..939: mol_type = other RNA
atgacaaaaaagatcaagtcttaccctctcgatcagagtcccttttataagctcacaacaaagcgcaaacttgcggagctgctaaggctcccactcggacggctgaagaggatcgctttgctgagtccaaatatgtataatgagtggatacaggagaacgcaaagggcaagaaacgtcagattgaagatccggctcgcccacttaagctggcccaagggaggatagccaacatcttgtcttcaatctcggcacccaattatctgcactgcccggtcaagggcagaagctatatttctaacgccgctgagcacattggtgcaaaacatatccgcaatattgacatctccaactacttcccttccactaaaagcacccgtgtgtactggtttttcaacacgatcctgaaatgtacccccgacgtgtctggcattttgaccgcccttacgacttataaaggtcacctgccttgtggcagtcctgcatcctcaatcctagcctactttgcccattacgacatgtggcagagcatcgatcagatcgtgtcagagaacggctgtaagttgtcagtttacatggacgacataaccgtctcaggtgaaatggtgactgagcgggtaatcttccaagtgcggaggtgcatttttcgcgccggactgcagcccaagaaagaaaaggagcgatggtacagacatggaattgggatcgtgacaggaatagtagtccggccctctgggcttagtgcgcctaatagcgctcacctgaaacgattcaccctccggcgccagatagctagctcttgcaatgaatccgaaaagtccagtctgagacgatccctgaaagggattgagggccagcagagccaaattgataggtggaatagaagattacacaacagcaaatccaatgccaaggaacatgttaacttaaagccaaactga

SEQ ID NO: 10393 - RNA, 930 nt, synthetic construct
  source 1..930: mol_type = other RNA
atgaagaccaagaagattaaaaactaccctctcgaccagagtccactctacaagcttactacgaagcgaaaattggctgaactcctatgtttacccctggccagactgaaaagaatcgccaccctgagtccgaatatgtataatgagtggactcaggagaaaaaaaacggagatctacggacaatcgaggatccggctcgaccccttaaaatggttcaatccagaattgccaagatcctctcgagcatcagcgcacccgagtatcttcattgcccagtgaagggcaaatcttatatatcaaacgcggctcagcacatcggctcaaaacacattcgtaacgtcgacatttccaattatttccccagcaccaaaagtagacgcgtctactggtttttccataacatcctgaagtgttcgccagatgtcgccggcctgctgacaacactgactacatacaagggtcatctgccttgcggctcaccttcctcctctatcttggcatactatgcccactacgacatgtggcaaaatatctatcagatagttagcgaaagtggttgtaaattgtccgtgtacatggacgacgtaactgtatctgggggcgtggtgacagaaagagttatgttccaggtgaggcggtgcatttataggtctggcctgcaaccaaagaaggaaaaggaacgttggtaccgccgggggattgggatcgtgactggtattgtggtccgatccggagggctctctgcacctaatgctgcccacctgaagaggtttaagctgcggaacaagctggcgaccagcagcaacgatgaggagcgcatcaccttacaaaaatctctcaggggaatagatggacagcagtcccagatagataaatggaatcgccggcttaatacgagcaccaagtcagtgagggcagacttgcagtga

SEQ ID NO: 10394 - RNA, 912 nt, synthetic construct
  source 1..912: mol_type = other RNA
atgactacaaagaccaagtcctatccactcaaccaaagtcccttttacaagctgaccacgaagcggaaactggctgaacttcttcggctgactcctgccaaactcagaaaattgagtgccctgtctcaggacctctatcgcgaatggccccagacaaatctgaagggcaaaacaagactgatagaggaccctgcccctgctctgaaagaggtgcagcgcaggatttacaggttgctatcctgtatcactccaccatatttcttgcattgcccagtgagggggagactttacatttctaatgcagcgtaccacgtaggaagcaggcattttcgtaacattgatatctcggactactttcccagcactaaatctcgaagagtgaattggttcttccgtcggatcttgaaatgcgccccggatgtctccgggatcttaaccgaacttaccacttacaagggccacctgccttgtggatcaccggcgtcatcaatcctggcttactttgctcactgcgatatgtgggaacagatcgcacgcatagcctcagagaacgggtgcaaactctctgtgtatatggacgacctcacagtgagtggtgatgtggtgcccgaccgggtaatgttccaaattcgtcagcgaatttatcgcgccggactacagcctaagaaggagaaggaaaaatggtatagacggggcgtgggtgttgtcacaggagtcgtcgttcgaccctccggcttaagcgcaccaaatagcgctcacctgaagagatttaagttacgctgtcagctggccacggcaagctccgctgatgagagggccaccctccaaaactccctgaggggggttgagggccaacagtctcagatcgatcggtggaatagccatttcaccagttacaacgcagaggagtga

SEQ ID NO: 10395 - RNA, 942 nt, synthetic construct
  source 1..942: mol_type = other RNA
atgctatccctggggaggaagttaatggccactctgcctcggacacaccccattaagcagtctccgcttcacaaactaggacatcacaagaggctggcctcactgttgaagatcgaggtggctcaactgcgagggcttgcaaaggccggcagtgcagcctactccgaatgggacgaggataaacctaatggcggcacaagacgcatcgaaaatccaaaaccaagactcaagaggctgcaaagcagactcgccactatattatcacttatagatcctccggcttttctttcttgtcccgtgaagggccgatcatatatttccaacgcccgggcacatctcggtagcaaagagttcgtcactctagatgtgaaatcctacttccctagtacgacctggaatcgcgtgtattggtactttaacaaaaggttgctgatgccaagggataccgcgtggaccctggcaagtgtggccaccattgacggtcgtctgccaacaggttctcccctctcgcccatcatggcataccttgctcacgaggatatgtggttgaaggtcgccaagttagcggaggacgtgggatgccggctgaccgtttatatggacgacatcacaatttctggagcccgtgtccccgaggctaccgtttggaagatcaaacaggaggttcataaagtgggcctgcgcctcaacgataagaaggaaagaagattcagcgacgtaggagtgatcacaggcgtagtcgttacgcctgatggggtgcgcctgcccaaaaggagccatctcaatctcagtattgcgcgaaaggccgctctggtagttgacggcgaagcaaaactgcgggctatgcgccgtgtgagaggactggaagcccagcaccggcaggtcttggctccaactgactttactgacaacttgagcgggagccaccgggggtcctcatga

SEQ ID NO: 10396 - RNA, 909 nt, synthetic construct
  source 1..909: mol_type = other RNA
atgcagaagtcaaagtacgccagatatgagctcgatcagtcaccgttctattgcctcaaatcaaaggctaaactggccgagttgttacacatctcccaatcgaagctgaagtgcctcacatgcaccgaggacctctatgttgaacgcgatacgttcaatcctggacgccgcaagtctagacgaatagagcaacccaagttaccgctcaagctggttcagaaaaggatcgaagagctgctgaaacggatcaaattgcctaactacattcattcccccggtaaggggaggagttatatatctaacgcaaaagcccatgtaaatgcgaaggaactgagaatcttggacatagagaagtactttacttctactccagctaggcggatttactggttttttcacaagcagatgaaatgtagccctgatattgctggcattctgacaaaattgtccacattcaaagaccacctgcctacaggctcaccatctagcccaattctgagctactttagccacatcgatatgtgggaggagatcaaccgaatcgtggaacccaacaactgtatcctgaccgtctatatggacgacgtcactattagtggtgagcatgtgcccggggaacttatatggcaagtgaagaagcagttcaagaggtacgggcttcgttccaataaaaaaaaggagaagcactacatcggcaaaaagagttatgaggtgaccggagtcattactacgcagtccggagaactgcgagtgcccaatcggcaacatctacagatgagaaatatcaggcggcttattagtttagaaagcgaaccagagaaactcgccaaacttagacgctccctgaagggcctggaagcacagagcgagcagatccgtcgggcaaactctctcctaaccgaaacctga

SEQ ID NO: 10397 - RNA, 909 nt, synthetic construct
  source 1..909: mol_type = other RNA
atgcggaagtccaaatacgccagatacgaactggatcaaagtcctttctactgtctaaaatccaaggcgaaattggcaaaactgctgagggtgagccagataaagctgaagttgctgaccaacactgagcacctctacgtggaatcagatatcttcgaccctgagcgaggtaaatcacgccggtttgagaagcctagacaggacctcaaatgtgtgcagacacggattgaggaactgctgaagcgtatcaaagtcccaaactacatccatgcgcccgccaaaggaagatcttatatctccaacgccaaggctcacgttaattcaaccgaggttcgaagtttggacattgaaaagtattttccgagcaccccagcaaggagaatagattggtttttcaggaagcagatgaagtgctcttcggatgtagctaatatcttggccaaactctctacgttcaaagaccacctcccaactgggagccctagctcccccattctttcctattttgctcacatcgacatgtggaaggcaattaatgaaattgtcgatctggccaattgcacactgactgtctatatcgatgacgtgaccatatctggcgaccgcgtgcccggagaattaatctggcaggtaaagaagcagttcaatcggtacgggcttcgaagtaacaagaagaaggagaagcattacattggcaaaaagagctatgaggttaccggcatcatagctacaaaggagggtgagcttaaaatccccaaccgccagcatctcaaaatgtataggtgccgtaaactactcaaactgggaattcggtacgagaagggcaaggacatgctgaaaaggttaagagggcttaaggcccagatgcaacaaatccgcaaagtgaacaatagctcaattgaaacatga

SEQ ID NO: 10398 - RNA, 906 nt, synthetic construct
  source 1..906: mol_type = other RNA
atgccgagaattaagcaagccggctacgaattgaaccagagccctttttactgtctcaaaagcaagaaaaaccttgcaagcctgcttcagatcagtcagtctaagctgaacaatcttacaaggtcagaagaactctatatcgaggagaatcggtttgataaaaagcgaggtaaaattcggcacatcgaggagccaaaacctgacttgaaacgagtgcagaagagaatcaagaatctgctgacccggattcagttgccaaattacgtgcatgcacctgctcaaggacactcccatatcgggaacgccaaggctcacgtcggagctgttgtggtgagaagcttggatatagaaaagtatttcccatcaacccccgccaagagcatattttggttcttctataagcagatgaagtgctcctctgacgtggccggaatcctgaccaaactatccacattcaaggggtatctcccgacgggctcacccctgagtcccatcctttcttatttttcgcacatagatatgtgggagactatcggtgagatcgtcagaaatgcaagttgcactctgacattatacatggacgacgtgaccatttccggcaattctgtcagcggagaactaatttgggaagtaaaaaagcagttccaccactgcgggctcaggtccaacaaaaagaaggagaaatactactttaggaagaactcatacgagatcaccgggattattgtgacaaaggaaggcgaactcaaagttcccaatcgccaacatctgaaaactcatcagatacgtcaggagctccattgtgagacggagcctaagaaatgtaaaaaactgcgccagcgcttacaaggcctggaagcgcagattcagcaagttaagagggtaaactatcccctgccagagtga

SEQ ID NO: 10399 - RNA, 921 nt, synthetic construct
  source 1..921: mol_type = other RNA
atgccggtgcttcgcattaaaaagattggatataaactcgaccagagtccattttattgcctgcaatccaaggccaagctagctactctgctcggggtgtcacgctcccgattgatccaacttgccagaagcgagtccctgtacatcgagaaagagattatccatcctagacggaagaaatcaagattggttgagaaaccaaagtatgagttaaagctgattcagaagcgaatcgaagggctattgaaacggatcgagataccaaagtatattcacgctcccaccaagggcaggagctatgtctccaatgcaaaagcccacctcaacagctacgtcatctctagccttgatatcgtgaaatacttcccttctacgaaaagtaagagagtttactggttcttccatacacgtatgaagtgcagtcctgatgtggcagcgatactgaccaagttatctacatacaaggaacatctgcccactgggtcacctctcagccccatcctctcatactttgcccatatcgacatgtgggaggaaattaacaatatcgtggaggatgcaggctgtatactgacagtgtatatggatgacgtaacaatttcgggagactacgtgagtaggaatctgatctggcagatcaagaagaagtttcacaggtacggcctgtctagcaataccaagaaggaaaagtactacataggtaaaaactcgcgcaaaataaccggtgttatcctcgacttcgagaagggcgtccttaagattcccaacaggcagcacaaaaaaatgtattccatccggaaacagatttctaaagaaactcacccagatacctatgcccatttgatgagcaaactgaagggactgaagtcccaggtacagcagattcacaaagctaacaatacccaaactaacgaaaattga

SEQ ID NO: 10400 - RNA, 921 nt, synthetic construct
  source 1..921: mol_type = other RNA
atgcagcgctcacggtgcaaacagtatacactggaccaaagccccttctactgtttaaagagtaaggagaagcttgctaagctgttatatattactcagaggaagcttgaggtcctcgcacatacggaagagctgtacatcgaacgagataaattcaaccctaaaaaaggcaagactttccgagtggaagagccaaccccccctctaaaacgtgtacagaagcggattgacgagatcctgaaacgggtgaaaatgccaaactacatacatgccccgggcaagggtagaagttatattagcaacgctagagcccacatcaacgttgccgtggtacgctccctcgacatcaaacaatacttcccttcctcccagtcttggagagtgtatagtttctttgacaagcgcatgcggtgctcttcggatgtggcgggaattctgaccaagctctctacatttaagaagcacttgccgaccggatctccctcctcaccagtcctgtcatattttgcccacatagatatgtgggaggcaattaatgagttggttgaaggggcgggttgtaccctaaccgtctacatggacgatgtgacaatctcaggctccagcgttagcgacgaactcatcaggaaaattaagagagaatttgacaggtgtgggttgagggatagcagggacaaggagaaacattacgtcgggaataagcctcgtgagatcactggcgtgatcgtcaaagacggcgagcttaaactgcccaatagccagcataagaaaatgcacgactgccggcaagctatccagcttgagacagatccagccaagctcgctcacctgatgcagtctctgaaggggctggaaagtcaagcccagcagatacgcaaagcaaacgaaattagagtggataatggatgcaatgatctgtga

SEQ ID NO: 10401 - RNA, 912 nt, synthetic construct
  source 1..912: mol_type = other RNA
atgaaaaaagacaaatgcaagcaatatccccttcaccagtctcctttttactatctaaagagtaaggacaagctcgcgaagctgcttcatatatcccaaaagaccctggagatactgacgagcaccgaacagctgtacattgagcaggatcgttttaatctcaagaagaagaagttcttcagggtggaagagcctaaaccattgctgaagcaggtgcagaaaaggatcggggagctgcttaagcggattgaagtgcctaattatatccatgccccggcaaaaggccggtcatacattagcaacgctaaagctcatatcaacggatttgttgtcagatccttggatatcgagaagtacttcccctcaactcagagccaaagagtctactggttcttccacaagcagatggagtgctcctctgacgtggccggcatcctcactaaactgagcacgtttaagaatcaccttccaacaggatcacctagttcgcccatgctcagctattttgcacacttggatatgtggaaagctattaacgaattagtggagtccgccggctgtgtgctgacagtatatatggatgacgttaccatcagcgggagtttcgtatctgggaaactgatctggctgattaagaaggagttttaccggtgcggtctacatgactctcgcaagaaggaaaaacactatgtcggtaataagccacgagagacaacaggaatcattattgacaatggccagctcatgctccccaactcccagtataagaaaatgcacgaatgtcgacaagcaatacgccaagagactgatgctgacaaaaggtacatattaatgcgcaccctgaaaggcttggagtcacaggcccagcagatcagaaaagccaacgaaacctacatcgatactgaatgttga

SEQ ID NO: 10402 - RNA, 924 nt, synthetic construct
  source 1..924: mol_type = other RNA
atgcccactaagcgtctctaccagctgaatcagtcccccctgttcaagctgggaagtcggtctaagctcgctaaactactcggtatgacacctggggctctcagggctctggcagcaggagacggcctgtataaagagtttgaagtggagaaaaagtcaggtggcaagcgcggggtcgagaacccctgtagaccgctgaaactggcccaggcaaccttggcaaggctgctggggcggatacaacctccagatttcttgttttgtcctgtcaagcgaaggtgctacgtgactaacgcggcagctcatcgccacagccggatggtccagtgcttagacatcaaaaagttctttccatccgtgtctcagagacgcgtattttggtttttcgctaccgttatgaagtgtccacgtgatgttgccggtctgctggctcagctcgcctgctacaagggccatctcccaaccggctctcctctctcccctatcatggcctatttcgcctactacgatttatgggcggccatcgacgccctgtgcaaagcaagagggtacactttcaccgtgtatattgatgacgtgacgattagcgggactcatgtgcccaagagcgccatttgggaagtccaacagatgattcacggcgctgggctacggtatcacaaacagaaaacgttcgtggataagccagccgagatcacaggcataattcttaaggacggccagttattggccccctttaggcagcaccgaaagctgaaagataccagagctgctcttcgagcagccgaccccgtagacaggaaggcccttaaaagtcgcttgacaggtgtgacagcgcagatcggacaaatcgaacggcaaaatctgtgtgccccgcagcgcaaaggaggatcgaccaagatctatagactttcagaggtttga

SEQ ID NO: 10403 - RNA, 903 nt, synthetic construct
  source 1..903: mol_type = other RNA
atgcgcactaacgccaagctgtataaacttgaccagagccccttgtacaagctacgcagtcgtgctaagctggcccggctccttggtgtttccgtagccgatttgcgacggctgaccaagaacgcagactcactctacaaggaattcgaaatacgcaagaagaacggcgagatgaggccagtgcaaaaccctgaaaggtatcttaaagtagttcagggacgccttgcaaaggtgctcgcgaggatcgctccaccggactatctctactgtcctgtcaaaggtaggtgctacgtgagtaatgccggccaacatcggggcaatcgcgatgtgagatgtctggatattcgacgatattttccttccaccccgtccaggagagtctattggttctttagatccgttatgggctgcgagaaagacatcgccgccacgctggctagattagccacatacaaagggtgtctgcccaccggttctagactcagccctatcatggcctattacagtcacatcgacacatgggacgctatcgcgtgcatctgcaaggaaaagggctacagactgactgtctacatcgatgacgtgacgatctctggacagtctgtcgatcctgacgatatttggcggatcaaacaggtcattcaccggtcggggctgagatatcataaggaaaaggcatacacagacaggccccccgagataactggggtgattgtggatggagagcgtttaattgtgccaaatcgccagattgctaaactggcaaagaccaggaaatctctctcatcaactaccgatccagaggagctgaaaaagctgcacgacaaaataagcgggctacggggacagatggcacaagtggctattaaagccttggagttgccccagctgagcaccacatga

SEQ ID NO: 10404 - RNA, 1005 nt, synthetic construct
  source 1..1005: mol_type = other RNA
atgactctgccacggaaaagcgccaaccgttacgacgttagtagctctgcactgtacaggttacccacccttaaggccctggccagattcctagagtggaagggatcacctagcgcgctccgcgctttatgcaagcgccctgacaatttttccgagttctatcaggcccacccccggaccgggaaaatgcgactgattcaagctcctagcaaggtgatcaaacccctgcagaaaaggctgaatgttcttttaaaacaggtgcgcgtccctgattaccttcatagtggcattccgaagcggtcccacctgtctaacagcgagcagcacatgctagccgccggagcaactgtcactgtggacgtatccgatttttatccgtcaattactaggcagcgcgtgttccggctcttcaaaaacgtcttccagtgtcgaggtgacgtggccgacgctatggctgatctcgtttgttatcaaggcaagctggccacagggtcaccagcgtccgtgctcgtgtccttttgggcatgcagagacatgttcgactctatggcccagcgagtcgctactcaaggaggcacatttacattgtacgtggatgacgtagccataaccggcgatacgatcggacacggcgatatccaatggttggacagacttctcagaagatttggtttctcttctaaggttgaaaaagccaagctctttcgcaaaacccgagcaaaagtagtgaccggcagagccttccgtcatggcataagcagggctcccaatcgaaaacacaaggagatgcatgaggcacgcgctgaaatcgaatcaggacgggccacaatcaaggctaagcgggggttggtggggcagctggaaaacatcgggaatctggatcaggaacgcggtaccagtctgaaggcagaggcaaagaagttgaggagtacactgccccggccaagaaggaggcgtagagctacagcgaggccagtcaaaacccggtcggagattgcgacgtga

SEQ ID NO: 10405 - RNA, 1005 nt, synthetic construct
  source 1..1005: mol_type = other RNA
atgtccttgcccaggaaatcagccaatcgatacgaggtaactagtagcgcctttttccggctgcctaccttgaaggcgcttgcacgactcctgcaatgggaagggagcccttctgctcttcgcgctctgtgcaaacgaccagataactttacggagttccccagaatccatccccgtaccaaaaaggagcgagtgattcaagcaccgtccgacgtggtgaaacctctgcagaagagattaaatgtgctgctgaagcaggtgagggtgcccgattaccttcattccggcatacctaagcggtcacacctgagcaactctgagagtcacatgtgggcagagggggctacagttacagtcgatgtgtcagatttttatccgtctatcactcgtcagagagtctttcgcctgttccggaacgtcttcgagtgtccaggggacgtagccgatgcgatggccgacttggtgtgttataaaggcaagctcgccactggatcccctgcaagcgtattaatctctttctgggcatgccgtgatatgtttgacatgattgctgatagggttgccaccctgggcgggacctttactttgtacgtggacgacgtcgccattaccggaaatacagtggggcatggagacattcagtggcttgacaggctcctacggaagttcggattctcaagcaaactggagaaggctaaactcttccgcaaggacagtgccaaagtcgttacgggccgggcatttcgccacggtatttcgagggctccaaacaagaagcacaaagaaatgcacgaagcgagaacagaagcaaaatccatcggtgctagtgtcaaggttaggcggggcctggtgggacagctcgagaatataggcaatctggatcatgaaaggggtacctctctaaaggccgaagccaagaaactcaggtccacattaccaccacccagacgccggagaagagccatcactcgccccaaccacatcagccctgaggccgctacctga

SEQ ID NO: 10406 - RNA, 1005 nt, synthetic construct
  source 1..1005: mol_type = other RNA
atgacccttcctaggaagagtgccaatcggtatgacattacctccagcgctttctttcggcttcccaccctgaaagctctggctcgcgtattgcagtgggatggaaccccatctgcgctcagggctttatgtaagcgcccagacaacttctcagaattttaccaaacccataggagaacaggtaagaaacggctcatccaggcccccaatgcagtggtgaagcctctgcagaagcgattaaatgtcctactcaagcagatatgtgtaccagactatctgcactccggcatcccgaagaggagtcatttgacaaattccgaatgccacatgctggccgaaggggcaacggtcactgtcgacgtctccgatttctacccctctatcactcggcaacgagtgttcaaactgtttaggaacgtgttccagtgccctggggacattgcagatgccatggccgatctcgtttgttataacgggaaacttgccaccggaagccctgctagcgtgctgttgagtttctgggcctgcagagatatgtttgacctcattgccaagagagtggcggatcagggcggcacattttccctctacgtggacgacgtggcaatcactggcaatacaattggacacggggatgtaagatggctggaccgcgtgctgcgtaggtttggcttcgcctctaaggtggagaaagccaaggtgtttcgaaaagcaagcgcaaaggttgtcactggaagagcgttcagagacggcattagccgagcccccaaccggaaacacaaggagatgcatgagagtcgcaatctagtcaagggtacaagcgcgtcaacgaaagttaagcgcggtctggttgggcagctggaaaacatcggaaacttggatcaaaagcgcggcaaagcactgaaagctgaggctcagaaattacggtcaacccttccaccggctaggcggaggcgtagatcggctgctctgcccactgccatatctgccgccgaggaggcatga

SEQ ID NO: 10407 - RNA, 1011 nt, synthetic construct
  source 1..1011: mol_type = other RNA
atgacgctgccacggagctctgcaaaccggtacgacgtgccttcctcagccctatttcgtcttccttccctcaaagctctggcaaaggttctgcagtggggcgggaacccctcagcactgagagccttatgtaagcgccccgataattttgaggagttctaccgcactcacccaaggaccaagaaaaaaagactgattcaagcccctagtgaccaggtcaagcctctgcaaaggagattaaatgtactcctgaagcagctgcgagtgcccgattatctgcagtcggggatacctaagaggtcacatctgtctaacagcgagcttcatatgagggctgaaggcgctaccgtaacagtggatgtcagtgacttctacccaagcatcaaaagaaagcggctgttccggctttttcgcaacgttttcgagtgccgccccgatgttgcggatgcccttgctgacctcgtgtgcttcaatggcaatctggcaacaggttccccagctagcgtcctgctttcattctgggcctgtcgggacatgtttgacatggtggccgaaagggcgctatctcaaggagggacattcacgttgtatgtcgacgacatcgccattaccggtaatgccatcggacacggtgatatccgttctctcgacagactgctcaataagttcggctttaatagtaaaaaggagaaggccaagttgtttaggaaggctgatgctaaactggtgaccgggagagcctttcgggatggagtgagtcgcgccccgaacaagaagcatcaggagttacacgagactcgaaaacagttgagagacactaccgcctctattcgcctcaaacggggcgcagttgggcagctcgaaaacataggaaacctggatgcacggaggggaagcagcttgaaggctgaagctaaaaaactgcgcacaactcttcccccaccccgtaggagacgacgatcctcctccgcgttgccgctcgaagcaggcatcctagaccctaaagcctga

SEQ ID NO: 10408 - RNA, 969 nt, synthetic construct
  source 1..969: mol_type = other RNA
atgacattaacacggaaatctgcgaaccgctacgacgtgtctagttcagccctgtttaggctgcccagcctgaaagctctggcctcagcattgttgtggcctggcacgccgagtgctcttagggcactaagcaagaggcctaataacttccaggagtttaatcgagtccaccggagaactggtaaagccagaaagatccaggcaccatgtgaggaggtcaaaccacttcagaaaagactgaacctgctgctcaagcagctgagagtgcccgattatttgcaatcagggatcccggggcgctcccacctgtcaaatagcggcaaacatatgactgccgaaggcgctacagtgaccgttgacgtgagcgacttctatccatccatcacccgtaaacgggtcttccgcctctttaggaatgttttccagtgcgaacctgatgtggccgacgccctggcagatctagtgtgcttcaacggacatttggcaactgggtcgcccgcaagcgtgcttttaagcttctgggcctgtagagacatgtttgatgtcattgctgaacggacctccctgtctggtgctacttttacactctacgtcgacgacattgccattaccggggataaaatcgggcacagtgagatattgtttctaggacgcctgctgaaggattttggcttcagttccaaggaacaaaaagcaaagctgttccgaaagagggaggcgaaggtagtgacgggtcgcgctttccgggatggagtttctagggctcctaacaagaagcacaaagagcttcacgaatccatgagacagctccgcgaacataaggctaccgttaaggaacgacgggccgccgtaggccagcttgagaatgtgggactcctggacgagaagagaggcgcgctcctcaaggccgaggccaaaaaactgcgttctaccttacccccttcccgaaggcccaagcgtctcccatga

SEQ ID NO: 10409 - RNA, 936 nt, synthetic construct
  source 1..936: mol_type = other RNA
atggcgaaaaaagagaggctgccacgttccctagagaattcagggctgtaccgacttaggaccatgggagccctggcccgacttttgcattggaagaagagcccctctgctctgagagcactctgctcaaggcaagacaattgggacgaatttgatcaagccaggccgggaaagaagccgagacgcattcaggctccaaaacccgccataaaggctctgcagcgcagattaaatgacctgctccagcgcattgatgcacccgagtatcttcactcagggacagtcgggagatcttacttgaccaacagtgccctccatagggatgcagagggagccaccgtgactgtggatatctccgatttttatccttctgtcacgcgaaaaaggctcttcgtgttatttcggaccgttttccagtgcagttccgatgttgcagacgcattagcgggtctactgagctgtggaggtagcttggccacaggcagccctgccagtgctctcgtggcgttttgggccgctaaggacatgttcgacggtattgccgaaagagctaaacgcctcgggggccggttctctctgtacgtggacgatataactctgactgcacgaaccgccggacgtggggatgtatcttttattgaaagacacgtcggccgctatggcttcagactcgcccgtaagaaatcacgcgtgtatcgggcgggccaacctcgagagatcacaggccgcgttcttaggaacgggcagagccgggctccaaacaagcagcatcggtacatgcacgaggccctgtccgctatgggccctgaaacacccccagctgaagtcaggtccgccatcggacggatccagcacgtgggcatcctggacgacgtacggtcgcaggagctgatggcaagcgctagacggctgagggagaagttggcaagttcctga

SEQ ID NO: 10410 - RNA, 957 nt, synthetic construct
  source 1..957: mol_type = other RNA
atgattgccctggaccagagctcacgctatgagctggagttgtctcccctctaccggctaggcaggaccaaggacttggccgccctgcttagatggcgtggtaatccatcccaactgaaagccttctccaagagggatgatcacttcgacgagtatgaccaggtcgatcctaaaaccctgaagaagcggcacattgaggctcccaaagccggtttgaaacgcttacaaagacgactgaatgcactcttgcaacgaatccatgccccgccttacctccacagtgggatcagaggcagatcctaccttactcacgccgggacgcatactcaagcggaaggggcgacgttaaccgccgatatttcggactactatcctagcgtcagtacagagcgtctccagcagctgttccgcaaggactttcgctgtagtatcgatgtggcttggatactcgctcgcctgttgagctgccgcggccatcttgccacaggatcacccgcttccgctattgtggctttcatggcaaataggtctatctttgatgaattggccaaaagggcaaccaagcggggaatcgccttttctctgtacatggacgacctagcatttactggccgaggcgttaaccgctcagatgccgccgccgcaggagaactcctcatcagacacgggcttcgaatcaaagctaaaaaaacacgtctgttccacgctgaccagccaaagttagtgacaggagtggcatggaggaacggcataaagcgggcgccaaacgcccagcacaaactgatgcgggaagcactgcttgtactgcagagggcacccagagagccaggtcattatcggaccgctattggaagagtccagcatatagctatgctcgacgatgtgagggggcctcagcttcggaagaaggcgagagaactgagggttggcctgaaggcactggagagcccgcggtga

SEQ ID NO: 10411 - RNA, 957 nt, synthetic construct
  source 1..957: mol_type = other RNA
atgaaccagcagacaacgaagcctgtctctaccaagcgacgcaccgaacgatacaggattgcgagctctcatctctatggcatcaggcggcacaccaaactggctgagatactttggtgggctgggactgctggccagctgcaaacttttacaagacagcctgacaactacacccgttatattgataccagcaagcccgggaaagaccgcttaattgaggcccctgccagacgcctgaaggggtttcagaggcggctgctagacctccttatccgaatagagctcccagattatctgcatagtgccaggccgggctactcctatctctctaatagcgccgcccactgcaaggcggatggaagtacagtcacaatggacattgattcattctaccagtccgtgaccctgcatcgtgttgcccagttctttgaacagaagttaaattgcgcacccgatgtgtcagaaacgctcgctcacttgttgtgctgtgatgggcaccttgctaccggatctccagctagcccactgctgtccttctgggcctaccataacttgttcgattcaattaacgaccgggtgaggtcccgaggtggtgtcttcactctctacatcgacgatatggccatcactggcaatggctttggacacactgacgcccggtgggtaggaagactgatccgccgcagcggacttcgcctgaaagactccaagacaagggtgtttagagcggatgctgcaaagctaatcaccggcagagcctgtagaaacggtgtgagtagagcccccaataaacagcacaggaaaatgagagaggcacaggcacaactggagcaaaatccccatgacctgacactccgcgcatcggtggctgggctgaaacgtcacttagccctgttggatgacgttaaaagggaccaacaccgggcagacgcaagccggatctcaaagcggcattga

SEQ ID NO: 10412 - RNA, 957 nt, synthetic construct
  source 1..957: mol_type = other RNA
atgagccaacagacaactaagccagcctcaactaaaaagcgcacagagcgctacgggatcaccctcagccacctgtatggcatacgatcccatacccggctggccgaagttatttggtgggcaggaaccgctgggcagctgaggactttttctagacgggcgggtaattatagccggtacattgacaaatcaaagccaggcaaggaccgactcatagaggctcctgccgcttcgctgaaaggatttcaggcaaggctgctttgtctgctgtccagaatcgagctgcctgactatctgcattctgcccgccccggatactcatacttgtctaatagcgctgcccactgtaacgctcacgggagcactgtaacgatggatattgatagtttttaccagtccgtcaagctccacagggtcgcaaagtttttcgaaagcaaattgaattgtgcttccgatgtgtcagagacgctcgcacatctcctgtgctgcgatggccatctcgccactggctccccagcttctccgttagtgtccttctgggcctaccgcgacctattcgacagtgtggatgaaagggtacggagccgggggggcatcttcaccttatatattgacgatatgggaatgacaggcaacggtttcgggcacacagacgcccgttgggttggtcggctaatgcatagatccggacttcgcctgaaggacagtaaaaccagggtctttcgtgcagatgcacccaagctgatcaccggaagggcatgccgaaatggcgtgagtcgggcccctaacaaacaacacagaaaaatgagggaagcgaaagccaggctggagcagaaccccaacgaccccacacttagagcgtctgtggccgggcttaaacgtcacttagccttgttggacgtgaagaagagagatcagcacagagcggatgcttcacgaatctctaagggccgctga

SEQ ID NO: 10413 - RNA, 963 nt, synthetic construct
  source 1..963: mol_type = other RNA
atgacactccagaccaaaaaaaaggccatacctctcaaaaggcgcactgaacgttacggcatttcctcttctcacctgcacgggattcggtcacactcacgattggccgaaatcctaagatggggagggactgccggccagctgagaacttacgccaggagagaggagaactataaccgctatatcgagaaggggaaacccggaaagaaggacaggcagatagaagctccagaacctaggctgaaggagtttcaaaagagactcctggacctcctcaatcggattgagcttcccgaatatctgcattcggctaggccagggtactcatatctttctaatagcgcagcgcattgcaatgccacaggctgtacactgacgatggatatcgacagcttctaccagtccgtgaaagtgcagcatgtagcacgcttttttgagaaggctttgggctgctctggcgatgttagcgagacaatggcccagctttgctgttgtgatgggcacctagccaccggaagccccttgtccccacttctgagtttctgggcgttcaaagaggttttcgacgcaattaatcatcgggtgaaaagcagaggcggtgtgtttaccctgtacatcgatgacatcggaatcacagggaagggtttcggacacacggacatcatttggaccactcggctgctgcgaaaatccggcctgactgtcaaagagagtaaaacccgtgtctttcacgccgatgcgccgaagttaattaccggtcgagcatgccgtaacaatgtcagtagagctcccaacaagcagcatcgcaaaatgagagacgcccaactcaagttggaatccaaccctaacgacccttcactgcgcgcaagcgtggctggcttaaagcgccacctgggactgctcgacgataagaatcgggatcagcaccggagtgaagccaggcaaatattaaaggctaggtga

SEQ ID NO: 10414 - RNA, 960 nt, synthetic construct
  source 1..960: mol_type = other RNA
atgaatacacctagaaccaagaagaccacgcccacccaaaagcgtactgagcgatacgcgatagattcatcccctctgtatgggatgaccagccacactcggttagccgctatactccgctgggcagggactacaggccagttacgcgagttttgccggcggccaactaacttttccaggtacatcgacaggtccaaacctggcaaagaaaggcttatcgaggctccggcaaaatctgcgaagacatttcagacccgattcctggagctcctgagaagaattgaactccccgattatctgcacagtgctagatcaggccggtcttacctttcaaactctgccacacactgtgaagccgatgggtgcacaatcaccatggatatcgatagcttctatcagtctgccacacgggagagagtgatccacttcttcgaggtgcacctgaagcagccacgggacgtggctgaaaccctggcaagcttgttgtgttgcgacggccatttggctactggttcgcccgccagcccactggtttccttttgggcataccgcgaggtatttgacgctatcgatgaacgagtgaggtccagaggaggtgtgtttacgctctatattgacgacatgggcattactggtaaaggattcgggcatacagacgtcgggtggattagccgtcttctgaggaaggccggcctgacggttaaagaaaccaagacacgagtattccatgcagacgcaccaaaactcgtcactggcagagcctgtcgcaacggagtcagtagggctcccaacaagcagcaccgcaagatgagagccgcccagacccaattggagctcaatccgaatgaccctggtctgagggcaagtgtggcgggacagaagcggcatctggccctactagatgacgctaatcgcgatcgtcatcgggccgaagccgagaggcttaccaaaggacgctga

SEQ ID NO: 10415 - RNA, 969 nt, synthetic construct
  source 1..969: mol_type = other RNA
atgagtacccctaatcctaaaaaacacccccggcctaagcgcaggaccgaatgttatgacgtcgctgactcacatctacacggcctcgagagccacagtcgactggccagcatcctttattgggccggaaccccctcgcagttaaagactttcagccggcgggaggacaactactcacgatacacagacaagtctaaggcaggaaaggaaagactgattgaagctccggcagagaggctcaaggtgttccaagctcgaatactggatctgctgtctcgcatcaagcttccagactatgtccacagtgggagaatcgggcgctcctacctgtccaactctgccgcacactgcagcgctgatgggtgcacgatcacaatggatattgaaggcttttaccaatcagtgactctgcagagggtcgcccgctttttcgaggtctggcttaaatgcagcccagacgtgtctctgactctggcacatctgttgtgttgtgactggcacctagctactggctctcccgcgagccctctcatgtccttttgggcatacagggaggttttcgatgcgatagacagtcgggtacgtgctagaggaggcgtgtttaccctgtatattgatgacatggggatcacaggcaaaggattcggccacaccgatgttcagtgggtttcccgattactgcgccggtacggtcttaagattaaggaagcaaagaccagggtatttcatgccgaccgtcccaaattagtgacaggacggggtatgagacacggggtgtccagagcgccaaataaacagcacatgaaaatgagacaggcccaggccctgctagaggccaatccgaacgatccaacgttgcgcgcttcagtcgctggtcatcgtcggcatttggccctcttggatgatgagaagagggcccatcatagggccgaggctgccagagtgtccaggctcaaactcaaagtgtga

SEQ ID NO: 10416 - RNA, 939 nt, synthetic construct
  source 1..939: mol_type = other RNA
atggcaagcaagcaaacaaattccgctcagagatatggcgtgggcacttccccattgtacgggattcaaagcaagaggcgactggccgaagtgctcttctgggcaggccccacttctgctctggcttccttcgccagggatcccgataactatgcacggtacatcgatcggaggagaagtgaaaaaccgcgccttattgaggcccctcaggcaagactcaagggatttcagaaacgggtagaagatctgctcaagcgaaccgtcatgcctgactatctacactctggcatcccagggcgatcataccttacttgctcagcagcccaccgtgatgctgccggctgcacagtcacaatggacataagcgatttctacctgtccattagtcaggacagagttaccaggatgttcatcgtgctcttcgcctgtacccgagacgtagcagaggtgttggcccagctcttatgttgcgacggacacctggcgactggctctcctgcttcgcctctgctcagcttcctggcgaataaagagacgtttgatcagattgctgcacatgccggacgccggtctggtgcttttacactttacatcgacgatgtggcccttaccggaaagggcatcggtaccgctgaggtcaaatggattacaaggctgttgaaacgttcagactttacggtcaaaagaagcaagaccaagatctttcgtgccagtcgcgcgaggctgatcactggtcgcgttctgtatggagggcaatcaagggcccccagtcgccagcatcagaaaatgaaggcagctatagaggcttccaacgccttaccaaaggacaaggccctgaaagccagcgcaatagggcgggtgcggcatgttgcgctgctagacgacgtgagacgcgatgggatgcgggctaccgccaaaagattggccccacccaagtga

SEQ ID NO: 10417 - RNA, 981 nt, synthetic construct
  source 1..981: mol_type = other RNA
atgaacccgaaagttaggacgaagaaagagcgtttggagaaacctctgaaacagtatgctcctgatcagtgtgcactatatggcataaagggggtaggtcagttgatgcgggtcctaagatggcggggaaccagggccgaactggaagccttcgatagagcccccgggagctaccgcttttgggcgaacgaacagggtcgtgagatacaggccgcaggggcagagatgcgcaagttacacgctagggtagccgtactgctgcggcgcattatgccacccgaataccggcaatcaggcgtgagaaaacgatcattcctgacaaacgcccagttccacacactggatgaaccaagcgtgaagctggacatcaagtccttttacccatctacgaccttcgcacatgtgcggcgatttttccagaacgacatgaagtgcgccggggatgttgcttttctcctcgcaaagatgtgctgcgtgaatcagaggcatctgccaaccggcggagtccactccgaggtgcttgcattttattgtcacaggaacgcattcgagcagctttaccaaagagccaaggcccgtggaggcgtcatgaccgtgtatgtggacgacatcatgatgactatgcccagagctagcctcaccgatcttgaatgggccagacgcctgttcgcgaatcacggcatcaagattcaccccggcaaaagtaaggtgctcgctaaagctaaaaggaagactattactggggtcgatatccatcgcggcaaaatttccgcccctaaggctcagcaccaactgatcctgcagcgacacgttgagctgaatgccgctgtcaatccgactcttgcagttaccgccgcgcggtctttgctcggacatctcgaccatgtggcccaaatcgagcctcgctttaggagtagagctgaaggaacacgagcctggttggccgcagtgttagcggagacagacgctcccggtgagtga

SEQ ID NO: 10418 - RNA, 963 nt, synthetic construct
  source 1..963: mol_type = other RNA
atgaagatgcccgttcgaaaaaagaaacagcgtctcgaaaagcctcggaagcagtacagaatcgaccagtgcgccctctatggcctgaagggggtcggtcagctgatgagagctctgagatggacaggtacacgtgcagcactcgagggattcgaccaggccaagggttcttataaggcctgggctaatgagacagggcgagaaatccaagccgcaggcgccgacatgaggaagctgcaggccaggatcgcagtcttactgcgccgcgtgatgccaccagattatcggcaatccggtgtgagggaccggagtttcctgaccaacgccaagctacaccgagcggatgagccgagcatcaagctggatataaagtcattttacccatccaccacttttgcccatgtgcgcaggttcttccaccaggagatgaaatgtgccggcgacgtagcctttctgctggcaaaactatgttgctaccacaggaggcatctcccgaccggcggagtgcactcagaggtgctcgctttctactgccatcggagagctttcgagcagctgtacagacgagccaaagggcgcgggggggaaatgaccgtgtatgtcgacgatattatgatgacgatgcctggcgcctctttaacagacctggaatgggcccggcgtctttttgcaaaacagggcgttaagatccaccctggcaagagtactgtgcttacaaaggacaggccaaaaactattacgggagtaactatacacaggggaaaactccaggcccccaaagcgcagcaccatttgattcggcaaaaatttgaggatcttgctaaagctgaggatcccgcggcagctaccgctgctgcaagaagcttgatcggacatctggatcatgttgcgcaaattgaacctcaccttagagacagagcaaacggaactcgcgccttgttgcggcgcaccttagctccctga

SEQ ID NO: 10419 - RNA, 987 nt, synthetic construct
  source 1..987: mol_type = other RNA
atgaccaccgtgcaaaagcgaaaaaaacctcctcgcctagagacaccaaagaaacagtatgctctgaccgactgcgccctctcaggcattagaggaatcggccaactgctccatgtgcttcggtgggagggctcccggcaggaattggaggacttacccgccgcccagggatcatataaggtctggcgcacggaccagggtcgagcaatccaggctgtgaatcttaaagaagcgaacggtagcaaactgagacagatacaggccaggatcgctgttttgctgaggagggtcctgcccccggaataccgacattcgggtgtcagggggcgttcttttataaccaatgctcaacagcacctccaggatgatccaagtatcaagcttgatattaagtccttctaccctagcactacattccaacatgtccggcgtttttttgtagaggcaatgagatgcagtggtgacgtagccttccttttagctaagctatgctgttaccagcagcgccacctgccaacaggcggagtccacagcgaagtggtggccttttactgtcacaagagatccttcgaccagttgtgggaacgcgtgaaagccagaagcgggaagatgtcagtttatgtggacgacattatgttgactatgcctaacgcctccttaactgacctggagtgggcccggcgtctgtttgcaaagcagcgggtaaaaattcatccaggcaagtctaaggtgctgagtaagaggagcattaaagtcatcacaggagtggagattcggggagggaaaaccggggctcccaaggagcagcacagactgatcaaacaaaggttcgacgaaatccgcgcagctgcatctgcagatgagctggccggggcagtgaagtctctcctcggccacctcgatcatgtggcccagatagatccccgcttcgttaatcgggcgagaggcacgagggcgcgactgaaagctgttatcgatcacaactga

SEQ ID NO: 10420 - RNA, 972 nt, synthetic construct
  source 1..972: mol_type = other RNA
atgacaaaaacgatcaggaagagtaaacgccggagacagcctcgcttagaaaagcccaagaagcagtacgccctccatgactgtggattgtatggccttaaaggcctgggacagctggcaaaagctctgcagataactcaggatgagttggacgaactggcgaatctccgtggcggatatacagtctggaatcagaatgggagggccgttcaacaagcaaggccagcgctaagaaagatacacgccaggattgccacccttctgcgaagggtggcaagcccagactacagacactccggcgtccgtgacagaagctttatcagtaacgcagcgcagcatatcgctcctcacgccagcctcaagctcgacatctctaagttttacccttcgacctcagtccaccacgtgtggaaattcttcttcaggaaaatgcactgcgctcgagatatcgcagcaatcctggccgggctctgttgcttcgaacggcggcacctgccaaccggtggagttcattctgaggtgctggccttttactgtcacaaagacatgctggattcccttaacgagcgcgtggtgagtcgtggtggcgtaatgactgtgtatgtggacgacatagtggtcacaatgccaggggcctgcgagtcagacctacattgggctcagcggctgattgccagagccagattggctatgaatttacgcaagtcccgggtaataaacgccgataaggagaagcttattacaggagttctcattcgcaggggcaagatctctgcacccgcaggtcagcataagaaggtcaagctcttacatgaagccattggctccgcgaccgctggggatgatgtgactccgcaaatccggtcattgcagggtcacctggatcatatcgcccaaattgatcccaaatttctgagcagagctaaagggcaccgcgctaaaaaccgacttgctctgctgcctcccatttga

SEQ ID NO: 10421 - RNA, 960 nt, synthetic construct
  source 1..960: mol_type = other RNA
atggcacggttggaacagctggatcgtcctaaatacgcaatgaccacaagccccctatacggaattcgctccaggaagcggctcgtcgaagtacttgattggcagggatccgtgaaagccctggacggcttcgtggaacaaccagataactacaactgtttcctgcatgaggaggatggcaaaaagcccagaccagtccaacagcccacacccaagcttgaggccctgcatcgccgagtagcccggctactcttaagaatcttgcccccagactatttacactcaggcctccgcaagaggtcgtttgtgaccaatgccgcccagcatgtgaatgggcaccctgcggtgaagctggacgtacacaagttttatccttcaaccctccatagccatgtctgtgggttcttcaagaaccagatggcttgcgcaccagacgttgccggtcttctggcctctctctgttgcgtgactgtgaatggagtccgccacttgccgactggatccccactcagccagattttggcgttttatagtcaccggcagatgtttgacgagttaagtgcctatgttgccgcccgaggcggcgtcatcaccgtttacgtggacgacattacagcctctatggagttcgcctccgtgggagatatcagggcgatggggaggatcatcacgcgccacgggctgatgtggcacaaggaaagatttttccctaggggtcattcaaaagctataacaggggcaattgctaaagtcgaccaccttgaggccccgaagaaacagcatctgaagtacgctaccgctcgtgaccgagtggatcaccctagcctgctggtggctgatcaaaaacaggcggcacggtctgctatcggcctgctgcaatgcattgcacagatcgatgaaaggcagataagagtggcaagaggtatggctcagaaactcactgctgttgcaggcctgtga

SEQ ID NO: 10422 - RNA, 933 nt, synthetic construct
  source 1..933: mol_type = other RNA
atgaaaaagatcaagtccccatacgcaatcaaccagtctcctctgtataagatttattctctgaagaagctgtgcgaggttctcaagtttgatcgcaaggtcatcgccaaacttctcaaatcacaggataactataagaagttccatcagcatgatggtgctaaatcgagactgatcgaataccccaagccgaggttggaggccgtgcacaaaagagtcttcagcctgctgagcagaataacaactcctgaatacctacacagtggcgtgagcgggcgaagctacatcacgaatgcacaacagcattcctccgctctggccgggtttaagttggacattaaaagtttcttcctgagtaccaccaccgatcacatttacaagttgtttcggttctcctttggatgtagttttaaagttagccagacgcttgcatctcttctgtgcgtatccggccatctacccactggatcttgtgcctcccaggtcctcgcattcttcgctcataaaaaaatgttcgacaaactggccaagacagtgaatcagtttggcggtaaaatgaccttatacgtcgatgacttgtatgtgtcaatacagtacgtgaaacggtggcacatccggagactcgaccgaattattaggggaaacgggctgtttgcgcacaaaggccgtgtctatcagcgggttaaacccaagttgatcacaggcgtaatcctcattgatggtaagatgaagctgcctcacgcgaagcacagaaagataagggacactaggaatgccgcccggatttgctcatccaggtcacagaaaagcctcctcatgcgcagtcttgtggggcaacttacaaccggatcattactggacccatctttaaagagccgcgtgaagccagctcgttcttatctgcagcgcctggagaagcaacaccaagtgtga

SEQ ID NO: 10423 - RNA, 951 nt, synthetic construct
  source 1..951: mol_type = other RNA
atgaagaagagaaaaaagcttaagatcagcacgaagaacaagtcttacggcgtgatggacagtccattctataagcttaagtcgaaaaagaagctggccggcctgctctgcatttcagtcaacgatctgtccattctcaaaaacgatgagggtaattacagcgttttcgaccaattatccaaaaaagggaaatcccggaagattcagaagccgctggacaaactggatatcgtgcatactcgtatcgctagcttactgtccaggatcgcattgcccgagtatctgcacagcggaaaaaagcggtgttcaaacgttactaacgccaaggcccaccttaatcacgaaaaaatgatgaccaccgacattaaggcattctttcctagtaccacgagaataatgatcttctcctttttcttctctgtgatgaagacttccagtgacgtcgctgacatcctgtcacacatttgcacctgtcatgatcgattgccaaccggatctaggatctcaatgcccctggcttattttgccaacagtcgcatgtttggtgagatgtacgaactatgccagaagctcaaagtgaaaatgacagtgtacgtagatgacctcacattctcgggcgccaacgtgaatcgactattttgtgcggtgataaggaaagtcattagcaagcacggacacataatgcatcccaccaagactaagctctacgccaaagataaacctaaattggtcaccgggatcatagtactgggcgatgcattaaaggtccgcaatgagcagcatagactgatggctcgcgacattgaatactggaaaatcattaaagacgctgaaaatgcaaaggagacaagcatcgccaagacactctttgggcggctgcattctatgggcgttatcgagcagaggtataagagcaaggtgttgactcttaaagtgaatacagcgtcttga

SEQ ID NO: 10424 - RNA, 951 nt, synthetic construct
  source 1..951: mol_type = other RNA
atgaaaaaacggaaaaagctcaaagtaaacacgaagaacaagagttatgacatcatggacagccccttctacaagttaaaatctaaacggaagctagctaatctgctgtgcgtgtctttagaggagctatactcccttcggaaagatgaaggcaattattccgttttcgaacagctctcgaagaagggaaaagcgagaaagatccagaaacccttggaaaaactggaactggtccacacccgaattgcaagcctcttaagccgcatcgccctgcccgagtatctgcactcaggcaagaaaaaatgctccaatgtgaccaatgctaaagcccatctgaacaacgagaagatgatgaccaccgacatcaaggccttctttccttccaccactaggggcatgattttctcatttttcttcagtgtgatgaagatgagtagcgatgtcgcagatgtactctctcacatctgtacttgtcacgatcgtttgccaactgggagcagaatttcaatgccgctggcttactttgccaactcacgcatgtttggtgagatctaccaactttgccaaaagttgagggtgaacatgacagtttatgtcgacgacctcacgttttccgggggaaatgtgaacaggctgttttgtgctgtgatccgcaagattgtgaacaagcacggtcacgtgatacatccaaccaagacaaaactgtacgcccgtgataaacctaagctggttacaggagtgatcgtctttggcaatgctctcaaggtgcgaaacgagcagcatttcttgatggcgagggagatagattactggaagataattaaagacgcagaaaacgcccgggagacaattattgcaaagaagcttttcgggagactgcatagcatgggcgtcatcgaacagagatataagtctaaggttctgacacttaaagccaatactgccaattga

SEQ ID NO: 10425 - RNA, 951 nt, synthetic construct
  source 1..951: mol_type = other RNA
atgaaaaagcggaagaagctaaagatctttacgaacaacaagagttacggggtgatggactccccgttttacaagttgaagtccaagaagaagctggcctgcttactgtgtgtagacaccaatgatctctatgcactcaagaaggacgagggcaattattctgtctttgagcagttgtctaaaaagggcaaaccccggaagatccaaaaacctgttgacaaattggatgttgttcatacaaggattgcgtcacttctatctcgaatcgctcttcctgaatatctccactcgggcaagaaaaaatgtagtaacgtcacgaacgccaaagcccacctcaaccatgaaaagatgatgacatccgatatcaaagcattttttccatcaaccacccgcagtatgatcttctccttcttttttagcgtgatgaagatgagcagtgacgtggcagatatactgtctcatatctgcacctgccacgagagattaccaactggatcacggatcagcatgcctctcgcgtacttcgctaattccaggatgttctgcgaaatagacgagctgtgcaggaaactgagaatcaagatgaccgtgtacgtcgacgacctgacattcagcggggccaatgtgaatcgcttgttctgtgctgtagtgagaaaggtgattagcaaacatggtcacaatatgcacccaactaagacaaagctctatgccaaagacaaacccaaacttgtcaccggggtcattgttttcggagattgtcttaaggtgaggaacgagcagcaccggctgatggctagagatatcgagtactggaagattattaaagatgccgaaaatgcccgtgatactcccattgcaaagactctgttcggacgcctgcattcaatgggtgtgattgaacagcgatacaaaagcaaagtgctgacactgaaagtaaacactgctatatga

SEQ ID NO: 10426 - RNA, 951 nt, synthetic construct
  source 1..951: mol_type = other RNA
atgaagaaaagaatcaagctaaaggtgagtaccaaaaacaagtcataccccattacagatagccctttgtacaaactgaaatcgaagaaaaagcttgctaacctcttatgtgtgtcaattaatgatctcagtgctcttaaacgcgacgagggcaattacagcatctttgaacagctgagcaagaagaataagattcgcaagatccagaagcccctggaaaagctggatgttgtccataccagaattgcctctttactgctgagaatcgccatgcctgagtacttgcactctggaaagaagtcctgttccaacatcaccaacgcaaaagcacacctgaaccaccaaaaactgatgacgactgacatcaaatcattcttcccaagtacaactcgcgagatgatcttctctttcttcttcagcatcatgaagatgtccccagacgtggcggacattctgtcccacatctgcacatgtcatgaacgtctgcctaccggcagccggatatctatgcccctggcttattttgccaatagcaggatgtttgacgagatgaaccagctttgcgagaagttcagggtgaagatgaccgtctacgtcgatgatctgacattcagtggggacaatgtgaacaggttattttgctctgtgattcggaagataatcaataagcatggccacgtgatgcatccaactaaaactaagctttacgctggggataagccgaaactcgtcaccggggttatagtgtttggtgactcactcaaggtacgaaatgagcaacactatctaatggcacgggaaattgagttgtggaaaatcattaaagacgtcgagcaggccaaagatactaggacggccaaaaagctctttggtagactgtattccatgggagtaatagaaaaacggtatcgaagcaaagttctcacattgaaagccaacacctccgtgtga

SEQ ID NO: 10427 - RNA, 951 nt, synthetic construct
  source 1..951: mol_type = other RNA
atgcagaaaccaaagaagttgaagatttcgacgaagaataaaagctacggaatgatggacagtccattttacaaactcaagtctaaacgcaagcttgccgaacttctgtgtgtgagcctgagtgacctgtccgcactgaagaaagacgaggggaattattgcatattcgagcaactctcaaagaagggaaagctgcggaaaatccagaaacccctggacaaactggatattgtccacaccaggatagcctccctcctgagccggattgccctgcctagctacctgcacagcggaaagaagggctgctctaatgtgaccaacgctaaagcgcacttaaacaacgataagatgatgacaacagacattaagtcgtttttcccttccacaactagggtcatggttttctcattcttttacagcgttatgaagacatcttctgacgtggctgatttcctctcacatatctgtacttgccatgggcagctaccgaccggatcaagaatctccatgcccttagcttatttcgcaaatagtcgaatgttcgacgaaatatatcagctatgtcaaaaactcaccgtgaagatgaccgtttatgtggacgatctgacctttagtggtgcaaacgtcaacaggcttttctgtgctgtcattgggaaaatcatcaataagcacggtcacgccgtgcatcccactaagaccaaaatgtacggcaaagagaagcctaaattggtaactggcgtgattgtactgggcgattcccttaaggtgcgcaacgaacagcatagattaatggccagagacatcgagtgctggaagatgatcaaggatatggaaaaagcgaaagagacatcctttgccaagactctctttggccggttgcactctatgggggttatcgatcagcgttacaaaagcaaagtcctgacgttgaaggtgaacacagcaaattga

SEQ ID NO: 10428 - RNA, 951 nt, synthetic construct
  source 1..951: mol_type = other RNA
atgaaacggaggatcaagttgaagatcagcaccaagaacaagagctatgacattatcgactcgccattttacaagatgcggtccaaacgcaaactcgcatcgctgttgggagttgacgtaggagatttaagtactctcaagaaagacgaggggaactactctatattcgaacagctgtccaagaacggcaagcccagaaaaattcaaaagccgctggaaaagcttgacgtcgtccacactcggatcgcctccctcctgagcaggatcacgttacccgactatctgcactcaggaaagaaaggttgctctaacgttacaaatgccaaaattcatctgaacaatgagcgtttaatgacaaccgatatcagggcgttttttccatctacaacccgcgagatgatattcagtttcttcttctccgtaatgaaaatgagctctgacgtggctgacgtgctttcctacatctgcacctgttacggccggctgcctacagggtcaaggatttccatgcctctcgcttattttgctaattcaagaatgtttggcgaaatccatcagctttgtaataaactccatgtgaacatgtctgtgtatgttgatgatctcactttttctggccagaatgttaatcgcctgttctgcagtgtcatcaggaaaataataaacaaacacggtcatgtgatgcatgccgataaaaccaaaatttactcaagagagaagcccaagctggtcacaggagtgattgtgttgggcggttcccttaaggtgagaaataaacaacacttgctgatgagtcaggagattgaatactggaagatgattaaggatgctgcatgtgcacgagagactcacactgccaagaagctgttcgggcgcctgcacagcatgggggtcatcgaacagcgatatcgtagcaaggtgctaaccctgaaagccagcacggccctatga

SEQ ID NO: 10429 - RNA, 951 nt, synthetic construct
  source 1..951: mol_type = other RNA
atgaagaagagaaagaaactcaaaatctcgacgaagaacaaaagctattccctcaatgattcccccttcttcatgttgaagtccaagaaaaaactggccaccctgttagggatcaccatttccgacctgtctctattgaagaaagacgacgagaattacagcatcttcgaacaactcagcaagaagggtaaacctcgtaagatccagaagcctctggatgcgctcgacattgtgcatacacgaatcgcctcactcctgtcgaggatcgcacttccggaatacctgcatagtggaaaaaaaggcaggagcaatataaccaacgcccatgcacacctcaacacctctaagactatgacgtctgacataaaggcttttttcccaagcaccactcggcacatgatttttagcttctacttctcagtaatgaagatgagttcagatgtggctgacgtgctgtcccatatctgcacttgttatgggcagttgcccacaggatctcggatctccatgccactggcatttttcgcgaatagtagaatgttcgacgaactcaacgccctttgcaatacgctgaaagtcaagatgactgtctatgtggacgatcttaccttttcaggggataatgtgaaccgactattttgttctgtagtgcgccgcattatttacaagcacggtcacattatgcaccccaccaaaacaaagttatatagcgagtatatgcctaagctggtgacaggcgtcatcgtcaccgccggatgcatgaaagtccggaacgagcagcacaggttaatggctcgggacatcgagtactggatgcttattaaagatgcagatcgcgccagagaaacttccgttgttaaaacactgtttggcagactgcatagtatgggcgtgatagagccaaggtacaaatctaaggttttgacactgaagatgaacactgctatatga

SEQ ID NO: 10430 - RNA, 951 nt, synthetic construct
  source 1..951: mol_type = other RNA
atgcgtatcaagccgaaactcaaaatcattactcgcagcaaagaatataacttaacagactcccccttgtataagattaacagcaagcgcaagttagctaagatcatcaacgtggatttcaacaccctgaagtctctgaaggacgataagatgaactacagtatatttgaccaggtgtcgaagaaaggaaaggtaagaaaaatccaaaagcctgtgcagagactggatatagttcatacgaggattgccagtctactgtgcagaattgctacgccaagttacttgcactcaggcaagaaacaccattctaatatcacgaatgctgacgtccacaagaacgagttcaatctcctcacaactgacatcaaatctttctttccctccacaaaacggtcaatggttttctcctttttcctcaccgtcatgaaaacatcccctgatgtggccgacatcctgagtcatctgtgtacctgtcacaaccacattccaaccgggtcccggattagcatgcctctggccttttgggcaaacgtgaggatgtttgaggagctgaaaaggctttgcagcaatcttgacatcaccatgaccgtatacgtcgatgatatcacattcagcggggagaatgtgaatagactgttcgtgtcatgtgtaaagaagatcattgtgaagcatggccaccaaatgcatcccaccaaaactaagttttataactctacagcacccaaattggttactggcgtgattgtcgtttcaaactgcctgaaggtccggaatgagcagcaccagctctttgcaaatgagttcgaacagtggcgaataatcaaagaagaaccacacgcgataaacgccaacattaccaataagctgatcggaaggctttactctatgggtgtgattgagaaacgattcaaggaaaaagtgcgcactgtcaagaatagcactgccctatga

SEQ ID NO: 10431 - RNA, 951 nt, synthetic construct
  source 1..951: mol_type = other RNA
atgaagtctaaaccaaaactaaagatcagcacgcgtgataaaagttataatttgatcgactcccccctgtacaaattgaagaacaagaagcggctggcccagttgctgaatatcaacctgtgcgattttcggaccctcacctcagatgacgaaaattattctgtgtttgaacagctgtcaaagaagggtaaagttaggaagatccagaagcccgtgcacaagcttgacgttgtccatacaagaatcgctagcctaatttgtagaatacaaactcccctctatctgcacagtggaaagaagacatgctcgaatatcagcaacgcatctgctcatatcaacgaattaaacttgctcaccacagacattaaatcattctttccttctaccacgcggaatatggttttcagcttcttctactcagtcatgaaaacttccagcgatattgcagacattctgagtcacatttgcacatgtcacggtcatattccgacagggtccaggatttcaatgccactggccttttggagcaacataaggatgtttaccgagctcgagaacctcagtctgtccctcaacgtcacaatgaccgtgtacgtagatgacatcactttctccggcgagaaagtcaatcgcctgtttatgtcctgtatgcgaaaaatagtggctaagcacggccatcaggtgcatccaaccaaaaccaaactgtacggcgcaaaattacctaagcttgtgactggggttatcgtgcactctaatgtgcttaagattcgcaatgagcaacacctgttactcagcagggagctggaacagtggcgcatcattaaggatgagccttacgccatcaacgccaatatcacttctaagcttgtgggacgactgtattccatgggggtaatagaacagagatacaaagagaaagtcagaactataaagagtaacacggcgttctga

SEQ ID NO: 10432 - RNA, 954 nt, synthetic construct
  source 1..954: mol_type = other RNA
atgaatagaaagagcaagctacggatcaacactaagtgtaaatcctatcagctgcaggacagcagcttttataaactcacttcaaagaagcgactggcctcaatcttaaatttgtccctgcagaacatcaatagtctccgttgcgatttgggtaactacacagagttcgaggagctgggaaagagtgggaagccaagaaagattcagaagccatgtcatcggctagatgtagcccacacgaggatcgctagccttttgtgcaggatccagacccccacatacctgcactctggaaaaaagagccactccaacgtaactaacgcggcatcccacgttaattttcatcaattactggccaccgatgtgaaatctttcttcccttcgacaagcagaaagatggtgttctccttctttctgaccgtgctcaagtgttctcctgacattgcagacatcctggccgacatatgcacctgtcacaatcatattcccaccgggagccgaatttcaatgcctctggcttattgggcaaattgccgcatgtttgaggaattagagcgcgtctccgacaaacaccacgtgacgatgacagtctacgttgacgatctcaccttttctggcgaaaaagttaaccgccagttcaggtctttggtcaagaagattatctcgaagcatggccacactatgcacccaaaaaaaacaaagctttaccaggggtcacaaccgaaactcgttaccggtgtgatagtgtcagatggcgtgctcaaagtccggaacgaacagcatcttatgtatagttccgagctggctcaatgggatagtattaagaatctgcccctcgccagtgaaactaacctggtggcgaaacttataggcaggctgcattctatgggagtgattgacaccaaatacaaagccaaggtcaagagcatcaaaaatgctacatgctccgactga

SEQ ID NO: 10433 - RNA, 954 nt, synthetic construct
  source 1..954: mol_type = other RNA
atgaatctgaagtcaaaactgaagatcaacacaaaacagaagtgctatcctctgaatgactcaccactgtacaagctgaagagcaagaaaaaactcgcaagtatcctgaaagtccaactgcccgaaattctggcgctgagatgcgatgacggcaactatgccgagttcactgagctcggaaagagtggtaagccacggtccattcagaagccgtgctacaagttggatgtgattcacacgaggattgcatcactattgtgccgaatcgagaacccacccttcctgcatagcggcaagaagtttcacagcaacgtgactaatgccgccacacacgccaattcgcatcaacttctagcaaccgatgttaagtcatttttccctagtacctctcggcccatggtgttctcctttttcctcactgtgttgaaatgtagtccggatgtagctgacattttggcagatatatgtacttgtcacaagcatctccctacaggaagcaggattagcatgcccttagcttactgggccaactgtaggatgtttgaggagctccagcgcatttcccttaaacacggggtcaccatgaccgtctatgtagacgatcttaccttttccggccaggctgtgaacagaagattcaagtctctcgttaagaaagtggtgtctaagcacggacacatcatccatcctacaaaaaccaaactgtataaagggacccagcccaaattaataactggggtcgttgtggtggacggcgtgcttaaagtccgtaatgaacaacacctgaagtacagcagcgaactcgcccagtgggactcgatcaaggacttaccagccgcttctgaaacgaaactggttgcgcagctgataggccgcttgcattctatgggtgtgatcgatatgaagtacaaagccaaagtaaagtccatcaagaatgctacatgctccgactga

SEQ ID NO: 10434 - RNA, 951 nt, synthetic construct
  source 1..951: mol_type = other RNA
atgacacgtaactctaagctcaagctggaaactaagaataaatcgtatcccctgcaggactcaccattccataaactcacctccaaaaagcaattgagaaagctgctcgacattgattccgaaaaactgaagaagctccggcaggataagggtaactacagcgaattcgaggacgtgagcgtgagtggcaaggcccgcaagatccagaaacccacgagggagcttgacgtcgtccacaccaggattgcctcattactttgtcgcataagcacacccgattacctgcactctggaaaaaaacagcactccaacgtgaccaatgctcgacagcataagaatgagtatgctctcctcgcaactgatgtcaagagttttttcccttccacaacgtggaatatggttttcagcttcttctatggagttatgaagtgctctagcgacgtgtctgaaattctgtccgatctgtgcacatgccataagcacattccaaccgggagcaggatatctatgccacttgctttttgggccaacatccggatgttttcagagctggactgtttgagtaataaacatggggtaactatgactgtgtatgtggacgacctgacattttcaggaagagaagtgaacaacttattcagatccagcgtaaaaaaaatcatcaacaagcacggccatatcatgcacccgactaaaaccaagttgtacaaacctaatcagcctaaacttgtgaccggggtcgtggtcaacggcggtcacctgaaggttcgaaatgagcagcactttaagatgcaccaagagctacagatctggtgtaaaattaaagatactccttacgcactgtctagttccataacgagtcaactgctaggccggctgcatgcaatgggcacaatcgacgatcgctttaagcagaaggcgaggaccattaagttgtcaaccgccccctga

SEQ ID NO: 10435 - RNA, 951 nt, synthetic construct
  source 1..951: mol_type = other RNA
atgacccgaaagagcaagttgaaacttgaaactaagaataagtcctacccactacaagacagcccatttcacaagttgacctctaagaaagtgctgcggaagctgctcgatgtagacgcagataaactcaaaaaactgcggcaagacaaaggcaattattccgagttcgatgatatcggggagtccggtaaagctagaaaaatacagaagcctgcgcgtgatctggatattgttcatactcgcattgccagcctgctgtgtaggattagcacgcctcagtatctgcattcaggcaagaagcagcatagtaacataacaaatgcccggcaacaccagaataaataccctttgttagcaacagatgtcaaatcattctttccaagcaccacctgggacatggtattttcgttcttttacggagtcatgaaatgtagctccgacgtcagcgaaatccttgccgacctgtgcacttgccataaacatatccccacaggctccaggattagtatgccccttgccttttgggccaacatccgcatgttctctgagctagaggctctttctacaaagcacaacgtgaccatgacggtgtatgtggacgacctgaccttttccggaatgcaggtgaataagctgttcagaagttctgccaagaagatcatcaccaagcacggtcacataatgcaccccactaaaactaagctctacaagtcaaaccaggcgaaactggttacaggggtggtggtcgaaggcgagagtattaaggtcaggaacgaacagcaccgaaaaatgcatgaggagttaggcgtgtggttcgaaatcaaggatatgccgtatgctatgagttcatctattacttctaagctcttggggagactccacgctatgggaacaatcgacgacaaattcaagcagaaagcaaaaaccgttaagaagtccacaacgtcatga

SEQ ID NO: 10436 - RNA, 951 nt, synthetic construct
  source 1..951: mol_type = other RNA
atgagccggaagtctaagctcaagatcgacacaaagaacaagtcgtacagcattatcgactccccgttctacaagctcttctctaagaagaagctggcgaccctgctcaagtgtgacctgagtgagcttaaaaaattgcgggatgacgaggggaattacagtgaatttgaggacattggaaaatctggcaaacccagaaagatacaaaaacctagccgcaatctggacatcgtacatacccgaatagccagcttgctatccaggatttcgacaccaacttatctgcactcagggaagaaagagcactccaacgtgacaaatgccaaggcccacctggaaacctccgctttgatgaccacagatatccgttcctttttcccctccacttcacatcggatgatctttagtttcttctacggtgtgatgcagtgttcatctgatgtggctgaactgctcgctgatctgtgcacatgccataagcacctgccaactggctcaagaatttcaatgcctctcgcctattgggccaactgccgaatgtttgaggagcttaattccctctcctctaaacatggagtaacgatgacggtttacgtggatgatttgacgttttcaggctctaaagtgaataaacttttcactagcaccgttaacaagatcataagtaaacacggccataccatgcacccagcaaaaacaaagctgtattcctctcatgagcccaaactggtcaccggggtcgttgtcgacaagggcgtcttaagggtgcgcaacgagcagcacctgaagttattcgaagatattagcctatggagtttcatcaaagacgaaaagtatgcacttggttctagtatcactagcaaactgattggaagattacacgctatggggaccattgaacctcgctttaaaagcaaggcaaagagcgtgaggaacagcactgccatgtga

SEQ ID NO: 10437 - RNA, 945 nt, synthetic construct
  source 1..945: mol_type = other RNA
atgtctcagaagttaactctcaacaataagaacaaggcctatcaactgacagattcccctttccataaactgagtagtaaaaagaagctggcaattttgctgcgaaccccattgtcccaaataagaagcctcagagccgatagtggaaactacagcgaatttgagtccattggcaaaagcggcaaaataagaaagatccagaaacccagccgtaatttggatgtggttcacaccaggattgcttctctgttaattcgcattatcactccagagtaccttcacagtggtaagaagggctactcaaatgtgactaatgccaacattcatctgaacacaaatgctctaatgaccagcgacatcaagtctttctatccttctacatcctggaatatgatattctccttcttttacagcgtgatgtcatgctctgcggacatcgcagaaattctggctgacctgtgcacttgtcacaagcaccttcccactggatcgcggatctcaatgccacttgcctactgggcaaatgtccgaatgttcaacgagcttgagaatatctgtcagaaacacgacgtgataatgaccgtatatgtggatgatttgacgttttccggaaagaatgttaacaggctgttcaagtcaaccgtcaagaagatcatcagccgctacgggcatgaaatgcatcccacaaaaactaagctgtatcctccgaacgggaccaagctggtaacaggggtcgtgattgacaggaacaatctcctggtgcggaacgaacagcattttaagctatttgaggaactctctatgtggaactcaatcaaaaataaccagtacgccatctcgatgtccatcacctccaaactcatcggccggctccacagtatgggtacgattgagcccaaatataagaccaaagccaaaagcgttcgcaaatctacagctatatga

SEQ ID NO: 10438 - RNA, 951 nt, synthetic construct
  source 1..951: mol_type = other RNA
atgcctaaaacgaaaactaagctcaaaatcgacaccagaggcaaattttacgctctcaaggatagtccactttataaactgagaacaaaacgcagactggcggaggtgctgaaccactcgcttcagaccttacgcgccctgcgcactgatcaggggaattataaggaattcgaggacaacagtggcggtaaggcccggaagatacaacagccggcccgatccctagacatggtccacacaaggattgccagcttgctgtgccggatcgacactccagattatctgcactcaggcaaaaagggggtgagcaacgtaacaaatgcagaagcccatattgattcccataatgtgctgaccaccgatattcggtcattctttcccagtacaacacggagaatggtgttctctttcttttacggggtgatgaagtgcgcacccgacgtagctgacctgttggcagatctctgtaccatacactcccatatccccacgggatcccgcttatctatgcccctcgctttttgggcaaatcatactatgttcaatgagcttaacgagttgtccatcaaacataacgttaagatgactgtatacgtcgacgacctgacatttagcggaaaggaggtcaacaggctgttcagcagttgcgcgcgacggattatcagcaagtacgaccactgtatgcacccaaataagactaaactctactcggccacctcacctaagttaatcaccggagttgttgtgcagggcagcctgcttaaggtgcgtaaccagcagcaccaatatctgctctcagaaatgacacagtggctatctatcaaagatagccctagagccctccacttgaacattacgaataggatgctgggtcgtctgtactctatgtccgtcatagataaacgctatagggctaaggctcgaatggtgaggaattctaccgccctttga

SEQ ID NO: 10439 - RNA, 954 nt, synthetic construct
  source 1..954: mol_type = other RNA
atgaagcagaggaagagtaagctaaagatacagacaaaaggaaagagctacagcctgcacgattcccctctttacaaacttaagactaaacgcaagctcgccagcattctccaacacagtctgccagacttgaaactgttatgctcggatgaagggaattatgctgtcttcgaagagacaaagaaaggtagcaagccgcgcgaaattcagaagcctaatcccaaactcgaggtagtccacaccaggatagcttcactgctgtgcagaatcgatacccctaattacctgcattcgggtaagaaaggccactctaatgtctcaaacgcctacgcgcatgtgaactccgacaacctcctgacgaccgatgtcaagagttttttccccgcaacctcaagacgacaggttttttcctacttttactccattatgcagtgtagcccagacgtggccgatatgttggcagacctgtgtacatacaatgcccatatcccaacaggatctagaatctccatgccccttgcctattgggccaacgtgtctatgttcaacgagctccaggccctgagcttgaagcactccgttaagatgactatttatgtcgacgatctcaccttcagtgggaaaaaagttaacaagttgtttaggctttgcgtgaagcgaattctagaaaattatgaccacgcaatgcaccccgcaaaaactatcctgtatcgcgctgcccaaccgaagctcgtgactggcgtaatcgtgaccgaggggcaaatgaaagtgcggaacgagcagcatcagcagctggccagcgagctggatatctggaaagctataaaagaccacccttacgcggcaggaatgaagccaacctctaaattattaggccggctgtattcaatggctgttatcgactctcggtataagtctaaagctgtgacggtgcgtaagtccactcatacatga

SEQ ID NO: 10440 - RNA, 951 nt, synthetic construct
  source 1..951: mol_type = other RNA
atgaccaaaaagtcaaagcttaagatcgagctaaaaggtaagtcatacgacatccgggacagcccattttttcgtctgcgaagcaagaaaaagctctcctcattgttcaatttaactctgcctcaactgcaagaactcaagagtgatatagggaactacgctgagttcgaggatgtcggcaagactggcaaagcgcggaaaattcagaaaccaaatctggaactcgacaaggttcacactaagatcgcatcttacctctctaggataaaaacccctgattttttgcatagtggcaaaaagtatcacagcaacataaccaatgctaaagcccacctggactcaacaaatctcatggtgacagacattaaatcctttttcccctccacaaagaagaacatgatcttctcctttttctacagtgtcatggaatgtagctctgatgtcgctgatctgctggcacagttgtgcagtattcatggattcctgcctacaggtagccgcatcagcatgccgctggcctattgggctaattgccgcatgtttaatgaactggataccctttccagatctcatggcataacaatgacggtatacgtggacgacttaactttcagtggggagaatatcaacaggttgttcaaggccgttgttaacaaggtaatttcgaaacatggacacactatgcacccatcgaaaaccaaaatctatagcgccaaacagcccaagctggtgaccggggtgattgtgaaggataatgagctgaaggtgagaaacgaacagcaccaaaagttgtacgccgacctcgagttttggaaactgatcaaagactcacccctgaccaaaaacgccaaaatctcttcccagctcctaggcaggctttattccatgggatttattgagcagaagttcaagcagaaggcattaacgattaagtctgcgcttaacagctga

SEQ ID NO: 10441 - RNA, 954 nt, synthetic construct
  source 1..954: mol_type = other RNA
atgacaaagaaatccaaactaaaaatcgtgacaagaaagaagtcgtatgagctctctgattcccccttttacaaattgaagtcaaagaagaagctcgcccatctactgaaagttaatgtgactaagctccagcagatgactaaagacagcaacaattacaacgagtttgagcacaacaaggacgacggaggaaaggtgcgcaagattcagcatcctatcggtgagctggatgtggtccacacccgaatcgcgagccttctttgtcggattaagactccagacttcctccactctggtaagaagcaccacagtaatgtgaccaacgcaaaagcccactgtaataagcaccctctgatgactaccgatgtctgcagtttcttcccctcaacttcccgggagatggtgttctcttttttctataccgtgatgaactgtgcccccgacgtcgctgacgttctgtcacgtatttgcacaatacatggccatctgccgaccgggtcacgcatcagcatgccacttgcatactgggctaactgcaggatgttcaaggaactggaagaattgacaaagaagcatcaggttaaaatgaccctgtatgtggatgaccttaccttttctggaaaaagtgttaacacactcttcaaatccatcacatgtcaaattatcgaaaggcacggccacaaaatgcatcctcgaaaaaccaaattatacgaagcgaaaagccccaaactggtcacaggcgtagtgattaaagacaaccaaattgaggtaaggaatgagcagcggaagaagctggtgtctgatatcgcttgctggaaaagtattaaggattttccaaatgccatctccatgcaggtcacgaatacgctgctggggcgcttacatgccttggggagcatagatagcaagtttaaggacagagctagaacgataaaggcagccactcagaaatga

SEQ ID NO: 10442 - RNA, 906 nt, synthetic construct
  source 1..906: mol_type = other RNA
atgctctacagaattctgctgtcaatcaacctgtcccagaagaaaaagcttgcatctctgttgaaagtagatatgcagaccctgtttagaatgatgaatgatacggagaactacaacgagtttgaaaagaaagggaagaaagggaaagtgaggaagatccaacatcctgtaggagaattggatgtcgttcatacacgtattgcttctctgatatgtcggattgctactccgaattttttgcatagtggtaagaagcaacattcgaacgtctcaaacgcccacgtccactgtaataacttccccctgatgaccaccgacgtgtgttcattctttccatcaaccaaaaaatccatggttttctccttcttctacactgtgatggaatgttcgtctgacgtggctgatatactgagttgcatctgcacaattcatagccacttacccaccggcagccgcatttctatgcctctggcatattgggccaattgccgcatgttctccgaactagagcaacttgccataaagcacgacgttacaatgaccctgtatgtggacgacctcacttttagcggggcacaggtgaatagtctgtttaagagcatcattaggcaggtgatcgagcgacacggccaccagatgcacagcacaaaaacgaagctttactccggaaacaagcccaagctcgtgacaggtattgtgatcaagggcgagatggttagcgtgcggaacgagcagaggatgaaactcgtcagtgacatcacttgctggaaatctatcaaggatatgccaaatgccataaatatgccagtcacccacactcttttaggacggctctatgctctaagctccatcgaccctatgttcaaggatagagccaaaaccatcaaggcgaatacacagaaatga

SEQ ID NO: 10443 - RNA, 951 nt, synthetic construct
  source 1..951: mol_type = other RNA
atgagaaagaagtcaaagctcaaactacaaaccaaggggaagtcttatcctctgtgcgattctccattttacaagctccggacaaagaagaagttggcggaattgattggattccccctcattgagctgcagaagcttcggtcccacattggacactacattgagttcgaagaggagggtaaaaagggcaagaagaggaaaatccagcagcccataaacgagatggacagggtacacactcggatagcatccctcatctgcaggattgacgtgcctaactatctgcacagcggtcgtaaaggcttttctaatgtgagcaacgctaaagcccatctggatagcagcaaactgatggctacagacgtcaaatcatttttcccctccaccactagaagaatgatattctccttcttctacagcgtcatgcaatgctctcctgacgtttcagatatcctggctgatatctgtaccatccacggacatttgcccactgggagtcgaatctctatgccaatcgcattttgggccagctgtcgactgttcgaggaattagacagtctatcaaagcaccacgacgtgaagatgacactgtacgtggacgacctcacattttcgggggcaaatgtgaaccgcctgttcaaaacgaccgttcgtaaaatcattgaacgccatgggcataccatgcatccgaccaagactaaactttatgatgagcaccagccaaagttgattaccggtgtcgtggtggataatggagttctccgggtaaggaatcagcaacgcaaacagctgatcacagactttgcctgttgggatcttgtgaaggacgtcgagaatgcttccctgttaccttgcactaacagtctgataggccgccttcagagtatgggcatgatcgatggcgcctttaaagaaagggccaaaacggtcagaggccagacacataaatga

SEQ ID NO: 10444 - RNA, 972 nt, synthetic construct
  source 1..972: mol_type = other RNA
atgaagaagtcaaaactcaagataaagactaagggtaaggaatatggcattaaggattccccactttataatctccgcaccaaacggcacctagcgaatctgctgaactgcagcaacagtgacctcaaaaaatacgctaaggatgatggcaactatcatgaatttgaggagaagggggccaaccagaaagcgaggaagattcagcagcctatgcgaggacttgacaaggtgcatactcgaattgccagcttattgtgccgcatcaccacacccgactacctgcactcaggaaagaagaaacacagtaatgtctcgaacgcactcgctcataccgctaaagaaaattctagaacaccgctaatgaccactgacgtgaagtcattcttcccctccacatctcgtaagatgatcttctctttcttctacagcgtcatgaaatgttccgccgacgtatctgatatcttagccgacatctgtacggtgcaccattttctgcccacaggcagtagaatctccatgcctctggccttttgggcaaattgtaggatgtttagcgagctggagcaattgagtaagaaacacgataacctgatgactgtgtatgtcgacgacctgaccttctccggtgttaatgtgaaccccttgtttaaaaccacggtcaagaaaatcctgaaccgctacgggcacattatgcatccagataagactaaagtttacgactgcgatgacgcaaagctggtcaccggggtgattattaaaggcggcaccattatggtgaggaacgaacagagaaaacagctcgtgaacgatcttagctgctggtcagtgataaagaaccagcctgacgctatcaataatacattcacccagcggcttatcggacggctgcactctatgggggtagttgatgagacgtttaaaaagagggccatgacaataagaaatcaaactaatcgcacaccaatcagctga

SEQ ID NO: 10445 - RNA, 960 nt, synthetic construct
  source 1..960: mol_type = other RNA
atgaaaaagagcaagcttaagattaagaccaacggaaaagagtactccctcaaagatagccctttctataacatcaagacaaagaaaaggctgagtatacttatagggtgcacattgtctgagctcaaggcattttccaaagatcaaggcaattaccacgagtttctggaaaaatcaaccggagggaagtcccgaaaaatccagcagcccgtgcggggtctagaccgaatccatacgcggatcgcaagcctcctgtgtagaatcgaaacccccgactatctgcactcagggaagaagaaccactcaaacgtgtccaatgcgaagactcacgccgagaaacacttcgataatgtgcctaccatgacgactgatattaagagcttctttccaagtactacacgtaagatgatcttttctttcttctattcggtgatgaagtgttctgctgacgtggcggacgtgctggccgatatctgcactattcataagtttctgccaacaggctccagaatttcaatgcccttagccttttgggccaatagtagaatgttcgaggagttagaagccttgagcatcaagcatgacattgtcatgaccgtgtatgttgatgacctaacatttagcggctgcaacgtcaataagctgttcaagactacggtcaaacgcgtaatagagcgccaccatcataccatgcatcctgataagacaaagatctaccgcaaagccgaaccaaagttggtcaccggagttgtcgtgcacaacggtgaaattagggttcggaatgagcagcacaaacagctggtaaccgaccttgcttgttggaactctataaaagcaattccggaagcaattcggatgccctacactaacaggctgatcggcagactccactctatgggcgttattgagagtgtgttcaaagacaaagctacagccatcaggaatcaaaccgctaaatga

SEQ ID NO: 10446 - RNA, 960 nt, synthetic construct
  source 1..960: mol_type = other RNA
atgaggaagcctaagtttaagattaaaacgaagggcaagagctactccatcaaggactcccccctgtataatctgcgtactaaaaagcacctcgctaatctgctaaattgcaacacacaggatttcagcaccctgagcaaggacgacggaaactacaatgtatttgaaactaccggcaagaatggcaagaagaggaaaatccataaaccacagcctcaactggataaaatccacacccgaatcgcttctctgctatgccgcatcgacgcaccagactatctgcacagtggcagaaaaaataggtctaacattaccaacgcacaggcccatattaccaaccattcttcagagactgccatcctcgcgacagatataagagattttttcacatcaacccatcgaaagaacgtgtttaatttcttctacaccatcatgaagtgcagcaccgacgtcgccgatatattggcaaaattgagtactatccacgagcacgtccccaccggttcgcgcattagcatgcccattgctttctgggccaattatcacatgtttgaggaactccacgcgcttagttcaaaatacaacgtctgtatgacagtgtacgttgacgacttgactttttctgggaacaacgtcaaccctctttttcggactgtcgtggagaaaattgtatcacgctacgggcacaagatccatccaactaagacaaaactctatgctaaagccgcccccaaactggtgacaggtgtgatcgttaagaatcagtccttacaggttaggaatgagcagttcaagcagctcgtgaccgatttcacatgttggaaagccataagaaacacgcctcaagcaatattcgatccacacacgtatcggctgcttggacggttacattccatggggtccattgaaccggtgttccgtgaaaaagctcggaccgtgaagggagccacaaacagatga

SEQ ID NO: 10447 - RNA, 954 nt, synthetic construct
  source 1..954: mol_type = other RNA
atgcagaagctcaaaatcaagacaaaagggaagagctacgctctgaaagattctcccttctacaatcttaggaccaagaagcgactgtccatcctgcttggatgcgatactaaagacttaccgctgctcgctaaagatgatgggaactacaatgtattctccatcattggcaaagcaggtaagcctagacagatccacaaaccaatcaacaagctggacaagattcatacaagaattgccagtctgatttgtaggataaatctccctagttacgtgcattctggacgaaagaagcattcaaacctgacaaacgccaaagcccacctatcagccgacggcttcgatactaaagtgctcaccacagacataaaggactttttcacttccacccggaaaaaacaggtgtttggattcttctactctgacctcaagtgcaccgcagatgtcgcaaacttgttagccgatatgtgcaccatccacggccacgtgccaaccggaagcaggttgagcatggtcttggcttactgggcaaactatcatctatttgaagagctgtcctcccttagcaagcaacactcggttactatgacggtctatgtcgacgatcttaccttttcagggactggcgtaaatgaattgtttaagactgtggtgcgcaaagtgctgagtcggtatggccacaccatgcaccccaccaagacaaagttatatgggaaggagagtcctaagctggttaccgggatcgtggtcaaagagggccagctccagatcagaaatcaacaatttaaggaactggtgacggactttgcctgttggcacgctattcgtcagactccccatgcgatattcgacccacatacatatcggctcctgggtcgcctgaatagcatgtctagcattgaccccgttttcaaagagaaagcgcagacggttaagggtaacacatgtcgctga

SEQ ID NO: 10448 - RNA, 957 nt, synthetic construct
  source 1..957: mol_type = other RNA
atgaaccgtaagcggagcaagaagcttaagatccagactaatggcaagtcatacacgatcaaggacagtcctctgtataggctgagatccaagaaaaaactggcgaacattctcaaaagcgatctgaacaatctcaaaaaactgcgactggacgctgataattaccacgagtttgaggataagggaaaaggtgggaagccccgaaaaatccagtgtccctgtaatggactggagaagatacactctcgcatcgcatctcttctgtgcagaattaagacaccggactacctccaaagtggaaagaagggccatagcaacgttagtaatgctaacgtccacctggggagtagctgcttattagccactgacatcaagagtttctttcctagcaccaaacgctatatgttgttctcctttttcttccactccatggaatgtagcgccgacgtggcggacatactttcagacctttgcacaattaacgggcatatccctacaggttctcaaatatcaatgccactggcattttgggcaaacagccacatgtttgacgagctgtatctactatctgtcaagcatgccgtaaaaatgaccgtgtacgtggacgatttgacgttctccggcgacgccgtcaataagttgttcatgtccgtgacccagaggatcatcacaaagcacaaccaggttatgcatcccgataaaaccaagctctacaggggatatgagtcaaaattaattactggcgtggtggttaagggcgacaatttgctggtgcggaacgaacagcacaaaatgctctttagcgatgtagaatgctggaaagctatcaaagatattccatcagccattaactccaatattgccaaaaaggtgatagggagaatgcattctatgtcggtcattgattctaagttcaaggataaagtccgcaccctccggatctccactgctacctga

SEQ ID NO: 10449 - RNA, 906 nt, synthetic construct
  source 1..906: mol_type = other RNA
atggattctcctctctacaaagtgaaaacaaaacggaaactggcttccctgctgaactctactatccccgatttaaatcgacttaagattgacgacggcaactacaatgagtttgacgacttgaagaagcccgagaagccgaggaaaatccagcagccagttaaaagcctggatgtagtccattcaaggttagccagcttgctgtgcagaatcagtgttccagaatatcttcacagcggaaggaaaggcaggagtcacgtcaccaacgcaaacgcccacgtagggaatcactcgatacttaccacagacatcaaggcattctttcagtccacaaagcgcgacatgatcttcacctttttctacaaaaagatgcaatgttcagccgacgttgctgacctactgagtgatctctgcacgtgtcatggacacatacccactggtagcagaatttccatgcctctggcctattgggcaaattctgatatgttcgatgaactgtatgccctcgctctgaagcatgataataacatgtcagtgtacgtcgatgacctgacgttttccggtgggaatatcaatgagttgttctgctccattgtgaaaaagattattatccgctacgggcagactcctcatcccaataaaacacgaatttacggcaagaacagtgtgaagatcgtgaccggcgtcgcagtccacggagacgaactgctagtgactaattaccagcactaccaacattatcagctctatagcgatgtggaggtgtggaaggctatcaaggacacagaaaacgcgatggagctcaacacctctaagcggctcataggccgccttaacagcttggctgtgattaaccgtaagtatagagataaagcccggactataaaggccgcgacctcaaaatga

SEQ ID NO: 10450 - RNA, 948 nt, synthetic construct
  source 1..948: mol_type = other RNA
atgaaaccaaagatcaacacccttgggaagtcccaccccatcgagaactccgctttttacaaactaacctcaaaaaacgtgctttataagttactgggagtgccaaaggaggaagttattcgcttgctgggcgatccggatcggtacaatgaattccaagacctgacaaacattgacaaacctagggctatacagaagccgaaaaaagcattggacgtagttcagagccgcatcgcatctctcatatgcaggatcgaggtacctgaatatctggagagcggacggaaaggccattcacacgtgaccaatgccatcgcccacgtctcccccaataacacatccgtagcgtttctgacaacagacattcgctctttctttccaagtacgacggtggtgatggtctacgatttctttcgatctacactgcggtgttcacatgccgtgagtgagatattgagcaatctctgcacatgcagaggatttgtgcccactgggagtcgaatttcgatgcctatcgccttctgggcaaattaccctatgttcttagaactagagaagctgtgtatcaagcacaatatccggatgtccgtgtacgttgacgacctgacttttagcggcaataacataaacactctcttcctggcttgtgtccgtaagattatcattagacacggtcatgaaccccatcccgataaaaccaaactttatgccaggaatgatgttaagattgtcactggtgtggcagtggtcgacaacagcatcactgccaccaataagcagcacctgaaattgtaccaggagatcgaagcgtggaaggccattaaggatatcccagacgctcttgagactaacaccgtgaagagactcattgggagactcaactcactcaccctgatcgactataggttcaaggataaagcccgtagcattaagtctgctaccagttga

SEQ ID NO: 10451 - RNA, 930 nt, synthetic construct
  source 1..930: mol_type = other RNA
atgaaagtcaaaaagcaaaagattaagaccaagggtaagtcataccccctgcaaggatgcattttctacaaactcagttcgaaaaagcgtctggagaagatattatttacaagcatcaaggagctgcagttcctgtccaatgacatcaattacgtgctcttctatgagaaatcagacattaacaagaagaggttgattgagaaacctaacgaaaagctcgacataattcatactcgcatcgcttctttgatctctcggatcacacagcctcagtatatgcactcaggccttattgataagagctatatctcaaacgcgaaacagcacttagggaaaaagccaactctgacgacagacataaaaagctttttcccgtctacgactcgccagaaggtttttaacttcttctacaagaagctgtgctgctccagcgacatagcagaccttctgagtctgctatgtacaattaacaaccacattcccaccggatctaggatcagtatgcccttggcatattgggctaatgccaacatgtttaataatctttacgccatctcctgtgccaacaatatcatcatgaccgtgtatgtggacgatattacattctccggggaaaaagtgaataaacagtttctctccagagttaaaaagatcattacctctgagagtcatataatgcaccctactaaaaccatcctttacagcggtaccgaaatcaagaagatcaccggcgtgataattagcaacgataagctgaaagtaccaaatagcctccataataaaatctacctggacattgaggaatggaaatccctggataataatgaaaacactgcagtgaagaaccggctattgggccgagtctacgccgctgccaacattgataacaggtttaaagataaggctagaaccatcaaaaagtatgtctga

SEQ ID NO: 10452 - RNA, 927 nt, synthetic construct
  source 1..927: mol_type = other RNA
atgaaagctaaaaagcggaagataaagacaaaaggaaagagttactccctccaggagtgcgtgttttataaactcacctcaaaaaagaagctggaaaaaatcttgttctcctccattcaggaactcaaactactgagtgatgataggaattacatcctgttttacgagaagtcagacattaataagaagagactgatcgagaaacccaatgagaaactggatatcattcacacacgcattgcaagcctcatatcgcgaattattcagccacagtatatgcattctgggctgaaggacaaatcttatatctctaacgccagagctcaccttgggaagaagccagtcctaacgaccgacattaagagcttctttcccagcaccacccgccttaaggtgttcaacttcttctataagaaactgaggtgcagttctgacattgcagacttgcttagtcacctctgtactgttaacaatcacatccctaccggctcaaggatatctatgccgcttgcctactgggccaacgcggatatgtttaacaatctgtatgcaatctcccgggctaatggcaacaaaatgactgtttatgtcgacgacgtcacatttagcggagagaaggtgaactcaaagttcttaagcagtgctaaacgcatcatagcgtccgaatcccatattatgcatcctactaagactatcctgtacggtagcatccaaattaaaaagataaccggggtgatcattagctcagacgagttaaaggtacccaactctctgcacaataaaatctacatagatatggaagcctggaaacgttccaataacaaaaactacacaggtatcatcgatcgattgctgggcagggtgcatgcagccgccaatattgataacagatttaaggacaaggcccggacgatcaagaataaatga

SEQ ID NO: 10453 - RNA, 936 nt, synthetic construct
  source 1..936: mol_type = other RNA
atgcgccggaaaaaaccgaagatcaacaccaaaaacaaatcttattccctgcaggattgcgccctctataagtgtattacgaagaagcgattagtcaagattctgaaaagtgacctcgggaaactgaagaatcttagcagggacattgacaactacactacattttacgagaagactgacatccagaaaaagcgcttgatcgagcgacccaatgaagagttggatgtgattcacaccaggatcgccagcctgctgtgcagagttacccaacccgattttatgcattctggactcaagctgcactcgcacgtttccaatgcaaaaaaacatattggtgttcaccctctgctgaccactgacttgaagtcatttttcagcagcacctcgaaagcgatagtgttcgacttcttctttaagaagctgctctgtagccccgatgtctccgaactattgtctaatttgtgtacctacaacaatcatatcccaaccggttccagaatcagcatgccacttgcatactgggctaattcaaagatgtttctggaactgaatgccctgagtaaagctctagggatttgcatgacggtgtatgtggatgacatcaccttcagcggacgctcagtgaacaaacttttcaagagtaaagtgaacaagatcatcgagtcacactctcatataatgcaccctgtgaagactatactttataaaccttaccagaacaagctcgtaactggcgtgattgtatctggcgataacttacgggtccgtaataagcagctgaaggacatccatgtgcaaatgaaagagtgggagaactccaacctgatcataagtagaaacattgtcaaggaaaggctcttaggccggcttaattctgcctccacaattgatatcagatttaaagacaaggctaggacactcaaaaagacaacatga

SEQ ID NO: 10454 - RNA, 933 nt, synthetic construct
  source 1..933: mol_type = other RNA
atggcgaaaaaaaagggtagaattaacaccaaggggaaatcatactctatcaacgacagcgccctgttcaatatccagtccaaaaacaagctggccgaggttctcttgaccaatctggataatatcaagtccctgctgtcaaacgataactacatagtcttcgataatacgaacgaagacggtaagaagcgtactattcagactccgtcagacaaactaaatgtggtgcacaccaggatcgctagcctgctttgtcggatcactcaaccagagtacgtccactctgggattaaaaacaagagtaacgtttcaaacgccaggaaacacgttggcacacaccccgtattgacaagcgacataagaagttttttccctagtacctctaagcaccaggtatttaacttcttcaatcgcaagctgaaatgcgcagccgatgtgtctgatctcatggctgaactttgtacttacgctaatcatattccaaccggctcccgaatcagtatgcccttggccttttgggcgaattatgatatgttcaacgagatgaacacgatttcgaacaaactcaatataaccatgacagtctatgtggacgatatcacttttagcggaaatgcagtgaataggctgtttttacacaaatgcaagcgcatcgtcgagaagaatggacatgtgctgcatcccaaaaagacagccttatattctgcaaaggagcctaagaccatcaccggcgtgatcgtccatgaaaacgagattaaagtgcggaacctccactacaagaaaatttatttcgaccttgacgcctggaaaaaaacagatgacgctatcgaaaaggagaatctcaagaacaaggtgctagggcgaatgcattccctgtccacaataaatgaaaagtttaaggacaaggcaagaagcttccggagcattgactga

SEQ ID NO: 10455 - RNA, 951 nt, synthetic construct
  source 1..951: mol_type = other RNA
atgtcccagaaaaagcggaggctcaagatcgatgttaggaataagaagtacccgatcgtagactcatgtctgtttagattacagtccaagcggaaactcagtgaattccttaataccgaattgtttgcgcttaagaaccttacagacgatcgaaattacaattgctatatcgacacctccggacacaaaccccgggagattgagcacccttgttttgagctggacaaaattcagacacgcattgcatctctgatttgcaggatcgctcaacccgattatatccattctggcgtgaaaggtcgaagtcacattacaaacgcgaagcaacacgtcggcagacataacgtcctaacttcggacattcagagcttctttcctagtaccacgcagaggatggtgttcaatttcttttacaaacgcttgcagtgctctagcgacgtagccgacttgctcgcaaacctgtgtacatgcaaaggccatattcccactggaagccgtatatcaatgccactggccttctgggccaacgaaccaatgtttaacctgttacacaaagtgtctctgtcacaggggataactttcactgtgttcgtggacgatatcgtcttttctggatccagcattgatgagcggtttgtctacaacatcaagaagttgatctcaaaccacgggcacacggcccatcctcgtaagaccaaactctacaaagctggcaacacaaaactggtgaccggggttgctgtggataccaatggtctgcacgttgccaaccgccatagaaagaatatctatcaggacatgagccagtggaaggtgagcaagcaagctggactgcaattcgatgatctgaataagagaatcataggcaggatgaacgcccagtccctagtcgactatcgcttcaaggataaggcaagaactctccggctttccataaagaaaaaaaattga

SEQ ID NO: 10456 - RNA, 948 nt, synthetic construct
  source 1..948: mol_type = other RNA
atgaagattaaacactccaagcttaagatcataaggaaaggcaagagctatgcgctgaaggatagctcactttataagattacctccaagaagaaactgctgtctattctctcgcaggccagcgtgactatatctgatttgactaaggcaattggggattacagcatctttatcgacaacaaaaacccgttgaaacctagaacaattgagaaacccaacaaaaacctggacatctatcagagccgaatcgcctcactgctgtgtcggattgaaagtcctgatttcattcatagcggtaccaagcggagatcacacgtcaccaatgccaaaatccacttagctaacgagaatacatttaccacggatatcaagagtttttttcccagtacacctattgagaaagtgttctctttcttctacggggttatgaaatgcgagcccgacgtcgctgacctgttggccaagctatgcacctgtaatggacatatcccaactgggtcccgcatatctatgccaatgagcttctgggcaaatgagaaaatgttccgcgaactccaaaacctctcaatccaacataatgttacaatgaccctctacgtagatgacatcacgtttacaggcagtaatgtgaataagatcttcgtaaacactgttaagaagataatcactagacacggacacattatgcatcccaaaaagtccatactgtatccaaagggctccgtcaaagtgatcaccggtgtggtgattcggaacggaacagccctggcaaaaaacgaacagcacaagaacttataccaggacattgaacttctcaagggctttagcgggaagctttcccctccagaaaagctaatagacaggaccctgggcaggatcaattccttgtctgtgattgagtctcgttacaaagacaaggctcgatcactctggagtctgatcaaatga

SEQ ID NO: 10457 - RNA, 951 nt, synthetic construct
  source 1..951: mol_type = other RNA
atgaacaatcccctcaaaataaacaccaaatccaagtcttactcacttcaggattcagctctctacaaaatcaagagcaaaagacgcctgctgtctctgctgaacttatcacatcaggaattgaagagcctcctgagcgatggcaactacaacatctatcaagacaatacccaagagaagccccggctcatcgaacacccacaaagacagctggagcggatccacacaaggatagcctcgcttctgtgcaggattaagcagcccgaatatattcattctgggatcaaaggaaagtcccacctaaccaacgctcgcactcatatcggacctgcaccgactctcacgacagacattaagtctttctaccaggccacacacatacacagtgtgttcgactttttcaaaaattccctggattgtagccctgacgtcgctaagttgctgagtgagttgtgcacttgtaatggccatatcccaacaggatctcgtataagcatgcctcttgcatactgggccaatgcccatatgtttaacgaactgtataggtattccagtgaacgggatattatcatgaccgtatttgttgacgatattacattcagcgggaataaggtgactcgaaccttcaaacagaacgttaagaagatcatagagaagcataaccacgtcatgcacccaactaaaaccgtgttacacaaagaaaatagccttaaagtgatcacgggcgcggtggtgggtagtaagaaactgcagatccgaaatctgcaccatgagtccatctatagtgagctctcacagtggatgttaattagagacgagaactctaaaaactcctccatttttaccgagcagattaaaaatcgcctattgggtaagatcaactcacaagggcagattgataatcggtttaaggacaaggcaagatccattaagaattacaggaaggtctga

SEQ ID NO: 10458 - RNA, 939 nt, synthetic construct
  source 1..939: mol_type = other RNA
atgaaaaggaaaaagaacaacaagatcaacacaaatggcaagtcttatcctctccacgatagccctttttacaagctgcgctccaaaaaagttctcttttccctactgaaaaccgataaagagaagatagctcacctgaagagtgaccaagggtacaatactttcacccagaagtctaataagaaaacacgcgaaatcgagcatcccgtggacgcattagatatcgcacatacgaaaatcgcttcactgctgtgccgcgttactacacccacttacgttcatagcggggtgaagggccggacccacgtaaccaatgcaaaagaacacctcggaaaaaagagagtcctgaccactgacattaaatcattctacccctcgacgactaggcagcatgtgtttaagctgttcttcaacacattcaaatgttccccagatgtcgctgacatcctcgccgatatttgcacatttcaaggacatgtaccgaccggcagcaggctaagcatgccaattgccctgtgggccaatatcaacatgtttgacgaattgaacgtcgtctctcgaaagcacgatatcaccatgacggtgtacgttgatgacataaccttctctggtaatcttctgaacggcaggtttaagtcccttgtgaagaagattataagtcgttatgaccacgtgatgcaccccaagaaaacagtgctctataaggacgatgagattaaagtgatcactggtgtggtgttggaccaggacggaattaagataaagaacagtcagcacaagttgatttatcaggatatcgagcagtggaaattgttcaaaggcctggctgcgttaccacctgagagtctgaacagcagacttatggggcggctccatgccctgtccgtcatcaatcctagacttaaagacaaggcccggtcaattaagaattgtatgtga

SEQ ID NO: 10459 - RNA, 942 nt, synthetic construct
  source 1..942: mol_type = other RNA
atgccgagaaaaaagtacaagataaacaccaacgacaaggcctatagctttgagtccagctctttctataagttgtccagtcccaatattttagccaatctgctgcacatcccactggccgacttaaaaaagctcaagaactcgaaagattcatataagcctttcgtcatcaaaaaagagggcaaaaaggaccggaccattgagtgcccaaaacgactcctagaaaaagtgcatacaaggatcgctagcttgttgtgtaggatcatcacaccagattttctgcactctgggataaagggtcggacttacattactaacgccaagtctcatttgggtaagcacaaggtgctcactagtgacctacgcagcttttatccctcaaccagcaagaagatgatcttcaagctgttccgatacaactttcactgctcagtggaggtcgcggaccttatcgcgagcgtggctacctacgaagagcatctgcctacaggatctagactgtccatgcccctggcactgtgggccaatattgagatgttcctggagatagaatcgctggccaaaaaacactccattaacatgacgatttacgttgatgatcttgttttctcagggaaaaatctgaacgagctctttagctccacagtcaataagatcgtgctgaaacacgggcatgaaatccattccggcaaaactgttctctacaaaagtgacgaaatcaagcttattaccggcgtaatcgtgcataacgacgagatcttcatacgcaactgtcaccaccagaatatgcacaacgacctcgaagagtggaaaacctataagaatggatttatggtacctgacgatcttaagtctaggcttctgggacggattaatgctttcgctcaaattgatcccagattaaaggataaggcacgtagtatcctcgcaattgaacattga

SEQ ID NO: 10460 - RNA, 993 nt, synthetic construct
  source 1..993: mol_type = other RNA
atgtcccaacagcggagaaagtacaagatcaatactaacgggaaatcttatcagatccacgattccccgttttataagcttagttcgaaaaagaagctgttgtcagttctttgcattactaaagagcagctccaatccgtgctgtctaatgagttgaactataacgtctttagtcaagttggaaagacgggtaagcctcgaaaaattgagcatccaattaactcagtagataagatccatacaaggatcgcgagcctgctttgccgcatctcccagccagagtttatgcactctggcgtcaaagggtttagtcacgtgacgaatgctaaagcccatctcggctcccacaagacactcactaccgatattaaatcatttttccccagcaccaagaaaagcatggtatttcacttcttttacaagcggatgaaatgtagccccgatgtggcagacatcatggctcgtatcaccaccttcgaatcgcacatacccactggcagcagaattagtatgcctctagccttttgggctaatatggatatgttcttcgaactagagaagctcgctaaacttcacaatgccattatgacagtctacgtggacgatttgaccttctctggtaaagcggtgaacaatctcttcaaatcaatagtcaagaagatcatctccaaacatggacatattatgcaccccaaaaagacaatcctgtatcagcatgacgacgtgaaggtgattaccggcgtggtgctgaagaacgacagcattgccatcaaaaaccagcagcatgccaatatacacgcagacatgatattctggaagatcgttcgcgacgatttattcgtccctcagggattaaagaatagactgctggggcggctgaacagtctgtccgtaattgcaccaagcctgaaagacaaggcccgaagcatcaataactacaagaggaagtctaaaaagtcaagggtggaaaacaagaaacagatggtttcttga

SEQ ID NO: 10461 - RNA, 957 nt, synthetic construct
  source 1..957: mol_type = other RNA
atgactagaaaaaagctccggctcaaaataaatacagctggaaagagctaccgactgcacgactcaccattctacaagctgattaaacagagcagactgctgtccattctttgcataacctcggaagaactatcgtaccttaggtactctcctgaacgctataacgtattcatccaaaagggaaacaacgagaaagagcgcgtgatcgaacatccccgtgaaaagttggagaaagtgcatactaggatcgccagtctcatgtgtcgtatcgagccgccaccgttcctccactctggcatgaagggactcagtcacatcaccaatgcccagtctcatagtaccaatagtaaggtacttactaccgatatcaagtccttttttcccagcactacacgcgagatgatttttcggttcttctataaaacgctgaaatgttcttccaatgtggcagacatcctggctgatatttgctctgtcaacggtcacctgccaaccgggagccgaattagcatgcctttggccttttgggtgaatgctgaaatgttctttgagttggagaaactgtccaacatgcatgatgtgtgcatgacagtgtatgttgatgacgtaacattttccggggtgaccataaacaagttattcaccaagacagtgaagtctattatctcccggcacggtcatctgatgcacccacggaaaacagtcctgtataagggggatgacacgaaagttatcactggcgtcgtgctatcaggctcaaagatcgcaattaagaaccaacagcacaaaaagatacacgaggacatcttgctgtggaaggtcgtcagagacaagtacgtgcctgcgagcttaaaaaatcgccttctcggcaggttaaactcactgagcgtggttgagcccaggctgaaagataaagccagatccattaagaattacaagcccaatcctcaggtttga

SEQ ID NO: 10462 - RNA, 963 nt, synthetic construct
  source 1..963: mol_type = other RNA
atgaaaaagcagaaacgccctaaattcaagatcaagaccctcaacaaggcctacgagatttcagactctccactgtacaagttaaccaccaagaggaaactggctgcactgctgctgctggagccagtgacgctcaacgccctgattaagaataccgacaactataacgtgttcgaacaggtaaattcgaacgggaaaaaacggatcattgaacatccgaatttggagctggataaagtccatactagaatcgccagcctgctgtgtcgcatcaagatccctgactttgtccacagtggtcgagccaaacacagtcacatcactaatgctcggatccacatcggccaccacaaagttctaacgacagacatcagaagcttttttcctagtacttccagaactcacctcttcaactttttcaaccggaagatgaaatgctccagcgatgtctctgatattctttccaagatctgcacatataacgagcatctgcccacagggtctaggatttcaatgcccctggccctatgggcaaatatcggaatgtttttggagcttgagaagatagcagtgaagcatgatattaaaatgtccgtgtacgtagacgacataaccttcagcggtgataagctcaataagttgttcatatccacaatcaagaggatcgtggaacgccacggacatattattcatcctgtgaagaccgtcttatacgcgaaggatgacgccaaagtgataaccggcgtgattttgaaggacgggaagcaattcgttaaaaacgagcagcatcgtaatgtttaccaagacattgaacagtggaaaatactcaaagatactccatatatgcccgagacacttaaaaatcggctcctgggcagattaaactcactttctgctattgaacccaagtttaaagataaggctcgaagcatcaggaatcacaagaccccgacaccatattga

SEQ ID NO: 10463 - RNA, 984 nt, synthetic construct
  source 1..984: mol_type = other RNA
atggccgagaaaaaactgcccaataataagcaacggcgccttaggctacagacccgcggcaagcagtattccgtgtgcgacagcccattttacaaactctgcagcaaaaccaaactcgccgagatgctgggatgcaccctacccgaactgaaaaacttatcttctgacgaagactacatcgtgtttaacgaagaaaagtctggaaaaaggcgagaggtacagcagcctaagcccaagctggataagatccacacaagaataggtagcttactcgctagaattaagactccagactacctgcattcaggagttaagggaaggactcatattacaaacgcaaaatgccacaattctaatagccgtatcttggtgactgatgtcaagtccttttaccaatccacaaccttcaaaatgatctatggcttcttcaaccatcgaatgcgctgtagtcccgacgtttcttggcttctcacgaaggtcagcacatataacaactctattcctaccggcagtcggctgagcatgcctttggcgttttggagttcaatagggatgtttgaaaagcttaaccagcttagtatttccgaatcagtagttatgactttgtacgtcgatgatttaacattctcgggggagaaaatcaataagctgttttgtcacaaggtgaagaaaatcgtgtcctcctatggtcatctctgtcacccaaaaaagacgaagatctataaccagaatcaggccaaggtcgtcaccggcgtggctttgctggaaaatgggccggcaatttccaacaagcagcacaagagcatttacgaggatatgctgcagtgggagataatcaagaatgaggctctcttcgagtcactgaataacagactgctcggcaaactgaatagccaagggcagattgacttccggtacaaggataaagccaggtcactgatgaacgagatcagacgtcggaaaccttatagtcaagtggtgtga

SEQ ID NO: 10464 - RNA, 960 nt, synthetic construct
  source 1..960: mol_type = other RNA
atgcgcaactcaaggtccaagcttaagataaacagcaattccaagaaacactctatcaatcagagccccttttttaaactgaagaccaagaagaagcttatcgaactactggggttggcttcttcagaactctccatcgcaaaaaaggatatcggcaactatgtggttttcgaacagatgggcaataacggcaagtcacgcacgatccagcatcctaaagacaaacaaaatgaaatccacaaccggatcgcaaacctcttaaccagaatcgagcttcccgcctatctccatagtggaaggaaaaaacacagccatataacaaatgctactcagcacctgggtagcaaaaaagtgctcactactgacatcaagagttttttccaaagcacaacaaagaaaatggtgttcaacttcttcaaccgaaagctcctgtgtagtcccgacgtcagccatattctgtcatgcatttgcacattcaatggacacattccaaccggatctcaattgtccatgccactcgccttttgggccaatatagacatgtttgagcgtttagagaatttatcttcgagtcttaacgtggatatgaccgtttacgtcgatgatttgaccttttccggggagcaggtgaacagacggtttctgagcctgattaagaagattatcataagtagcggccaggtacctcacccactcaaaacaaagttgttcaagaaaaacgatctgaagattatcaccggggtcgccctaaaggaggacaagactctgatcacgaataaacagcatatgctgatttaccagtccttcgaatcctggaaaggctgtagagacgagccggtaatagctaattatgtgatgcctaaactgcttggaaggctgaatgcgttgtcaggtattgaccccaagctgaaggataaggcaaaatctctgattaactacaaacctacttctctactgtga

SEQ ID NO: 10465 - RNA, 963 nt, synthetic construct
  source 1..963: mol_type = other RNA
atgcggaaccgatccaaactgaagataaatagcaactctaagaagtacagcttaaatcagagtccattctataagctgaagaccaaacgtaagctcatcgagctgttgtctctgtccatgcccgaattatcaatcgccaagaaagatatcgacaattaccaagtcttcgaccagatgggaaacaatggtaagccaaggaccattcaacacccgaaaaataagcaaaacgagatccacaacagaatagctaacctgctgacccggattgagctacccgactatctccattctggcaggaagaaacatagccatatcacaaatgccactcaacatctggggtcaaaaaaagttctcacaacggacattaagaaattttttcagagcacaacccgcgaaatggtgttcagattctttaataagactctgcactgctcctctgatgtctccgacatcctttcctacatctgtaccttcaatagtcatatcccaaccgggtcacagttgtctatgcccctggccttttggagcaacatagatatgttcgaacagttagacaacctctccgcatcacttgacgtgaaaatgactgtttacgtggatgatctgacgttcagtggagagcaggtgaataagcactttcagagcattgtaaagaagatcattatctcgaatggtcagacacctcaccctctgaaaacaaaactgttcaacaagaacgacctcaaaataattacgggagtcgtgattaaagacgataagactctgattaccaataagcagcacaagcttatctatcagagttttgaaagctggaaaggctgccgcgacgagccccttctcgagtcatatatcaagattaagcctaaactgctcgggaggttgaacgcactatctggcatcgatcctaagttgaaagataaagcgaagagtcttatgaactacaaatccgccgctgaaatttga

SEQ ID NO: 10466 - RNA, 969 nt, synthetic construct
  source 1..969: mol_type = other RNA
atgcgcaacaagtctaagcataaactgaaaacctatgagatctgcgattcacccttatacaagctgagatctaagaagaaactcttgtctttactgtacatgtccaaagaggaaatcgggatcgccgtgcaagacacggacaattatgttgtcttcgaaactattaggaagaaaggcaagtctagaacaatccagcaccccaaagatcgacacaaggagattcactgccggttggccaatttactgatcaaaataaaagtcccgaactatcttcactccggacgcaaggagcactcctacgtgacaaatgccaatcaacaccttggggagaaaagggtcctcacaacagatatatcagcattcttccagtccacggcaagggataatgtgttctgctttttcctcaacataatgaaatgtagttcggatgtggccgacacgctgagccatatctgtacatacaacggccatattcctacaggtagtaagctgtctatgccactggcgttttggagcaatttgagaatgttcgaccagcttgaaaaactcagcatcaaacacaacgtgtgtatgagtgtttacgtggatgacattaccttttcaggcaactccattaatcggctgtttctaagcaccgttcgtaagatcattactagcaacggacatactcctcatccagaaaaaacaaagatcttcggaaaaaaggacatcaaggtaatcactggtgttgtcattaacggcgacgacaccctgatcactaacaagcagaacaagcttatattccagagttttgtggagtggaaggctagccgagatgaacctctcaccgagaggctcattacccagaagctgttggggcggctaaatgctctgtcaatgattgatcccaagctgaaggacaaagctaaaagcgtgacctcctacaagaagatcgtcattaaatatgtgactacccagcgcgtattttga

SEQ ID NO: 10467 - RNA, 975 nt, synthetic construct
  source 1..975: mol_type = other RNA
atgcccaagaagtcaaaattaaagatcgaccatagccggaggaaacacaagctgtttgaaagttccctgtacaagttgaaaacgaaaagaaaactggccgagcttctgcaagtgacaataccagagctgaagctcgctagtgccgatgtggggaattatgtggtatttgaacaggagggcaagagtggcaaggctcgtactatacagcaccctaaagatagccagaagaaaatacattgcaggatcgcaaatctgctatgccgaatcgagtttccagagtatctgcactccggtagaaaggaacactcgcatattactaacgccaaggcccataccgggaataagaaggtcttgactacagacattaaaagctttttcccttctacaacgcggaagatggtgttcaacttcttctacaatacaatgaagtgttcctcggacgttgcagacttattggcatctatttgtacctataatggacatatccctaccggcagtcagctgagcatgcccctcgccttctgggctaacatccgcatgtttgaacaactgaataacctcgctaacaagcacgacgtgaaaatgaccgtctatgttgatgacctgaccttcagcggagattctatcaataggcagtttctttccgtcatcaagaagatcatcgtctctaatgggcacatctcacacccagataaaaccaagctcttcgagaagtctgacgtcaaggtgattactggcgttgccatcaaatgcaacgatgtaggcattaccaacaaacagcacaaactgatatacgagtccctcgagcagtggaaaggatgtcgcgacgaaccgcttattagctccttcgtgattccaaaactattgggtagacttcacgcgcatagcaatattgaacctaaactgaagcacaaagtgaactcaattctcaactacaagcccgtgaagaacccccattcaaaatctacagattga

SEQ ID NO: 10468 - RNA, 933 nt, synthetic construct
  source 1..933: mol_type = other RNA
atgaaaaagacgaaaaagctcaagcttataagcaatcaaaagtgctaccatttggatcagagccctttctataagctgcagtccaaaaagaagctgttagcgctactctgtatcaacgaagccgaattgaaagattgtattacaagtccactgaactacaatgtgttcttaaacggcaccagagtaatagagacacccatcggcgtcctgaagaaagtgcattggcgtatcgcctccctcctgataagggtcaatgtgccagagtaccttcagtccggcaagaagaagcattctaacatctcaaatgctaaggtgcacattggtgacaccaatctgctgagcaccgacattaaatccttctatccctctactcttcgctacaaagtgttcaacttcttcctgaacatcatgaagtgctcagtctatgtggccgatatccttagtaagctcagcacctacaatgatcacatccccaccggttctcagctttcgatgccattggttttttggagcaactttcgaatgttttctcagttgaatggactcgctgagaagcataatgcaaaaatgactgtgtatgtggacgacattacattttcaggaaatagcgttaacaacctgtttctcagtgttgtcaagaagatcataattagcaacaatcacacaccgcaccctaataagactaaactgtacgcatccaaggagaacaaaattgtcaccggggtagtgattaaaggcagtaaaatactgatcatgaacaagcaccacaaagccatctatcaagatctgacagtgatcaacgcctgtaaactgtcaggaggggcaccttcttgctacgaaattacgaaaaagcggttattggggagggttaatgctctgaagctcattgacactagactacagcataaaatcgagtatttttccaacctgtga

SEQ ID NO: 10469 - RNA, 957 nt, synthetic construct
  source 1..957: mol_type = other RNA
atgaccagaaaactgaagctggacatcgatcacagacggcgtaagtataccctgattgagtctcctctatataagttgaagacaaaacgcaagctcgccgagttactgctggtgcagactaatgaactaaaaaatctcacccaggaccagggcaattacagggtctttcagcagatagggaagtccggaaaaccccgcgccattcaacaccctaaggattccctcaagatcgtccattgtcggatagcttcactgctgggaagggtggagctgccagactacctccattccggtcgcaaggagcatagccacatcagcaacgctaaaaaacatcttgggcaacacaacgtcctcaccacagacattaaaagcttctttccatccaccactaggaagatggttttcgacttctacttcaacttgttaaagtgttcagcagacgtcgcggaccttttggcgtccatctctacgtataactgccacattcctacagggagtcagatttcaatgcccctggcattttggtctaacatccgaatgtttgaacagttgtatagcctcgccaaaaaacacgatagtgagatgacagtttacgtggacgatcttacgttttctggacatgcagtgaacaaacgatttgcctcggtagtaaaaaagattatacacactaacggccacattgcacatccggacaaaactagactctacgccaaggacgaggtgaaggtgatcactggcgtggctattaagggtaatgagacacggattaccaatgatcagcatatgaaaatctacgaaacactggagttctggaagggctgcagggatgaacccatcatcgctgaactgatcaagccaaaacttctgggccgtttaaatgcccacctgcaaatagataccagaatccgggataaggttaagagtatcaccagctataagcccaaattctcaatatga

SEQ ID NO: 10470 - RNA, 954 nt, synthetic construct
  source 1..954: mol_type = other RNA
atgaacgttaagaagaaccaaaaatctaagctgaagatccagttgaagaataagtcctaccaggtgaaggattcccccttctacaaactggcaaccaaacgcaagctggcgaatctattaaacatcagcgtcagcgaactgcttactttgacaaaagatgccgtaaactataaggtgttctcccagtctaagggttatgggaaacagagagtaattcaaaagcctataggccgactggagtacgtccacacacgtatcgctagcctcctgtgtcgcgtgtctgtcccgagttttgtgcactctggacgaaaaggacatagtcacgtcaccaacgccaagcagcacctggggaacaatcgggtgctcacaactgacattaaaaatttcttcccttcgactactgaggaaatggtgttcaaacttttctttcacacctttaagatgaacggagacgttgccaagctcttggccaatctgtgctgcttctcaggccatgtccccacagggtccagggtgtcaatgccaatatctttttggagcaatagcaagatgtttgatgagctctcctctctatcaaccaaacatgacgtcgtgatgtcattatacgtagacgacttgacctttagcggagatggcatcaataggctgtttctttccaccgtgaggaaaattgtgcagaaacatggccacatcatgcaccccgataagacaaaagttcatacgaaaaacagtcggaaggttatcactggtgtggttgtccagggcgacaccctgaatattacgaataagcagaacctgatgatttatcgcgaactggctcaatggaaggtgattaaaaacctccctttcataccaaagagtctggagtcccggttactcgggagactttacgcaatgggtcagatcgacaagaagtataaagataaagctatgagtgtgagaaacagctcatga

SEQ ID NO: 10471 - RNA, 939 nt, synthetic construct
  source 1..939: mol_type = other RNA
atgcgcaaaaaccactccaaactgaaaattaccacaaagcagaaggcctattctatcagcgactctcccttctacaagctcagtaataagaagaagctggccgagcttctcttcgtgaaggcctcggagtttaaaaatctgacatctgacgaaaactacaaagttttcaagcagctgaacagcaaaggcaagtcccggcagattgaacagccgctattgaatctggatcgcgtgcatacgagaatagcttctctcctgtgcagaatcgacctccccaactatttacattcaggccgtaaaggacggtcacatgtatcaaacgcaagagcacacgtcggtaataagaaggttttgactacagatatcaccaatttcttcccatctacgaccgagaaacagatcttcagccttttctacaacatctttaaaatgacaccagatgtcgctagggtgtttgccaagatttgctgttacaaacagcatgtacctaccgggagccggctgtccatggtcctcgctttctgggccaattataagatgttcgaggaactaaacagtttttctctgtttaggaatgtgaggatgaccgtctacgttgatgatctgactttttcgggcgaaaacattaaccgagaattctcatcccttatacggaaaatcattaagaagcacggacacttggctcataaggggaaaactcaccagaaacaaagtcacgaggtgaaggtgatcactggagtggtggtgaaggggaatgacattaaacctaagctgagtcagtttaaggagctccacaacgacatccaagcgtggaaattagtccgcgacaccggtctgcccctttccagcctgagggatcgaattagcggcagattgtatagcatgggccaaataaacaagcgctttaaagacaaagcaaagtccgttcgtaattactga

SEQ ID NO: 10472 - RNA, 939 nt, synthetic construct
  source 1..939: mol_type = other RNA
atgaaacagaagagactgaagcctcggatcattaccaagaacaaaagctacccaattgaggattcagtgttctacaaacttagcagcaagaagcgtcttgcaaatttgctgtttagcacatctcaggagttgaaaagtctgggagagtcagataactacaggtgctttacccagaccaaaaacggtaaaccacgcttaatccaggagccgctgcctcgactcgacaagatccactcccgtgtagcaagcctcctgtgtaggatcgatacagtggacggcctccactccggaaaaaaaggtcgcagtaacatatctaacgctcacgctcacttggggcaggggaagaaggtcattacagcagatataaagagtttctttccagctaccactagacagaatgtgttcgactttttctacaccaccatgcaatgcgcggcagacgtggccgatctactctcgaagatccttacatacaatgatcacatccccaccgggagtcggatatctatgcctctggcttacttcgctaacaaacggatgtttgacgagatagaaagcgcagcctcagaattctccgcgaagatgacgatttatgttgacgacctgactttctcaggcgctatgcttcaaaagagctttattggcagactcgaggccactgccaagaagtatgggcataaaatccatccctccaagacgcgattctatgaggcctctgaagtgaaattaatcacaggagccgccatcaagggtgacgagattacacctagaaacaagcatctgaaacagctgaggggcgaattgtccgtttggctggacaatcccggcaatgacgaaaaactaactaataggatcctgggacgcatgacctttattggctccattgatccccgctataaggataaagccaaaacttttcggaagtctgtcttcaagtga

SEQ ID NO: 10473 - RNA, 939 nt, synthetic construct
  source 1..939: mol_type = other RNA
atgaagcagaagagacgaaagccgaagataattaccaagcagaagtcctatcctctccaggactcagtgttctataaactgtcgaacaagaagcgactggcaaatctgctgtcaagtactccccaggaattgaagatgttagccgggaatgataactatcggtgttttactcaaaccaaaaacgggaagaaaaggctcatacaagagcccttgccacgcctggatattattcatacacgtgtcgcctccctcctgtgccgcatcgagacaatagatgggcttcatagcggaaagaaagggaaaagcaacatctccaatgcacgggctcacgtgggtcttggcaagaaagtcatcactgctgatatcaaatccttttttcccactactacccgcctcaatgtgtttgacttcttctataataccatgagatgcagtccagacatcgccgacctcctgtccaagatgctgacgtacgacgagcacgtacctacaggctctaggatcagcatgcccctagcgtacttcgctaacaaaaaaatgtttgacgaaatcgagagtgcagcgaacgattgcggcgccaccatgacaatcttcgttgatgatcttaccttttctggaaccacccttaagcggtcattcattggcagactcgagacgattgccaaaaagtacggacacaagattcatccaagcaagtctcggttctacggtgccaatgaagttaagctgatcacaggagctgccgtgaaaggtaatgatatatctcctaggaacaaacacttgaaattactacgcagcgaactgtcagagtggttgaaatgtgcacagaaagacgaaaagctgaccaaccgtgtgctgggcagaatgacttttattggcagcatcgacgcaaggtacaaggacaaggctagggccttcagaaagacagctttcaaatga

SEQ ID NO: 10474 - RNA, 939 nt, synthetic construct
  source 1..939: mol_type = other RNA
atgaagaggcgcttgcccaagaatagaatcatcaccaaaaagaagagctatccgctccaggattcaccattctacaagctgtcaagtaaaacaagactggccagtttgctcggctcaacacctaaggagttgaaaagtctggttggcaatgataactaccactgtttcactcaaaccaaaaagggtaaaccacggctaatacaggagcccttacctcacctggataagattcacagtcgggtagccagcctgctgtgccgcatagagacggtcgacggcctccattctggaaaaaaggggagatccaatatttccaatgcgcgcgcacatcttggtcccggccgtaaagtgataactgccgacatcaaatctttttttccaagcacaacccgcctcatggtcttcgacttcttctataataccatgcagtgctcctctgatgtggctgatctgttatcccggattctgacctacgatgaacatatcccaacagggagcaggatttctatgcccctggcttacatcgccaataaacgaatgtttgatgaaatcgaggacgctgctatgagggtgggagccaaaatgaccatttacgttgacgacctgactttttccggagtgatgctgcacaaggactttgtgaagacgctggaaatgattgcaaagaagcatggccacaggatccacccctcgaagactcggttctattcagaaaacgccatcaagcttattacaggggcagcaatcggtgaggatcgtatcttccctcggaaccgccatttgaaagctctcaaagaggaccttcagatctggataaacagcccgcaaaaggacaggaagcttattaacaaaattctaggacgactcaccttcattgggagcatcgaccctagatataaggataaggccagaacttttcgaaacgtcgcgatcaaatga

SEQ ID NO: 10475 - RNA, 927 nt, synthetic construct
  source 1..927: mol_type = other RNA
atgaatacgcagaagcaaaaaatcatcaccaagaacaagtattacccagcgaaagattccttgttctataaactgtctagtaaaggccgtctagcaaaactggtttctagcaccgtccaagagctgaagtcgttaaccaaaaacgatcagtaccactgttttacacagagtaagagaggcaagactaggcctattcaggaaccacttcccaagctcgataagattcactcccgcatcgcgtccctgctctgtcgcattgagacggccgacggccttcatagcggaaggaaagggcgcagtaacatatctaacgccagcgctcatattggagtgggcaagaaggtaataacactggacatcaaaaacttctttcctagcactaaacggtcatctgtgttcgactttttctacaatactatgtgctgtagccctgacatcgctgatttactgagccatatttgcacctacgacgatcacatacccaccggttcgcggctgtcaatgccgctggcatacttcgcaaataagagaatgtttgacgaaatggaacagacagctaatgagtgcaacgccaaaatgaccatatacgtggatgacctgacattctccggagaggagctctctaagaacttcattaccagaattgagcttatcgctaaaaaatatggtcacaagatcaattcctccaaaactcgattctatgcagaagatgccgtcaagctcgtcacaggggttgccgtgatcgataatcagctgaagcccagaaacaagcacctcgaagccttgtttaagaagacaaatgactggcaagtgaataagagcatgcagtcacggaactgcatcttgggctatatgacctatctagggagtattgactcacgatacaaagacagggctcggacttttaggcagaaagccatcttttga

SEQ ID NO: 10476 - RNA, 924 nt, synthetic construct
  source 1..924: mol_type = other RNA
atgaaacagaagaaaaacaagatcattaccaagaacaagtgctaccccattaaggatagcgtgttttataaactgtcttctaaaggccggttggcaaatcttctttccagtacagtccaggaattgaagtctctgacgaagaatgaccagtatcactgcttcacccagttaaagagaggcaaaactcgcctcatccaggagcctctacccaagctggacaagatccacagcagaatcgcgtcactgctctgccgcattgagacagtcgatggtctgcactctgggtgtaagggaaggtccaatatcagtaacgcaaaagctcatgtgggcgtcggaaaaaaggtgatcacactcgacatcaaatcattcttcccatccaccaaacggtcctcagtgttctatttctttaacaacactatgtcctgcagccctgatattgcggatttactgtcgcaactgtgtacttatgaggggtacattccaactggttcccgactttctatgcaactggcctactttagtaacaaacgaatgtttgacgaaatggagcaggctgccagcgagtgtggcgcaattatgactatatatgtggatgacctcacattcagcggagccgaactgtcacgtaatttcatcaagcggttggaatttatagccaagaagtacgggcacaagatacagagctctaagacgaggttttacagcgaaaacgaggttaagctgatcaccggagttgctgtgatcggtgaacaactcaaaccgaggaataagcatctggccgctttgacccaggagattgagtactggagagtaaataaatcccagcagagtgccaataggatactagggtatatgacctaccttggctcaattgacagtcgctacaaagataaagccaaaacattccggcatcaaatggcatga

SEQ ID NO: 10477 - RNA, 933 nt, synthetic construct
  source 1..933: mol_type = other RNA
atgactcaaaatagaagaaaaccccgtatccagacaaagaacaaaagttatcctctgcaggattcacccctctttaaacttacaaccaaacgaaagctggctaagatcatattcagcgagctggccgagctcaagcagctgtgcaacgataacaattattcctgcttcaccgaaattacgaagggcaagacacgatttattcaggctcctctgcggcgccttgatatggtgcatactcgtattgccagtttgctttgtaggatcgacgttccaaatgaactgcacagcgggacaaaaggccggtccattttttcgaacgctaaagcacatttaggcgtgggacgcagaaccgtaactgtggacatcaaatcctttttcaaaagcacctctcgatctcaagtcttcgacttcttcagtgataccatgaagtgtgcgccagatgtcgccgacttactaagcagactcctcacatttaacgatcacatcccgactgggtcaagggtttctatgcctatggcgtacttcgcaaaccagaagatgttttgcgacatgcaagctgtggccgatgcgcggggagctacaatgactatatacgtggacgacctcacgttctccggtaccaaattgaatcaccagtttgtggacaagatctcaaatatcaccgaaaagtacaagcatacactgcacccagataaaacccgcttctacggccctaaggcagccaagtgcattacgggcactgttattgtggggaatgagttgaggccccggaattgtcagtataaagccgtccacgaggacatgcagaattggctgagcatcaacaaacccgacgacgctctagccgcaaggctgctgggaaggatatctttcattggtaacttcgatgccaggtttaaggataaggcagtacgctttcggagagccctgtga

SEQ ID NO: 10478 - RNA, 963 nt, synthetic construct
  source 1..963: mol_type = other RNA
atgatcaagaagaagaaatcaaagctgaaaatccggaccaatggcaaaatatacaggcttcaagacagccctttctacaagttgaccagcaaaaagcgattcgcatctttgctaaatctggagtacgaccagctaaagcagttactctctaattcagattctaagtttgagaagttcactcaggtcaaagagggtaaaaagcccagagctatccagaagcccatcaccagcttcgctccactgcactgtcgcattgcaagtcttctctgcagaattggtactccagagtacctgcacagtggaaaaaaagggcgctctaatctgagtaatgcccaatcccactcagggaagcacaagctgctcgctgtggacattgaatcattctttgaaagtaccagccatgagaaggtgtattcgtttttccggggccatcttaaatgctcttccgacatagctgacgcgttgtgtaaactgtgcctttgtgactcccacattcctacaggcagccaactgtctatgccgctggcctactgggccaactcaaacatgttcaacgaactggatatgttggccacaaagcatagggtgaagatgtccgtatatgtggacgatgttgtctttagtggagagcagctgaataagctctttttgtcgacggttaaaaaaatttgcgcccgctatggaatgacagtgcatcctgataagatcaggctttacaacaaggagcagcccaaagtggttactggggtggcgattataggaggcgagttaaaagtagatcacaagcagcataagctgctcgaaaacgacctgaaactgtggaacgcctgtaaagaagatcccatcgcatccgacctctccctcccacgaaaaatctccggccgtttatccgccatggggagcgtcgagaaggaatatctggatcgggcaagaagctttaggaaaaagaacagcatcagatga

SEQ ID NO: 10479 - RNA, 951 nt, synthetic construct
  source 1..951: mol_type = other RNA
atgaatcagattaatctgaagccaaagctgatcaccaagaacaaatcatacaagatccagaactccgccctttatatgattaagaccaagaatcacctggcgcgagtgctattggtcgatattgaggagataaagaacatcgagaacatttgcacgcaatacaatgtgttccagattgagggtaaatcctcaaagctcagggaaatacagactcccatcaattttcttgagattgtacacaatcgcatcgctagtctgttatgtcggattgaaacaccaaactttctccatagcggaaagaagtctcactctaatataaccaacgccaaagcccacttggggtataatctgcaagtgctgaccatcgatatagaaaatttctatcctagcaccactgcccagaaaatctacaaatttttcttacacggcatgaaatgctcggagacaatctccaagatcctcactaaaatttgcacatacaatgaacatctgcctacaggctctagaatcagtatgccgctcgcatattttgctaacatgttgatgttccaagaaattgagaagctgagcatcaaacacgaaatcaagctcaccgtgtacgtagacgacataactttttcaggatttaaggtcagcaccctgttctacaagctgattcgcaacattatcttcagacatcagcacctggtgaacataaagaaaaccaggttttatctgaagaaccagcccaaactggttacaggcgtcatccttaaagagaattccatcttcattcgtaacaagcatcataaagagctctacgaactaaaggagttgtacgaaattacgaaaactaataaccccgagcagcttttctccatccggaataaattagtgggtaaactctatagctgtggggttatcaacagtaaatataagtctgaggcaaagatctacctgaacacaccttga

SEQ ID NO: 10480 - RNA, 951 nt, synthetic construct
  source 1..951: mol_type = other RNA
atgatccaaaagaatagcaagcccaaactggtgaccaagaacaagtcttattccattcaggacagtgcactgtacatgatcaagactaagaaacacctagctagagtgctcctcattgacgtcgagaaactcaagaacatcaaggatatatgcactcaatacaacgtgttttctaccaacgggaagagtaacaaattgagagaaattcagaccccgatcaacgttctggagacaatacataatcgaatagcctcactcctgtgccgcatcaagacccctgactttcttcattccggtaaaaaaaaccacagcaacatttctaatgccaaggtccacctgggagagaatctgaagatccttactattgacatcgagaaattctttcccagcacggcaagcaaaaagatctatgagttcttcctttacggtatgaagtgcaataagacagtgtccaagattttaacccagctgtgtacttataacgaatgtctgcctaccggatcacggattagtatgcccttagcctattttagcaacatgttgatgtttcaggaaatggctctcctggcttccaagcatcagataaacatgactgtgtatgttgatgacattacattttcaggctccaatatttcaaccctgttctacaaactggtcaagaaaatcacaatccgtcaccagcacagtatcaatgatgataagactaggttctatacagagtaccaaccaaagttaataaccggagcgatcctcaaaggcaattccttgctaattaggaacaagcatcacaaagaactctatgagttcaaagaactttacagcttcacaaaggataataatccaacgcagttgtctgaagtgcggaataaactgatcgggaaactgtactcgtgtggcgtaatcaatgtgaagtacaaatctgaggccaaagtataccagaactacctgtga

SEQ ID NO: 10481 - RNA, 951 nt, synthetic construct
  source 1..951: mol_type = other RNA
atgaactcgaaacttaaaattgtgactctcaagaagagttacaatattcaggacagcgccctttttaaggtgaggtccctgaagcaccttgctaaagttctcctcatcgatatcgagaaactgaacgacctgtccttcactaaggatcagtacaggatcttcacaatcactggaaagtctggtaaggaacgcgagatccaaaatcccacaggattgctcgcccagattcacagtagaattgctagcctcctatgccgtatcaaaactcccgattatcttcattccggtaagaaaggccgcagcaacgttacaaatgcaaagtatcacaccgggcataacctggaaattttgaccgtcgacctcgtagacttctaccctagcaccaccagtaacaagatattaaacttctttctctgcacgatgaagtgttcttataaggtggcctgtatattgactacactttgctcttacaatgagaaattaccaaccggatcacagatctcaatgccactggcgtattttgcaaactgcatgatgtttaaggagattgaagccctgtccaataaacacaacatcaaaatgtccatctacgtggatgacatcacgttttctggcgagaagatcacccggctgttctacagcctgataaaaaaaattgtcgtaagacacggccattctttgaagcatacaaaaacccggtactataagaagagctcagcgaagctgatcactggcgtggtcgtgaaggatgcaaatctgctgattaggaataagcaccaccaggagatctatcaaacaaaagagttgttaaccatcgctatacactcagacagcaaagaacagattggcagtctacgactgaagctgattgggaagctgcatgcctgtgggtccattgatcctaaagctaaatctgaagcctattactaccagagacaatccataaattga

SEQ ID NO: 10482 - RNA, 948 nt, synthetic construct
  source 1..948: mol_type = other RNA
atgaaactgcccgctaaacattcccccaagcttcacatcaaatccaacaagaaaagctacctgccgagcgatagcgctctgtataacctgaccactaagaaacgcctcgaagcaatcattgggaaaaccatcgcagagatcgaggccgccgggattgacgagaactatagagttttcggactgaaaaaaggtggtaagactagggaaatacaggcccctaagtactcccttgatgtcatccatacccgaatcgcgagtctgttagtgcgtgtggccgtcccagattacctccattcgggaatcaaagggcgaagcaatatcacaaacgctaaggcacacattggtaatcatcctctgctcacaatggacattcagaagttctacccttccattagcaagaagtccatcttcaatttcttccatattaggatgaacgcctctcgcgacgtggccggaatcttggcagaggtctgttcatacaaagattgcctgcccaccggtagtcggataagtatgcccctaagtttttgggtgaactatgagatgtattctaaattggagtcattgtgcctgaataagggcatcattatgacagtattcgttgacgattttacattctctggcgatcaggtggacgaaaagtttaagaagcacgcaaagaagataatcaaggagtcaggcctggaggtgcacccacggaagactcggttatttgggaaaggattcccaagagtcgtgaccggagccctagttgacggcagcgggataaaggtaagaaataagcaccacaaatcaatctacacgctctttggcgaaattgaaaagtgttctgatgacaagaaacttgaaaagatgcagatgcaactcctgggcaaactttctgctgctggccagattgacaaatcctttaaaaataaggcggctcaatttaggaaagccatttgctga

SEQ ID NO: 10483 - RNA, 990 nt, synthetic construct
  source 1..990: mol_type = other RNA
atgaagaagaagaaaaagctgatcacacacaataaggagtacactctggacaagtctcctcttttcaatattgaatacatcaagcgcctcgtcagtgttctgaatgcagatgaggagatcatcaccagcctcatcaaatacaaggctgaaaactacaactgcttctcacagggaaagaagaagcgggagatccagacaccaatcaatgagctgtacctcattcataacagaattgcctccctgttggctcggattaagctgcccaaatacttgtactctggcgtgaaaaaccgatcctatattgacaacgccaaagaacacctgaatagcaaggcgatcctgacaactgacgtgacggctttttttccatccactaccagaaccatgatattctggttcttcaaagacaaaatgcagtgtagcagccgcatggccaatatcttggccgacttatgcagtataaacgatcatttaccaactggctcccaaatctcaatgcctctggcatattgggtgaactcctctatgttcaaggagctgcataggctagcagaagatcacaagctcaaaatgacagtttacgtggatgatctgactttttcaggggaaaaagtccctaaaggttttaagtatcaggtagagcagatcattaagaaacacaagcaccaaattaagagtgaaaaaaccaccctctacaataaccaatcggttaaggaagtgacagggcttatactgaaagagggtaagctgcttcctcccaacaggcaactgaaaaaactccatcagcatcttaacctatgggaaaaattgatagagtctccccgtaatggaattaaaatcgagtggctctatcccaaggtgatcggcgtcttaaacaatattacctattttagaccggagtataagaacgtaatctttgctattcagaaggagtatcaccagtataaaaatacgcccagcaattacaagaatcagatagacgccaactga

SEQ ID NO: 10484 - RNA, 978 nt, synthetic construct
  source 1..978: mol_type = other RNA
atgaaaaagaagaagttgataacccacaataagtcctatgcgatcgacaaaagccccctctataacattcaatacatcaaaaggctctcagatattctgcagatcaacgagaagacaatcttctccttgattgagaataagaccaagaattacaactgtttcctgcaggggaaaaaaaaaagagagatccagagccccattaacgaactgtaccttatccataatcgcatcgcctccctgctggcccgggtgaaactacctgaatatctgtattctggagtgaagaaccgttcttatatagacaatgctaaagctcacctgacatcaaaagaaatcattaccaccgatataacagccttttttccttctaccacaagaacgatgattttctggttcttcaagaacaagttaaagtgcagtcacaagattgcaaatattctcgccgatctgtgctccattaatgaacatttgcccaccggcagtcagatcagtatgccgctcgcgtatcttgttaacgcctctatgtttgacgagttaaacaatctagctgagaaaaacaagctgataatgacggtgtatgtggatgacgttaccttctcaggtgaaaaagtcccaaaaggattcaagtaccaagtggagcgcattattaagaaacacaagcacaacatcaaggcagaaaaaactactctgtataagaaccagtcggtaaaagaggtcactggtctgattcttaaggacaacacactgcttccacctaataggcagtttaaaaaactccaccagcatctcaccttatggaaaactctgatcgcaaaaccccgaaacggcatcaaaatagagtggctctaccataagatcgtaggcatcttgaataacataagctactttaagagcgggtacaagaatgtcgtgtttgctatccaaaaggagtaccatcagtacaagaatactccaacaaattacaagaaggccgattga

SEQ ID NO: 10485 - RNA, 969 nt, synthetic construct
  source 1..969: mol_type = other RNA
atgaaaaagaagcttatcacacacgataaaagctaccagctggaaaacagcccactgttcaagattcaatacaccaaaaggctgtcacaggttatactgcagtcagaagagacaatttcatccgtgttcgagtctaaggcccagtactacaatatctttcagcagggtaatcgcctaatcgaggttccattacggacactctacgcaattcataacaggatcgcctccctcctggctcgaatcactccccctgattacctgtactctggcatcaagaacaaatcctatattacaaatgcccagcaacatctggactctgatgtcatactaacgacggatattaccgcctttttccctagcactactaaagagaagattttctggttcttcaaggacaagatgcaatgcagtaccaaaatagccaatcacctggctgaactgtgtactattgacggacacttgcctaccgggagtcagatctcaatgcctctggcctattgggtgaatgcaaacatgtttgacgaactcaatcgactcgctaaggagaacgagctgaaaatgacagtttatgtggacgacgtaaccttcagcggggcaaggattcccaaggaattcaaatttcttgtcgaacgcaccattaagaagtatagacactccatcaagttagagaagacaaaactctataagtctcaaagtgcgaaagaggtgaccgggctgatactcaaggatggaaagttattgccgtcgaaccggcagatcaaaaaactgcaccaataccttaacctctggggcgaattgttgagccagcccagacagggccggaagatcgagtggctgtacccaaagcttgtgggtgtagtcaacaatatcgcgtattttaaaccagagtaccgtaatgtcgtgtttgctatccatagagagtataaccagtacaaaaatactccctccaactataaaaaggaagtgtga

SEQ ID NO: 10486 - RNA, 951 nt, synthetic construct
  source 1..951: mol_type = other RNA
atgaaataccccgtgaaatatagtaagccttcttacccactcagcaaaagccctttttatcgcctgtgctctatttcctacctaaagcggatcctcgaagtctgtgtttggtatgaagaggaactgttaaacgagatcgagcagttctactcctgttatgactctagtggccatcagaaaagatttccctatccaattgacgaactgtacgggattcataataaaatagcgtcctacttggcccgcatggagatgccagaatacattcattcaagcaaaaagggggcaagctatttaacaaatgctcaggtgcatcaaggcacaaaggagacgtttaaaaccgatatcagatctttcttccagtcaacaaccaaagccatggttttcaaattcttccggaagaagatgctctgctcgcgcgccgtgagtgagtatctggcccacctttgcacactggataacgctctgcccctgggtagccaggtgtcaatgcgactcgcttactttgctaatatggatatgtttgagcagctgtttctcttagcacaaagccacaaccttcgaatgtcagtatatgtcgatgacataaccttttccggggataagattcccaagggtttcaagggccaggtggcacagatagtccaccggcacggacacaagatcaagagaaataagaccaagtgctactcccagaataaaaaagagatcactggcattatgatcgacggagagactcttaaactgcctgataggaagctgctgcaaattcacaacgaattcaacaagttcaaggcactcctaaagacgaccgaaagggacaaagagaagatcttgtacaagactcgttatttgttcggcctgttgaatcatgcggcccaatttgacccgaagtaccagctgatcaggaaagagctcaaagccaaaatcaacgaaaagtgtggactttga

SEQ ID NO: 10487 - RNA, 1173 nt, synthetic construct
  source 1..1173: mol_type = other RNA
atggccatccacaaacgccataccctccaaacgtccccactgtatggtctgaagcatctgcatcagttgcaacaccttctgtaccattcccgttacttcagaaataccaacattgacttggacaagcagtacaaactctcagagactgctcatcgagaggttttctatcccgatgatacgctatataattttcacagcgagctgaacaagttcctcagcaaaatagagaaacccgagtttatcaaatctggaaagaaaggcgaatcttacctgacacatgtgtcatcacacattaacaagaatcagtacttcagtttagacattaggagctactattcaaacattaatcgccttgacgtgttcaagttttttaggaataacctcggttgttctcacaagatcgccaactacctagcctatttttgcacttacaaggatcagctaccgctggggagtcctatgtccatgaacttggcgtattttataaatgagcccatgttctattgcctcaatgaaatcgctgtgaagaataatttgagcatgaccgtgtatgtcgacgacatcgctttttctggaagggtgatcacctccaaggttaagtatgacatcatcggcgtaattaataagcatggctactccataaacgaagacaaacttcggttctacaaaagtaaaaagacatatcgcgagacaagtggactcctgatctataaggggaaacttctgccaaacaaggaaaagctggataagctgcacaagatgctgtccgaatgggatgcacttctccgactcgacaaacctctcgagacaaaaaatcatttcattcggttgatcagcttcatttcctatttatgtcagattgataccaagtacatgcaactgaagtataaggtcatcaaagaatacaacaacaagaaagagggcgatttgttagccatttaccaggatagaattaccgagtggaacactctgctgtctaatcacgagactagttttcacgcattaaatgaaaaacacgccgaactgaacgaactgatcaaaaacctttcgaagctcaacaagaagcacctgatactgtacaaacagatcaaatacgagcacgagaagttcaaaaaacacaagagatcaagcatagggcggttttttagcgcattctctaaatacctggcttga

SEQ ID NO: 10488 - RNA, 933 nt, synthetic construct
  source 1..933: mol_type = other RNA
atgatcctctgtacaactgacgagatcttttccatcattaacaacaagatcttctactacaacatgttcgagattgggggcagggtttgccacacgccctgttatgagttgaaggggcttcattccagactggcccaattccttgtgaggattaaaaagccccgctacttatattccggagttaaaggcctgtcttacgtggacaacgctcgcgtccattctgtctattatgaaacattcaagacggatatcagcgagttttattcagcgactacccaggctatcgtgttcaagtttttcaggaacaagatgcagtgtagccacaaggtagcaaatatattagctgaactctgcacacttgaggggaaactacctaccggctcgcagctgtctatgatcctggccttttgggccaattcagatatgttcgaacagttgaatcagctggcacaggagcaccatttggtgatgacagtgtacgttgacgacataaccttttcaggcgccaaaattcctgctggtttttgccagcaggtagcacaaattatgagcgaacatggacatgcaatgaataagaagaaaactcggctctaccaggcgaatagtcacaaagaaatcaccgggctgattattaaccgggtgggagacagcccgataccaccaaaccgtttttatctcaaactgcataacaaactggccgagttcaatcagatctacgccgaaattaaaaatggcaagagtaaaatggaggaggataccctgcgacaactaaccaaccacctgataggtctgctcaatcacgccagtcagttcgataagaagtacaagatggtgaagaagcacatccagaagcaacacgatgaccttattcaatatctgcagactacacacaaagtcggctccggaaagttgggtaaactctgcatcagatga

SEQ ID NO: 10489 - RNA, 987 nt, synthetic construct
  source 1..987: mol_type = other RNA
atgaataaaatcagacgcaagagtctgaagattcctatcaggcagacaaaagaatatgatctcaaccaatcaccgttctttaaattggtatcaatcaagaagctgctgtctattttgcgagtgagtcaggaggaactgaaggacattctcgacaaccccacctctcattactctatcaggattgagaataaaagggacattcagagccccaaaaagtatcggatcttatatagaatccacaacagaattgcccatcacctccgagctattatcactccagattacctgttttccgataaaaaagggtgcagtatctatgacaacgcaatagtccattttggctgcaaaatgctcctgaatgttgatatctccaaatttttcccaagcaccaataggaacaagatttactctttcttcaagtactccatgcaatgttcctcagaaatatcggacatcatgtcctacttgtgttcaatcaataatcacatccctacaggttcgcagatttcaatgagactggcttaccttgtcaataagaagctttttgatgatctgtacaagtttgccaaagacaaaaacctcaagatgagtgtatgggtggatgacgtttcatttagtggcgacaaaattgattcctccgtgatttatgtcgtggaaaagataatcaagaagcacgggttcaatgtgagcaaaaataagactcagatacggcactccaccgaaaacaaaagcgtgacgggaattttcataagcggagacataatggaggcgagcaaggagctgtataaaaagcgtcgcatcaagcttcgggagtggaagaatttcatcaaaaacaaggagatttccctcgaagaattagagaaagttaaagactctctactaggcctgcttaactacttaaacctgttcgagcccagcagcagcaagtatattgccctgatcgagaacgatttcttgagttactctaacaagcgcatctctatctga

SEQ ID NO: 10490 - RNA, 981 nt, synthetic construct
  source 1..981: mol_type = other RNA
atgaataagatccgcaaaaaatccctgaagatacctatcaaacaaaataaggagtacgagctgaatcagtcgccattctttaaattagtgtcacttaagcgactgctgtcaatcctgcgggtgagcgaggacgagttgaaggacatattggacaatccggcttcatactattccattcgtgtcgaaaacaatcgggagattcagtctcccaaaaaaacgaaaagtctctatcgcatccacaatagaattgcacatcatttgagggccattattaccccttgttacctgttcagcgataaggttgggtgcagcatctacgataacgcgtccgtacatatcgggtgcaaaatgctgctaaatgtggacatctctaagttttttcctagtacaaaccggaacaagatttacagtttcttcaagaaggatatggaatgcagcccccagatttccgaaattctctcctatgtgtgtagcataaacggccacatccccactggatcacaattatccatgagactggcttaccttgtcaacaagaagctctttgatcaccttttccattttgccgagagcaaaagtctaaaaatgagtgtatgggtggacgatatctctttctctggcgaaaagattaatagcaacttcctgaactcagtcgagaaaattatcgagagacacggtttcaacataagcaagcacaagaccaaactgaaacattccacagagtccaagtctatcaccggaatttttatctcaggtgaaaaaatggaagcctctaacgagtcttatcagaaaaggcgagtgctgctggaaaaatggaaggagtctataaagaacaaggagatcccaataaaagaactcgaaaagctgaaggattccttactcggcttgctcaattatctcaatcactttgagaactcgagtaagaagtatattttccagatcgagaaagactttatcgaataccttaagagggttagctga

SEQ ID NO: 10491 - RNA, 990 nt, synthetic construct
  source 1..990: mol_type = other RNA
atgaaaaagaaattcaaaaagctgcacatcacccagactaaagagtatgaactgacacaaagtcctttcttcaaactctattccgtcgataagctgttaaacatccttaaagtggagagggaaatccttgaagacatcctgaattttcccggcaactactacacattcaaaactagcaatggacgtaatatccagacaccttcaaaggatctgtcactctaccttattcataattgtatcgcaaaccatctccgcgctatcataacacccgattatctctttagcgacaagaagaattgcaccgtctacgacaacgccagcgtgcatttaggctgtgatatcctgctgaacattgatatctctaagttcttcccttccacgacctatatcaaagtttttaagttcttccggtacaggctgttatgttcaacagagatagcagacattttggctcacctgtgcacgattaatgaccacattccaactggatcccagataagtatgcggctcgcctttctggtgaatcagggtttgtttaatgacctgtacaatcttgccatttcaaagaacattaagatgtctctgtgggtggacgatatctccttttcgggtgcggaagtcactccgaccttcaagtacaaggtatataagatcattgaggaatacgggtttaaagttagcgagcacaaaactaaactatcctataaaggccaaccaaaatctgtgaccggcatcttcatagatggggataaaagtattggggccaatgagcactataagaagagacgcgtgctatttaagaaatggaaagacgcatgcaagaaaaagacctttaacaagaagcagtttcagagaattaaggctctgcgaatacagatcttgggactcttgaactatctgaatcattttgagcccagctctaagaactacataaacattatcgagaacgacttcaaaaagatcaagaacaagttcctctacaaaatttga

SEQ ID NO: 10492 - RNA, 960 nt, synthetic construct
  source 1..960: mol_type = other RNA
atgactaaactgaacactcgaaacaagtcttataatttggaggaatcccccctctataacatccagtacgaacagaagttgctcaagattctcaatattagtcagaatgacctgattttcgttcgggagaacttgaaggacttctatcattcattctccaaaaagcatagaatcatccagacccctaaaaatctgctgaaacaaatccactaccgcatcggagatcttctggctaggatagctatgcctgactatctgatgtcggggaagaagggtgccagtcacatagagaatgccaaattacatctgcaagaggacctccacgtattcactgccgacatagaaaaattttttccctcaacaaagcgccaggccatcttcaagtttttcaaaaacaagcttcagtgtagccacaacattgctaccatcttgtctgaactatgcacaacccacgagggcagattacctacaggcagtcaactttctatgcatctagctttttggacgaactttaacatgttcgaaaaaatcgcaaagttgtcaaatcagtatgacctgcgtttttctatcttcgtggacgatcttactttcagcggaaagactattccgcacaactttaagtaccagctgaagaagatcatcaccagctacgggtatcaaataaatacacagaagattctcctcttcaaaccatttaagatccggagagtcaccggcatttacattaaaaacggtgatacccacctgcccaatacctttctcagggagctacatacagcgttacagagctggaaggatattctgaaaacttccccagataaactggataaaaagaaactggagacgacctataataaactccttgggtccatcaactacgccgcactgctggacaaaaagtacaagcagatcaggaagaaagtgatagcagagaagcagaaaattacacagtaccaatga

SEQ ID NO: 10493 - RNA, 960 nt, synthetic construct
  source 1..960: mol_type = other RNA
atgtcaaagaagaagctgaagattaagtcctccaaaaagtactctatcaaccagtgccgactgtacaaggttacctcactgaaaaagttgtgtgaaattctgggcatcaataatcgcgaactaaaattgatcatcgacaaatcgaagaacagggagttttataactgttacatcaatcagaaggggcgcctgatccaggagcccattaacttaatgtatcgggtacacaacaggatcgccaatctgctagccagggtggagacacctagttacattcattacagtaaaaggggctattcacacatcagcaatgcaaaggctcacctggattccaaacagcttattacattcgacatcaaatcctattaccaaagcatcgactatgaaacgctcagaagattctttcgggagaaactgaaatgtgaacaagatgtcgcctacattttatcaatgatatgctctttcgagggaagcctgcctactggtagtcagataagcgtctacctctgcaatctgaccaaccttgatatgttcgacgaaatgtaccttcagtctaaccgagttgaccaaaagtttactgtatacgcggatgacataacaatcagcggacgtaccgtgaataactcccattacaacgtgatgaagaagatcattgagcgctacggctacatcataaaagaacaaaagactaagcggtacactagcaatcagataccaattgtcaccggggtggctctcagaaatacagtggatgtgaagaatgagtattataaaggcctgcggaagttgtgcgagggtgttaactttaatattgataacgagccgtatgcccagttaaaagacagatatctctctttgaaaggaaagacgcagtatatcaagcagcttaacaaagaagtgccctatttcattctccaaacccagatgctcctggagaaaaagctcgaagggcagctgtga

SEQ ID NO: 10494 - RNA, 960 nt, synthetic construct
  source 1..960: mol_type = other RNA
atgtctaggaagaagttaaaagttaaggcagacaaacgatacagcatagatcaatgccgcctttataagataaccagcctgaagaaactctgcgaaattctctctatcaacaacgaagagctgaaactcctgatagacaaatctcggaactcaaagttctataattgctacaccaatcagaaggggagactgattcaggagcccattaaccttatgtacagagtacataacagaatcgccaacttgttggccagggtggagacaccgtcgtacatcaattacagtaagaagggctgctcccatatcagcaatgctaaagcccacctctattctaagcagctaatcactttcgatatcaagagctactatcagtccatttgtaatgaggcgttgcgccgttttttccgggacaaattaaaatgtgagcaagacgtggcttatgtgctgtcaatcatctgttcctttgagggttccctccccacaggctcacagatctccgtctatctctgcaatctggcaaatatagacatgttccacgagatgtatctacaaagtaaccgctttcagcaagagttcactgtgtatgccgatgatattacaatcagcggagatattgttaacgactcccactacaacgtgatgaagaagatcatcgagcggtacgggtacataattaaggaagagaaaaccaaacggtatactagtaatcagacgccaattgtcaccggggtcgctctgaaagacacagtggatgtaaaaaacgtctactacaagggattgcgagaactgtgtgagtctatcaacctgaacgtggacaatgaaagttacgcacagctgaaggatgaatatctgtcactcaagggtaagattcagtacatcaaacagctgaatagggaagttccttgttttattctgcagacccagagccttttagagaagaaacttgaaggccaactgtga

SEQ ID NO: 10495 - RNA, 960 nt, synthetic construct
  source 1..960: mol_type = other RNA
atgagcggcaagaagctcaaggtgaaaactgataaaaagtatagcatcgaccaatgtagactttaccgggtgaccagcctgaaaaagctctgtgagatcttggggattaataaccaggacttgaaagtcctgattgataagtcgaagaacagtgagttttatcactgctatgtcaaccagaaaggcaggctgattcaagaaccaattaatctgatgtaccgcgtgcacaatcgaattgctaatctgctgagcagagtggagacacctagttacatccattattccaagaagggatgttctcacatctccaatgctaaagcccatctccactctaagcagctcatcactttcgatatcaagtcatactaccaaaacattgggaatgagacaatccggaaatttttccgtgataaacttaagtgcgaacaggacgtggcatacattcttagcatcatctgttccttcgagggctctcttccaaccggatctcagatatccgtatacctgtgcaacctcgttaacttagacatgtttcaagaaatgtacctgcagagtcataaagcccagcagcagttcaccgtgtatgccgatgacatcacgatatcaggccagatcgtgaatgattcccactataatgtcatgaagaagatcatcgagcgctacggttatacagttaaagaggaaaagaccaagaggtacaattcaaaccaaattcctatagtaaccggaatagcgctaaaaaatactgtcgacgttaagaacgtgttctataaagaaagcaggaagttgtgcgagaacattaacatcaatattgacaacgaaccctacgcccagctgaaagacaagtatctatcattgaagggtaaggcacaatatatcaaacagctgaacaaggaagtcccctactttattctgcagacacagatgctgctcgagaaaaaattagaggggcagatatga

SEQ ID NO: 10496 - RNA, 960 nt, synthetic construct
  source 1..960: mol_type = other RNA
atgtcgaaaaagaaactaaaggtcaaggccaacaaaacgtatcccttaaatcagtgtctgctgtacaaggtgccgagcctaaaaaagctctgtgttattctcaagatcaccaaggaggagttgctgactttaatggctgatagtgagagcaacgggctgtataattgctatgagaataaggagggcagacttatccaagaaccaagggacctcatgtacgtggtgcacaaccgaatagctaatctgctttctcgtgtaaaaacacctgactacatacactacagtaaaaaagggcattctcatatcagtaacgctgaagttcacctggacagcaaccagctcatgacctttgatattaagtcctactatccttctatctcctcagaattaatccgcaagttctttagacacaagctgaagtgcgaacaggacattgcatacctgctgtcaaaattgtgtaccattgatggctcactgcccacaggttcccaaatctcagtctatctatgtaatctcgtgaacctggacatgtttaacgagatgaagctgcagtgcgaccggtttaaccataaattcactgtctacgccgatgatataaccattagcggcgaatccgttaatgaaagtcactacaatgtgatgcgcaagatcctcgagagatatggatacgaaattaaggagtccaaaactaaaaggtacactagcaatcaaacgccaatagtgaccggtatcgccctgaccaaaaaccttgacgcgaagaatgatttttacaagcagctgaggcagctgtgcgatgacatcaacttcattattgacaacgccagctatgcacagctcaaagatgagtattactctttgaaagggaaagcccagtatttgaagcagcttcaacagaaggtacccgagttcgtgttcacaacacaggcacggttggagaagaagcttgaaggacagatctga

SEQ ID NO: 10497 - RNA, 954 nt, synthetic construct
  source 1..954: mol_type = other RNA
atgtcaaaaaagaaggtgaaggcgaataagatttacagtctcaaccagtgccggctttacaaagtaacttccttgaaaaagctgtgtagcattcttaagatcaccgaagaggaactgtctctcctcgtcgagagttacgagaatagtgacttttacaactgttacatcaacaaagatggaaggcctatccaggagcccaaaaaattaatgtacagggttcacaatcgcatcgcaaatctgttatcccgcatcgagacacctgaatatgttcactattctaagaagggacatagccacatctccaacgccgaggtccacctgcattcaaaacaacttatgaccttcgacatcaagtcttactattcaaatatcagctcagagagcattagagtatttttccgacataaactgcaatgcgagcaggacatcgcttacctgttgagcaagctatgcactttaaacggctccctaccaaccgggtcccagataagtgtgtatctgtgcaatctggttaacttggatatgtttgacgaaatgaaactgcagtgtgaaatgttcgagcagaagttcaccgtgtatgcagacgatataacaatctctggcaaaagtgtgaataagagccattataacgtgatgtctaagattctcgagagacacggctatgaaatcaaagaatctaagacgaagcggtttacatcgaatgagattcccgtcgtgaccgggattgccctcaaaaaaacaagcgacgtgaaaaactccttctacatggagctgcgtcagctctgtgaaggtatagatattcacattgatgacgcctcatatgcccagcttaaggatgaatactattccctgaaggggaaagctcagtacgtcaagcaactgaaccagaagataccaaagttcgtgtttcagactcaagctaaactggaaaagaagctcgagggtcagttgtga

SEQ ID NO: 10498 - RNA, 966 nt, synthetic construct
  source 1..966: mol_type = other RNA
atgaaagtgaaatctaacaagctcaaggtcaaaacagacaaatactatccactgaaccaatctgctttataccgtgtaaacagcaaaaaaaagcttgccgaggttctcttaatctcaggtactgaactggctacacttataagagatgatgacaagatcaagttctataactgctatctcaatgaaaaggacaggctgatccaacagcctcagggattgatgtataaactgcacaatcgcgtggcgaaccttctttctcgcatagaaacccccgaatacattcaatactccaagaaaggactgagccacatcactaatgcaagcattcatgcaaacagtaagcaggtcatcaccttcgacattaagagctattacctctccattaagagggagagtgtacaaaacttttttcgggaggaactggagtgcgagatcgatattgcattcattctttccaaactgtgcacactcgatgaggctttgcccaccggctctcagatctcaaattatctgtgtaatctggtgaacctagtgatgtttgacgagatgaattcattggcctctaggtttgggatgtcctttagtgtttatgcggatgatataacgatcagcggcgacaatctggattcatcgcatctcaatacaatgcgaaaaattatcgaacggtacgggtattgtataaaggacgagaagaccaaaatattcaagggcaatgagacggccgtggtgactggaatcgctctaaaagaaagtttggatatcaagaacgagttctacagcgatctgagaaagctgtgtgaactggtcaattcctacattgacaaagagtcctacgcccagctgaaaggcgactacttcaagctgaaggggaaaatccagtacattaagcagttgaaccagactattccgagactcgccctgaacaccaaggccctactcgagcggaagttagacggtcagatctga

SEQ ID NO: 10499 - RNA, 957 nt, synthetic construct
  source 1..957: mol_type = other RNA
atgaaaaagaagagaaagctgaaggtgcgccatttcaacaaacaatatcccattcatcagtcgccactttaccgcttgtctagccttaaaaagttgtccgtcctcctggccatgcctcttaaggacatccgtaagctcaacggtaataatgactcccgatacaacgtatttactaacaaagacgacagggagatacaggagccctttaacgagatttacgtgattcacaataagctcgcaagtctgttatctaggattgatactcctacctatctccactctttcaaaaagcagtattcgcacatcaccaacagcaaaacccacctgggcagcgagcaagtgataaccttcgacataaaagctttttaccaaaacatcacccaggataaaatccgaatgttcttcaagaacgacctaaaatgcagcccagatattgcattcctgctgtcaaaaatctgcagctacgataatcatctccccacaggaagccaggtgtccatctaccttaactttctggttaataggacgatgtttgacgaaatgcactctctagcggagacactgaagatctgtttaacggtgtacgccgatgatgtgacaatttctggagaaaaggtcgatatgggaatgttgaataccatgagtaagatagtggagcggcacgggcatacaatcaataagcaaaagactcggaaatatagcaataatcaggttccggtcatcactgggatcgccttatgtaatggcaagacccagcctaccaatgaaaagtttaaggaactgcgccagaagagtaacttcttgctgagagtatccaacgacctggatttggactttctgaaaaaagagagtatgtcactcgatggtactctgaactatttctcccagctttcctcagaagttccaaaatcaacactcgaggcccgggacagactggctaaactactgggcatttga

SEQ ID NO: 10500 - RNA, 957 nt, synthetic construct
  source 1..957: mol_type = other RNA
atgtctaataagaaacgcttgaagatcaagaatcacaatcagtacccctttcatcagagccccttgtataaacttaagagcaaaaagagactggctgatattttcaatgtggagctcagtgaactgaagtcatggtttaacacaattccaagcgaatataacgttttccttaacgagaaagacagagagattcaaactccactcaataacctgtacattatacacaataggcttgcgaatctgctgtcgagaatagagacgccttcctggctgcatagtttcaagaagaatttctcctacctaactaatgctaaaagtcatatcgattctcgccaggtgttaacgttcgaccttaagtctttttaccagtccacaactcaaaatgccgttcggaaatttttcaaggacactatgctgtgttccgaggatgtctcctttttcttgagcaagatttgctgctacaataaccacctgcccaccgggagccaagtcagtatatacttgtgttacctcgtgaacatcaaaatgtttgatgaaatgaggaggctggctgtcagccgaaatgccctcctgaccgtttatgcagatgacatcaccgtgtcaggtgacaagatcgactattcactgctgaacaccatgcggaagataatcgtgagacacggctataaactctcagaagataagacactccgcttcaaatataacgaaatacctgtgatcaccggcattgccttggtacagggagagctacgtcctacaaacaagtttatgtccgagcttaggagcaaagtatatttcttaaaccggaatgccgaagagctggacattgaactgctaaaaaaggagaaacagcggatcaacgggaagattaactacatcgagtctttaaaccgaccaattccctctcaggcaatcgacatcaacaagaaactcgataagctggtgccgatcaaatga

SEQ ID NO: 10501 - RNA, 960 nt, synthetic construct
  source 1..960: mol_type = other RNA
atgaaatcaaccaagaggacaccttccctgcaaaggtttcccaaattgtacccattaaatcagtcccccttttttaagctgaaaactcgaacaaaactcctcgagatcataggactgagtcggagccaagcggacaaactgatgctcgacagcgcctacaaggagttcataaatgatgcagggagaagcatccaggaaccgatcgcccagcttaaggcagtccacaaaagaatcggtatactgttcagtcggatcgagctgccacaatatcttcattctgggcgcaagaaacactccactcttacaaacgcagagagtcaccgtcatgccacggagctgctcaagctggatatccacaaattttttccttcaacctctgctgcaaaggtgtataaggcattcgtcgagaagttcgagatgagccccgatgttgcctatgtgatgaccaatttggccaccttcgcaggcaaggttcccactggctccccaatttcgatggccattgctttctgggctaacaaagatatgttcgacgaactgagtaaccttgccacactgtcaaacttggtgtttacagcttacgtagacgatgtggccttttccggagccaaaatccctaagggctttgctagccaggcgaagaaatgcattcattctcacgggttaacttcaaaggacaaaaaggaacgcttctaccctgcatctgaagggaaactactcaccggaattgtgatccagaacggaaagctgaaggtgcggtgggctcataatgacagcattggcaaagaattcgccaccctagctgaggccaaagataatgccgcgaagatttctcatctggagaagctcgcaggcaagctgcacgctgccggtcagattgacttcagacaaaaggataaggcgaggtttttcacgcagcagttgaaggtcgctaaaaaacagagcgaacaggactcctga

SEQ ID NO: 10502 - RNA, 978 nt, synthetic construct
  source 1..978: mol_type = other RNA
atgaaatcaacaaagcgcacgcctagcctccagagcccaccaaagatttatcccctgaaccagagtcccctgtttaaattgaaaaacaagcggaagtctctggagataattggtctatccaaaaaacaagccgacaaacttatgcttgatagcgcatacaaggagttcgtgaatgacgcagggcgtacaattcaggagccaatcgcgcagctcaaggctgttcataggaaaattggggtgctgctatccaggatcgagttgcctccgtatctgcatagcggtcggaaaaaacacagcacactgaccaacgtggagagccacaagttagccaccgagttgctcaagctcgatatacataagtttttcccgtcgacacgagctgctaaagtctacaaggccttcgtggaaaagtttgaaatgtcacccgatgtagcttacattatgactaatctgagtacctttgcaggcaaggtgcctactggcagtccaatctccatggcaatggccttctgggccaacaaagatatgtttgacgagctctctaatcttgcagcttctaacagcttggtcttcactgcctacgtggacgacgttgccttctccgggtccaagatccccaaaggattcgccgcgcaggccaagaaatgcatccgctcacacggccttacttctaaggacaagaaggagaggttttacccttcatccgaaggaaaactgttaacaggcatcgtaatacaggacggagaactgaaagttagatgggctcacaatgatagtattggaaaggagtttgccacgctcgcggaagcaaaggataatgccaccaagatcatccacctggaaaaactggctggcaagctgcatgccgccgggcaagtcgacttccggcagaaagacagagctagatttttctataccgcagctcagtctcacaagaaagccttacgcacccgatatctgaagcagcaagtggattga

SEQ ID NO: 10503 - RNA, 960 nt, synthetic construct
  source 1..960: mol_type = other RNA
atgattagcactaagaggtcaagctctttgcactcaagtcccaaactgtatccattaaaccagagccccctgttcaagttgaaatccaagaaaaagctacttgagatcatcgggctcagcaaaaagcaagccgataagctgatgttagactcagcttacaaagagttcgaaaatgacgctggcagagcaattcaggaacccatcgcccagctcaaggccgtccacaagaggatcggcgcattgctgagtcgtattgagctccccccatacctgcattccggccgaaagaaacacagtaccctgactaacgcaaagtgccacaggcatgccacagagctgctgaagctcgacattcataaatttttcccatccactaaggccgccaaggtgtacaaagcatttgcggaaaagttcgagatgtcgccggatgttgcctatctgatgaccaacctggtcacatttgcgggaaaagtgcctacaggctctcctatttctatggctatggccttttgggcaaatcgcgacatgtttgataccctttcagaacttgcttcttctaataacctggttttcacggcttatgtggatgacgtggccttttctgggtccaagatacctaaaggattcgctgcccaggctaagaagtgtatcaaaagttacggtctaacctccaaagataagaaagagagattctatcagtccagcgaggggaagttactcaccggtattgtaatccaggatggagaactgaaggtgcggtgggcacacaataacagtatacgcaaagagtttgcagacttggcgaaggtgaaagacaatagcgccaagatcatacatctggagaagcttgcggggaaactccacgctgccggccaagtcgattttagacagaaggacaaggctcggttcttcacacagcaactcaaagccgcaaaaaaacagtcaacggaaagctcctga

SEQ ID NO: 10504 - RNA, 966 nt, synthetic construct
  source 1..966: mol_type = other RNA
atgattagcaccaagaggagttcatctcttcacatttctccgaagctatatcctcttaaccagagccccctctttaagttacgatctaagaagaaactgcttgaaattatcggactctctaagaagcaggctgataaactgatgctggacagcagttacaaagagtttgagaacaatgcaggccggacaatccaagagcccattgctcagttgaaggctgtccacaagcgcataggagccctgctgagtcgagtggagctgccaccatatctgcactcaggcagaaagaaacactctacgttaactaatgcagagtgtcatagacaggctacagagctcctgaagctggatattcataagtttttccccagtaccaaagcggccaaggtttataaggcctttgttgaaaagttcgaaatgtctcctgatgtcgcctacgtgatgacaaatctcgctaccttcgccgggaaggtgcctactggctccccaatctcgatggcaatggctttctgggctaacaaagatatgttcgacgagctgagcgaactagccacgtcacataatctgatatttactgcatacgtcgacgacattaccttcagtggactcaaaatccccaaaggcttctccagccaaatcaaaaggtgcatccacagccatggcctggtgtcaaagcagaagaaggaaaaattctactcctcctcacaggggaagctgttgacaggtgtggtaatccgggatggtaaattgaaagtgagatgggcccacaactcctccatcaagaaagaatttaacgaattggcgaaggcaaaagacgacaccgaaaaaataattcaccttgagaaacttgccggacgtctccatgcggccgggcaaatagatgagaggatgaagaataaagcacgcttctttagcaaaaaactcaaggaggccaagcagtccttactgatccggagcactaagtga

SEQ ID NO: 10505 - RNA, 918 nt, synthetic construct
  source 1..918: mol_type = other RNA
atgaaccagtcgcctttcttcaaactgaagacgaagaagaaacttctggagattatcggactgtccaaagcacagtcagataagttgatgcagaagtccgcttacaaggaattcgtgaatgacgccggcagaacaatacaagaacccattgcacagctcaaggccgctcaccggcgaataggggtcttacttggacgcattgaacttccgacatacctgcattcaggtaggaaaaagcactctacattgaccaacgcagagagccatatccaagcgaacgaactcctcaagctggacatccacaaattttttccctcaaccaccgccgcgaaggtccacaaagctttcgtagaaaagttccagatgagtcctgacgtggcatttctgatgacgaacctagttaccttctccggcaaagtgcccactggcagtccagtctcgatggctatggcatattgggccaataaggacatgttcgacgaattgagcgatttggccatctccaatagtctgatctttactgcttatgtggatgatgttgcgttttcaggtgtgaagataccaaagggatttagcagccgtgttaagaaatgcattcacagtcacgggctcgtgtccaagcagaaaaaggagactttttacgatagcacacaggggaaactcctgactggcgtagtcattcaagacgggaaactaaaggtgaggtgggctcataattcttctatcaagaaagagttcgatgagctggccaaagcagagtctgataccgacaaaatcattcaccttgagaagctggctggcagattacatgctgccggacaaatcgacgagcgcatgaaaaacaaggcccggttcttttctcagaaactcaaggaagccaaacagcatctggccgcccagagctccgagaagagctga

SEQ ID NO: 10506 - RNA, 960 nt, synthetic construct
  source 1..960: mol_type = other RNA
atgaaatctactaagagaacacccagcctgcatagagcacccaaactgtacccgctgaatcagtctccgttttttaagctgaagaacaagaacaagttcttcgagataataggcctcagcaaacaccaggtcgagaagctgagtttcgaaacggcttacaaggtgttcataaatgaatctgggcggacaatccaggagcccattcctcagcttaaagccgtacataagcgcatcggcattctgttggggcgcattgagctgccaatctacctccattccggaaggaagaagcattcaacgttaacaaatgccgaaagccaccggtacgccaccgagctcctcaagcttgatattcacaagtttttccctagcacttctgccgcgaaggtgtataggacctttatcgacatctttaagatgtccccagatgtcgcctacctaatgactaacttggtgacctactcaggcaaagttccaaccgggtccccaatctccatggccgtggccttttgggccaataaggacatgttcgacgagctctcacggcttgcattctcgaatggcctgatcttcactgtgtatgtagatgacgtggcctttagcggagaaaaaatccctaaaggtttcgcagcacaggctaagaaatgcatccacgcgcatggtttagtcagcaagaaggagaaagaaaccttctatcctagttccaaagggaagctactgacaggcatagttattcaaaacggaaagctgaaagttagatgggctcacaacgcgagtatcaagaacgaattagataccctggctaaggctgagaatacacccgaaaaaattactcacttggagaaactggctggcaaacttcacgctgcaggacaaattgactataggttgaaagataaggcccgtttttttacacgacagctcaaaaaagcaaaaacccagtcagaacaagagaactga

SEQ ID NO: 10507 - RNA, 978 nt, synthetic construct
  source 1..978: mol_type = other RNA
atgaaaaatactaaaaggacccctagcctgcacagcaaacctaagctgtatccactccaccagtcgccattatacaagctgaaggtaaagagcaagttattccaactgcttgggataacaaagtcacagcttgccaagctttctcaggataagagctacaacgtctttaccaacgagaatggcaggaccatccaggagcccattcctcagcttaaactggcacataagagaatcggcaagattttgtctcggatcgagatgccaagttatctgcatagtggacgcaaaaagcattctacactgactaacgcacgcgctcatatcaaagctaatgagttgctcaagcttgacattcaccactttttccccagcactacagcggcccgagtttacaacctgtttcacaggaagttcgacatgtctccggatgttgcctacctgattactaacttcgttacatactctggtcggatccccaccggctccccgatttcaatggccctcgccttttgggcaaactgggaaatgttcgacgaaattaacaagttggcaatctcccacgatttagtctttaccgtatatgtggacgatctggctttctcgggcgagaagatcccaaagggatttgcttcccaggtgaagagtatcataagttcaaatgggctgatctccaaacggaaaaaggaaattttctatccctcctccaaaggaaaactactgaccggggtggtgatccagaatggcgagctcaaggtgcgatgggcccataatgccagcatcaagaatgaatttgataacttgagcttggcctcacaggacgtccaactgagaataaagctcctggaacgcctcacggggaaactacacgccgctggtcaggtggattacaaactcaaagacaaagcacgtttcttcacgaaacaactaaaaatagcgagatgcacactcattcagcaacctcatctgtctcaccagtga

SEQ ID NO: 10508 - RNA, 957 nt, synthetic construct
  source 1..957: mol_type = other RNA
atgaagaatactaaacggcccccaagtctgcattgtgccccgaaaacataccccctcaaccagtctcctttctataggctgaaggttaagaaaaagttgtaccagctgctcggtctaaccaaagcccaggtcgagcgacttagtcaagataatagctacaacgtcttcaccaacgaaaaagggagggtgatacaggaacccatctcccagttgaagttagcacataaacggatagggaagatgctggcccgcattgagctcccagatttcctgcattccggaagaaagacatactctaccctttccaatgccgaggcacacatcaatgctgacgagctgctgaagctcgacatacacaaatttttcccaagcacgaccgccgcgaaggtctacaaggtgtttaatgagaagtttgaaatgtcacctgatgtagcttacgtgatcaccaactttgtgacatttagcgggaaaatcccaaccggctcacctattagcatggccattgcctattgggcgaattgggaactcttcgacgagatcaataaggttagtattgcaaacagactagtgttcactgtgtatgttgacgatttggccttttctgggcgaaagatccctaaaggctttgcttcgcaaatcaaatccctgattgctagcaaaggtcttatcgcaaaaaagaacaaggaggtcttttatcccaaatccaagggcaaactcctgacaggcgtagtgattcagaatggaacgcttaaggtcaggtgggcccactcagcaagcattaaagacgaattcaagaacttagctatcatgtcacgtaacaaagaatctactgtgaagttgttagagaagctggcaggaaagctccacgctgcgggcagaattgattataagctgcgggataaggcccgcttcttcactaagcagctgaaaatagctaaatgcgtgctgatcgactga

SEQ ID NO: 10509 - RNA, 987 nt, synthetic construct
  source 1..987: mol_type = other RNA
atgaaaaacgctacacggagttcctccagcttttcttccctaaagaattacccaattaaccagtctcccctgtttaaacttaccaccaagaagaagttgttagccctcttgggctttagcttaccacagattgaaaagcttagtaaggattcatcctatcgtgtgttcctcacgccctcagacagatgcgtacaggaaccgattctgcagctcaaaaaaatccataagaagatcggatcactccttaaccgcatcgagcagcctgactatatccattctggaagaaaaaaacggagcattattaccaacgcaaaagttcaccaaaattcataccaactcctcaaactggacatccacaagttttttccatctactagtggcagcaagatctacaggctgttcgtgaatgattttcagatgcagcctgacgtggcccatttgcttaccaatctggtgacctacaactattctgttcctacaggtagcccactatcgatggttcttgcttactgggcgaataaaagcatgttcgacgagctgtatcagctggccaacgagaacgatctggatttctcagtgtatgtagacgatgtcgctttctcgggagagaagatccccaagggcttctcccactgcgccaaatcctgtatttctaaacacgggatgaagtccaagtccaaaaaagagatgttctaccaggaaaatcaggcaaaactgctgacaggcgtgattataagtgacggtgtcttgaagactaggtggaaacacagccaaatgatcaagaaggggtttgaaacactggccctgcagaccagtgacggcgacagggtcatcgccctggagaagttaactggaagattgcacgcggcagggcaaatagatccccgaatcaagagcaaggccatccatttctctaaaatactgcgcgctgcaaaactcgacattatagccgctaagaatgaaaacgataagcctgatgtgagctga

SEQ ID NO: 10510 - RNA, 951 nt, synthetic construct
  source 1..951: mol_type = other RNA
atgtcaaaaaataggtcgcctagctttaagtactatgagctcaatcagtcccccttgtataaactgcaatctaaaaacaagctgaacgccctgctcggaatcaataaaaatcaaatacccagccttctgtccgacgagctgtttaaccagttccttaataaagataaccgcctcatccagcatcctatcggcaagctcgagcttgtgcataaaaagatctactgtctcctcaacaaaattattaagccatcctaccttcactccggtaccaaaaaaaggagcacctcaaccaatgctgagattcacaaaaacaacaaggagatgttgaaaatcgacatcagtaagtttttcccgtctaattcagagcgaaaaatcagaaacctgttcctgtatcagtttgaaatgagcatagacgctgcatcttatctatcaaagctgatctgcattaatggaattctgcccacaggaagccaggtgagtatgcagattgcttacttcgccaataaggtgatgttcgatcgtttaaacactctggccaaagagaataatttgagcatgaccgcttacgtggacgatgtagccttttctggggaaaaaatccctacagggtttcttaagaaggttaagactattgtcaacgagagtggtctaaccatcaagaacaagaagattaagatctaccgggagaagcagccaaagatgattacgggcattatcataaagaataacatgttgaccgtccgcaataaaaacctgcggaagatcaagcaaacgttcttagaaattttcacaccaaatgcacacttatccctggaagaaaaagaagtcatatatacaaggctgaaaggccagttgcatgcggccgggcagatcaataaaagattcaagcagaaggcaaaacacataaacaagaaccagaagaagtacctgaaacagaaccaaactctctga

SEQ ID NO: 10511 - RNA, 903 nt, synthetic construct
  source 1..903: mol_type = other RNA
atggagagtagccctccttgcgactatgccaaatatgtttatgaattggaactgctcagctctcctctttttcatatcacgagtaaaaagcgcctggctattctcctgcacagtagtgtaaaagagctaaacaatatcgtgcgtagcaaagatcagatgtaccagtatttcaacgagactcagactgacaattccggaaacatcattaaagtgaggcccattcagaatccgcacgatagattgaagcagatccactcgagaattgggaaatttctgggtaatctgaaggctcccgaatatctgcattctaagaggtccaaaagcgccatctcaaatgcaaaggcccacgttgggattaaaggccacacacttaacattgacatcaccgacttctaccccagcacttcccgcgccaaggtgcaagctttttttggatacacccttcagtatccaacagatattgccaagtacctgtcagaaatctgtaccgttaagaattgcttgccaaccggatcccccttatcttcagcactggcattttgggctaacaaatccatgttcgacgagatctaccgagtggccaaatcacgggctataacaatgaccgtgtatgtggacgatattagcttcacgggtagagcggtcaatcagaacttcctgaagaagataatccagatcgtcggcaaataccaacacaagatcaagcaggagaagattaagttctttccagagtactctgtcaagttcgtaacaggcgtggcgattctcaatgggcgactacagcctgcacatcgccattaccgggatataagggtgctccaaaagatcgataacgacttacaagccactctgcggctcatgggcaaaaacaactacataaagcagatcaccaaccaggtctga

SEQ ID NO: 10512 - RNA, 903 nt, synthetic construct
  source 1..903: mol_type = other RNA
atgggaaacagtcagcccagtgaccatgctagatacgtttacgatctggaactcctgaactcccctctgttccacatcacctctaaaaaacggctagccatgttattgtgttccagcgtcaaggaattgaaccacattagcaggtctaagaatcagatgtatcagtgcttcaataagaaacagacagacaacaacggaaacgtaattaaggtgcggcccatacaggacccccatgagcgtttaaaacaaatccacagccggatcgggaaatttctcggtaatcttaaagcgccagattacctacacagtaagcgatcaaaatctgcaatttccaatgccaaagcacacgtggggctgaaaggcctcactctgaatatcgacattaccgatttctatccttcgacaagtaaggccaagatccaatcattctttggctacactctgcagtatccaacagacattgcgaaatacatcagcgagatttgtaccgtcaataattgcctgccgactggaagccccttgtcctcagctctggcattctgggccaacaaagctatgttcgacgagatttataggattgccaagagccgctccataaacatgacggtttatgttgatgatatctcatttacagggaaggccatcaaccagaagtttctgaaaaagatagtccagatcatcgaaaaataccagcacaagatcaaggaggagaagataaagttttttcctgaaaacggcgtgaagtttgtgaccggcgtggccattgtaaatggccatctccaaccagctcacagacacttcagagatatgaggcatcttcaaaagttcgacaatgacatccaggtggctctccgccttgcaggtaaaaacaactacattaagcagatcaccaatcattcttga

SEQ ID NO: 10513 - RNA, 915 nt, synthetic construct
  source 1..915: mol_type = other RNA
atgaaaaaacttagctatgtgtcctttgactacgtagaacacatcaaagatctggctattttcaatatacagagcaagcggtacttggcatttgtgctgaagacccagctcccactgcttaaagatatcagccgaaatcccaataacttttacagattcaaggtgaaagagattgtcaagaatgagaagctgaaaatacgtcgcattgaggagccaaattctattctaaagcccatccacaagcaaattcacaacctgattagtcagctccccgcaccggactacctattttctaagaagaaatcatcctgcgtgctgaatgccaaggtccattccctcgctaaaggcaaaacactgaacatcgatatcgagaactttttcccttcaaccgccaagtggaaagttcagaacttcttcggctattaccttcaatataatagggatgttgccgctttttttgccgacatttgtacggtggacggacatattccaactgggagtcctttatcgttgatgcttgccttctgggcaaatcagcccatgttcaacgaactgaacaagctctcaaaaagtcgccaaatcaccatgacaatctatgttgacgacatcagcttcactggggaggctgtgtccgagaagtttaagaacaaagtgatagaaatcgtcaacaagcatcaccacactgtaaatgcggacaaggtcagatttttcggtaaggatctgaagttcattaatggtatagccatagtcaacaaccagttggaacctagcaacgaattatctggcaaggtgcggaatctcaaaaaaagcaaggagatccagtacattaaaaatctgaacggaaaaatcgggtacatcaagtatatcaagaaggtggattccctgaacagggacatcacaaccgaatgcaaatga

SEQ ID NO: 10514 - RNA, 912 nt, synthetic construct
  source 1..912: mol_type = other RNA
atgtcttcacaactgaaagggaattacgagttaaaccagtgtgtgatttacaagctgaagtccaaacggaaattgaaaaaactcctgaatttgtccgaaaatagcaacctcaaaatctacttcaacgacgattatttctcttgctttgacctcatgcaggaagacggctcagccagaaatattcaaaccccaattaacgaactgcagcagattcacattcgcctggcaaatttcttcaagtatgtgaagactcctgattatcttcattccggtaagaaaaagcatagtatagtcaccaacgcgaaagcccacattgatagctcaaagcctaccctaacaatcgatattgccaagtttttcccatccaccaagcgggagaagatcttcaacttcttctacaagaagatgcaccagagcgcggacgtagcagacatattatctcgcttggtatgttacaataaccacgttcccactggtagttcgatctctatgctgatagctttttgggctaacaaagagatgtttgacgaactttacaaactgtgcgaggctaacaacatcattatgacggtgtatgtggatgacatcagttttacaggaaatggagtcgggaaactctttctaaagaaggttacagagatcatcgagcgatatggcctgaacatcaagaaagagaaggtcaagtttttcaaggccaatagccccaaaaccatcactggggtgatagtcaagaacaatagaatttacgccaggaacgaacactacaaaaaactgagggtgatggaaagcgcctataaaatcacaaaggttgaggatgtgattgagaaaggcatcatgcagaaggcatataatggacagctcgcttttctggtccagatccatccgcaacttcgtaataagatggtgttctga

SEQ ID NO: 10515 - RNA, 903 nt, synthetic construct
  source 1..903: mol_type = other RNA
atgacaaaaatgacccctcgttgtagcgcaaactatgacattagccaatccatactctacaaactgcactccaagaagaaattgtctgagatccttggcctccccttatcagtcctcaagatctgcaaaaacgatagctattacagttgcttcgacctcgagcagaagaataagatcaggtcaatccaacagcccattgaccagctgtttataattcaccagcgcatcgcaagcttattaacgagaatttaccaccctgattatctgcatagtggaagaaaaaagcattcgattatcaccaacgcctcccagcatctgatttcggataaaaaaaccctgaccatagatattgagaaattctttcccagtaccacacaaaacaaagtgtttcacttctttcggacaatttttaagcagtctgtggacgttgccgatctgctcagccatctgttgaccttcaataaccacgtgccgactgggtcccctgtatcaatgagtctggcgttctgggcaaataaaaatctcttcgacgaactatctaggtttagcaaaaatcgaaacactatcatgacggtttacgtggatgaccttacatttactggctcaggggtcaactccaatttcctaaaaaacgcttctaagatcatcgaaaaacacaacctgaaggttaagaagtctaaggtattcttgtacaaggaaaaccaggccaagtttataactggaacagtggtccttaataacaagctggaggccgagttcaaacagtttaaagctttgcgcgtgagcgagttcctgtttctcaatgacccaaagaacgaagtgtatcggaatgcttacaatggtaggctggccttcctttcccagatcaagccaaacctgaagatcaagatgaatttcaagtga

SEQ ID NO: 10516 - RNA, 936 nt, synthetic construct
  source 1..936: mol_type = other RNA
atgaatgtgcacaacggaatcaaaatcgaggacagttccctttacaggattaacagagagtgtctatttctgctgttaggtatcaagaataatgacgagctgaagactctcctttctaacaacaactataaggtttacactgttggaccaaaaaaccgcattatagaagagccagacaaaaaactcaagaacattcagacgaagtttaataagctgcttcagcaaatagaaacccccccctacgtcttcgctgggaggaagaaaatgaatcatatctcaaatgccaaggcacatattgattgtaatgacatgatctgcgctgatatcaaaaaattcttcccccacacaaaaatcaagtatctgcaggaattcctggagactaatctcaaatttagtccagacttggccctggacgtagccaacctgctgacaatcaacggccatttacccactggagccccatcatcccccctccttaccttctggtcttataaaatcgtgtttgacaagatctacgatttcgcgaccaatctgggtattaccatgactatatacatcgatgacatgacattttctagcaaaagcaaagtcagcaagaaactgattcctttcgtgggggcagaattgacacgggtaggcctggagttgcacccggagaagttaaagaactttaagtgctcgaagtacaaacatgtgaccggcgtctgtatcgatcggaaacacagactcgtggttaagaatgagcacagggacaacttgctaaagatcctcaacagcaaggatgatattacgcagctgtccaccgagcagattgaaacctgcataggcatgattaaatccatgcaacttattgaacctaagattttcgagcctacattgaagaagctgaaggaaatctataaactccgtcctaaacgaatagtgaagaagcgctga

SEQ ID NO: 10517 - RNA, 924 nt, synthetic construct
  source 1..924: mol_type = other RNA
atgaccattaaagataacttcaaaagcttcgagtccctggataagaccctgaaactgttggacgtgagtctggaggagatgcaacaggcaatcaataagggttacaggcgctacaaaacatttaagaatggcaaatttcggtggatcgaggaacctaatgacgaattgaagattatccaacagaaaatcctgctttacctccagaataatctggaatgtccaacatattgcacggctggattcaaaggccagaacaatatcaaaaacgccgaaaagcatagaaataaacgggaagttctaacaatggatattagccactattttccaaacactcaagagaagtacgtgcgaaaaatattttctgagttcattggcgtagacgacaacgttcttaacttgctagtgaagataaccacctttaacgggtatttacccactggggcagcaacctccacaatattatcttgctttgtgcacaaggagatcttcgacaatattttcaagaagatgaagagcctggacattgacatgaccgtgtatgttgatgatatcacactctccacgcacaaacatatttcaaactgggtcatcagccatatcaacaactctcttcagtcacacggcctcttcctgaaaaagtcaaagataaagaggtatgggtacaagcacgccgtggtaactggagtgcatatcgctcagagcggaaagatgagtgcgcccttcaagattggtcacagtgctatctgtgccctgtgcgataaagacctgaaacagatgtctctcactgagctccgcaaaattatagtcaagatttcgtacatccagcagtttaaccctttgaagatgatcaaagtcaagaaacaagccatcaaacagcttaagaagctgcagaagatctccgccaataagaatgaaagaatttga

SEQ ID NO: 10518 - RNA, 954 nt, synthetic construct
  source 1..954: mol_type = other RNA
atgaatacgctcatgaaaaagcgctacgacattacgcaatgctctttctacaagtgtcgatccaagagacggctaatgaatctcctgatgttgaatgaagaagagttcaagaacatcaagaagaagatttgctaccactcatttacccaggcaaaaaaggatggtgacaagagggtgataacagctccgaacgaggagttgaaacgtatacagaagcgcatactgaaactcttcagctatgtgaagcgtcccgaatggttaatctcaggagaaagagggaaatcctatatcgataatggccgatatcacattaacagcaactatttcctgaccatggatatccgcaagttctatgataattgcaaaagggagtacgtgtaccggttctttaatgacaacctggaaatgtctaaagatactgccgccatcttaacagacctggtgacatatgagggaaaagtgcctactggctgtccaactagccagataatcgcttattacgcctaccagaagatgttccattccatccacaaagtggcagaaatgcacgggtgtaagttttcactgtacgtagacgacatgaccttttcttcctcaagtccatttaatcccgattcgctacggaacgacattgacaaaattcttaggaagtatggtcaccgccctaagtactctaaagtcaagtactatagcaagaacaagttcaaactgatcactggggttaccatcagttctgatcataagctgttggtcagtaacacacttcggaaaaaaatttacgacggcgcgatgtcccaaattgagatggatagacagaagaaggtcaccattccaaaagagcttaggagactcaaaggaagaatccaggctgccagggtggttaatccccatatctttcctgaggtaaaccggtttgttgaggaaaaactgtatagcagtggcagctacaagtga

SEQ ID NO: 10519 - RNA, 966 nt, synthetic construct
  source 1..966: mol_type = other RNA
atgacacaaatacgtaaaaagcacgaactggatcagtgcgccctctacaaatgcaaatccaaacgcaagctcgcttactatcttaagattgattacgagaagctgaagaccatcagcaacataaccctgtaccactcgttctcactgcagaaaaacgatggcgaccctcggcttattactgcccccaaagctgaacttaagaaactgcagaagcgcattttgagactgctcgagaaagtgaagcggccagactatctaatcagtggcgaaaaggggaagtcctacttgaacaatgcgctcactcaccaacattccgactactttttaaccattgatatccgcaagttctacgataattgtaaacgtgagtacgtgtacaacttcttcattaaaatgcttcagaccagtaaggacgtggcctgcattctgactgacattattacgttcgacaataaaatccccactggatgtcctacatctcagatgctggcctattacgcttattttgatatgttcactgagttgaaggagataagtcagcggtttaacagcatcttcaccctatatgttgatgacatgacgttttctagcaagacaagctttaatccaaaagcattggccaatgaagtggatatcgtactgaggaagtacggccacaggcctaagtacaagaaggtgaagtatttttccaaggaggactttaaactggtgacaggagtcgtcatcactaaagaacatgctctcaccgttcccaacagactgagagagaaaatttataccgggtctatggccgagaaggaaagattatatacatataacccccgagaaatttctaaacggatcaagaagctcaggagcatcaagggtcaggtccaggcagcaaagaatatccaaaaaacaatcttcccggagatcgataggctgatagacgacaaattactggacatctcatcacatacccgatga

SEQ ID NO: 10520 - RNA, 960 nt, synthetic construct
  source 1..960: mol_type = other RNA
atgtctctgaagaaaaaacgctacgatctgaatcagtgtgccctctataagtgtagagggaagggacgattggcttacttactccatatgaataaggaggaatttgacaatctagagaaactgatcgaatattactctttcactaccgataagaatgacggcgataaaagactgataaccgctcctcgtaacaaccttaaaaaaatccagaagcggatcctgaagttgattacattcgtcaagcggcccgagtggctgataagtggcgaaaggggtaagaactatattgacaacggcaaattccaccagcagtcccattacttgctcacgatggatattaagaaattctatgagaactgcaagcgggaatttgtgtatcggtttttcaggtacacaatgtgcatgagcggggatatcgcggaaatcttgaccaacatcgtaaccctggaacaaaaaatcccaacaggctgtcccacttcacagcttatagcatactacgcatatcaggagatgtttgagaacattaagaagatcgccaacaaatacaattgcgtgttcactctttacgtggacgacatgacctttagcagcaaaaggccgttcaatccagacaagctgcgaaacgagatagatattgagctgaggaaatacggacaccgccccaagtatagcaaggtgcagtattattcccgcaactctaataagctggtgacaggagtagttatctccaaggatcacaatctcttagtggcaaacaagctgcaaaaaaagatctacgacaacgctatgaaactgaagaaagtcaacggcaacaaaaaagaagccaagattgcctaccaactcgaaagtgacctgagatccctaaagggtcagctccaggctgccagaaatgttaagaaagggatttttcctgagattaatcgcttagtcgagaattcgatgatcaatctttcaaagtga

SEQ ID NO: 10521 - RNA, 948 nt, synthetic construct
  source 1..948: mol_type = other RNA
atggcccgcattgtaaagcgttaccggttggatcagtgtgccctttacaagctgaagtccaaaaaaaagctggcgcattatctgaatgtggactacgagactttcaaggaaaccggcgagcttatccactacagtgctttttccctcaaagcagagggaaagaaggaccggtccatcacagctcccaacagtaaactgaagagtctccagaagcgagttcacaagctattactcaagatcgaacgtcctgaatggcttattagcggtgaaagaggaaagtcctatatcgataatggcaagatgcatcagaaatgcaattatgcgctgtgcatggatatcagatccttctacactaacacgaaacgcgagtatgtgtttcggttcttcattgaggaaatgttaatgagcaaagatacggctaagattgttaccgacatcttgacatttaaggactctattccaacaggctcgcctgcatctcagctcattgcatattacgggtatcacaggatgttccaggagatagagtcaatctcaaccaataaatatggttgtgtgttctctctatacgtcgacgatatgaccttctctagcgagaagccttttcaaatgaaaggcttgagaaacgagatcgacataatcctccggaaatacgggcataaaccaagctataagaagaccaaatactactcaaggaataaagcaaaacccattaccggcactactgtgagtagcaagcacgagctgctgatcccgaactctctgcaattgaagatcattaggggggctgaactgatcctggagaaaccccaggaactgtccagggcccagctcgctagctttcgcggacaagtccaggccgccagaataattcagaaacgagcctttccagaattaaacaagctggccgaagagatgctgtcaaacccccttaagatacctacatga

SEQ ID NO: 10522 - RNA, 927 nt, synthetic construct
  source 1..927: mol_type = other RNA
atggcacgcattgtgcagagatataaactcaaccagtgcgtgttctacaaactgaaatcaaagaagcaactagcttactttctcaaggtggattacgaaaccctccgggaaattaacgagctcatccattacaaatccttttctttgaggaccgaagggaaaaaggatagggatatcacagcccctaataaaaagctgaaggatctccaaaaacgcattcacaacctgcttctcagaatagaaagacccgactggttgataagcggcgagcggggcaaatcatatatcgacaatggaaagatgcatcagaactgcaattatgcactgtgtatggacatcaagtctttctataggaatactaagagagagtatgtgtttcgcttctttaccgaagagatgctaatgtcaaaggacactgctaaggttgtcacagacattctgacctttcagaattcaattccgacgggatctcctgcttctcagttgatagcctactacgcataccaccgtatgttccatgagatcaagtccattgcgacgaacaagcacagctgtatcttctccttatatgttgacgatatgacattcagttccgatactccattcgaagtgaacgtacttcgaaaggagatcgacatcttgctgcggaagtatgaccacaagcccagctactccaagaccaactactacagtaggaacaaagctaaaccagtgactggtacaacaataagcaagaaccacgaactgcttattcctaataccctgcagatgaaaatcaagcgagatagtgagatggtccttcagaaggggcgggaactgagcactaaacaaagagcctcgtttaatggccgcgtcaaagccgccaggattatcgagaaactggcgttccccgagttaaacaaactggccgagcgtatgctgaattga

SEQ ID NO: 10523 - RNA, 969 nt, synthetic construct
  source 1..969: mol_type = other RNA
atgaaagcccccattaagaggtatcctctgcatcagtgcgcattgtacaagtgcagctctaaaaaaaaactcgaacttaggctcaagcttaatgccggcgacgcctccctcctggagaacatgatccaataccataagttcagtatcccaaagaaagacagcactaaacttcgtgacatcacagcccctgccgatgacctaaaaaaggtacagagaaggatcttacggttgctgcaaagaattgagcgtccgcagtggctgatttccggggaacgcggtaaaagctacgtggataacggacgggcacacataaattctatgtatcttctagccgctgacataaaaagcttctacgacaactgtcgcagggattacgtttaccgctttttcaccgagagactgaaaactgccccagacattgcgaagttgctcaccgatatcatcacgtacaagggagggatccctacagggtgccctacttcccagattattgcttattatgcttatgagcggatgttctcggaaatcgcacaggtggctgagcggcacggctgtatctttacactctacgtcgatgatatgaccttttcatctcagacgccctttgatcccaagcgactgaagagggagatagaaatgatactgctcaggtatggccatcgcctgaaggattcaaaggttaaatactatgcgagagacgacgccaaaccagtgacaggcactattatcactaaggagcaccgcctggctaccccgaaccaattacaaaaacggatagtgaccgaattccaggctttgaaggaacagatgaacggccaggccctgacccctgaggaaaagagtagatatgcgaccctgcagggtagaatttacgcagcccgaaatatcgaaccatgtatctttcccgagattcaccgacaggtgacagcagtcaagcactcccccgagaatgggaagggagtcgagtga

SEQ ID NO: 10524 - RNA, 930 nt, synthetic construct
  source 1..930: mol_type = other RNA
atgaatagcgccatgcacaagtatgaaatcaaccagtgtgctctttacaagtgctcttcgaaaaagcgcctcgagcatctgttgttattgaaagagaacgaactgaagcagatcaagcagtatacaaggtattacaactttagcacccctaaaaaagacggatctccacgcaagataacagctccatgcgataaactcaagaagattcaacgccggattctgcggctgctgtcccccataaaacgtcccgattggctcatctccggtgagcgaggcaaaagctatattgataacgggaagagtcatattaacagcaaatacttcttgaccatggacatcaagaatttttacccgaattgccagagggagtatgtgtttagattcttcaccgatgttctgctaacagcccccgatatcgcaaagattctgactgacattataacctacaacaatggcatccctactggatgtcctactagtcagctgatcgcctattacgcctatgagaatatgtttaagagtatctacgagatctctttgaactatggctgtaaattcactctgtacgtcgacgacatgacattctcatccaattttccattcgatcccaaaaagctcgaacaggaaattgacatacagcttagaagatacaaccacaaaccaaagtactcaaaggtgaaatattacccggcgaatacatataaactagttacggggacgactgtatcacctgacaataagctcctggtgaccaataacctgcgacaaaagatagtggagaattttaagatcctcaaaaactaccagaagctgtccaacgacgaacggaagaagaaaatcgattctcttaaaggtcagattcaagcagctaggaatgtcaacaaaaccattttccccgagatcaataggttaaccaacgaccttaagtga

SEQ ID NO: 10525 - RNA, 936 nt, synthetic construct
  source 1..936: mol_type = other RNA
atgagggagaagagccacaaatacgacatcacgcaatgcgcattatacaaaatcaaaggcagtaagcagcttaagaaagtgttgtgtataacggaggaggagtataaggatatcctgtccatcgttcactatcattcctttcagatcgacaagaaagatagtaccgaaaaacggaatattacagcacccgataagagaatcaaggaaatccagacccggatactgaagctgctgcagaatgtcgaaagacctatctggttgattagtggtgaaaaaggcaagtgctatattgataacggaaaatcccatctcaactctaattacttccttaccatggacatcaagaaattctatgataactgctctagagaatacgtctttttgttcttcaagaaccgcctcatgatggctggcgacctcgctggcctgtgtacagacatagtgacttacgacggcgggattcctacaggctgtccaacctcgcagatcatcgcctactacgcctacgaatctatgttcaacgagatatatagcgtagcttgtaaatacggatgcgaatacactgtgtacgttgatgacatgaccttttcagccaaggagccatttgacattaacaggatgaaaaatgaggtagattgcattctacgcaaatatgggcacaaacccaagtataaaaaggtcaagtattacagcaagggaaagtccgtgcctatcaccgggacaatagtgactggtcaacatgagctgaaggtgcccaatcgactgcagaagcgcgtttatgacgattttcaggagctgaagtatttaggagggaaggagctctcagacattgagattcgaaagctaaacagcctgaaaggtaggattctcgcgagccgtaatatcgaagaaggaaaatttccggagatcaaccggcttactaatttcatttcatga

SEQ ID NO: 10526 - RNA, 936 nt, synthetic construct
  source 1..936: mol_type = other RNA
atggcgaagcagtataagaggtatgacatcacccagtgtgccctctataagtgcatctcaccgtataacttgaaacgagtgctcaagataaccgatgaagaatacaaagacatcgtgaaaatcgtcagataccacacattccagatcgacaagaaggacggggtcgaaaagcggaatatcactgcccccgatcggaggatcaaagagatccagacacgcatactgcaactgcttcagaaagtcgagaggcctgaatggcttatttcaggcgagaaaggcaaatgctatattgataacggcaaaaagcatatacactcgaattactttctgaccatggacataaagaaattttacgacaattgcgaacgggagtatgtgttccgatttttcagagataggctgctcatggccggggacctagcaggtctgtgtacggatatcgtcacctacgaaggagggattccaactggctgccccactagccagctgcttgcattctatgcttacgagaacatgtttaacgagatttctgaggttgcttacaagtacggttgtatttattccgtatacgtggatgacatgacctttagtagcgaggtggctttcgatgtgaaaaaaatgcgttccgaaatcgaccaaaagctccgcaagtacggccataagccaaagtatcgcaaagtgaagtattactctcacggacagtacgttccaattacgggtacaattgtgaccggaaaccatgaattgaaggtacctaatcggttacagaagagagtttacgatgacttccaagagatcaagagcttcgaaggccgtaaagtcacttccgaggagcaaaaaaagattaacagtctgaaaggacgcatccaggcctctgaaaatatcgagcccggaaaatttcctgagattaagagactgacaaagttaattgggtga

SEQ ID NO: 10527 - RNA, 936 nt, synthetic construct
  source 1..936: mol_type = other RNA
atggagaataagtggaaaaagtatgatatcacccaatgcgccttttataagtgtaattcacccaagaacctcaaacgaatactccagataaaggatgaagagtacaatgacattttctccattgtcaagtatcatggcttcagcattgataagaaagacggcattgaaaaacggaacatcaccgcacctgataaaagaatcaaggccattcagggcagaatcttacgtctttttcagaaagtggagcggcccgagtggctgattagtggtgagaaaggaaaatgctacattgataatggcaagcagcacgtcttctctaactacttcctaacaatcgacatcaagaagttctatgacaattgtaagagggaatacgtgttccgcttttttaaggatcgcatgctgatgacaggagacttggccggactgtgtaccgatatagttacttacgaaggtgggatcccgacagggtgcccaacttcccagcttatcgcgtactatgcctatgaaaatatgtttaaggagatctacgaggtagctacggaatactcatgcatctttaccgtttacgtcgacgacatgacttttagcagcgagaaagcattcgatgtgaataaaatggttaacaaggtggactgtaccctgaggaaatacggtcacaagcccaaatacaagaaggtaaagtactattcccaggggcaatatgtgcctatcacggggaccatagtgacaggaaaacatgaaattaaggtcccaaaccaattgcagaaaaaagtgtatgacgagttccaggaaatcaaaactctgaacaccgaaaacctgacagacaaggagcaaaagaaaatcaacagtctcaagggccggatacaggcttctagaaatattgaggatggcaagttccctgagattcgaaggctggtgaacaaaatcgggtga

SEQ ID NO: 10528 - RNA, 936 nt, synthetic construct
  source 1..936: mol_type = other RNA
atgtccaaggtgatcaagaagtatgacatcacacagtgtgccctttataagtgtaggtccccaaggatcctgaaaaagcgtctcgtcatcaaggatgaagagtacaaagacataaccgccatcgttaaataccacggttttcagatcgataagaaggatagcactgagaaacgaaacatcactgcccctaacaaaagaattaaggaaatccagactagaatgctgcaactactgcaaaaggtgatgcggccagagtggttaattagtggcgagaagggcaaatgttacatagacaatggtctgaaacacatccatagcaactattttctgaccatggacatcaaaaagttctacgacaattgcaagcgcgaatatgtttttttgttcttcaagaatcgcctgtgcatggcaggggatatcgcagggatttgtacggacatagtaacctataaaaagggaattcccactgggtgccccacatcgcaattgttagcattttatgcctacgaaaacatgtttacggagatttacgaagtggctcagtcccatgggtgcatgtttaccctttacgtcgatgacatgaccttctcatctccaaaggctttcaacgtgaaagagatgattcgcgagatcgattgcattctcagaaaatatggccacaaaccgaagtataagaaggtaaaatactacagtcacggaaggttcgttcctatcacaggaacaattgtgacagcgaatcatgatataaaagtgcccaataggcttcagaagaaggtgtacgatgacttccaggagctgaaagacctgtcaggcaaaaaattgtctgtcgaacagcagaagaagatcaatagcctcaaaggacggatacaagccgctcgaaacattgagaagaataagttccctgaaattaaccggctcacccaggctattggctga

SEQ ID NO: 10529 - RNA, 933 nt, synthetic construct
  source 1..933: mol_type = other RNA
atgcggaaggagacgaaacgatataacatcacacagtctgcactctacaaatgtcgctcgcccaagaaaatcaagaccttgctgcggctggaggacacggaatataagaaaattaccgaaatcgtgggataccacgagtttcaaatcgataagaaagatgggattgagaagagagatataaccgcccctaaccgccggattaagcagattcagtctcgagtcctagaactgattcagaaggtggagaggccgcagtggcttatctcaggtgaaaaaggaaaatgctacatagacaatggaaaggcacatatcagcagcaattatttccttactatcgacatcaagaagttttatgacaactgcaaaagagagtacgtatatcagttcttcaagaataagctgcagatgagtggagacattgcaggcatttgtaccgacatcgtgacttttaaccagggcatacccacaggctgcccaacttcccaactcatcgcttactacgcctacgaacagatgtttgatgaaatctatcgcctggctgtcgagcatggttgtatcttcaccttatacgttgacgatatgacattctcatccatcaaggcttttgacgttaacaggttggtaaaagagatcgactttaaactcaggaaatacgggcataaacccaagtataagaaggttaagtactattcccacggcaaacctgtcccaataactggcgccattattaatgcgaaacacgaaataaaggtgcctaatagcctgcagcagaaggtgttcgagggtttccaggaggtgaagaaactgcaagggcaggaactgagcggcaacgatcaaaaaaagcttgatagactcaaagggcagattcaggccagtagaaacattgagacaaataaattcccagagattaagcgtttagtgaatcaaatctga

SEQ ID NO: 10530 - RNA, 945 nt, synthetic construct
  source 1..945: mol_type = other RNA
atgaagaaccccaagtatcggtacgagatcaatcagtgcgcactgtacaagtgtcagagtaaaaagaagatttgctcactcctggatataagcgacagcgaattcaatactttgcgcgacagtgtgaaataccactgcttcgagatctataagaaggacaattcagacaaaaggaaaataaccgcgccaaatcagcgactgaaaattgttcagaaaaggctcctacaactgattcaatacgtgaaacggccagattggctgatatccggagagaaaggaaaatgctacattgataacgggaaggcgcatatcatgtcccactacgtgcttacgatggatatcaagaacttctatgacaactgtaaccgtgaatatgtctttcgattctttaaggacaagatgctgatggccggtgacatcgccgggttttgcaccgacctggtgtgtcttgagggcgggatccctacaggctgtcccacttcccagctgatcgccttctacgcatatgaagccatgttttttgagctctatgaagttgcctgtgaaaacaagtgcatcttcactgtctatgtagatgacttgacctttagcgctgagaatcccttcaatgtcaatctcttgaaaagggaggccgacatcagactacggaaatatggccatcgccctaaatacaagaaggtgaaatactatggcaaagacattccggcacctattaccggtacaatcctgatgcctgataacaaactgaaagtgcccaacaaccttcaaaagaaaatttacgacaacttccaggatattaagaatctctgtgatgttgaggctatcgataaggtggatttaaagaagatctacacattacagggccagattcaggcagctcgctcgattgaaccagaaaagtacaaggagataggaagaatctcttctgctaaggtacaaagatga

SEQ ID NO: 10531 - RNA, 930 nt, synthetic construct
  source 1..930: mol_type = other RNA
atggttaagaaatactcgatagagcaatcagcactgtacaagtgtagatctctgagacggctgaacacattactcttcttggatacggatagcaaacagatcgccgacatcaagaagtactactctttcgagataaataagaaggacggcattgccaaaaggaagataactgccccaacaaaaaagctgaaaacagtccagaaaagggttctgtatctacttcagaggatcgaacgcccaaattggctgatctcaggcgagaaggggaagagttacattgataacggaaaagcccacatttatagcaactactttttggccatggacattaagtctttttatgacaactgcaatcgggaatacgtgtttcgctttttcaaggattatctgcaggtgtccggtgatatagctggaattctgaccgacattgtcacttatgataacggcatccccacggggtgccctacctctcaactcatcgcgtattatgcttacggcaaaatgtttcgggagataagtgaaattgctcagaagtacgagtgcatcttcactctctacgtggacgacatgacctttagcagccaggaacacttcgacgacaatagcatgaaaaaggagatcgattgtacactgcgtaagtacggccataaacccaagtactccaagatgaaatattattcccacgggaaggatgtactcattaccggtaccgtagtgaacagaaatcatgagcttaagatccctaacaaacttcaaaagaagatctatgatggattccagaatgtgaaggacgtcgacatcaaagaaatggactgcaacaaaaaaaaggaaatcgcttcattgcgagggaaattacaggcagcaaagagtattgagtgtaacaaattctccgatatcaataagatcgtgggaaatattgagaaacagtga

SEQ ID NO: 10532 - RNA, 1035 nt, synthetic construct
  source 1..1035: mol_type = other RNA
atgcgtggcctcatgaaaaataagtcttatcccatcaaccagtgcgccctgtttaaatgcaatagcaagaaacgactagaacatctgctgactattgagcagggcgatctaaagctcgttcaatctatcataaagtacagcaacttcgaaattgataagaagaactccacagagaaacggaagataaccgcaccacaaaagactctgaaacagatccagagacgcattctttacttattacagtccattgagcaccctgaatggctgatctccggaacaaagggaaagtcttacatcgacaatggcaaataccactgtaagtcaagttacgtgctcacgatggacattgagaaattttacgataactgtacccgggaaaatgtgtatagcttcttcaagaacaagatgtgcacaagcagtgacgtcgcagagatcttgactaacatagtgacattcaataacgggatcccaacagggtgtcctacaagtcagatcattgccttctacgcatatgaagagatgttctccaatatcaagaaaatagccgacaagtatggttgtatattctcggtatacgtggatgacctgacgttttcaagcgataaagcctttgacgctgaaaaattgaagcgggatgtggatatcgaacttaggcgatataagcacaaacccaagaacaagaagatcaagtattacagcaagtatgaagctaagccgataactgggacaatcgttaccaaagaacatgagttggccacccctaatagtctccaacataagatttatacggattttcaggacatcaaaaacgactgcctgtcctcagacgaggagctgtacaaaaagatccaggtcctggagggtagaatccaggcttctaaaaacattgagattggagccaacaaatttccagagatttctagacttaccaataggattaaagagaatacccccattcccacccaacctaccgtcactaggaaaaataccaacaagaaggctaaaatccgcattaaaaattcaactcaggcgtga

SEQ ID NO: 10533 - RNA, 1011 nt, synthetic construct
  source 1..1011: mol_type = other RNA
atgaaggcaaaaaagtaccctttgaaccagtgtgcgctttacaaatgcaactctaagaggagactagagaaaacgctcactattgaacagggacaattgaagttgatcgattccgtaatcaaatactctcacttcgaaatcgataaaaaggatagtaccgagaagagacaaattacagccccaaagtataccctgaaacagattcagaggcgaatcctgcggctgatccagtttattgagcggcccgaatgggtcattgctgggacaaaggagaagagttatatcgataacggggaattccacctgaaatcaaactatgctcttatggtggatataaagaagttctatgacaattgcaagcgcgagtatgtctacaggttttttagggacaaaatgctaaattctcccgacgttgccgaaatactgaccgatatagtgacgtatgagggcggtgtgcccacagggtgtcccacatcacagctcatcgcctactacgcctatgaggacatgttcgcgaacattaaacgaatagcagataactacggttgcttattttcactgtatgttgatgacatgaccttttcgtccgaaaagccatttaataaagacgtgctcaaacgcgaaatcgacattgagctgcggagataccagcataagcctaaatacaagaaggtgaaatactacagcaagaacgacccaaaacctatcaccggaactatcgtgactaaggataatacacttgtagcccccaataaactgcaggagaaagtttataagggcttccaggacataaagaacctggacatcgacgataattccgaagagactattaagaagatcgctgcactccagggaagaattcaagcctcccgtaatattgaaaagaataagaagttcccggagatcgagcgcattactaaacaaatcagcaccgagcatagcggcagtgtccctgctaacccgcctaaaaagagccgcaaacgtccacggaagataaggattatcaaatga

SEQ ID NO: 10534 - RNA, 1029 nt, synthetic construct
  source 1..1029: mol_type = other RNA
atgaaagccaacaaacaaaaataccctctggaccagtgcgcgctatataaatgtcgaagccgtaaaaagttggaatccattctggcaatagaacagggcgatttgcggaacatccagtctgccatcaagtacagttcatttgagatagacaagaaggattcgagcgaaaagagaaccatcacagctccaaaaaggacaattaaggctgtccaggcccgcatcctgactctgattcagcgaatcgaacggccagaatggcttatatccggggagaagggaaaatgttatatcgacaatggcaaggcgcatattgggagtgcctacgtgctgactatggacattaagaagttctatgacaactgccggcgcgaatatgtgtataggtttttccttgacaagatgcagacggcaccggatgttgctaaaatcctgaccgatattgtcacgtacaagggcggaatacctacaggttgtcccacatctcaactcatcgcctactacgcatacgaagacatgttcaaacagattcaggcttgcgccgagtcctatggatgcatctttactttatacgtggatgatatgaccttctcctcaaaagaccctttcccccaggagaagctgagccgggagatagacattatcctccgtcgctacggtcataaacccaagtacaaaaaggtggttttcttcgcaaaggagaaacccaagccaatcaccggcactatcgtcaccagcgatcacgagttagaggtgcccaacagactccaggagaagatctataacggatttcaggggatcaagcaactctctgagcaaaatgacttcaaacagattgatcacgctgcacaaattcttctggggcaggtacaagccgctaagtcaatcgacaataaaaagtttccggaaattgaacgcttgaccaaggagatcaggaatattcaggagcctcagagggattttaaaccaaagccaccccatagaaggaaagccaaaggcaagatacacattcctaagcctagaacaaattga

SEQ ID NO: 10535 - RNA, 1035 nt, synthetic construct
  source 1..1035: mol_type = other RNA
atgaaaaataaagtccctatcaagaagtacgatatcacccagtgcgccctttataaatgtaggaccaggaaacgactcgagtatctcttgcgtctcgaccctggcggactgaagattattgatggcatcatcgggtaccataagttcgagattgataaaaagcacagtgatgagaaaagagagatcactgctcccgataaaaccctgaaggccatacaacgcaggatcctgtacctgctgcagcgggtgatacggccagagtggcttatttcaggcgaaaagcagaaatgctacatagataacgggaaggcacacctgaatggcaaatatgtgttaaccatcgacattaagaagttttatgacaactgcacgagagaacctgtttatcaatttttcgtgcagaagctggagactagcccagacgtggccgaaattttaacaaacatcatcacctacaacgggggaatcccaacaggttgccccacaagccagattatggctttctacgcgtactcagatatgtttagcgaaatttttgacttggccaagcaacacggatgtaagtttacgctgtatgtcgatgacatgaccttctcaagcaaggagcctttctccccacatcagctatctcagatgattgacagagttcttcgcaaatacggtcataagcctaaatacccgaaagtaaagtactatggcccctcggactacaagccaataactggcacagtcgtcacaccggagcactctttggctgtgcccaacgggctccagaagaccatatatgatgctttccaaactgtgaagcccctcatcggggtggaaacatgttctgaagaggacgcccggcaaatcctgagcctgaagggtcagattcaggccgcatgtaatattgaagacggaaagtttccagagatacgaagactaactaatcagatcaaagtacccgactcccagtccgtttccaccaggaaacgccagcatcaccgtcggagtaaaaagatccacatcaaacagcaggcacctattaaatga

SEQ ID NO: 10536 - RNA, 1011 nt, synthetic construct
  source 1..1011: mol_type = other RNA
atgaaaaacaagactcctctgaagaagtacgacataacacaatgtgcgctctataagtgtaggaccaaaaagagactggagtatctgctgcggctcgaatcaggctcactaaagatgatcgactccataatcgaataccataagtttgagacggataaaaaacatagcactgagaagcgcaagataacggcccccaataaagccttaaagactgtgcagaagcgcatcctttacttattgcagcaggtgctgcgacccgactggctcatttcgggcgagaagcggaagtgctatattgacaacggtaaagcgcatttggatgggagatatgtgctgaccatcgatattaaaaagttctacgatcactgcacaagagaaccagtataccacttcttcgtgcagaaactaaagacaagcccggatgtggccgagatcttgaccaatattatcacctacgatggctcaatcccaacaggttgtcccacctcccagattatggccttttacgcttactttgatatgttctcagaggtctatgacatcgcccagaaatgcgggtgcaagtttactctgtatgttgacgacatgaccttttctagtaaagaaccatttagcccacaccaactgcgacaaatggtagaccgtgtgctgcgcaagtacgggcaccgtcctaaataccccaaagttaagtattacggaccctccgattacaaaccaattaccggcacaatcgttactcctagacagtccctggcagtccccaacggactgcaaaagaccatctataatgcattccagagtgtgaaaccgttcatcgacgcagaaagccacagtgaagaggacgtcaaacagattctctccctcaagggccagattcaggctgctcggaacattgaggaaggaaagttccctgagatcaggaggcttatcaaccagataaggattcctgataatcagacagcttctaaacaaaagtcttatgcccggcttcatagcaaaaagtctgagtga

SEQ ID NO: 10537 - RNA, 984 nt, synthetic construct
  source 1..984: mol_type = other RNA
atggagaaccccagcttaaaaaagtatgatattacccagtgcgccttctataaatgtcggaccaagaagaggctggcctttctattgtgtcttagtctgaaagagctcgagcacatttctggaatcatcgagtaccatagcttcgagattgacaagaagaatagtgaagagaaaaggaagatcactgcaccatccaaagagctcaagaccatccaaaggagaattctggcactcttacagcgcgtgattcgacccgattggctgatctctggcgaaaaagggaagtgctatattgacaacggaaaagcccacataaatggaagatatatactgacgatggatatacggaagttctatgaccattgtgttcgtgaagcagtctaccaattcttcattcagaagatgaagacaactcctgacgttgccaaactgcttaccgatatctcaacctacaacctcggcattccaacaggttgccctactagccagctcattgcgttttacgcctatattgacatgttttcagaaatcgcggccatcgctcgggagtatgggtgcgtgtttaccttgtatgtagatgacatgacattttctagctccaaacctatccaggtgaacaatttgattcggaagatcgactgtatcctacgcaaattcaaacacaaacccaaatactccaagatcaagtaccatcacccgtcagattacaagcctgtgacgggcactgtcatatcgccaaatcagacactgcttacaccaaattctcttcagcacaagatttacatcggcttcatcaagttgaagcccaagctgtttgaaaataacgaggccctcagtaatgaagagggcaaagagctgcaatccctgaacgggaggatacaggctgctagaaacatagaagagggaaagtaccccgaactgaaacgcatcatccataatagccaggcagctatcagatacaacggtaagcgaaagaaaatttga

SEQ ID NO: 10538 - RNA, 924 nt, synthetic construct
  source 1..924: mol_type = other RNA
atgcaagacaaatttagacgatacgacatcaatcaatgtgcgttgtacaagtgcaagagcaaaaaaaagctcgaaaagcttttgaatctgcagatcggtgaacttaaatacattaacgtgatcaccacttactatcacttcgagattgcgaaaagttctagtcacgagaaaagagctgtcagtgcaccttcaagcaagttgaaatccatccagagcaggatactaagcctcatccagtatattaaccgtccagggtggttgatatcaggcgagaaaggaaagtcatatataaacaattcccagtgccatatcagcgccaactatctgctcgccatggacattaagaacttctataacaactgcaagcggaatcccgtttacctgttcttccttaatgagcttaaaacttctcctgatgtggctaacgtgctgaccaatattgtgacctacgaaaatctgatccccaccggtgctccaacctcccagctcatcgcctttcatgcttatactaacatgtttacggaaatcaaccaaatggccctgaattttgggtgtatctttacgctgtatgtcgatgatatgacatttagttcgtctgttcccttcaatcacatgagcctgtcttgtaatatcgacaagattctgagaaaacatggccataggccaaagtacaaaaagctaaagtactactccaagaacgaatctaaacctatcacaggcgccattctcacccctacacacactatcaaggtacccaataagctccgctacaagattcacaacacattccagaagataaagaataactccaacttcagcgatgaggccaaatcagagctgctgacattaaaaggacgcttacaggcagcaaaatcgattgagaagaacattttcccggagatttcccggataatcaattcttga

SEQ ID NO: 10539 - RNA, 969 nt, synthetic construct
  source 1..969: mol_type = other RNA
atgatcaacaaaaacaagctctataggtatgacatctcacagtccgcactgtacaagtgtagaagcaaaaataagttgagcgagttcctaaaaatctcgattaaagatgtggacaagatcattaagtactacaccttcaacatacctaaaaaagatacctccaaaaccaggcaaatctctgctcctcagaaaaaactcaagactcttcagaaacggttgctgtatttaattaagcgcattaagcggccaccctggttgttcagcggggaaatgggcaaatgctatctggacaatggtaaatatcacctgaataatccttacgttctgactatcgacattaagagtttttacgaacattgcacacgaaacgctgtgtacttgttttttcttgagaaaatgcagacctctccagacgtagcaaaaatcctcacagatatcactacactggataaaaagctgcctactggaaccccaacatctcaactgatcgcctttcatgcctatgaggacatgttcaatgagattaacaacctcgcaaagtcgtacaactgtatcttttctctttatgtggatgacatgacgtttagtagctcctaccccttctcccccaagaatctgacttacaaaatcaagaccatacttcacaagtacaaacaccatctgagttccgaaaaggtcaaatactatagcaaagacatggcgaaggatattaccggactgatactcaccaaagacaaccagatagccatcccaaatagactccagaagaagatttatgacaacttctccaagattaaggattatgaaaagatgacagtgtacgataaggagattatcaagagcattaatacgctgaaaggccaattacaggctgccaagaacattaattataatgtcttccccgagatcactcgcatagtttactcaatcaattgcaagacaaacaagaagccgctagggaactcatga

SEQ ID NO: 10540 - RNA, 912 nt, synthetic construct
  source 1..912: mol_type = other RNA
atgatgatgatcaaaaagtatgacatctgtcaatccccgctgtacaaactgaaaaataaaaggcgcctggaaaagattctcgggttggaaaaatacgagctgaataagctcaagttctggaacaaatacaaatcgggaaaaattcctaaggacgatggagactttcgcgagataaatatccccaatttcaagctcaagaaggtacagaagaaactgcagatcctgttaagcaagattcaacgaccagaatggctgattagtggggagaagaataagtgttatattaacaacgcacagtaccacataaagagcaagtatgtgattaccgccgacatcaaaaaattctatgacaattgctctcgtgagagggtgtatctctctctggtgaataagtttaaagtctcatccgacgtggctggcgcgatcacagatattgtcacatataacaagaggattcctacgggtgcctccacctctcagcttattgcttactactcatatgaagacatgttcaacgagatcaatactatctcacacaagtatggatgcaaatttagcttatacgttgacgatatgactttttccagtatcaacccaataaacgttcagtctctaaagagacaaatcgacatcatcctgagaaaatatgggcatcggttgaaaagtaacaagttcaagtactacagcaaagatgaagataaactgatcacaggcgtgacccttaagtcaaataacagtctcgccgtgagcaatcggttgagatacaacataatcaaggatttcaagggcatcaagtaccgaaaagattctaacattaagctacagagcctgaagggtcggataaccgcagccaaaatgatagagaaatccatttttccccagattaataactacgtctccaaccttaattga

SEQ ID NO: 10541 - RNA, 939 nt, synthetic construct
  source 1..939: mol_type = other RNA
atgcgaaaacagcctccgaaattctataacattaatcagtctgctctctacaagtgtcgttctaaaaggaaactcgcagaactactgaagtgcgatctcaagacaatccagcagatggctaaggatattaagctgtattacgacagcttctcaatgtccaagaaagattcagaaaaggttcgcaaagtagatgccccaaatgagcaactcaaaagaacgcagaaaaacattcttaaactcctacagcggattgaaaaacccgactacgtgatgagtggaacgctgggcaaatcccatattgataacgcccagtaccacataaaggggtcctactttttaaagaccgacatcaaacaattctacaataactgctctagggatcgggtgtacagattttatgtggacaagatgaaaactagtcccgatgtcgccaatatcctgactgacttgacaacatacaacaacatcattccaaccggttcgcccagcagccagatcatagcatatttcgcgtatgaggacatgtttaacaatatgtacatcaaggcaaaggagaatggctttctgatgagcctgtatgtcgatgacttagtcttttctcggactgactatatagactataagtcattcttgagagagattgaggttgaagctttgaagttcaatcatagtctgaaaaagtccaaaaccatgtattacagccctaacaggtctgcccttgtgactggggtgattatcaaaaacaagaagatgaagatcccaaatcgcctgcgcaataacaccatccttcaatacaagaacataaagaaggacaagaacaaggatgagaaaaccgaactgagtctgattggcagcatcaactccgcccgaatgatcgagcctaatcactttaatggagtgttctcattctacaaacagatcaagaaaacacccaagtga

SEQ ID NO: 10542 - RNA, 927 nt, synthetic construct
  source 1..927: mol_type = other RNA
atgaagaagaagaaactgaagttttacaacatcaaccaatcattactgtacaaatgtcgctccaaaaaaaaactcgctcagtatcttcattacgatctgaaatccttgaagaagatcatttctgagattgactctcattataacttcttttccaaggacaagaagaatagcgataaaaagcgggaaatcgaagcaccaagcgacgagctgaagaaaatccagaagaacattttgaagtacctgaagaaaatccagaaacctaattatgtgatgtccggtacactggggaagtcgtatattgacaatgccaagtatcacattaacgagaagtatttcctcaaaaccgatatcaaacagttctacaagaattgctctagggaccgcgtatacaggttttttcttgacaagatgtacacgagtcctgatgtggctgagatcctaactaatctgactacatatcggaatactatacctaccggagcacccagttcacagctcatcgcttatttcgcctatgaagacatgtttaacaacatgtacagaaaggcaaagaacaacgggtttaaaatgtccctttacgtcgatgatctcgtttttagcagaaacgattacattgacttcaagagtttcctgcgagagatagagattgaagctctcaagtacaatcacagcctgaaaaagagcaaaaccatgtactattcaccaaaaaaagcggccctcgtcaccggcgttataatcaataagggcgagcttaaaattcccaacagactgcgtaataacgccgtgcatcaataccgggacattaaaaacaatttcatcgatgacaaggtgttactaagcttcatcggaaatatcaactctgccaggctgatagaaccgaatcactttaatggcttgctgtcattctataaaaagacacccaaatga

SEQ ID NO: 10543 - RNA, 933 nt, synthetic construct
  source 1..933: mol_type = other RNA
atgcccagaaaaaaaaccaacgtaaatctgtatgagctgaaccagtgtgtgttctacaagtgttattccaaaaagaagctcgccgagatccttaagattactctccgggaacttaagaatacttcatggaacgcaaatacctcttactatcagtttagccagaaaaagaagggaaccgacgagctgaggaagatcaccgcacctgataaggagctcaagaaagtgcaatctacaatttactctttccttcggcgcattaaaaagcccgagtgggtcatatcttccacactgaagaaatcatatctaagtaacgccttgtaccacaagaaaagcaattacttttacaagaccgacatcaaaaagttttacgataattgccaccgcgaccgcgtgtatcgtttcttcaaagacaagatgaaaacatccagcgacgtggctaagattttgaccgatctgacaactaacgaaaacatccccacaggctgcccgagctcacagctgatagcttactttgcctacgaggacatgtttaataacatcaagatcattgcggacaaatacaagtgcattatgacgctatatgtggatgatatagttttcagtaacgccgacaagttcaattatagggccttaatccgagaagtggaaaatgaggtaagacatttcgatcacagtctcaagaagtccaaaaccaaatattacacgggggaaaaaggagcaccaatcactggtgttatcgtcaaaaataacttactgtacgtccctaacagcaatagaaaatcgatactggatagctttagtctcgctaaaggcattaataagatttccgagaaagagttcaagtctttgagggggaaggtgaatgctgcccggctgatcgaaaagaaccattttaacggcatcaactcatatctgaaaaagaacaatccatga

SEQ ID NO: 10544 - RNA, 924 nt, synthetic construct
  source 1..924: mol_type = other RNA
atgaacacactcacaaattggcgcaaaaatgacctcaagcagtttaagaagtatcctattcatcagtgcgccttctataagtgcaaaagtaagaagaagttggcctcgcttcttaagaccgacctgaaaaacttgaatcggctgagtaagtcaatcgaacaggagtactacacctttaacaaaaaaagacagatcaccgcacctaaaaaagaactaaaggcaattcagaaacgggtcctcaatctcctgaataaaattgaaaagccggattgggtaataagctccactaaagaaaaatcctacctggacaatgctcactatcacataggagctcaatatgtgtgtacaactgacattcgctcattctataacaattgtagcagggatcgagtgtatcagtttttcgccaaaaaactgatgaccagccccgacgtcgccaagctgctttcagatattacgacacttaaatacatccccacgggctctccctccagccagatcctcgcatactttgcctacgaggagatgttcatcaacatgtttaatatctcccaaaagttcaactgcaaaatgaccctgtatgtggatgatctaacctttagcaaggactctagcttcaattatcagaacctgatcaatcacatcgatatcgaagctagaaaattcaaccattctctgaagtacaagaaaactaactacaagtctgttaagaagggcgctaagataactggtgtgatactgaagaactacgagctcaagatcccaaactcattacgtatcagtattttgaaggacttcgagaacattaagaataaccaggagttgaagcaccaagttatgtctctgaagggaaaaattaatgccgcgaggctgattgagccaaaccattttaatgggaccaacagttacgtgaaatccttatga

SEQ ID NO: 10545 - RNA, 921 nt, synthetic construct
  source 1..921: mol_type = other RNA
atgaagcaccagaagtaccacagcataaaaaatagccccttttttcggctgaaatccatcgacaaattagccgagtacctgaataccaagagcaaacggttgatttacttggagaatatgccactgacggaaaggtatcggtgctttccacaaggaactcgcgatattcagcagcctatcggcttcaataggtttatccacaaccgcctgcatacccttctttcaaggatcctgagccccgattttgtgttttccggaaaaaaggggttctctcatgtcgataacgccctggcacacctcaatagcaagtatgcagctcttatggacattgaaggcttttatcgcaatagtaagagagagtacgtgtttcgattctttctcaaaaaactggagatggcctcagatatagcgaacatcctaacaaacatcgtatgtttcaatgacttcatccctacaggtagcccgctgtcacagctgatcgcttactgggcctattccgacatgttcgaggagattgaaacagtcgcctcttcaaacaatttcattttcagcttgttcgtggatgacctcactttcagttctcaggacagaatacggcacgacttccatctcgagatcaacgctattttaaagtcgtatcgtctcaacatcaaaaggaagaagctacagtaccgtagtaagaaccaaaccaagattataactggttgcgccataacccccgataataagatcaaagttagaaacaagcaccgagtgaagtacatcaataacctgcagctcttactggggtcgcatcagaacagaaaggatgagaaactgattgactccgctctcggcttgattagttccctgcaagcaatcgaacctcaaattttcatggaatctaaacgcatccttaaacagaagatttccttttcttga

SEQ ID NO: 10546 - RNA, 915 nt, synthetic construct
  source 1..915: mol_type = other RNA
atgaggaaggtaaacaaaatctacgatatcacattctctccgctttatgggattaagaataagaggaaattgcgcgaactacttgatatcggtactaatgaggagctcattcatctgcctctaacaaattcatatcggattttctccatcaacggccgcgaaatccaggagcctattgggctgctgcggaagatccacgatagattattccgctacctgtccagaatcgatacccccacgtatctttatagcggcaagcgtggcctgtcctacgttgacaatgccaaaagacacataaacagtagctacttcttgaaaatggacatcaagggtttctacaaaaacgcaaaccgagaatacgtgtttagattctatagatatcggctgaaccagtcagacgacatcgcgcatattttagccaatatctcgtgctacggaaaaatcattcctaccggaagcccaatctcccaacttattgcttattggagctacaaacagatgtttgacgagattgccatcctgaacaaagataagatatttacactctacgtcgacgacctcaccatatcatctgtggaactgagcttggccaaaaatctccacctgcaggtgcaggcaattgtcaagaagtaccgtctggatctgaaaaggaagaagattcgctactataacaagagggagaacaagcacatcaccggatgtgttattactagcgaccacaagtttagggtgccaaacaaacatcgaaagaagctcattagtatcatgcggaaatatccctcattgaatactataccagagggggagctcatgaaattaaccggcctgatttcttcctctcagcaaatcgaacccgatatatttatcaatacgaagaagcggctgagtcaaataatcaaaaagcagctcgcttga

SEQ ID NO: 10547 - RNA, 930 nt, synthetic construct
  source 1..930: mol_type = other RNA
atgcacacagtccatggaaatttcttctatactctgtcgaacaagaaacgcctggccaagtacttaagggtgtcattgaaggaattactcacgctgcaggatgactcaaactataaagtatggtttgaggaaggcgagaatgggaaactgagggagattcaggaacctagttacaagcttaagtctgttcactctattatccagaaaagtcttgcttccatcgtagcacctgaattcctattttccggcgttaaaggtaaaagcaatatcagcaatgccagctatcacaaggatagcaactatatcgtgacggctgacattcgttccttctacatcaattgcaacaaggagtacattttccgctttttcaaatacaccctgcacaccagtgatgatatagccaggatccttactgagttgtgttgctacaaaacattcctcccaacaggcagcccggtgtctcagatcctggcataccacagctatgccagaatttttaatcggatagacgcctttagtaaagcgaatgggatcacattctccctctatgtggacgatattactctgtcgtctgaaaagagtattcatccatacatcctgaagaaaataagcaagctgctcgagtcagtgaatttatcattgaaacgagagaagaccaagttttactccaagaactcttataagatcgtcaccggttgtgctataagccctgaccatattcttctccggcccaacaagataatgagaaagatcaacaacaagttgtgcaaacatgaaaaggacctgtcaaaactgacttccaaagagattgagtctgtcctcggacaggtgatttacctgcggtccatcacccccaacagctattctcaactgtttaaatcactatccctcatgaaggcagaggaaaagatcaagcaaagacccctgtga

SEQ ID NO: 10548 - RNA, 927 nt, synthetic construct
  source 1..927: mol_type = other RNA
atgaagacattgaaataccccattaataagtcctcactgtacaacctgcagaacaagaaaaaactgaaacagctgctctacatcgataattctgagttcaattacttcgccaaacaggtcaatatagacaatgaataccacccttttgttaacaaaaaggggagaggcattgacaatcctagtaaacggcttaagaaacttcattctcgtatccagaagctgctaagccgaattacttacccaaagtatttatattccgccgccaagcgctctaacatcaagaatgtgctgaagcacaaaaaccataagtacatgttcaagacagacattaacaagtttttcccaagtagcaagaaggagtatatattcagggcgttcaaatacaactttcagatgtcagaagatatcgcatggtacttagccaatcttgtgtgctacaatgaccacctcgctaccggaagccccgtgtcaactattctgtccttttgggggtacaagggcgtatttgattccatttatgcactcgctaaaaggagaggcatcaccatgagcctgtttgtggatgacatggcattttcgtctaacaagtatatcccaatctccttcaagtctaagatagagaagtatctgaaaaacgttgatctaatcctctcactgaagcccagcaaaaatattttctataagtccaacgaggagaaaaaacttacaggtgctatcataaccactgacaaaaagctgaaaatcttgcctgaaaccgagttgacgattaaggatctgctcaacaatatcgaaaacctcaaccatcaaaaactcaaaagtttgctgggaatgttgcaatatcagaagcaggtggagaaaaataacccgaatattacagaacacatcagcttagtcaaggccaagatcaagaacctgattagtaaatga

SEQ ID NO: 10549 - RNA, 903 nt, synthetic construct
  source 1..903: mol_type = other RNA
atgagtaataagcaatacaacatccaccagtctccactgtacaagttaaactctaagtccaagctgtcgtccatcctgcacatcgataacctggccaatcttctgcgggacggtcactacaacaggtttgagatgaatgggaggcagattgaatccccctgcaaagaactcaagagagtccataagcgggtgcttaaactgctctcaaggatcaacacccctgattacctgattagtggtaagaaaggcttaagctatgtggataatgcaaaagttcatacccgcagatgcaatttggttaagatggacattaagaagttctatcccagcagcaaaaaagaatacgtattccgattgttccactacaaattccgcatggccgaggacgttgcttggattcttactgagctccttacatgcgacggccatattccaacagggtcacctgtgtcacagatcttggctttcatgatctttgccgacacattcgaagagatcaacaatctagcaatcacccacggctgttgttttaccctctacgtcgatgatattactatatccagcaccggcaacatccccagaaaactgatctatgccatacgcaacgagctcaaaaaggtaaacttaaacctgtctggaaaaaagacgcggttttatagcctgaacaaaaccaaatgtgtcacgggatgcgtgataacacctgatggcgaactgcgtattccaaataagctccaccaaaagatccatgagaaatctactatgctgaataaggagggactgtcaccgcatgaccaccaggtgctctttgggctattgaatgccgcacaacagattcagaagagcacttttcccagtctgtatagggaggctaagcgaaatttcaagatatccgtggcgcagtga

SEQ ID NO: 10550 - RNA, 912 nt, synthetic construct
  source 1..912: mol_type = other RNA
atgaaaaattacagcctcgaaaagtctccgctcttcgggattcctagcaaagcaaagctggccgacctgctgaacgttgggaggtccgatttgttagctatgtctcggaaccccacttactctttctttaaaattcggaaaggagagaagtttagggacatagaggacccaaaccctgacctaaagaagctgcagaaaagattgaaccgactcctgtcccggattcaggtccccgaatatgttaaatcaagcagaaagggaatcagctatgtagacaatgcgaagtttcatcttggattcaattgtaccgccaagttcgacattgataagttcttccgaagcacaaaaagagagtacgttttcaggtgctttcactacacatttggcatgcccggcgatctcgcgtggcttctcacggatttagtcactctcgatgggcacttaccaaccggcgcacccacatccccactcctggcttattgggcatacgccgacgtgttctcccgcatgcatagcctggccgaaagtcggggcgccgtgatgtcgctgtatgtggacgatgtcgcagtaagtggaaatcaaccattgaaaagtgagtttcgtgataagctgtcaagtatagctggcgattacgagctgaaacttaagaaggacaagacccactattatttggaaggtgagacgcgcctgataactggctgcgccctaaacaccgtgggtcaggccattgtgcctaataagctgcgcaggaaaatctcaatcatgattcagcaaagagatatctctgacatgacagaaaaggagatccgcagactgtacgggcttctgaactccgctaggcagatcgagccggacttttctcccggtttgttcggacgggctaaatcacgtatcgaaacccttcctgtgtga

SEQ ID NO: 10551 - RNA, 990 nt, synthetic construct
  source 1..990: mol_type = other RNA
atgtcccagatgaaaatatatcctttggagaattcacccctatatcaactgtgcaacaaaagcaaactcgaggaacttttgggcctacctaagggctatatcaataactttacctattctagggagaattaccactgttggcatcagctcaagaaaaacaaaatagacacacgccccgtggaagatccttgcggtatcttaaaaaaggctcagagtaagctgaacaaactgctctcacgcatttacaccacagactacctgatgagcgggaaaaagcactccaattacatcaagaacgccaagtaccatcagaataatccatatgttttctgtttcgacctctccgccttctttcagacagcaactcgacactatgtcttttctgcgttcaagaacgagttcttaatgtcagaagacgtagcttggatgctgaccgatcttgtcactatcccaaacatcgaaaacacagatggatatatcccgacgggctcgccgagtagccagaatgtgatttactgggcttacaaaaaggcctttgataccctctttagagtggctgagtcgaaaaagctgaaattctccctttatgttgacgacatgacgttcagtagctccaggcccataagtaacaaatttccacagttgatccaaaagctgtgtagcaaagtgggtttgaaaatcaatagcaaaaagaccaggtacttctctaagaacgatttcaaggatattactgggaacgtcatttcacctaaaaaagaacttaaggtgcccaaccgtagacggaaggagattctggacattctggcattcaaaaacatcaaggacatgaatgtgaaggagattcggagcttttacggaaagctgtgctctatgcgccagatagagcccaatatctttccagcactctataatgaagccagatctcagtactacaagctgggagcccaatacaatcagtccaagcaatttatgaaggggcgacggaagtga

SEQ ID NO: 10552 - RNA, 990 nt, synthetic construct
  source 1..990: mol_type = other RNA
atgaagcagattaaaacctaccccattaataatagccctctgtacagactgtcaaataaatccaaactggcggagttgctgggcgtgtcaaagaaatacctggaacatttcaactatagtcgggacaattataagtgctggaagcaaaaaaagaagaacaaaaagggagcacgaccagtagaagacccaacactcattctcaaaaaagcccagtcaaaactgaataagctcctcagcagggtcattacaaccgactacttaatgtccggcaagaaacactcttgttatattaacaacgcacagtatcaccttaacaatccgtatgtcttttgctttgacctgcacacatttttccagaccgcctcgaggaagtacatcttcaaggctttcaaaaatgagtttcagatgcccgcacatatagcttggttgatcactgatcttgtgactattccaaagctcgataacagcgatgggtacatccccaccggcagtcctagctcccagaacgttatctactgggcttataaaaagacgttcgacaagttactggagatagctgaggcgaaggcccttaccttttctctatatgtcgatgacatgacgttctcatctcaaagacccatcagcgccactttcccgaaactcatccagaaaatgtgcgcccgcgtgggtctggagattaacgaaactaagacacagtacttctccgccaaggactataaagatgtgaccgggtgtatcatatctcctaaaaatgagctgaaggttccaaaccgacgtagaaacgaacttattaacatcgtgaagaacaagcctatcgaggaaatggatattcctgaaatacgcagtctatatggtaaattgaacagcatgcggcaggtggagcccaatatctttccacagctgtacaatcaagccaggaagcgctactacgagctgggagcacagtacaataccaagtccaagcaaaagatccggaaaaagaaatga

SEQ ID NO: 10553 - RNA, 987 nt, synthetic construct
  source 1..987: mol_type = other RNA
atgctgaccattgaacaatcatggttctaccgtctcgggagaaagcgcgacctagctgcactcttgaatcttagtctctctgagctgaaggctcttactaatgacaaaaacttcgagccctgggaaaagacgtttccagacgggaaaaaaaggttgatagaggagccgcagccccagctgaaaaaggccctgaccgaggtgcaaaagatcctgtctcatatccagacccctccttggctcatgagtggtaagaagaagatccaaccgcgagacaacgcaatcgcccacattaaaaacgcctacatgatcagcgtggacatagccaaattctatcaaaacagcaagagagaattcgtttatacactgttcagggacgattttaaacagactaccgatattgcctccctacttgccgatttagtcacctacaacggacatattcccacaggagctcccagcagccagctcctagccttttggacatatcggaaaacattagagaagattcatgcagaagcatccagacagcacataactatgactgtatgggttgatgacatcaccttttcatctcggaaacctttgccaaagaactggctgacatttgtcaaaaggagtctggataagaccgacttgcacctgaagaaggagaagataaagttccatggtcagaaggatcacaaaatcactaccggctccgcgatctcacctaaaggcgtgctgaaggtgaagaatcagaagcggctggaaattctctccttgattaagagcaagaaaatcgaacaactgacactgaaggaggcccgctcattactgggcaagctgactgcgcagcgacagaatgagccagatttctttagtagcacgtacattaggtgcaagaaacacctccggaatcttgaaaagatgaaacagaaagagtcgtatcacaagaaacccaaacgcatcaaatcccttaaacagaaaccagctgctcagtctagatga

SEQ ID NO: 10554 - RNA, 1032 nt, synthetic construct
  source 1..1032: mol_type = other RNA
atgagtaaatgttatccgattgagtcaagcccactttatagactgagaaacaggcgccgactggccaagctattatatctgcccaagaactatttccaggaggagcatacgtactgctacaatgagttctcacggcctaaacccaatggcgatggcaagagacatttcaccgtgcctccggacgacctgaaggacatacaaaagcacatctgtattctgctcaaacgcatcataacccctgaatgggtgatgtccggaaaaaaaagctgttcctacattacaaatgccgagatacatctcaagcaccggtttgtccgcactatggatatctcgaaattttacgatagcgctcagcgaagcaggatttacaatatgttctcccagacctttaagatggcaagtgatatcgcttggattatgaccgagctggtaacctataatggcatgttgccaacaggctccccctcatctcaattagtcgtttactggacgtacttcaacatgtttcagagaatcaacgaactcagcgagaagtatgattgtcgattctctttgtatgttgacgacatgacattttctagtgacttccccattaaacgtcagctgcgcgacgaagtcagtgtggtcctgaggaaaaatggtctgctagcgaagtctaagaaagaccactactatcaggccaacgattttaaagtaatcactggggtggggatcaggcaaggaaaaaagatcgtgccaaataacaaacgcaaacagattatcgaactttacgttcagtgcaagaaatcaggtaacatctacgacatcgaaaagctcaacggaattctgtgctccctcaggcagatcgaacccaatatttttcctgagatatatgggtacgtccactgctatgaaaaggagctgaagaaacttagcagagatcggttctaccggacaaagaggaagaaaaagccatatcggactaagcagatgtacaacgtggtgaataacatgaacttggtggagcaacgtaaggaaggcaagcagtgctga

SEQ ID NO: 10555 - RNA, 1011 nt, synthetic construct
  source 1..1011: mol_type = other RNA
atgaataagtgctaccctattgagaattcccctctgtaccggctccgtaaccgaagaagattagccgagtttcttaatctccctaagaactacttcaaagaggagcacacatattgttataatgaattctctcggccaaagcccaacggagatggagagcgccatttcaccgtacccccagaagacctgaaagacattcagaaacatatctgtaaactcttcaagagaatcatcactcccgaatgggtgatttctggcaagaagagctgttcctatattacgaatgctgaagtgcacttgaaacacaggtttgtcaaaaccatggatataagtaagttctacgactcagcccagaggtctaggatataccaaatgttttctcaaaccttcaacatggcaagtgacatcgcgtggatcatgacagagctggtaacttataatgggaagctacccaccggcagcccaagcagtcaactgattatctactggacttattgcggtatgtttcagaggattaatgagctggcagaagagtataactgctacttctcactgtacgtggatgatatgacattcagcagtgactttccgatcaaggccatactcagagatggtgtctctgacgttctgcggaagaacggcttgctggctaagtccaaaaaagatcactattaccaggtgaacgatttcaaagtcgtgacgggggtggggattaaacagggaaagaaattggtgcttaactccaagcgtaagcagattatcgaactttacgccaaatgtaagaaaagctccaacatctaccagatagagaaactcaatggcaccctgtgctcactgcgccagatagaacctgacatttttccagagatctatcgctatgttcacagctacgagcaagaactgaagaagctatcgagagacaggttttatcgatccaagcgggagaaaggacgctacttatcaaagcatatccataacgttggcatcaatacagaacaggggtttgactga

SEQ ID NO: 10556 - RNA, 1014 nt, synthetic construct
  source 1..1014: mol_type = other RNA
atgatgtctagcaaatgttatcttttagagcagtcgcctctattcagactcagaaacaggcgcaagcttgccactctgctgaaactagatgagaagtacttctcgaatgagcgtgcttatacgtacaggtcattctccaggcccaagcccaacggtatcggcatccgaaagttcaccgtgccctctgacgaactcaagatcatacagaagcagatctgcaaattgttgtcccggattgagactcccgaatgggttatgagcggcaaaaagagctgttcctatatcacaaatgccaaagtccacctggagtatccatttgtgaagactatggatatttccgaattttacgattcagcacagaggagcaagatctacaacatgtttttcaacctctttcaaatggaacatgatattgcttggttgatgaccgaattagtgacatataacggtgggctgcctaccgggagtccttcatcccagctgattgtgtactgggcctacagcgacatgttcaacgagatacagctgctgtctacaaaatacaactgcaccttcagcctctacgtagacgatatgacattttcatctgatgagtctatcagtggaaaactgagggaagacgtcagcgcacttctccgtaaaaataatctgaacgccaaggtcaagaaggaccactactatcagatgaaggactttaagatgattaccggagtcgggatttataagggaaatatggtggttccaaacagtcggcgcaaggctgccatctccctttactcagaatgccgcaaacatggcaatataaaagacatcgagaaattgaacggcatactgtgtagtatgagacaaattgagccaaatatcttcccggagatcgctatgtatgtgaaacactatgagaaagagctgaaagaatacagtcgaaagcggttttatatggcccggcgcaaggcataccaaaaaaagagaaattcctgttctgtagcggtgagcaatgaagttaagatttgctga

SEQ ID NO: 10557 - RNA, 996 nt, synthetic construct
  source 1..996: mol_type = other RNA
atgtctaagatgtatgctctcgaacagagtcctctgtaccggatgagaaataaaaagaaattggcgaccttactgaggatctcgactaattaccttatgcaggagcatgggcaagactattataagttctcacgtcctaaacctaacggggatggtacgcggaactttaccgtgcccagtgatgaactaaagtacgcacagaaaaagctctgtaggctgctgtccaggatccagaccccggactgggtgattagcggaaagaagaatcattcctatattacaaacgccgagaaacacatcgaaaatactttcgtgaaaacgatggacatctctaaattctacgacagtgctgaacggaagtatgtgtatcgcatgtttaaagagacttttaagatggcagaggatatcgcatggctaatgacagagttagtcatgtatgagaacatgcttcccaccggcagcccatcatctcagctgatagtgtactgggcctattgcgacatgtttaatgaaatcaaccaaatcgccaacgagcgggcctgcattttcacactgtatgtagacgatatgacattctccagcaagactcccattaccaaggaactgagacaggaagtatgtaatcagctgaagaaatacggcctcatagccaagtcaaaaaaagatcattactaccagggaaacacagttaaggtcataaccggtgtggggataaacgatggacaaaaagttgtcctcaataataagaggaaacgaattttggaacagtttgagaagtgtaaaaccagcaacaaaatctacgacattgagaagctgaacggcatgctgtgcgccctccgacagattgagccagagattttcccagagatctacaattacatcaagcactatgactccgaacttaaattgatggctaggaatcgctttttcaagcaccgaagaaagcgcagaaagatcgagaagcaacgccagtacattaaccagaacaatatctga

SEQ ID NO: 10558 - RNA, 978 nt, synthetic construct
  source 1..978: mol_type = other RNA
atgtcgaaactttatccaattgaacggagccctctttataaaatgtgtaatagacggaccttagccaacttgctgtgtctgccaaccaagtacttctcctacgagcatgagtaccagtacaatgaattcagtaagccgaaacccaatggcaatggcagaagggacttcactgtgccctccgacgaactgaaggccatccaaaaacgaatctgtagactgctcagcaggattgtgactcccgagtgggtcatgtccggtaagaagcattgctcttatatcaccaatgccgaacaccacgtggataagaaattcgtaaggacaatggatgtatcaaagttttatgatagcgtccagagaaactacatcttcaagatgttcaaaaacacctttcagatggctgaggacatagcctggttgatgactgatatcgtcacttataagggggtgctcccaaccggatcaccatcatctcagctgatcgtgtactggacatacgcagaaatgttcgacgccattaaacgcaaagcggatgaaaacgactgcgattttacactctacgttgacgacatgacatttagcgcagatcatcctatttctacggaattccggaacgaaatcgccatacagctgaagaaaaatggcctgcttgcaaaggctcagaaagaccactactaccaacccggaagttttaaggtcgttaccggggtgggtatagaaaacggggagaagaaggtgttgaataacaaacgtcagaagattctgttccagtatgagaaatgcaagaaaacgtgcaacctgtatgatattgagaaactcaacggcatgttatgttccatgaggcaaatcgagcctgacatctttcctgagctaggaaattacattaagcactatgaggccgagctaaaagagatggcgcgcaaacgattttacgctaacaagcgcaagaaagcaaaggttaaggagaagaattatgcttga

SEQ ID NO: 10559 - RNA, 987 nt, synthetic construct
  source 1..987: mol_type = other RNA
atgagcaaaacctactccattgaattctcacctctgtataggatgagaaaccggcgcaaactggcccgcgtactgaaattagatgagaagtacttcaagcagaaccacacctacaagtataatcatttctcagagcctaaaccaaatgggacaggcacacggaactttacggtcccagaaaaagaactaaagtcaatacagaaacgcatttgcaagctcatgagcagaatcgagacacccgagtgggtgatctcggggaaaaagaagcatagttatatttccaacgctagaaatcactgtcgaaactataatgtgaagaccatggatatttctcagttctatgacagcgcgaaaagaaagtacgtgtacagtatgttcaaagagaagtttcttatggccgatgacatcgcctggatcatgaccgacctcgtgatgtgcggcggaacattgcctactggatctccgacttcccaattagtcgtatactggtcttattctgatatgttcgaaaacatctacgagattgcacgaaagtacaagtgtgaatttacgctgtatgtcgacgatatgactttttcctccaatatcggcattagcaagcagcttagaaaggacgtggaggaactactgaacagttattgcctgcacgccaaagcaaagaaagatcattattaccagaacaacgcctttaagaaggttaccggtgtggggatcaaaaaaggaaaactcctcgttcccaatcagaagcgttacgagatcataggtatgtacaagacttgtctgaagaataaggacataatagagatcgaaaagcttcggggcctgctcatcagcgctcgacaaattgaaccagacattttccccgagatctataggttcgtcgagaagtacaaagatgacttgaatctgttggctaggaatcgttattacaggaacatgcggaaacggaaaaaagtgcagaggcgcgaggacgtggcatttgtttga

SEQ ID NO: 10560 - RNA, 972 nt, synthetic construct
  source 1..972: mol_type = other RNA
atgagaaagagcaagacttaccctctcgagaagagcccacttttcaggctaagaaaccgccgcaagttggccttgctgctgggcttagacgtagattatttcaaaaccgcacacgaatactcctataaggagtttgagaaacctaaggcctcaggtgatggggtgcgaaaattcgctgagccgaaaggcgaaatttgtgaaattcagaagcacatcctgaagtacctgaagaggattgagactcccgaatggctaaagagtggaaagaaatccgaaagctacatcacgaactgcaagatgcataaggacgcgctttatattcgtaccatggatatatgccatttctatgacgcggtcagttatgctcaaatcgagaaatccttttgtcaggtgtttaagatggcccccgatatcgcccggctgatggcaaaactggtcacaaatcgcaaaactattccaacaggttccccttcatcacagctggtggtgtattgggtttacagagacatgtttgacgagattaattcgatcgcagctacctttggctgtaaattctctctgtatgttgacgacatgacattctcatctgaaaagcagatcagtcaccagctccgggatgctgtggtcaaaaaattaaatgagtacggattgcacgcaaaacgatctaaagatcattactacgaggcccaagactataaggtcgtgaccgggtgcggcatcaaagatggcaagacggatgtgcccaataagctgcggtacaaaatcgttcagcagtacaggctctgccaacttaccgatacaatagccgagatagaaaaactcaacgggatgatgtgcagcgcccgtcagatggatgaaaacattttcgacagcgtaagcaattacctgtgtaagaacagggagaggctcaagggatatgtgcggtccagaaagtctaagcgccagtacgaagacaacgactttgagttctga

SEQ ID NO: 10561 - RNA, 930 nt, synthetic construct
  source 1..930: mol_type = other RNA
atgaataaagacatcaatcaatatgagctggaagatagtctgctgtatcggctgcgaaatcgcggtaaactggctgaaatgttcaacctaccccataactactttcgcactcagtataagctggacattgagtataaaagcaaacacatccagacaggacgaaacaagaaagataggttggtggagaatccttcgaagaagctcaaaaatatccagagagagattctcaagtacttatcccggatccaaacgcctgattggattatctccggaaaaaaggggaagtcatacattgataatagcaagtttcacaaggacaattcatacgttatcacaagcgacataatgaacttttacccctcctgcaaaaaggattacgtgtacagaatgttccgttatacctttaggatgagttccgaccttgcgacgatccttaccactcttgtcacttacaatggtgggatcccgacaggcgcaccaacatcacagatgattgcctattgggcttataaggacgccttcattagaatcaatgagatcgcattaaagtacaacgccaaattttcactgtacgtcgatgacatggtattcagctctaagtctaccatttctaagaggatgattctcgagataaagaaagagctgcagaaatataacttgagcctcaaggacaacaaaacccggaaatacggctccaaggattataagttgataactggagttgtgtacgacaagaatggggagcttaaaattcccaacaggctcagaaaagatatcatcgacggctacaacgaaataaagaaaaagaaggacaactgcaacgaaaccgataaaaagagcctgctgggcaaaatttattctgcccgccagatcgaaccagatgctttcagtcagctactgcataacgtgaagaaaatagaatgtaagtga

SEQ ID NO: 10562 - RNA, 924 nt, synthetic construct
  source 1..924: mol_type = other RNA
atgaaaaagatagtggagcgccatcacaaaaaacagtcgtttttttactgtctcgcaaacaaatcactgttagccactcaattcggtctacctcagaattttttccggagtaaatataaggagcagctgatctattctttcttcgagattagcaaaaaggatggatcaagccgtgagatcaataatcccaagtatgacctcaaggtgctgcagaggaagattttgaactacatgaaccgaatttacaagcctgattggcttatgagtggccggaagactatcagttacattgacaacggtagaaagcaccttgggtctaactatgtgattaccatcgacattaagaagatctacagcaactgcaaacgcaacaatgtttacaacatgttcaaggatgtgttcaagatgaccccagatatagcctccatcatggccgatttgacgaccttcgaaggggcagtacccacaggggctccgactagtcaagtcattgcattctggacatatcaggacgcttttgaaaagataaacgagatcgcccagcagtatgactgtatattcagcctgtacgttgatgacatgacattttcaagcctgggcgaaatcccaacacaattactgctcgaagttgacaaagagctcaaattggtgggcctgagcatcaaatggaaaaaggtgaagagatttggaatcaaccattgcaagcttatcaccggagtagtcctggacgaagctaagcagatgcgaattccaaatgcgcttagattgtctatcatccagggcgtcaagaaactgtccaataaagaactgtcacaagaggagcgcctccggctgattaagtccctaaaaggcaagatcaattccgccaggaatattgagcctgaaatatttcccgagattcacaggaaaatctcttccatttga

SEQ ID NO: 10563 - RNA, 927 nt, synthetic construct
  source 1..927: mol_type = other RNA
atgcgtccctccattccgctcaatcagtgcatgttttacaaatgccgttcaaagaaagctctggccagatgcctgctactcgatttacaccagttgcagcggcgcagcgaatggatccagtatcgagtgcatgcagagcaaaaggctagcggtggactgcgcgtcatttatgcccctgcagatgaactcaagagtgtgcaaaaggtgatcaaatcgcgcctgcacagaattgaagtcccctcttgggtttacagtggcgtgaaaggaagatgtcatatcgacaacgctaaacaccatgcggggtcccggtattttgtgctgtctgatatatcatccttctacgaaaactgcactagggacgccgtgtatcgattcttcagagacgatctgctgtgttctcctgatgttgcctccctcctcgctgacttgacaaccgtacgcaatgccgagggcaagaccgtaaaccccaccggaagcccctgctctcaattgatcgcctactttagctaccggagtatgttccacgagattgcgtctattgctgaccggtatggctgtaaattttccctttacgtggacgatctgactataagctcagagagtcctatctcgaacccacgaaaccttatgaaacaggttgccaagtcccttagagcatacggccatagggtgaagtgggagaagacagggtatttcggtaaaaatcagtttaagctggtcaccggcgtggcgattgatcagcaaggcgagctgaatatcccaaatcaccttggggaggctgtcattactgggttaaaggagacgttgtcaggggacaggagcgagatagccccaacactaggtagaatcaacgcagcccggcagatcgacggacgcgtcttcagcgaagcaaggaggctggttgaaaatgcacagaggtgtttttga

SEQ ID NO: 10564 - RNA, 921 nt, synthetic construct
  source 1..921: mol_type = other RNA
atgcggcccgaaatcacaatcgatcagtgtcagctgtacaagtgcaggtccaaaaagcgcctggccgagatattatacatcgagagggcagactttaacgatattcctacctgggcaacatacaggattagccacttggaaaagggagacggtgggacccgaactatctattcaccttccaaacggctcaagaaggtccagaaacgcatcaaacgcctgctagagaggattcacaaacctagctgggtttttagtggcaccaagggaaagtgtcacgtcgacaatgccatgcaccatgcgggtaacacctactttgtgctctcagatattgccgagttctatgagtcatgcactcgtgataccgtgtataagttcttcctgaacgaaatgaaaacttcccctgacgtcgctgaactgctcgccgacattacgacactggaaactaacggcaaaaccatcatcccaacgggatctcccagcgggcagctcttggccttctttagctacagagaaatgttcgatgagcttgaagagttgaccactagacatggatgccgcttgagtctgtacgttgacgacctgacaatctcgtctaatacaccgatagccaatcccaagtccctgcaaaaacagcttgctagaattatggcctcatatggccacagtataaaatggagcaagactagatacgtgaagccgtctgagtttaaggtggtaacgggggtggctattggtccagacgggaccccccatattccaaacaatctaggccgagcaatcataggtggactccaggatgcgttaggcggggactgcctttcccaagctagcacactgggccgtatcaatgctgcacggcagatcgttgaaggctctttcccagaggtggagagggtactttgtgattatcggcatctgtga

SEQ ID NO: 10565 - RNA, 921 nt, synthetic construct
  source 1..921: mol_type = other RNA
atgacccatccaatcgaccaaagccgcttctataagctgagatcgaagagaaaattggccgaggtactctgtaccaatcctcaggagttaaaacgtacactgagaaacgccagctaccgcatttctcagactcccaaagcggacggtaccttccgaactatatacaatcctaatccatcccttaaacgggttcagcacaggataggaaatcttttgagtcggattgagatgccaccctgggctttctttgccagaaagggcgtctgctacgtggacaacgccaggtatcacgagggtgctagatatctagtgaagtccgacctgtcttctttttacgaccattgtgacagggaacacgtgtaccgcttcttcaagaacaccatgaagtgttctcctgatatcgccgaagccctgtgcgacctcacgacatatacccttcaggatggatcaactatcatcccgacggggagccccagcgcacagatagttgcatttctggcatatcgggagatgttcgatgagatcaaggccgtggcggatctgtacaaatgcaaattttcactgtacgttgatgatctaacctttagctcacgctccgggattagtaaccctagcaatctcgaaaggagtatctcccacatcgctcggcagtatggccattgcatcaaggccgagaagactgtctacctggatgcatccacaagtaagattattactggagtggctttaaccccctccggcgagccaaaagcaccgaacgccttgcgtgaagccacagtgtctgacctgacacagatcagctcaggggacctgtcaaagattgtctcttgtctgggccggataaatgcagcgcaaatgattgaacgaaacctctttgctgatagtaaaaggcaggtagaacaaatcctcgcttccgcttga

SEQ ID NO: 10566 - RNA, 927 nt, synthetic construct
  source 1..927: mol_type = other RNA
atgaaaaagacggtgcggcagtatcccctacaacggtcacccatttaccggctcggaagacgccgagatctggaagagctgctctatatgcagaagggagatagccgtcgggttaaatgcttttctgaatacaacatcttcgacaaagagaaatccagtgggggctcaagaacgatcgaggccccatgtagcaagatgaagaaatggcagagaagggtttgggacctgatggctagaatcgagaagcctgattgggtgattagcgctactaagggaaagagctacaaagataatgcttccaaacatcgcagcaatggctacgtcatgaccatggatattagttctttttacccgtcatgcgtgagggagtacgtgtacagactgtttagggaacggttggaatgttctccagacgtagcccagtgtttaaccgatatatgcacctatcaggggggtatccccacaggtagtcctgcgtctcaagcagtggcctatttcgcatacgccaagatgttcgaggagattgaggatctcgccaggacttatgggtgtaccttcactttgtacgtcgacgatatgacattctctagccaggacaactttagctggaaaaagctggcgtacgaggtggacggagttctgcacaagtatggccaccgcgcaaagggctccaaaacaaagtataggctgcctggcgactttaagatagtcactggggtctgccttgcacccgacggtgctctcgtagcaccaaataaacttcgatcaaagattgtgggcaacacacgctccctgaaagccagtggggacctgtccttactttcgagaatccagggtcagatccaagccgctgactatgtggagggacgacgcaccttccctggcataaggtccgaactagaacgtatcgctgaagccgccttgtga

SEQ ID NO: 10567 - RNA, 924 nt, synthetic construct
  source 1..924: mol_type = other RNA
atgggggctaacagaaagaagtatgcaatagagcagtgtgcattatataacctgaccaccaaacgacgcctcgaagagaagcttctgctgcaatccggtgaacttaaaggtgtgatgcgaggagtgacttatcgggattttcagattccaaaaaagtcagggtctttccggcaggtcagcgaaccaaacaagcgcctcaaactggtccagaagcgcgtgctatggctgctgagtgcggtggagaagcctgactgggttatgagcgctacaccgggaaagtgtcacaaggacaatgccgtgtttcatagatctaatgcctacatggttaccatggatatagagagcttctacgacaagtgcgaaagagagagggtctatcagtttttcaagaggaagctgagacagcctggggatgtggcaaaagcacttaccgacctgtcgacatacaggcaaagcatccccacaggcgctcccaccagtcaaattgtggcctatttcgcttacgaatctatgtttgccgaaattaaccaggtcgctaaatcccatggatgcatcttcactttgtacgtggacgacatgacattctcatccggtgagcctttttcccccgacaagcttgcaagcgaggttgatgcggtactccggaaatatgggcacaaatccaagatgagtaaaacgcggtactacccaaaaggcacttgcaagctcactacgggggccgccatctcacgtcagttgctgttagtagcacccaacgatctgaggaaacgcgttttggagaattacgataagctaaggaaaaccggagataaatctctggtggccgtcattctcggacagatcggcgctgctgaattcatcgagggccgggacatgtttcctggcatcaagcaagccgtgcgtgccttcggcaatgcctcatga

SEQ ID NO: 10568 - RNA, 903 nt, synthetic construct
  source 1..903: mol_type = other RNA
atgaagagagcaagtaaaaagtacgatttagatcaatgtgccttgtacaaatgtaagtccaagaaaaagcttgccgagctgcttctcattgaccttcgatatatcaagaatagcaagaacttcatcgattatcattctttcgaactgacaggcaaaaataataaaacccgtctgattaatgccccacagcccattcttaaaaagatccaaaagagactcttggccctgttgaggcctatcaatcggccagcttgggtgatgtttggcgagaaagggaaaagctacatccaaaacgctatcgtgcatcagtataacccttattgcatcaccatggacatcaagggattttatgatcactgtcggagggacgccgtttatcggttttgcaaagacaagttgcaggtgtctcccgacgctgctactatcattacagactttaccacgtgggaacagcgcatacccactggctccccagtttcacagatcctagcttaccacgcctacgaagatatgttctgcaagattaacgaatacgcgaaaagtattggtgccaagttcacactgtatgtcgatgatataacgatatcgagtaaaaacgccattgaccctaagaagctcgcatcaaaggtccgaaagatcctgcatgtgtacggtcacacaatctctaagaacaagaccaaatactacagcaaaaatgacttcaaactcataaccggggtaattatctctcccaaccatcagctgctggtccctaataagctgagccacaaaattaacaatgagctcgagcacctgtattccattatgcaggagtcaactgatgtgcaaggagcgatattaaggctaaacgggctgctgcaggcagcaagactcatccagccgaactaccgctccgacatttga

SEQ ID NO: 10569 - RNA, 930 nt, synthetic construct
  source 1..930: mol_type = other RNA
atgaagaaaaagtatccacttagccaatcttatctcttcaaatgccacagcaagaagaaacttgccgattccttaggaatgagcttgaagaagctgaaatacatctcaaacaatccccgctattatagttttactaagagaacaggcactaaaaatcgagagatcgacgtgccttccgatgccgaactcaagaaggctcagaagaacatatacaattacctgaagtacaccaaccggccgaattacctgatggcaggggagattgggaaaaatatcctctcaaacgctaccttccacaaagatagtgactattggctgaaatttgacattagcaacttcttccccaactgtaaacgggagtacatttaccgtttctttcagtctagtatgcagtgttctccagacgtcgccagtatcttgacaaacattactgtgtatagaggtgggctggttcagggtatttccacatctatgttactctccttcttcgcgttcacccctatgtttgacgaactaagtcttctggccactaagaacaatctaaagttttctacgtacgtcgacgatttcacattcagctcgtcatcccctatcaacacaaattttatcaaactgcgcgtgaacaagatcgttagggcttatggacataccataaagaacaggaaggtgaaatattacagcaccaatgattcaaaacgggtgtcgggcgtgatagtcactaaaacccaccatctgaaagtacccaacaagaatcgtaagaagattatttctctcgcaaaatccatgcgagagaacatcaatacaggcaattaccaagaggcagaaaaaataagattgtcactgcgcggatgcatcaatagcgccaggcagattgagcccgaaatctttccagaaatctccaagtttacgaaaaccaagtttaagagctga

SEQ ID NO: 10570 - RNA, 933 nt, synthetic construct
  source 1..933: mol_type = other RNA
atgacttaccctatcaaccagtgttatctgtataaaatccacagcaagaaacgactctctaaaatttttggcctcgacctgaagaaaatgatggatatatccaacacccccatctataagaacttctacatcttgaagaagaacaagaaggattataggaagattgagtatgccagtgacaccctgaatggaatccagaggaagattcataaatacctggctaacatcaataagccaaaattcctgactgggggagtaaaaagtaagagtattctcaccaatggcaagattcacaagaataacaactactggatcaagttcgacatctcaaatttttacgtgaattgcaaccgggactacatctataaattcttcctgaatgatctcaagtgcagcccagatatatcagagatccttacaaatctgacgacttttgaaggccacctcatacaaggttcctcttcaagtgtggaccttagctactttgcctactccaaaatgttcaagcagctaaacgatctcgcgttgttgaatgacttaacattctctacctatatcgacgactttacatttagctcgaacattcccataaacattgactacatttcaaagaacgtgcttaagatcctgagattgtatgggcataaagccaaacgcaacaaagttaagtactacaacatcaacagcaataaactgatcacaggtattgtcgtgaataagaacaacgagattagagttcctaattacaatcgcgagatgattatcaatctaaggcggaaaatcgaagataatgattcttgtgacctgagagatattctgtccttaatcggcatgattaattccgctcgtcagatagaaaacggggtcttctccaactcttataactacgcacaaaatatactgaagcgacttcggaaaaataaaagctattga

SEQ ID NO: 10571 - RNA, 933 nt, synthetic construct
  source 1..933: mol_type = other RNA
atgaggaaggggaaatacgccctgaatcagagcgccctctataagtgtggaagtaaaaaaagactggccgagattcttgggatcccactgggtaccttgaaggaaaatgccgaaaacccgcaatatcacatagtgtacaaacccaagaagaacagtaccgagaaacggaaaattaatgcacctcggaagacactgaaacggatccagggcaaaatctacaagaagcttcaatacgtgaagcgccctaaatgggtgatggcgggcgaaaagggcaaaaactggccagataacgctgaattccacaaggactcctgttacgtgctcaagtttgatatagccaatttcttccccaattgcggtagggagtatgtctacaggttctttctgaatagactaaagtgcgctccagatattgccgaaattcttacaaatctgactacgtatcatggctgcatagtgcagggaagccccgtttcaatggtcttagccttctacgcttacgaaaaaatgtttgacgagctcgcaaacttggctgacgagaactccctgctgttttcgacctatgtggatgatctaacattctcctctaaaaaacagatccagaaagacaaactcatcaagattgttaacaagaagctgcacgcatatgaccataaatctaagtctaagaaggagatgtactacgggaagactaaatacaagaagataaccggagtcatcctgtatcccgatcatgttagcaaagtgcctaaccgaatccgtctcaagattaaacgctccctggtggcggccaaagaggctgagaaggaaggcaacgtaaaacaggccaatgactttaagaaggagttggtcggaactatttatagcgctagacaaatcgaaaagaacatctttcctgaggcattaaattatgcaaagcagcaggtatcatga

SEQ ID NO: 10572 - RNA, 954 nt, synthetic construct
  source 1..954: mol_type = other RNA
atgaagccgagcgagtctcggaaacggtataacctgaatcagtgtgccctctattgctgccgtagcaaaagcaagctctttaagctgctgggcaccaatgcaagggaaatccgggacctgactaaaaacatgaatgagcagtacagtatcttcgacttggaaaaaaagggaggcgggactagaacggtccatggcccatcacccttacttaagaggatccagaagaccttatataaatacttgagaaaggtcgagcgcccctcttggctgattagtggtgagctggggaagtctgttatagacaacgtacggcctcaccagttcgccggcgacatgattaagctcgatatctccggcttctttgataattgtaaacgagaacctgtattccagttttttcacactatacttcgccaacccggtgatgtggcttccatctgcaccgagctttgtatgcttaatggagccatagtgcaaggaagtcccacatcaatggtgattgcgttttacgcgaaccgcaaaatgctcgaagagctgcagcagttagcatcggatttcggtttggtctttacagtttatgtggacgatattgctttctcctgtgctgccagcttcaatgaagacgcactgctgtctcgagcttgccagatcgtgcgcgcctacggatttagggtgaagacgaagaaggtcagagagtaccctttggagaaacctaaactgctaacagggatcgtcatctccaagaagaataccctgtccgttccaaacagggtgcgtcgaacaatactcgactccatgaccagttacagaaaaatggatgactcaaacgagaaggaaaaactgcgccaaagcatgctcgggatgattgcatcagcccagcagatcgaaccagggattttcaacagcattcggggccagctcctaagcgataggagaaaacaactggtgtcttga

SEQ ID NO: 10573 - RNA, 948 nt, synthetic construct
  source 1..948: mol_type = other RNA
atgacaactaaggtaacaaaacgatatctgctgaaccagagcgctctataccattgtaccagcaagcggaagctggcccgggtcttacaaatcgatttaaagcgccttgtagggattgtgggggatataccaaaccaatactccaccattacacggccgaagaaagattcaggagagaggatcgtgcataatgcacacttcgaactcaagagggttcagagacggttgtttaccctgctcagaagggtgaaacggccaaattggctcatctcaggcgagataggtaaaagcattacagacaacgttaggcctcacctgggcggcactcagcttttgaaaattgacatctctggcttttttgacaattgctcacgcgaaagtgtctaccagttctttcatgttcaaatggcccagcccagtgatgttgctaagatttgcactgacttgtgtaccctggaaaatgctgtggtccaaggggcctccaccagtatgttgattgccttttacgcgaatcagagcatgctccaggagctgcacgagctggccgaggacaactccctaatatttaccgtgtatgtcgacgacatcgctttcagctctagtcactctttccaggcatccgatattcttgaccaagcgacaagaatcgtgtctgcctatggtttcagagtgaagaataagaaggtccgcgcatataacgatagccgacccaaacttctcactggagtgatcattacgacaacctccaagatggctgtgcctaattgcaaacgaaggaagatcctggacgatatgactcagtacaggcgctccaccaaccccgcagagcgtagatctatgcgttcaaagatactgggccagatctcggccgcccagcagatcgaacctgatttcttcacgggagtgaaaaaccagctgaaatacgaaatgcgcatggatgaggactga

SEQ ID NO: 10574 - RNA, 936 nt, synthetic construct
  source 1..936: mol_type = other RNA
atgaagaaaaatatcaggcgttaccccctgaatcagtcccagctgtataagtgccactctcgtcggaggctcgcccgaatgttagataccgacctgaagactctcgaagagatcgccaaaaaccccagatattatagctttacacggccgaaaaaaaatagcaacgagagacggattatcgatgcccctaatcaaaggctcaaaaaaatacagaccagcgtgtacgcttacctgaggaaagtgaaacgcccagactgggtgatggcaggcgaggtaggcaagaactggacagagaacgctgagactcacgcagacgactcatactttgtcaaggccgatatctccaagtttttcgataattgtgagagagagtacgtttaccaatttttcttgaccaagctggaacagtccccagatgtggccgacatctgtaccagtcttgtgatgttcgaagggaagatagttcaaggagcacccaccagcatggtaattgctttctatgcgtatcagaagatgttcgaagaactggcttgcgtcgccaaacaattccactgcattttcaccatttatgtggatgatgtcacatactccagcctcgatccaatagactctgccgccctggaggcaagaatcagtcagattatggcggcttatggccataaggttaagcgacagaaagtgagaacatacggatctcagcgggctaagcgcgtgactggggtcatcttatcgacggaccatcaaatgcttactcctaattcactgcgccaggaaatttacgctgactttcagcagtaccttgcgcagaaaaaagcagacaaggatgaccctaacctagaccaccagagggcctcattgctgggtaagatcaatagtgcccgccagataaaccccgggatttttcctgagatgcatcggatcttgaagaacggttga

SEQ ID NO: 10575 - RNA, 951 nt, synthetic construct
  source 1..951: mol_type = other RNA
atgaaaaacatcaccctgtcgaataatccactgtataacttgaagagcaagaataagttgaagaagttactgtacgtggataatttcgacaacataatcaaccagtatgatgtcttcattgcaaaacccgcacggctggttgaaaaaccaagtaaccagctgaaaataatccacacccgcatctttaaattcctgaagaagatagagatccctgactatctcttctcaagcaagaaagggaaatgttacatcgacaatgccaggctacaccagaataacagttttgtagtcactcttgatctgtcaaaattttttcctaagtccaacgcatcccatatctataacctcttcgagaagaagtttaatatgagtaaggatgtggcctacattatgacccaaatttgctccattgatacaagcaaaatcaccctgaaagatagtgtgaaaagatggtaccagaatgcgaataacaaactcaagtaccctattccaattagccatgtgcccaccggatcttgtacatcacagataatcgctttcttatctttcattgacatgttcgaagagatgaatagcatcgcctgctgcaacaatattactttttccgtgtttgtcgacgacatcatcatctcctctaatcagcccataaaaaggcacatcattaacaagttcaagtatatcgctacgaaatacggccatgagatcaacaaaagcaagattaagtactacgggattaactataacaagcgcatcacaggcgtaattataactaaggatcaccgtcttaagtctccgtccaagaatcactttcaatcttttaaagacgcccagcagtataagatcaatcccagcattaaatcaaagcaacgaacaattggtagaatccaggctgttcggaacattgaaaagcaaaagttcatacagctcatcaaagacattaaacaggtgtga

SEQ ID NO: 10576 - RNA, 942 nt, synthetic construct
  source 1..942: mol_type = other RNA
atggagaacgcgttattcaatctgaagtcaaagaagaagctagcaaagctgttgttctatgacaaaattgggtacctcgataaggacctcagcttcatcaacaactattccgtttttatcgtagagacatcaaatggtggaaccattaaaagcagaatcgtggagacgccaagagggatgctgaaagtgatccacgaccgtgtgtttaaattccttaaccaggttgatttgccggactatttgatttccaaaaggggctcttcctatgttcagaaccacatttcccacaagaataatagtaacgtggtgagcatagatatacagaaattctacccaatgtgcagcttcggcaatgtctacaagttcttccataacactatgaatatgagtcctgatgtcgcttacattatcagtgagatcctgacaatcaactacgagaacatcaaaatcaatgacaaagtggacgaatatctggagcagcaggaagtgaagaataaagtcaaatttcccaccaaacatatccctaccggttccagcgtgtctaacatactgtcatttctgtcttaccgagaaatgtttgaggaaatcgctcagcttagcaagcgctacaatattgaaatgacagtctatgtggacgatataaccttttcgtctaacgaacaatttcccaagactttcattggaaaggtaaagaagattctcatcaagaatgggcataagtacaacaaaaggaaatctaagaagctggacaagaaccacaataagaacatcactggagtgattgtcaacaagtacaagcagacaaaaatacccaataaactccaccttaagtacaaatatgccaaacgggatctgttaaaggatccttcacaactcaacaatcagaaactaaatggcattaaagaggccatgaagcaaatcgacaccgttagtaaaaagtga

SEQ ID NO: 10577 - RNA, 921 nt, synthetic construct
  source 1..921: mol_type = other RNA
atgttgaaaagactgcttcatatcgaagacaacaaattcctgaaacaagactatattgcaagtatggtcacaccctatatcgacaagaaaggaaaagcccgtctcatcgagccccctcgagaggagctgaaaactatacagaagaggatcaaaatgatgctaggccagatagtggtcccttctaatgtgttctccggaatccgggggcgctcatacgccgaaaacgcagtgatgcattccagtgagaaattacggaacctcttcaagattgatctgacggcttttttcccgagcatttcgcgtgaaacagtgtaccgcttcttttatgaagacctgtgttgttcacccgatgttgccgaaacactgacaaatttgaccaccatcgatctcgagaagagccaggcccactgccttgatgagatttacagcttcctgaactacaagggggttacatgcaaaaatcacctgatcagcggggcaccaacttcccagattatgtcctaccttgtcaaccatcggatgtttgaagaaatgcagaaggtggccgatgataataatgccgtaatgaccgtgtatgtagacgacgtcactttttctaccgaggatcatatctcaagacactttaagaaccgggtgattgacattgttaggaagtatggctatcagattagtaaggcgaaggtgaaaaactacaccaagctatacccaaaactggtgacgggtgtcataatcgactcacacggtaagccaatcatcaagaattctatgagagagaagattatcaaggagtatgagctgttgagggatcaccctgagagcgcagaatctaaacaacgattaaagggcctcctcaccgctgctaggcaggttgaccaccgcgcttttcccactatatacagattcgcgttcgacaaggagtga

SEQ ID NO: 10578 - RNA, 921 nt, synthetic construct
  source 1..921: mol_type = other RNA
atgctaaagcggctgttacgaatagaggatagcaaattcctgaaacaggactacgtggcatcgatggtgagcccttacatagacaaaaaaggtaagcctagacttattgaacccccacgggaagagctaaagatcatccaaaagcgtatcaaacagatgctggggcagattattgtgcctagtaatgtctttagcggaattaaaggcaggtcatacgccgacaatgcagtgatgcacaccggggaatcccgccgcaacctcttcaaaatcgacctcactgccttttttccgagtatcagcagggaaaccgtttatcacttcttctacgaagatctgtgctgtagcccagacattgctgagatactgactaactttaccacgatcgatctggacaaatcccaggcaaactgtttagacgacatctatagttttctggactctaagggcgtactttgcaaaaatcatttgatctcaggcgctcccacttcacagatcatgtcctatctcgtgaaccaccaaatgttcgatgagatgcagaaggtagccgacgagaatggagctgtcatgacagtctacgtggatgacgtgaccttctccgccgagaatcgaatttccaagaacttcagagatcggattattgccatcgtcaggaagtatggctatcagatctctaagtcaaaagtgaagaaatacacaaagctgtaccctaagttggtcacaggtgttgttatagattctgaagggaagccagttattaagaacagcatgcgtgagaagattatcaaagagcacgattacctccgggagcaccccgatgatgcaaagtctagacaaagactgaggggattgcttacggcggctcgccaggtgaataatcatgcctttcccaccatctataaattcgcgcataacaagacatga

SEQ ID NO: 10579 - RNA, 927 nt, synthetic construct
  source 1..927: mol_type = other RNA
atgctcctgctacatataaaggactcccgctacattaaacaggactacatcgcagatatggtatctccttacattgacaagaaggggaagccgagattaatagaacctccctgcgaggagctgaagacgatccagaagaaaatcaagaacatgttgggacagatagtggtccctaataatgtattttccggggtaaaaggaaagtcttatgctgataatgctattatgcacgtggacaataaaaggcgcaatttgttcaaaatagacatgactgccttcttcccaagcatctctagggagactgtttatcgctttttctgcaaagatctgtgttgttcaccagatgtcgccgagattctgacaaactttacaaccatcgacctgaaaaagagccacgcacggtacctagatgagatctacgcgtttctggacagtaaacacgtcaaatgcaagaaccaccttatttccggcgctcccaccagtcaaatcatgtcatatctcgttaaccaccgaatgttcgacgaaatgcaaaaactttctgacgagaacaacgcagtgatgacagtctacgtggatgacgtgaccttcagcagcgaaaattggctgtcgggtagttttcgaaacaaaatcgtggatattgtggggaaatatggctaccagatcagcaagaacaaggttaagaagtatacaaagttgtaccccaagttagttactggtgtggtgatcgccctcaatggcaagcctactattaaaaactcaatccggatgaagattgtgctggaacatgcccaccttcgggatcatcccgaggatgccgattcccgtcagaggctcagaggactgctcaccgcagcgagacaggtcgacgctcatgcctttccaaccatttataaatatgcctacgaactggacacgaagaacaattga

SEQ ID NO: 10580 - RNA, 939 nt, synthetic construct
  source 1..939: mol_type = other RNA
atgcttaaacgactcctacacattgaggatagtaagctgacaaaacaggactacatcgcctctcttataagtccttacattgacaaaacaggcaagccacggctgattgaaccccccagagaggaactgaagacagtccagaaaagactcaagaagctgctgggcgaaatagtagtgcctgacaatgttttctctggcatcaagggcaggtcttatgccgacaacgccaagatgcacattgggtccgggagacgtaatctatttaagatcgacctgacggcatttttccccagtattgaccgcgacacagtgtaccacttcttttcaaaagacttaaactgttccagtgacgtagcgcagatcctcactaatttgactaccgttgatctcgagaaggctcatattaccaataggaacgatgtgtatctgttcctgagcagcaaaaaagtctcctgccggaaccacttgatctccggagccccaacgtctcaaattatgagctacctggtcaatcatcacatgtttgatgagatgcagaccatagccgatcgcaacaacatctcaatgacagtctatgttgatgatgtgactttctcaagcgagggtagaatatcccatgattttaccgagcagatctacgcaattatcaagaaatatcgttaccaggtgagccggagcaaggtgaggaagtatactaagttatacccgaagcttgttaccggagtcgtgatcgacgctgatggtaaagcagtgattaaaaatgctatgcgactcaagatcatcaatgaatataaccacttgctccaaaacccaaacgaccctatctgtcggcaacgcttgagggggcttctgactgcagcgcgccaagtggatcagcatgctttccccaccatatacaaatatgcctttgaaggatcgctgaaatgccagcagaattga

SEQ ID NO: 10581 - RNA, 930 nt, synthetic construct
  source 1..930: mol_type = other RNA
atgctcaagcgacttttgcatatcgaggattcgaaatttactaaacaggactacatcgcagccttagtgtccccctatatcgacaagaccggaaagccaagactgatcgagccaccacataaagatctgaagacaatacaaaagcggctgaaaaatctcctcggaaccatcgtggtcccaaataatgtgttcagtggcattaagggccgctcatatgccgacaacgctaagatgcatgccggaagtcactcaagaaatctgttcaaaattgacctgactgcattcttcccctctattagtagggaaaccgtttacaacttcttttaccatgacatgacttgcagcagcgatgtcgctgagattctgactaacctaacaacaatcgacttggagaaggctaggattcatgagcgaaatgaagtactgctttttcttgagtctaaaaaggtgtcttgccataaccacctgataagcggtgcacctacatcacaaatcatgagctatctggtcaatcaccacatgtttgacgaaatgcagattgtagccgacaacaatcacgctataatgaccgtttacgtggatgatgtgacatttagttctgagtatcggctctcccacaagtttaaggaacagattcttagcatcgtcagaaaatacgggtatcagatctcaagacctaaggtgaagtactacacgaaactgtatccgaaactggtgacgggtgtcgttatcgatagcagcggctcccctatcattaagaacgcgatgagggaaaagataattaacgagcacaggcacctccgcgaattccctgacgacaaatcctctcggcagcgcctatgtgggttgttaaccgcagcccgtcaggtggatccccacacctttcccactatctacaaattcgccttctcctccccggatcatgagtga

SEQ ID NO: 10582 - RNA, 981 nt, synthetic construct
  source 1..981: mol_type = other RNA
atgccgctcatatacactgattgccccctttacggacttaagtccaaaaaacttctgaagagactgttacgtatcaataacaatcagatgatgaggcaaactcatattgctagcctggtgtcgccatatatagacaagagtggcaagcccaggctcattgaaccacctcacgaggagttaaaaataatccagaagcggattaagaactgcctggggagaattactgtacctgataacgtattttctggcatcaaaggcaggtcatacgcagacaacgccagattccacgttggtaataatagacggaatctgtacaaaatcgacctgacagccttctttccctccattacccgagacacagtttataggttctttgctgaggacctgttgtgtagtcctgacgtcgcgcagctgctgaccgacctgacgacaattgatctcgaaacatccaatacgaaaaacatcgatgagattcggttgtttctcaaagagaagggagtttccacctataaccatctaatatcaggagcccccacatcacagatccttagttacttagtcaaccaccaaatgttcgacgagatgcagaaaatcgccgatgataacaatattaccatgaccgtctatgtggatgatgtcaccttcagctctgaaaaccgcatctctaaagactttcgtgataagataatcgcaatcatccggaagtacaattaccagatcagcaagaagaaggtgaagcgatataccaaactctatccaaagctggtgaccggggtgattatcgatgcaactgggaagatcgtgctgaaaaacagcatgcgccaaaagatcatcattgcgtataatgaactcaaaaacgaccctgacaacgcagatatacgcatgaggttgaaaggtttgctaattgccgctcgccaggtgaataaagacgccttcccaactatttacaagttcgcttttcagacagaagagaataagtga

SEQ ID NO: 10583 - RNA, 930 nt, synthetic construct
  source 1..930: mol_type = other RNA
atgctgaagtacgtcctccacattaaaaatggcgaccttctgaaacaggactatgtcgtaagcatgattggcccttacatagacaagaccaagaagccccggcttatcgagccaccccaagccgagctcaaaactgtgcaaaagcgcatgaaaactctactggggaaaattcaggtccccgataatgtgttctcagggatcaagggacgctcttactcggataatgcctgcttgcatctgggcaaatccaaaaggaacctgtacaagatcgacctgacagccttttttccctccatcagccgcgagactgtctattgtttcttttttgaggatctgtgctgttccccggatgtggccgaaatacttaccaatctcaccacggtggacctgaagaaactaaaccagtctagtctgctcgaagtgtacgacttcctggctaataagggggtgaagtgctataaccatttgatcagcggcgccccaacgtcccaaatcctgtcatatcttgtgaaccacaagatgtttgacgaacttcagtctctcagtgacaagagcaacgtaacaatgacaatttacgtggatgatgtcgtgttttcgagcgaacacaagatttctagcgagttcagacagagtgtattgtctctgatcaaaaagtacaactaccaggtcagtaggaagaaagttaaaggctattccaagacataccctaagttggtgactggtgtgatcattaattcagaaggaagagctaccatcaaaaatgctctgagaaagaagataatggttgagtatgagcatttacggaacaatccagacgacataaaaagccgacagcgtctcaggggattagttaccgcagcacgacaggttgataagtcagcttatcctaacattcggaaattcgcattcgataaccctgcgaaatcctga

SEQ ID NO: 10584 - RNA, 927 nt, synthetic construct
  source 1..927: mol_type = other RNA
atgctgaaatacgtccttcagatcaagaatgacgatatgctaaagcagtctaacatcacgagtaagattcacccttatatcgataagaccaagaaaccccgactgattgaggccccacaggccgagctcaagattgtgcagcgaaggattaaaaccttgctgggtaaaattcaaacaccggataatgtctttagcgggattaaagggaaatcctaccccgagaacgccagaatgcatatcgggggcagaaaacgtaatctgtataagactgatcttacagcatttttccctagtatcagcagagaggacgtttatcaattcttcaacaatgagctctgttgttcacctgatgtttccgaagtactcacgaatttgactaccgtgagcttagagcgcttccccaaagaagaactgacagaagtttatgatttcctaggacagaaaggagtgcactgctataatcacttgatcagtggcgcgccaactagtcagatcctgtcatacctggtgaaccacaagatgtttgacgaattacacacactgtctgcaaagaatgacatggtaatgaccgtttatgtggatgacatggtcttttcgtccgaacataagatatcttcccattttcggaactccgtgaagtccatcatcaaaaagtaccgctacaagctctcacacaacaaggtgaagggctacagcaaaggatacccaaaactggtcactggcgtcgtgatcgactgcaatgagaatatgatagtgaagaacagcctccagcataaaattatccttgagttcgaacatctgcggaaaaaccccatggaccaagagagccggcagaggctgaggggtcttgtgacctcagctcaacagatagacaagtctatattcccaaacattaagcgctttgctttcgagaacccttctaagtga

SEQ ID NO: 10585 - RNA, 924 nt, synthetic construct
  source 1..924: mol_type = other RNA
atgctgtgtcacatgcttaacatcagagatacaaatctccttaaacaggattatgtgtccaaactggtagagccctatatagataaaaccgggaagccacgcctgattgaaccgcctcgggcggagttgaagctgattcagaagagaattaagaacatgttggggatgattgaagttcctgaaaacgtctttagtggaatcaaaggaaggtcctatgcggataatgcctcttttcatatcggggacagccccagatacttatttaagatcgaccttaccgctttctttccctcaatctctcgagacaaggtttacgctttcttcctgagcgacatgcactgctcgcctgatgtagccgccatcctgactaactacacgactatcgacctctcccgggcagccattcaggataggcaatccatctatacattcctgagtgagaaaaacgtgagttgctataaccacctcattagcggtgcccccacctcccagatactgtcatacttggtcaactaccacatgttcgatgagatccaaatgctagcagacaagcattcagtttctatgacaatatatgtcgatgacctcactttcagttgtgaacatcgtatcccgcgacatttcaaagagaatgtgctttcagtcattacaaaatacggctacgtgattagcgccggcaagaccaagagctacactaagaggtatccaaaactcgtgacgggcgtgatcatagactctaatggacagctcgctctgaagaatagcctgcagttaaagatctctctggagcacgcccatctgcgcgaccaccctgaagataccaagtcccgccagagattgcggggtctaataaccgctgcaaggcaagtgaaaaaagacgcatttccaacaattcaccagttcgcttttcaggccaatccatga

SEQ ID NO: 10586 - RNA, 975 nt, synthetic construct
  source 1..975: mol_type = other RNA
atgaagtatgacaattgccccctctatgaactgaagagtaagaaaatcctaaagtacttgctgggcataaaaaactccaatctgctgaaccaacagtatgtagcatcgctcgtgactccttacattgacaccacgaggaaaccaagactcatcgaaccccctcactctgagctgaaagccatccagaagaaaatcaagaccttactgggtaaaattgaagtgcccaacaacgtgttttccggaattaaaggaagatcctatattgacaatgctctgatccacaaaggcaacggacttcgtcacttgtttaagattgatctcacgaccttcttcccgtccatttctcgagaaacagtttacgggttcttctacaaagatctcaggtgcgctcctgatgtggcacagatactggcgaatctgaccaccatcgacttaattaagtctaatagtcgggacatcgagacaatctatcaatttctggagatgaagaaggtgcgttgtcggaatcaccttatttccggggctccaactagtcagatcctgtcataccttgtcaaccatcgcatgttcgatgagatgcaggctttggccgacaaaaaccgcgttacaatgagcatctacgtggatgacgttactttttcatcagactaccggattccacagaggttcaaaaatctagtcttcactattgtacgaaagtacaactaccagatatcaggcattaaggtcaagagctacagcaagctttatccaaagttagtgacaggtgtcatcatcgatacaactggggatctcaccataaaaaatagcctgcgcaagaagatcattgatgagcatcgaaacctcagaaatgaccctggcaacagagagtctcgccagcggctgagaggcttgatcaccgccgccaggcaaatcgacaagagcgcatatcccaacatacatcggtttgccttcgaaaaatttacaataaggtga

SEQ ID NO: 10587 - RNA, 966 nt, synthetic construct
  source 1..966: mol_type = other RNA
atgaattacaactattgccccttgtatggtcttaagtcaaagaaacgactgaagtaccttctgaagattaagaatagcaaaatgctcagccaggctcacattgccaaacatgtagagccctatattgatatccaaggtcgccctaggcttatcgaaccaccatccgtcgaactgaaagcaattcagaaacgaataaagaacctcctgtcgaagataattgttccggataacgtgttttccggcattaagggccggtcttatgttgataacgcaagaatgcatagtaatgggctccggtatctcttcaaagtcgacctgaccgcttttttcccctctattacaagggaaactgtctacaccttttttcgcgaggacttgcactgtagcagcgacgtggccgaggccctgactaacctaactacaatcgatatccagaaatccaaagctaagaacattaatgagatctattgcttcctggacgccaaacaggtgaatgttatcaatcacctgatcagtggagcaccaacatctcaaatcttatcataccttgtgaaccacaagatgttcgacgagctccagctattgtctgacaaaaacaagattacgatgagcgtgtacgtagacgatattaccttttccagtgaattcaggataagccatatgtttagagagaaagtgtaccagataatcaagaagtacaactacaagatctcaaagaagaaagtgaaagggtattccaagctgtatcctaagctcatcacaggcgtcatcatcgatgccaatgggaatctggtgatcaaaaacaccctgcggcgcaagataattctggagtttagaaagctgatggaggaccccgctgacgatgaatcaaggcagagattgcggggattagcaaccgccgcccgtcagattaataaagcggcgtaccctttcatctacaaattcgctttcgataacaagcaatga

SEQ ID NO: 10588 - RNA, 972 nt, synthetic construct
  source 1..972: mol_type = other RNA
atgatatacacaaactgcaagttatacaagctgaattctaagaaagtgctgaaatacctccttgcagtatctgacaacaacttcttcgaacagaagtacgttgctagtcagattgagccctacatcgataccctcaaaaaaccaaggctgattgaaaaaccttccgaacaactgaaagccattcaatccaagattaagggattgctgtatgctattcaagtccctgataacgtcttttccggtatcaaagggagaagttattctcagaacgcacagtggcacaagggaaccaagcatgtgtataagattgatctgacagcgttctttccaagcattactcgtgaaaaggtctacagcttctttaaagatgacctggagactagttcagatgtcgcagagatcatcactaacatcaccactgtggatattgacttgacgaatctccagaacgtggagcaggttaatgagtttttaatcagcaagaacgtcaaaaccagaaaccacttgatctccggggctcccacatctcagattctaagctatatggccaatcacaagatgtttgacgaaatccaaagtctggccaatcataacggcattgttatgaccatctacgtggacgacataacattctcctcagagaactacatcagcaataagtttaagaacaaggtgcagtccatcattaagaagtatggatatcagataagcgctcgcaaagtgaagtcatatagcaaatgctatcctaaactagttaccggtgcgataatagacaaaaacggctgtctgactgtaaagaattcacttcggtacaagatcatgtctacgctcaatgagctgaaggaaaacccgaataataagacagcccgcaggaaactccggggccttgtgatcgctgcccgacagatcgagcccaatgcctacccatcggtgcataaactggcattcgacaaaaaatacaaggtgaattga

SEQ ID NO: 10589 - RNA, 951 nt, synthetic construct
  source 1..951: mol_type = other RNA
atgtaccagctgaagtgcaagaaggtgttgaaatatctcttgaagataagtgacaacagcgtatttaaccagtggtatgtggcctctttgatcgagccctatattgatatttctagagggaaacctagactgattgaaccacccagtcttatgcttaaatctatgcagacacgactcaaaaatatgctggggactattgacgtccctatcaatgtgttctctggtatcaaaggacgttcctacgcacagaatgcccagtggcacaagggtaacaagtttgtttataagattgacctgacggcctttttcccgagcatctcaagggaacgagtctattcctttttcaaggagaaactccgcacaagccctgacatcgctgaattcctaaccaacataacaaccgtgaacttagacttgagcaatattaaatccatggaggagatcaacatctttctggagtcgaagaacattaccaccaggaatcatttaatcagtggagcgccaacatcgcaaatcctaagctatctggcaaaccaggatatgtttaacgagatacagaaactgagtgatcacaacaacattacgatgactatatacgtggatgatctgaccttctcttctaccgaccatatctccaataacttcaagcaggaaattttctccgtgatccggaagtatggctaccacatttcaaataagaaagtcaagggctactcaaaattctaccccaaactgatcacaggggtaatcatctccaaggacggcaatatagctgttaagaattcacttagactcaagaccatcaatgagctcaatactcttaaacaagcccctcaaaacaccactagcaggaaacgcctgcggggactggttacagccactcggcaagtcgaacccaatgcatacccaagcattcatcagttcgcttttgataagaaatacaaggtgtga

SEQ ID NO: 10590 - RNA, 975 nt, synthetic construct
  source 1..975: mol_type = other RNA
atgatcaacccaatccatagtaatctgtacaaacttaccagtaagaagtacttacttagtcttctccacatccataataggcagtttttgaagcagtcttacgtgtccaagcagattagcccgtatatacagaccgatccaaaacccagactaattgaagtaccttcggaagagctgaagactatccaacgtcatataaagaacgagctcaacaagattatcgtgccagcgaatatcttctccggaattaagggaaagagctatattggtaatgcaaagctgcattccgggaataagtatgtcttcaaaatcgatctctgcgcattttttccctgcattacaaggaacacagtctacaatttctttatagagtcccttaagactagccccgatatagccaacatactgaccaatctgctgactgtggatttaagcaaatgtagcatagagaatgttgagagtgtgaacgctttcctgatctctaaaaaaatcaagacccctaaccacctgattagcggctcaccggcatctcaaatcttgagctatctcgtgaatcacaaaatgtttgactcactacagaacttttgtgacaagaataacatcacaatgtcagtttacgttgacgacgtgacgttctcttcccaacacattattagtcacacacagaaacaggtgatctacaagattatctccaagaacttataccgactgtccagaaacaaggtaaagtactatacgaagaagtatcctaaactgatcaccggcgtcgtcatctcatcgaatgggaatctgaaaatcaaaaattccttgtctctcaacgtgattagcgaatggaaatatttctctcagaacccaaaaaacctccagtctaaagcccggttgcagggcctgctgattgctgcccgccaaagcgaacccgccaaattccagaatatctacaacctcattcgggaggcttcaatccctttctcatga

SEQ ID NO: 10591 - RNA, 975 nt, synthetic construct
  source 1..975: mol_type = other RNA
atgataaaccctattaactccaatctgtacaagcaaaccagcaaaaagtatctcctaaatctgctgcacattcacgacaaacgtttccttcagcagaggtatgtatctaaacacatctccccctatatccagactaaccctaaacctcgcttgatagaggtgccatcagaagagctgaagatcatccagcgccatatcaagaatgagctcaataagatcatcgtcccagaaaatattttcagcggcgtcaagggtaagtcctacattgaaaacgccaagttgcatagtgggaataagtatgtgttcaagatcgacctcagctctttttttccgtgcatctctaggaacactgtgtataacttctttactgagtcgttgaaaacaagtcccgacattgcgtgtatcctgaccaatctcttaaccgtggatctcagcaaatgtaatattgaagacgctgacagtgtaaacgagttcctgatctccaaaaagattaagacgtccaatcatctgatctctgggagcccagcttctcagatactgagctatcttgtcaatcacaagatgtttgatacactgcaagagttctgcgataagaactcactgattatgtccgtgtatgttgacgatatcacattttcaagccagcacgttatttcacatagtcagaaggaggtcatttacaaggtgattagcaaaaacctatacagacttagtcggaacaaagtgaaatactacaccaagaattaccccaaactgatcacaggagctatcatttcaagcaacggaaatcttaagatccggaactcgttatcactcaacatcatcaaagagtggaaacatttcaaatacaaccagcaggatgcccaatccaaagcccgattgcaaggcctgataatagcagcacaccagagtgaacccaataagttccagtccatttacaagatagttagagacgcctcttttgatgtgtcttga

SEQ ID NO: 10592 - RNA, 972 nt, synthetic construct
  source 1..972: mol_type = other RNA
atgattgatccagtgaagtccaatctgtttaagctaagctccaaaaagtacctcatgacccttttaaacgttcctacaaaagagtatctgaatcagaacttcactgcaaaacaaatcaaaccttacatacaggccaatcccaaacctaggctcattgaggtgccctctgattccctcaaaaagatccagaagaatatcaagtgcgagttgaataagattgaggtaccgtcaaatgtgttttcaggtatcaaaggcaaaagctatgttgacaatgctgtaattcatcagaactgcaacttcttattcaaaatcgacctcaccgcgtttttcccatgcattacccgagaaacagtgtacaagttttttaaggttgacctgaaaacatcgtcggatattgcaaacatcttgaccaatttcgtcactatagacctcactctttgtgacatacaggaacctgaaccgattgaacagttcttgctgagtaaggggattaaaacaacaaaccacctgatatctggcagtcccgccagccagatcctttcctatctggcaaatcataacatgtttgacgagctgcagaacttctgtgataagaatgacatcatcatgagtatctacgtcgatgacatcactttttcaagccagcacgagatttctcacaaacacaaggagatcatctacaacatcatattcaagtacctgtatcgcctgagcagatctaaggtgaagtattatacctcaatctaccccaagtccgtgaccggggctatcattagccccaatggaaacctgtccattccaaacagtctatcttacaaggtcattaacgagttgcggaattacaaaaacaaccctaatgatgaacactctcaaaagaggcttcaaggactgatcgtggtggctcagcaaacggaaccaactaagttcagcaacatttataaccatgtccgtaatgccacgataaaagcctga

SEQ ID NO: 10593 - RNA, 963 nt, synthetic construct
  source 1..963: mol_type = other RNA
atgatcaatgccacaaactctaagctatacaatctgcaatccaagaagaaccttatctaccttctgaaaatccacgataaggacttttttaatcaggattatgtggctgcccatatacatccctatatcgataaacggggaaaacctaggcttatcgagagtccatctttgcagttgaaaaagatccagaggaatctgaagaatgagctcgctaagatcgaagtgccatataacgtgttctctggcattaaaggaaaatcctacgtggagaacgctgaaatgcaccgtaagtccaactacatttttaagatcgacttaacggccttttttccatgtattccccgggaatccgtctatacattctttcgcaagcagttaaagactagtcctgatatcgcccaaattctgaccaacttgacaaccgttgacctcactagatgcaatatcaaaaaactggaaagcattgagaagttcattctggacaagcacatagtgaccacaaatcacctcatcagtggcagtcctacctcacaggccctgagctatcttgtaaatactaaaatgttcgacgagctgcaatacctgtgcgacaaaaataaggtgattatgagcatttacgtcgacgatataaccttcagcagcaatcacaaaatctcacataagttcaaagagattgtctacactatcatttctaagtacatgttcaagctgtcacataacaagatcaagtactataccaaagactatccaaagctggttacggggcccgtaatctctaacgggaaactcataatccgaaattcactccgcttcaagataattagcgaatttaagagcctcaaaaagaaccctaacaaggcgtcgtatgatagactgaaaggtctaattgttgcagcaaaacagatcgatttgaaccagtacccgaacatatccaagtacattaaagagaaccccatccactga

SEQ ID NO: 10594 - RNA, 909 nt, synthetic construct
  source 1..909: mol_type = other RNA
atgctgcggcacttcctccaggtgcaaagcaatcagctgttcaatcagaccttcatccttgacaaaatccatccttatatcgacactgtgggtaaaagtagactgatagaagtccccgacaaggccctgcgcacgatccagaagaaaatcaaaaacatgctcggaaagttagtgttacctgattacgttttctctggtgtgaagggaaagtcatatgtggataatgcgacacaccactctgggactaaattcacatacaaggtggatgtgactgcattttttccatcaatcagtagggagaaagtctatctgttttttagggagaagttgaagaccagtcccgatgtggccgaggcactcaccaacctgacaacagttgacttgcatcttattgagaacattcaggaagtacacgagttccttaaacgtaagaacatcaagacttggaaccatttgatttcgggcgccccaaccagccctatactctcatacctcgttaattctgacatgtttgacgctctgtattcactgagcaaggaaaatgagattgtgatgaccgtttacattgacgacatcgtcttcagttcctcctaccggatctcttacaaaattagaaccaagatcttgagcattatcaagcaatacggcttacaggtcaacaagaaaaaactaaagctgtatacccggaaataccccaagaagataacaggcgtcataatcgataaaaatggaaactccgaagtgccaaattccctgcgcaaaaagattattacagagctgcacactctgaaatccaatccgaataacctctcctctagacagaggcttcaggggctagtaaccagcgctcgacagattaacaaggaaacgtttcaaaacatctgcagctatgcctataaaaaggattga

SEQ ID NO: 10595 - RNA, 960 nt, synthetic construct
  source 1..960: mol_type = other RNA
atggaaatacagaaaagccctttatacaagctatctaacaagaactaccttaagtacctcttaaaaatccccgacaaaaagttcttcaagcaatcctatatcacacagcttataacaccatacatagataacaagaacggcaaaaaacgattaatagaagttcctgacctcgagctgaaaaagattcaatctagactgaagaacatcctgtccttgctgcagatgcccaattatgtgtttagcggagtcaaagggcgctcctattacgataatgcatatctccacaaaggaaataagtatgtgtgcaagatcgatttggagtctttttttccgaacatttcacgggaaaaggtctatctcttctttctgacctactttaaatgttcctcagatatcgcgtacattctaacgaatctgactaccgtagatcttactcgtacaaagatcaagaacaataagaagctggagaagtttctggagtacaaaaatatcttctgcaaaaaccacctcatttccggcagtccagccagtcagttgctgtcttatctggtcaataaggacatgttcgacgaaatctataacttggccaacaagaattctataaacgtgagcatctatgttgacgacattatctttagcagcttcaacaagattagttacgacttcatcaaacagatcaaacgcatcatcaataagtacaactacaatatctcgaactcaaagttcaaaaggtatcttaatgggtatcccaaaaggattaccggtgtgatcatagacaaaaatggccagctgagcatccccaattcgcttaggctcaagattattaaggaattcgagtacctgaaatcccatcctaacgatagtaagagcaaaattagattgcggggtctgattctctcatctagacagattgagccaaatgctttcgtgggaatttacaagtacctgaaaaagttttga

SEQ ID NO: 10596 - RNA, 954 nt, synthetic construct
  source 1..954: mol_type = other RNA
atgaataagaagtgcccactgcacggactgaagagcaaggcgcagttgtactccatgctcggagtgaatgataaaaagctgtttaggaatggtatccaggataaggtgaaaatatacattgcaaaggaccctaaagagagactcatcgaggctccagattacatcacaaaaaaagcccaaaagcaggtgaaaaactacttgatgaagtgtgatttcccaccctacgtcttttctgggatcaaaggcaaatcctattttaataacgcagagatgcatctgtcgagcaagtatatgtataagaccgacataagcaaattctttccgaatatctcacgagacaaggtgtatctatttttcctgaacgacctcaatacgtctcctgacgtcgcaaacatattgacaaacatctgtaccatcaacataagcgattccattgagactaatcctcaagtagctgaattcgtgagcaagaataagatcaggatgtttaatcatctgtgcaccggttcaccagccagtcccctgctgagctatctcgtaaatcggaagatgttcgatgaactcaacaatattgctgagaacaatggaatgtcctttagtgtttatatcgatgacgttttcttcggctcaaaaaaaccgattccctacggcgtgagacagcagattcttaaaacactgactaaacacggctacaacatcagtttcaagaaagttatctactacaaggacaaggaaaacaaaaaagtcaccggggtcattattagccccaacaacaagctagagattcctaacaagttaaagcttaagatcgtgtctgggttttctaaaggcaacttaaaggattcacgtgccaagattaatggaatgcttatagcctcctctattatcgacaaaaatagtttcaacgggatccgcgagtatatgaagcagctggaaaaagactccgaggaatga

SEQ ID NO: 10597 - RNA, 948 nt, synthetic construct
  source 1..948: mol_type = other RNA
atgcataaacattgcctcctgcacggtttaaagagtaagaagcaattgatcagcatgctggatattacagataacaaagttatgaagggcaaagcccaggacaaaatcaaaatttatatcgctaccgaaccaaagaaaagattgatagaagccccagaatataagattaagaaggtgcagaacaagatcaagaactatctcctaaagtgtgacttacccagctacgtattcagtggaattaaggggaaatcctacttttgcaatgccgccttgcatagagactgtaagttcctgtacaagaccgatatatctgcattttttccttccataagcaggaatactgcttacaagtttttcaagaacgatctcgagacaagctccgacgtggccaaaattcttacggacatttgtactgtcgatattcgcgatacccttgagaaagactcctctgtggcgggattcgtgaaggacaaaaagatcaagatgtataaccacctttgcactggctcccctgccagtcccatcctgtcctatctggttaataaggcaatgttcgacgagatgtacgctatcgcggagaacaacaatctgaagttctcaatctatatggacgatgtattctttagctctagtaaatcgatctctaacaatgtgcgggagcacattctccgcattctcacaaagtatggctacaatgtctcatttaagaaagtcatctactacacatcacagcagaataaaaaagttaccggggtgattataaccccccaaaataagctttctatcccgaataaactgcgtcgaaagataattgcatctttttccaaaggcaacctgaagaccggtgaacagaacctgcgggggatgctggtggctagcaacatcatcgagaaaaattcattcagcggaatcaaaaggtacctaaacgaactgagcaaaatccagtga

SEQ ID NO: 10598 - RNA, 954 nt, synthetic construct
  source 1..954: mol_type = other RNA
atgtacaaatcttgccctctgtacgccctgcaaagcaagaaaatgcttatgaaggtgctgggcatacaggataaaaagtggaccaagaatatctacgtccagcagaatatttcccctttcatcgattgtatggtgaagcccaggttagtggaggccccaaagcaggagttgaaagtgatccaaaaacggattaagaacggactgatgaaatgcaggttccccaactatattttttccggagtgaaagggaaaagctatattgacaatgccaaaatgcatgcaggcataaagtacctttacaagatcgatattagcgctttttttccgaatacatcacgagagaaagtctacatgttctttaagaacgagctgaagacttcaagtgatgtggctgagatcgtcaccaatctgtgtacctatgatatctccattgacctagtagaaaagaaagagattgacacattcattcgcatgaaaaagataaagcacatcaaccacctctgtacaggagccagccctagtccattactgagttatctcgttaacaaatcgatgttcgacgaaatgtactctctctgcctgaaatacaatgtgaacatgtcagtatatgtggatgacgttgtgttcagctgtgacaagcccatacagccagaatttcggggtagaatattgaagattgttctgaagaacgggtataacatctccaagaataaggtgaaatactatgggtcttccgacgtcaaaaaagtaaccggcgtgatcattaaacctgatggcacgcttgacgttcccaataaactcaagttcaaggtcactaagagatttaaggacactcaaaaaggttcagaactaaacaagttgtacggctgcgtcatcgcggcaaagcagatcaaaaagaatatctatccaagcatctctgagtacatcatgaaccagaagaaaaaggaaaagtga

SEQ ID NO: 10599 - RNA, 1023 nt, synthetic construct
  source 1..1023: mol_type = other RNA
atgcagtcatgggataagcataaccagtttaagtataatgaggtgtatcctcttgagtatagaaagtgttacttgtatggactcaaaagcaaaaagaagctcctggagcttctgcacattgacaggaagatatactgcaaaagctcgtttctgaattgtaaaatcaagccctacatcgaaattaacaagaacaagaagaagcggcttattgaagcaccagatgaggacgtgaaaaatatccagtccattatcctgagggctctgcagttgattgacgtcccaaattacgcttttagtgggatcaaaggtaagtgctatattgacaatgcgaaagcacacagcgataagaaatacctgttcaagatcgacatcagcaaatttttcccaaatattggccgcaataaaatctacaacttctacctgaacaagctcaaaacatctcccgacgttgccaacatactaaccaacctgtctactattaatctggatctgaagaaccagaacaataagaccatgttgaagattaatgagttcatcaacgatgcccatataaaagaaagaaaccatctcatcacggggagtccgctatcctcaatcatgagctatttcgctaatgtggacatgtttgagaaaattaacgaaatagccctgaagtataacattacaatgactgtctatgtggatgatgtagtattctcctccgacaataaaattccctacttcttccgcaaaaacgtgctgaacattatcaaccaaaattcttacgacgtttccgtcaaaaaatgcaagtggtataataaacctgagaataagaaggtgaccggtgtgatactcgataaaaaaggaaagatgcagatccctaacaaattaatgcttaagacccacaactacataaatgagatcaataaaggcgacaagacaaacatcgataagttacaggggtgtctcgttgtcgccaactcaatcaatggcaagtttaaagaataccgaggacaattgaagaagatgaagcgtaagttttga

SEQ ID NO: 10600 - RNA, 987 nt, synthetic construct
  source 1..987: mol_type = other RNA
atgacctataaactttgccggctgtatggccttaaaagcaaaaaaacactgcgcgagtggctggaaatcgacgattctagctttttccactctaaaaacattgctaagaactaccacccctacatagacaataaagctaacaagaagaggttaatcgaggtcagtagccctaaactgaaatttgtccaaaccaagattctgggaatgctgaagaatctggactatccggaatacctattctcatctgtaaagggagtttccttcattgataatgcaaagcagcactccggtaagtattacactttcaagatcgacattagcaaatttttccccaacacctctagaaacaaggtgtacaatttcttcaagaaagacctgaacaccagttctgatgtggcgaccattctcacagattgcacaactgtggacctgaggaattacaattcggacaaacatcacaacgagatcgtcaactttctggaggaatacaaaataaagcaaatcgcccacttgagtactggggcccccacatccatgctcctatcgtttctggccaatcgtccaatgttcgaggagctcaattcattttgtgaacagagaggctatatctttaccgtctatgccgatgatgttactatgtcctccataaatcctattagttactctgatcgatccgcaatcattcggatagctgagaaatacggacatttcgtttcaaaaagaaaggtgaagtactataacgccaatcagagcaagaagataacaggggtggtaattaataaaaacggcgaaatctgtacgccaaacaagttactcaacaagacgcacaacaaaattcttaagtacaagtccaagaacatcgacgagcatgaaatcaatagcttgaagggttgcatcaatgtggcatatcagatcgacaaacgctatcctcatctcaggaaggtgttgaacaaaaattcaaattacagcaaggagaagaacgggtga

SEQ ID NO: 10601 - RNA, 972 nt, synthetic construct
  source 1..972: mol_type = other RNA
atgacatataagctgtgtagattatacggattgaagtcaaagaaaaccctgagggaatggctggggatcaatgacagcggcttcttttgtagccagaatatagcgaaaaattaccacccgtatattgggagtaaagacaataagataaggctgattgaggattcatcttttaagctgaagcacgtgcagaagaaaattctgaaaatgctcaagaagctggattatccaaagtacctgttttccggggtgaaaggcctgagctatatcgataacgctaaacaacacctcggaaaattctatacctacaagatcgatgtaagcaaattctttcctaacaccagtcggaacaaggtgtactcattctttaaggacttccttaatacttctcccgatgttgcaaagatcctgacagactgcactactgtagacctgcggaattattctaactccaagcactacaacaaaattatgcgattcgttgccatagccggcatcagacagattgcccatctttccacaggcgcatccacgagtatgctactttccttttgcgtgaatcagagcatgttcgaggaactaaacgagttttgcaagcaacgggactatatctttaccgtctatgtggacgatgttactatctcttccacaaaacccatcacgtacaaagatcgcctcaaaatcatccgtatcgtcgaaaagtacggtcatagtattagcaggaacaaaatcaagtactacaccttgtctaagactaagaagatcacaggtgtggtcataaacaagaacggagaggcccgcacccctaacaaattactctcgaaaacccattgtaaaatcctcaagttcaagagaggtaatattggcgacgctgagattaactcattaaagggatgcattaatgtggcttaccagatagatgggaaattcattcaccttaagaagttgttgaacctcaaagacaatctgaaatga

SEQ ID NO: 10602 - RNA, 915 nt, synthetic construct
  source 1..915: mol_type = other RNA
atggatctgaccacatgcaaactgtacggtgtgcaaagaaaacgggatttatccaatatcctgaagatcaactgcaaggaaatcaataagattgtgaactcctacaaaccgtacatagcgaataagtcgaagaaaagacttatcgagcccgtgagctcagtagagctgaaaaaagtgcagaaacggatacagaatcttttgaaggagataaagtacgactctaatgtcttctcaggcatttctgggcgaagctatattgacaacggaaggctgcatctcgggtgtgaatatgttgtggctcttgatatttccaaattctttccaaacacctcccgagaaaaagtctacaagttcttcaagcacgatatgaaaaatagtagcgatatcgctgaaatcttaactaatctctgtacaatcgacttgtctaacatcgccgacatagacgaggaggttatcaagtatatctccgagaataggatcaggtacaaaaagcacatacctactggtagtagcatcagttgtattctgtcttacctggtgaattacaaaatgtttgacgagatcgtcaagttgggcgttgaataccggtgcaagaccagtatttatgtggatgatgtcgtcataagctcaaccgagaaaattaataaacagctgattgaccgtatcatgggaattattaaaagccgcggctattctatacagaaaactaagctcaagttctacgacaaaaatgagtttaagagagtgacgggaaacatcatttccaaggacggcacaaagctggtgattcccaacaaaatccgctataagatgatcaagctaaagaagaacaaggaaattcagaaggataaaaaggaagccaagctcaacgggtataaccaagtaattaaccagatcaacatggaggcattttga

SEQ ID NO: 10603 - RNA, 963 nt, synthetic construct
  source 1..963: mol_type = other RNA
atgaacttcaagaactgcgaattgtataagatcaaacgaaaacgggacctgttcattttactgcatatagacgagaataagctcaatgaggagctgtataaatataaggtctgcatcaaagacaagaagagactgctggaaaagccttccgaagaactcaaaaagattcaacgaaacatactgtacaagctttaccagcttgattttccacagtacgttttttctggcatcaaaggtcggtctgcatttgggaatgccatttaccatatcaattgtaagtacatgctgaaactcgatatgtcaaaattctttcccaatactcacagaaacaacatttacgagttcttcaaggataaactcaagatgagcagtgacgtgagtagcatatgcacagatatagtgacagttaactacgagaaagaggatgttgaaatcgattacgaggtgtatgacttcttaaagaggaaaaagatcaagaacacgaatcatttgccctccggaacccctacgagccaaattctgtcttatctagcgaatatcgatatgttcgacaagattatagagtacaccaagaagcacaaactgcagtgttctatttatgtagatgacatcaccatctcatcctcaaacagatacatcactaaaaaagaggagagcgaaattaaacgcatcattaaaaagcacaagcacaatctgtcgaaagagaaaaccattcgttatagcgtgaacgaatttaaaaaggtgactgggtttgtcattgacccaaacaatcgccttgtgattcccaacaaaatcaagagtaagatcaaaaaccagacaaagttcattaggaagaaggaactcgacgagcagcggaaaaactcaatcataggcctaaccaactttgctaatatcagcgtcgaaggaagttataagggcctgagggccacattgaagaatatctccacctccaatactgtatga

SEQ ID NO: 10604 - RNA, 918 nt, synthetic construct
  source 1..918: mol_type = other RNA
atgaacaagtataaatgcaccctgtttaattgcaaatccatcaaaaaactccagaaatacctgttcatccagaacaagaacaactttaagaagatttccaacgagttgaaaaacaatccccttaacttctacgtgtcctttaagaataacacagggcgagagctgttctcatgtaatgagcagatcaaaaagatccacaaaagattgcagaaactcttcaacgtggaaaaaagcgactacctgaaaagtggagtcaaaaaagaatctcatatcaccaatgtgaagttccataagaacagcaatttctttctactgctggacattaagaatttttacccgtctataacgaagcaaaagatcaaaaaacagctgatcactacatacaatcaatctagtgatgtagccgagattattagcaatatggtgaccgtcccacaagaaaaggcgttaggcaagcgcgccctggtgacaggctcagtgctaagccagttcttcgcatacatgataaacaagaagatgtttgacgagcttgataagatctccaaagaagagaatattcggttcagcctgtatgttgatgacctcacttttagcagtaacgttcctgtttcctatttgttttataccaaggtgtacaacatcattcggaaaaacgggtacattattcactcaggtaagatctatcgtggtaagattggcaataaatctaagatcactggagtacatatcacaaaatatggattcaggctgctcgatagacacaagattaagatcagggaaatcataaagaacaaggactatcttgagaacaataaaccccttctcgggttactgaattatgctttgcaggtcaatccgaaatacagtaagtacatgtacctgataaagaagaagctcatatcggattccaatatttga

SEQ ID NO: 10605 - RNA, 978 nt, synthetic construct
  source 1..978: mol_type = other RNA
atgaacgcatatcaatgcaccctttacggcgtgaagagcctgaacaaattgcaacaatttctgcagatcaaggccaaacaagaatttaaggccctgtcaagttctgtgaaatctacacccctgaaatattatagcccctttaaggatgagaataaacgggagctcttcaactgtagctctcacatcaccttcctgcacaaaaaggtaatgcgattatttaatctcgagcagtctacctatctgaaatcaggtgtgaagaaagagtcacacataacaaatgctaaagaacatcagaacagtaacttctttctgctgatcgacatcaagggcttctatcctagcataacgaagtctaagattaaaactcaactgattcagacctacaaacagtccaaagatgtggctgagttcctgtctaacttattgacagtgcctcaggagaaatcgctcgggaaaagagcacttgtcactgggagccccctttcccagtggtttgcgtatgtcattaacaagaagatgttcgatgaactttacaatgtgtccaaggaagaaaacataatcttcagtgtttacgtagatgacatcaccttcagctccaaatcgattatttcctacaagttctacacgaaaatctacaacatcatcaataagtacgagtatcgtattcaccagggaaagatgtataggggaaagctgtgtaacaaaactaaggtgaccgggattcagttcactaaatatggttttcgcttattggacaaacacaaagaaaagataaggaagatcgttaagtccaaagactgctccaatcagattaagtcactactcggcctcgttaattttgccatccaggtcaatccaagatacagtaagtacaagtacttgattgagaagagcctactcctgaagcatagcaatacaaaaaacaagaaccagtaccataagtcaccaaccaattccaaggccctgaagtatagttga

SEQ ID NO: 10606 - RNA, 903 nt, synthetic construct
  source 1..903: mol_type = other RNA
atgaatccttacagttgcaccctgtataactgcaaaagcttgaacaagctcaagtcctacttgaatattgaggacgataagtacttcaaatctctgaatgctaacctgagcgcgaatcccttcaaatttttccgtaagttcgagaaaaacgagagagaactgtttcgctgtaataaaagaatcacacagatacaccaacgattcatcaaactgtttaagatcgaggagagtgagtacttaaaatctggcattaagaaggaatcacacattaccaatgccctggctcataaagacagcaacttctttctattggtagatatcaagggcttctatccctctactacaaaggccaaaatcaagaaacagctgatcatgacatatcagcagtccagcaacgtggcagagtttatatcaaatgctgtgacagtcccgcaggagaaggccaacaataaacgcgccctcgttactggcagtgtgctatcccagtacttcgcatatgtcatcaacaagaaaatgtttgacgaactttacaagctgtcaaaacacaatgatgttatcttcacggtgtacgtggatgatatctccttctcgtctaagaaagtcctgacctataagtttcaccagcaagtctacaacataattaagaagtacgggtatactgtgcataacggaaaggtgtatagggggaagatcaataacaagtcaaaaattaccggtgtacaaattaccaagtacggctttaggcttctcaccaaacataaggacaaaattaaggaactgaagaacaaaatcgacataaaatccaaacggagcctcctcggaatgttaaattatgccattcaggttaatccaaagtataggcggtacaagaacctgtttaagaactacgaagaacttaattga

SEQ ID NO: 10607 - RNA, 906 nt, synthetic construct
  source 1..906: mol_type = other RNA
atgtttacctgcactctgtacaattgtaagtcactgaacagtctccagaagtatttactgatcaagaccaaggagttcaaaagcttgtctattgaactgaaggaaatccctcacaagttctttaaaagctttaccgatgataagggaagagagctgttcaggtgcaatggacaagtcacgaagttacataagagattgatgaagcttttcaacgttgagattcctatctatcttaagagcggcgttaaaaaacagtcccacatcactaacgtcaaataccatgagagttctaattttttcctcctgattgacgtgaaacggttttatccaagcatcaccaagagtaagattaagaaacagctgattacaacctacaaacaaagtagcaatgtggccgagtttatatcaaacctggtgacggtgccccaaaaaaagtccaacaataagcgagctctcgtgacaggctctccactctcccagtacttcgcattcattatcaacaagaaaatgttcgacgagctgaacaaaatatcgatcgaagaggacgtaaagttctcagtatatgtcgatgatatgacattttcatccaaacaggtgatctcctacaagtttcatcaaaaagtcttctctatcctgactaagtacgggtttgttacacacttgattggcaataagaaaacttataggggcaaagtcggggcgaaatctaagataaccggcgtgcatattacaaaatacggtctgcgcctcttgcagaaacacaaggacagcatccagcacattataaaacagaatctgcacgaagaaaaggggaaaactcttcttggactagtgtactatgccatccaggtgaatcccaagtacgacaagtataaacggttactagagaagtacaacaagctctga

SEQ ID NO: 10608 - RNA, 957 nt, synthetic construct
  source 1..957: mol_type = other RNA
atgattaagtacaaccttgacattttcaagaactttacctcaatagagaagacgtgtgaatttctctgcgtgaataaagtgctgaagtacaacatcatcaacaacaacatcaaagagtgttatatcaccgaaataaacgataatgggagggaaattcataagcccattttcttcctgaaaaagactcagaagaagctgctcaaatgcttacttcccaaagttctacctaagtacctgtttgcgcctagcatcaagaacacaaataagaacaacatcgagaatgcaaggtaccacctgggcaaaaaatactttctgaccatggatatcagctcattttataacagcatcaagggaaacactatttacgacctctttttcaacaagttcaaattgaactctgacattgctttgtttatcaccaaactcaccgtatacgataatggaaaggaaacgttcctgtccacaggttctccgagttcccagatcttggcttatctctgttactcggacgtctttgacaacatttacaacttgtgccttaaaaaaggcattagattctccctgtatgtggacgacatgaccttcagcagtgatataaagtttacaaacaagcttcccaacaagataattgacattttcgagaagaacaacctgaagataaaaccagagaaaactaagcgatataacaaaggctatgccaaaataacaggggtcatcctcaagaacaataagctgtacatcaagaattccaaacggaaagatattatcgaaaacctgaaactcctaaacaagtctaacgatatcattaagaaggagatcgagaacaacaacatcgagataatcaagacaattagcaagttaaacggtctgctgaattatactaaacaaatcgaagaggatcacttcctggccaatagaaatcgcatccggaagttgtataaacttattccaaaatga

SEQ ID NO: 10609 - RNA, 954 nt, synthetic construct
  source 1..954: mol_type = other RNA
atgcaatacaataattgcatactttacagcctgaactctaaaaagaaactcgtgaagattctcattgtgaacaagaacatcaacaagaagaaactcgttaaaatcttctctaaggaggaacaactgaagatcttgattgaaaaaagcaagaaggtacaactgaccgacaagaaaacacgcaataaaattctgaacagtactaacatcacgtttaatgagaacatacaccgtcaatttacatatgcccagaaaaagtcagactataagatgatccttaagaaactgtctaagattctgagcatatgggtcgaaaaaaacaacctgaactacttatactccattatcaaaaacgtcgattacgtcaaaaacgcttatttccataaggagaacaactactttctgaagatcgacttcaagaactactttaacaacatctcatccctccagatctttaatttcttcaagtacaagctgaacactagtatagacattgccaggatattgacagttttgagtgtggcagatatcaataataccaatcttaaacagggcctcgaaactagccctattctgtccttcttagtgaatatcgagattttcgaagagatataccagtactgtatcgagaaaaagtttaagatgtccctgtatgtggacgatttagttatctcaagcaaaaatcccatcaacaaaaaggagattcagtttgtattcaacatcctaatcaagaacaagctaaagatcaatcgacggaaaatcaaataccagaacctgtacaataacatcgtgattataaccggaattcagattctgaagaatcacaatctcaaaccaatcaacaaaacctgcaagaagttgagaattgagaaaaagatctctaagaaccagaatgtgattaatgggcttatttcgaacctcaaatacatccagcagataaatgataagaacaaatga

SEQ ID NO: 10610 - RNA, 1002 nt, synthetic construct
  source 1..1002: mol_type = other RNA
atgaattacaaagagtgctctatctacaagataacaaagaagagtgacgtaaattacctcctggacaacgccgacaaagccacaaacatcaataagtaccaccagtatattactacctacgtggtccttgatcctaatgggaaaccaaaaaggctgatcgaatgcattgaggaaaagtataggcacactaacaaagtcctattcaacttactcaagagcatcgaaacccctgaatggcatttctctaaaaaggctgttagctacctggacaacgccttttatcacctcgataatcggtacatgttaaccttggacattaagaagtttttccccaatacttctcaagattccgtatatcgcttctttctgaacaaattcgagttgacacccgacatcgcaagttacctcgccaagttgtgcaccgtgaacattgatctttgtaaatatgatagcgtcgagatgaagaataacgtgaacacatatatggagatcaagaagataagacagcggaaccatctgatcacgggtgctagtacttcatgtctcctaagtttcctggtgcaccaggaaatgtttgaggaaatcagaggccttctgaaaaagcacgaaaagatgtccgtgtacgtcgatgatattactataagctcaaattgccccattgacaagaaactcgtgaagcagatatccgcgattctgtaccgatatggccatcggttgtccaagaacaagacaaagtactatacaaaagactcctacaaaagaaccaccggggtgattcttactccatcaaagcaggcccgaattccgaactctaaaaggaatgagatctttagcctgttcggcatctataaagaaaccggatatacctgtgagaaaacgaaggaccgtctgcgcggactgctgaattacgcacgctccatcgagcctaacgcttttccaagaatctatgaggcagttgttagccagtctaaatcgtactcaaaacaaaatcccaccaggtga

SEQ ID NO: 10611 - RNA, 1251 nt, synthetic construct
  source 1..1251: mol_type = other RNA
atgaatttaaacgaattgattgagcagcagatacaaaaatgtcggctgtacgggctgactaaaccactcatcattaaggagattctgaatattcccgattacgtggatattaagcacctggataaatcaattgactccttttacgacaccttttacataaagaagaactgggccaaggagagccagacaaaagaagaacggtataaagagattctgaacattgagaagaacatttccgagaggttcaccagtatccccgacggagaagacaaaacaaaataccggaagatagtcaccatcaatacagactggctcaagaaatctcagaagaagtttaacaagatcctcatgtccattctcttggacaagaaagtgagaggaatcaagcagaagtcaatcatcccttaccttcacagtgccgtgaaacagcgtagctatcatacaaatgctcaagcgcatgtcggagataaatacgtctttgccatcgatctgaaagatttctatcctagcgtaaccaagtataagctgtaccttttcttcaaaaacgagttcaatctgtcttcagatattgccatgttctatgcagttctcagtacctgcatctctgacgatggcacttaccgcttaggtcaaggcctctcacagtccagcactttagcttatctggttaactattcccttttcaactatctgtacgagctaagcaaggtcgaagacattgatatgtctatttatgtggatgacgttgtgttctctagcaaaaacaaaatctcgcaggactttatagataaactgttcggcatcataaagtccaacaatatgcagatcaagcgacaaaaggtacattattacaagaaggaatcggtaaagaagatcacgggtgtgtatgtgaatggcaataagaccagggtggcaaatcacaagcactatgagtttcatacgcagtacaaatacttgaagaaccatatccttaacgtgaaaaccatcgaagactattacaagatctataacttgtacctcaagttttacgggaatttccaacacattaaaatggttgaaagcagagtgcacgataggtacgaaaagttcatcaaagactttgacgagttttttccaaaagggataaacaaaaagcagaagagtatcaactaccagaaagacaacattaagaatgtgactgaccgcgagaaactaaataaatgctatcagaagctgctgaataaaaataagatcatagagtctgtcctgtga

SEQ ID NO: 10612 - RNA, 1251 nt, synthetic construct
  source 1..1251: mol_type = other RNA
atgaatctcgacaacttactggaggagaaaattcgcgagtcgagactgtacggagtgaccaaaccgatgattataaaggagatgttgaatatccctgaagacatcgacatcaagaaccttgataagaacattgacagcttctacgatacgttctatataaaaaagacctgggttcagggtagtaaaacaaaggaggagaaaatcaaggagattctcaacatagaaaagaccacttctgaaagatacaaaagcattccagatggagaggagaaaacgaaataccggaagatcgtcacaattaatagcgactggcttaagaaatcccagaagaagttcaacaaaatcctgatgaacatcctgctggataaaaagatcaggggcgtgaagcagaatagcataattccctacttacattcagccgttaaacaaagatcttatcacacaaacgcccaggtgcacgtgggggacaagtacgtgttcgcaatagatcttaaagacttttatccctccgtgactaaatacaagctcttcctgttctttaaggataagtttaacctgtctagtgatattgctatgttttacagtgtcctctcgacatgcttagcagacgacggttcttatcgattgggccaagggttgtcccaatctagtaccctggcgtatctcgtgaattattccctgtttaactatctgtacaacctcgccaaaaatgacgacatcgaaatgtccatttatgttgatgacgtgatcttttccagcaaaaatgagatttctcaggtctttatcgataaactattcggaatcatcaagggcaatgacatgaggattaaacgccaaaaggtacacagttataagaaagagagcgtaaaaaaggtcaccggcgtcttcatcaatggtaataagactcgggttgctaatcacaagcattacgaatttcatatgcagtataagtacctcaagaaacacataatcgatatcaagtccatcgaacagtacttcaagatttataacctgtaccttaagttctacggcaattttcagcatatcaaaatggtggaagggcgggtacacgatcgttacattaagttcatcaaggaatatgacgacttctttcctaaaggaatcaacaagaaacagaagaatgtcaactataggaaagggaacattaagaacatatcagattcagagaagctgaaatcaagctacaaacgactgctaaagattaataaggtgtcaaaaagcgtgttgtga

SEQ ID NO: 10613 - RNA, 1266 nt, synthetic construct
  source 1..1266: mol_type = other RNA
atggacctcaataaactgattgaggagaatatctccaaaaacaggattactggcttgaccaaaccgaagattatcaaggagatgttatctataccagagaacatcaacctcaaaaaactggatcagatcataaatagctgctacagcactttctatattaagaagaattggtcgaagcatcaggaaacagaagaggaaaagtacatcagataccttaatattcaccaggaactgtctgaacgtattcaacagctgcctgaaaatgccgacaaaaccaaatacaggaaaatccttgtgattaatgagccatggctcaaagtgtcacaaaaaaaactgaataagctgctgacatccattctgttgacaaaaaaggagaaagcgaagaaaagagaatcaattgtaccttatctgcactcaagcgtaaaacagaggtcatacactacgaacgcacaggcccatattggggataagtatgttttcgctatcgatctcaaggatttttaccctagtgtcacgaaggttaagattttcaacttcttcaagaagcactttaagcttccctccgatatcgctatgatctatgccgtgcttagtacatacaaatctgacaatggagagtattgcctggggcagggattatcccagagctccaccttggcatttctggtcaattaccgactgtttaactatttatacctggaggctcagaagctcggtattgaaatgactatctatgtcgacgacgtgatatttagcagtagcagtcctattccacagaagtttataaaccgcctattcggcatcattaaggagaacaaaatgtccataaagcggcggaaggtgtattactatggcaagaaacaaacaaagaagatcaccgggatatacattaagaaaaacaaaaccagcgtggcctacgagaaacataaagaaatcagaatccagtacaactatctcaaagaaaagatcaaggagataaagactttctctgactacctatgtatctacaacctttacctgaaattctacggaaactaccaccatatcttgaatgtggagaagaagatcaataacaagatcctgaacttcgtggataagtatgatgagttttttcccaaaggtatacacaaaaaacagaagcagccctattctgtccaaaatatcaagaccatcaatgacgtccaacgcttgaataagtgttatcagaagctcaagaacaaaaacctaaacgaagtgattctggactatcccaacgttaatctctga

SEQ ID NO: 10614 - RNA, 1227 nt, synthetic construct
  source 1..1227: mol_type = other RNA
atgaaaaagaattttgacggtctaaaacggctgaacaaaaagaagaccatttactcactgttcgagtttcctaaagcagcatccaacaaggactacgactttagcaataattatgagttccgctacctggcaaagaagaaggatgacataaatagaaaggagcgaaaactcgaaagacttacagggtatatccagctgcaagatagcgataaagatgctcttatgcgctccaggcccaaagactacgacaaaaattcctatcggaccatagtgaactattctaactcctccgattggttaaagaaagcccagaagaagatccataaatatatcgtgaaggagctaggagaagtcgaatacctgcacagtaccatcaaatcaaagagctatgccactaatgcctttcagcacaggggagaaaactacactttggccatcgacctgaagaatttcttcacgtatgtttcgagggagaagctgcagtataccctgaaggatttcctacagatcgattctgacgtagctttcctgtacagttccatgttgactagtcccgtggatgagccgccgcatcatggagggaagtataacttgggccagggcctgccatcatctcctatcctggcttatttgtgtcacgcgagtctgttcgagtatatctacaataactcactcaaggaagagatcaccatgacagtgtatgtggatgatgtcgtgtttagtagcgttaaacccatcccacagcacttcattgacagactgtttggattatttaagcggaatggcctcgagattaacaaggataaaatacgcctttacatgaatggctctaccaagaaaataacagggacatacgtgagccctcagaagcttagcatcccaaatcgaaaacacgaagaacttcataacctctaccaaactctgaaggaaaagaaagaaaagattgagacgatggacgactacttgttcctctacaatatttacctcaaattctctggcaattaccaatacctcattcaggtagaatgcaggggtgaggacgggaaaatttctgtcaacccacggtacaagaaatttgagaagttaaacaacgagctgaacattctgtttcccagaggcctcaaaaagaagaagaagaaaaccccttatagcaaagaaaacatgtacttcgaggaatataagcaactcgaggagaaatataaactttccgtttcacgtctgaaatga

SEQ ID NO: 10615 - RNA, 978 nt, synthetic construct
  source 1..978: mol_type = other RNA
atgaaaattctcgaaaactgcaagctctttaaactgaacaagatcaagaccatatacaagaaattgaacatccccatagaggcacagcagaagaattttgacttcgattctctatacgacttcaaatacctgaagaaggactctaaagataacaacaagattagcaaagaggaacgctttgagaaatatgtgaatattgagaagtccataccgcagctgattgatgagcgaccaggggacttcaataagagcaaatatcgggttattatcaacatcaatcaggagtggctgaaaaagagccagaaaaagttccacaagatcatagccaaggaactcaacaatatcccctatcttcattctaccatcaaacacaaaagttttgcgacgaatgcccataagcacattggtgaaaaattcaccttgactattgacctgaaaaacttcttcacatgcatttcgagagagactctagctaataaactgaaaacgcttcttgaaatcgattctgacatcgccatctattacagccgtttgtttacaagtccttctgataaacccccctacaataacgggcaatataacctgggacaaggactcccttcaagtccaatcctggcatttctctgtaactacactcttttcgaatatatcaacgatctcgctaagttatacaatacctccatgaccatttacgtggacgacatcaccttttcaagcgacttacctatttcccaggagtttatagacaagctgtttggtttgtttaagcagaatggcatgaggatcaatccaagtaagatccacctgtcaaaaaacaattccttcaagaagatcacaggcgtaaatattattgatggcaagccaaagatacctagcaggaaacatgaagagattatgatccaattcaagaccattaagacactgatgactatcaagtccttttcagattatttcgacgataaccaggtcatattctga

SEQ ID NO: 10616 - RNA, 1260 nt, synthetic construct
  source 1..1260: mol_type = other RNA
atggatagggtcaaagaatgtcttaaaaattgcagactgtacaagttcaacaatagaaagggtataaagcaactcttgaagatcccagacaatctgaacctgaacgacatacgcggcgaactgtctagctattacaacttcttctacctaaagaagccggataaaatcaagtcaaagatgagcaaagaagagattaggaataagtacctctcaattgaagagaatttggagatctacgatgagaggccggccgattacaccaaagacaaatatcgaatgcttatcaacatcagagagaaatggctgaagcagacccttaaacggattaataaactgctgagtcagagtctaatcaagaagaacaaaaagaacgtggaatatcctatcccctatctgcacagctctctcaaaaagcgatcctataatactaacgtgaaagctcacaagaaccataaatacatattggcgatagatctcaaagcattctaccccagcgtttcgtatgagaagatcattaacttctttcggcatgatttaaagctggagaaggacatagcagagatatatacagccctgtgcacttgtccattggatgatccacagcagggcaatatccaatacggcatcggccagggactggctacctctcccgtgttagcctttctgacgaattaccgtatgttcgagtatatttacagtatcgcccaaaaaagcgggatcgaaatgactgtgtatgttgacgacattgtcttttctagttccaaacctattgagcagacatttatcaattccctgtttggcattgtgaagaaaaataacctgaagatcaacaagaacaaggtaaaactctatggaccaaaacaggtgaaaaagatcaccggattatgcattattaaggggggttcaatcaaagtgcctaattccaagcactttgagacaaaaatacagtttgagtacctagtgaacaaaattctggtgattagcaatatcgacgactatctttctttctacaacttgttcctcaagtttaagggaaatgttcagtttatcgaacttgtcgaagacaaaattcccaaaaagtatagcgacttcattaaagagtacaaggattatttcctctacggggtccctaaaatcaagaagtccaagatttacacacaatcaaacgtatccaatgacgattacaagaacttcgtcattatgtatgaacgcctcaagaaaaagatagacaaggtgaagaacaataagatcatcatgtga

SEQ ID NO: 10617 - RNA, 1242 nt, synthetic construct
  source 1..1242: mol_type = other RNA
atggacaatgttaaagagtgcttgaagaaatgccgcctgtattgctttaacagccgcaacggcatcaaaaatctgcttaatatacccaaagacttcgacctggagaatgtccgagacggcctgctgccctattacaattttttctacctcaaaaagcccgacaaaagcaaaaccaaggaaactccagaagagaggaagatgaaatatctctcaatcgaagaatcgtcagatatatatgacactaggccagatgattattccaaagacaagtaccggatgttaattaatatcaacgagaaatggctcaagaagaccttaaagaagattaacaagctactgagcttgtcccttatcaagaagaacaaaaaggaagtcaactacccgattccttatcttcactcatccttgaaaaagcggagttacaaaacaaatgtggaggctcataattcaaacaaatacctgctggcgatcgatattcagaacttttacccaagcatatcctgtgaaaagatcttcaatttcttcaagtacgaccttaatttggatgacgatattgccggaatttatacttccctgtgtacctgtcccttagacgatcctgtcgtgggaaaatttgaatatggaattggtcaagggctggccacgagccctgtgttggcatttctgtctaattatcggatgttcgagtacatcaatgatttcgccacaaagaacaatatcgaaatgactgtctacgtggacgatgtagttttttctagcaacaaaccaatcaagcaagagttcatcaacagtctgtttggcataataaaacgcaatggtctgcgaataaaaaagtccaaggttaagatctatggtcccaatcaggacaaaaagattacgggcctctgcattacaaagggggggaaagtgagagtgcctagatctaaacacgaggagctgaaaattcagtatgactacctctctaaggaggtgctgaacatcaagaacatcaacaactatttcaacttctacaacctctttctgaaatttaaggggaatgtgcagtttgtactacttgtcgaggaacgtgctacaaccaagcatttcaagtttatcgaagagtacaaggatttctttctatacggcatcagaaagaacaaaaagggaaacaagtataccaaagacaacatttctgaagaggattacaagaaattcatcctcaaatacgagaatctgaggaagaagattgatagtctcaagtga

SEQ ID NO: 10618 - RNA, 1017 nt, synthetic construct
  source 1..1017: mol_type = other RNA
atgcagttcaacaattccaagctctatggcctgagcaataagaaacttttggccgacattctgagtgttgacaaaaagtcacttaagaatgtttccctcgaattcctcccctacaaactgccacaacatctatccacaattaacggcaagcaaagagatatatacaaccctaatgacgaacacaagaaggctctgcggaaactcgtccgcttacttatgcaggttgagctgccttcctatgtcttcgggggaatcaaggagaagagccacattcagaatgccagtatccataaggctaataactacctgatgctcattgacatccagaatttcttcccatcgacgttagatagctatgtgtatgatctctttaagggaaagtttcagatggccgacgatatagcaaaaattctcaccgatttcgtaaccatcccttgcgagaaaaaagacggtaggtatctgccccagggctatccaactagtccgattctatcatatttggcatatgtcggtatgtataatgaattggccactgtggccgtggaaaatgagatgattttttcctgctactacgatgatctgacattttcaagcaataagttcatcaacaagagcttgaaacgtaagtgttaccagatcatcgaaaagcaccaactgaaagtgcatcccatcaaatctaagctgatagtaaagaaaggggtggaagtgaccggggtttttctggatgacctcggagaggcaaaggcgcccaaaaagctgcttaagaagctgcaggagtcatacgagaaggtgaaaaatatggataggaacccttctgagtttaccaaaatgaactttgtcgacgagttaaacaaactgcagggccttatctctgctgtcaaatctatcgagaaaaaccggaagattgacctgtttttgaacgaactgaagttcatacgcaagaaatacaacgtgccatacagaaagaacgacgtgaaaaaatacttcaacacagaatacgctagcattatccgatga

SEQ ID NO: 10619 - RNA, 1017 nt, synthetic construct
  source 1..1017: mol_type = other RNA
atgcagttcaacaacagtaagctgtttggcctgtcaaataagaagctcctggccgacaccctgaatgtcgagaagaaatctctaaagaacgtggcaattgaattcgtgccttataagttgcccccccagctctctaatataaacggaaaacagcgggatttatacaatccaaatgaggagcacaaaaaggccctgcgcaaactcgtcaagctgttgatgcaggtcgaactgccctcatatgtttttggaggcattaaggaaaaatcccacattcagaacgcgtttgttcataagcaaaacaaatacctgatgctgatcgatatccagaatttcttcccttctaccatggatagctacgtgtatgaccttttcaagagaaaattccaaatggaagaggatctggctaagatcttgacagactttgtgacaattcagtgtgaacgaaaagaaggcaggtaccttccacaagggtatcctaccagcccaattctaagctacttggcctatgtagatatgtataatgagcttgaagcactggcagtggaaaatggtatgtctttttcctgctactacgacgacctgacattttcgagcaacaagtttataaacaagagcctcaagagaaagtgctcccagatcatagagaagtaccaattcaaaatccaccccaccaaatccaagctgattgtgaaagagggcgtggaagttactggggtgttcctcgatgatctagggaacctgaaggccccaaagaaactgctcaagaaactgcagaaatcatatgacaaagtcaaggagatgaatgagaatccgagtggatttactaaaaaaaacttcgttgacgagcttaacaggctccagggtcttgtggctgccgtccgcagtatcgagaacaatcgtaaggtaaacttattcctcaatgagttgaagtacatcagaaggaaatataacgtgccttaccggaagaaagacatcaaaaagtactttaagacggagcatgctttactgattcagtga

SEQ ID NO: 10620 - RNA, 1017 nt, synthetic construct
  source 1..1017: mol_type = other RNA
atgaattttaacaatagtaaactctacggcctgagcaataagaaaatcctggccgatctcttgaaggtggataagaagcggttaaaaaatgtcatcgaagagtttgttccgtataaacttccaaccgagctttctaccattaacggaaaaaagagagacttgtacaaccctaaaaacgagcacaagaaagctctgaaaaagctggtagggctgctaatgcaggtgggtattccatcctacgtgtacggtggaatcaaggaacgcagtcacatccaaaacgcatcaatccaccggactaaaaagtacctgatgttgatagacattcagaatttcttcccttcgactagcgattcctatatctataacctgttcaaagatcgcttcggaatggccaatgacctggcaaaaatccttacagatttcgtgactgttcaatgcgagaaccgtgaagggcgatatctgccacaggggtatcccacatcccccgtcctgagttacctctcttatgccgccatgtatcaagaactcctgcatctggccgtcgaaaacggcatgcagttttcctgctactatgacgacctcacattttccagcgacaaattcatctctaagtcactaaagaggaaatgttctcagataatagagaggtaccatttcaaaattcaccccaccaagagtaagctcatggtgaagaagggcgtcgaggtgaccggtgtgttcttaggggatagcggcgaggttaaggcccccaaaaaactgttgaagaaggtgcagaattcatacgaaaaggtgaaggagatggacaaaaaccctaatgcttttacgaagattgattttgtggacgaacttaatagctttcagggactcattgctgcagttaaaagcatagaaaatgatcggaaggtcgacttatatttgaacgagctgaagcacattagaaagaaatacgacgtaccttacaggaagggctcagcgaaggagcattttagatctgagaacgctaaattcatcctttga

SEQ ID NO: 10621 - RNA, 1017 nt, synthetic construct
  source 1..1017: mol_type = other RNA
atgaatttcaacaactctcgtttatacgcccttagcaataagaaggtgttggctgacatcctcggcatcgacaagaaacggctgaagaatgtgatccaggaattcgtgccctatcggctgccacctgaattgagcacagtgaatggcaagcaaaggaatctgtacaatccaaatgatgaacataagagagctctgcgaaaactcgtcagactgctgatgcaactcgaaattccgccttacgtgtatggcgggatcaaggagaaatctcatattcagaacgcatcaatacacaagaaaggaaaatacctgatgcttatcgatatacagaacttctttccctctacatcggatagctacgtgtacgacctgtttaagaacaaattcggcatggctaacgacattgccaaaatcctcactaatttcgtaaccgtcccctgcgaaaattccgatgggcggtatttaccacaggggtacccgacttcccctattctgtcatacttgagttatctcgatatgtacgaggagctgctttacctagcagtagaaaacggtatgaagttcagttgctattatgatgatctgacgttctcttccgacatatttattagcaagagccttaagcgcaagtgtagtcagatcatcggaaagtaccactttaaaattcaccccaccaagtcaaagttgattatgaagaagggagttgaggttaccggcatatttttgaacgaccttggggagatcaaggtgcccaagaaactgctgaagaaactacagtccagttatgagaaagttaaagaaatgggtgagaacccatcaacctatataaaatccgacttcgtcgatgaactaaacagactgcagggactgattgccgccgtgaagtctatcgaggtgaatcgcaaggtcgacctctacttaaacgagctcaaatatatcaggaagaaatacgacgtcccttataggaagagctccatccataaacactttaaaacagagagcgcgaaatttattatgtga

SEQ ID NO: 10622 - RNA, 1014 nt, synthetic construct
  source 1..1014: mol_type = other RNA
atggatttctccgcttccaaattgtttgggattagcaacaagaaatacgttgccgagctgctgaatgtggagaaggcaaaactgaagaatgtgtcgtctgaatttgtgccctataaatttgaacagagtgtcaagggcaaaaaacggatcctctataacccaaacgatatccataaggccatcctgaagaagattacaaagatgatcagccagctggacatcccggattacacatttgggggaattaaaggccgcaattatatagacaatgctaatgtgcatcgggacaacagctatttactgctggtcgatatcaagaacttctttccctccaccagagactcttacatctacggtttgttcaagaataagttcgagatgccatccgatatagctaaaatcttcacagatctggtgaccgtaccttgcgaaaatggagaggggcgatacctccctcaggggtaccctacaagccccatcttatccttctttgcatacttggacatgtatgaggaaattttcgaagtggtgcgcgccaacaacatgggcttttcttgttattatgacgatctgactctcagctctaataagttcattgcgaaaagtgtcaaaagaagggtcacccggattatcaggaagtacggattcgaagttcaccccactaagagtaggcttgtgatcaaaaagtacacgaaagtaaccggtgtcattcttaaagaggatgagatcgttgcccctaaggctctactgcgaaagttgcacgacactcataacctcatgaggcttatggataaggactgtgttaagcacaccaaagaggacttcattgatgtgtgcaataaggtacaaggcctcatatcagccatcaaatcaattaacgaccagaaaaagctagacatatacattaacacgctgacacacatcagaaagaagtacaacgtgccatatcgcaaagccaacatcgcaaccagttttaatactgactatggccgtcttataggagtgtcaatttga

SEQ ID NO: 10623 - RNA, 1026 nt, synthetic construct
  source 1..1026: mol_type = other RNA
atggacttttcaacaagcaaacttttcgggatttctaataagaagtacgtcgcagagctgttaaacgtagagaaggtcaagcttaagaatgtgagttcggagtttgtgccataccggtttgagcagagtgtgaagggaaagaaaagagttctgtacaaccccaatgatgcccataaggcaatcctcaaaaaaatcgttagaatgatctcacagctgtacttgcctggatatacctttggcggcattaagggccgcaattatattgacaatgctaatgtgcatcgaaacaactcctacttgcttctcgtggacatcaaaaattttttcccaagtacaagggacagttacatctatgacctgttcaagaacaaattcgagatgccccccgatatcgccaagatattcacagatttggtgaccgtaccttgtgaaagcggtgaaggcaggtatttgcctcaggggtacccgacctccccgattctgtcatttttttcttacctggacatgtatgaagaaatcctcaaagtgacgctggagaataatatgctgttctcctgctattatgatgacctaactttgtcttccaacaagttcattgctaaatccgtgaaacgaagggtgacccgcatcattcaaaagtacggcttcgaagttcaccctaccaagagccggctggtgatcaaaagacacactaaagttaccggtgtcatattaaaagagaatgatattgccgctcccaaagcgttactaaaaaaactgcacgacacttacaacctgctgctgtctctcgataaaaactgcacgaaatatactaaggaagagtttgtcgatgtctgtaacaagcttcaggggctcattagcgccatcaagagcattaacgacaagaagaaactcgaaatgtaccacaacacactttctcatatccggaagaagtataatgtaccatacaagcgcgcaaacatatccacctcattcgagacagattatggaaagctcataggaactctgccacgtcacatcagctga

SEQ ID NO: 10624 - RNA, 1209 nt, synthetic construct
  source 1..1209: mol_type = other RNA
atgaaacacgcaaagcacaggaagaagcagtgcctgaatgactattatcaggccttaaaagagattacgatcgtgaaaaacctggtgtacgtggtgaaagctatccaatatctgacgatccttaagatcatcatcgccattattttcttcacccttcaagtcatcgtgaaaatcatctcatgggtcattccatatctggagattatctacaacttcctgtcccaggtaacaagtctcttttgctgctttcaaaggggtaatgtcaaaatgtactggaagtcatgtaggctctacggcgtgaagagcaaacgggaactgtcctatctgttgaaggttcctctggagtcactcaaaaacatcgacgaaaactatatcagcgagaatttcgtatacgatgggcgggagctgactaaccccagtgacaagcttaagaaggtgctagaaagaattctaggctatctcttcatgctccgcattccaccctacgagtacggaggcatcaagggaagaaacgccattcagaatgtgcagagacacgtgggccatgggtttatcctgagaacagatatacggcattttttccccaatactaagtatgacaatgtgttcgatctcttccgtaataaattgaacatgtccatcgattgtgccacaatactgaccctgctgactaccaatgtcgctgttaacgcatcttataggagcttggcgcagggctacccaacatcgccggttttgtctctcctgtcctaccttgacttgtttaacgagatttccgactatgcagatgaacacaagttcacttttaccgcttactacgacgatttaacactgtcctctgaaacctttattaacaaatcgcacctgcgaatgattgagcacattataaagaagtacggatttgacgcccatcctcaaaagactaaacttgtgaaggttagcaaggtccatagcaagataaagataaccggcgtgctgttgcagaaagatggtttatacgtccctaaaaaactctataaggggctttacgaatacgtacagcgcctccggagtgtcttaagcggagacgtttcaatcagtaatgaagagaaaaagacactgatacagcaggtacgcggttgtatcgctgccatccaggtgatatctgatgatgaaagcttccaggggtatgaggacatggcgcgatctctagagaaaaccattatttga

SEQ ID NO: 10625 - RNA, 999 nt, synthetic construct
  source 1..999: mol_type = other RNA
atgatcttcttccttaagttgcaccttttttttgtcgctttcaaggaggtgcgaaaggtgtattggaaatcttgcccattgtatcgcgtcaagtccaaaagaaagctctcatacctgttaaaagtaccagttgagtccttcaaaaacgtcgatgaaaactacataagcgagaactttgagaaggacggtaggaatctgaccaaccctagtgataaactgaaggtggttcttgagaggatcctcgactatctgtttatgctgaagatcccgccatacgaatacggagggatcaagggcagaaatgccattcagaatgtacaaagacacgtgggacatgggtttattctgagaaccgatattcggcatttttttcccaacaccaagtataataacgtgttcgacttcttccgcaataagctggacatgtctatagattgcgcaacaattctgtctttactgacaaccaacattgcacgcaatagcgatcatcgttctctcgcccaggggtatcctactagccctgtgttgagccttctggcctatttgaatttgttcaacgaaatttcctcctacgcaaatgagaagggatttactttcacagcttactacgacgacctgacgctgtcaagcaacgacatcatctcccactcacacctacgaatggtgaaacatatcatcgaaaaatatggcttcgaggcccacccccggaaaaccaaactcgttaacgtcagcaagtttcaatccaaaatcaagatcacaggagtgctgctccagaaagacggcctttacgtacccaagaagctatacaagggcctacacgagtctgtcaatcagctgaacctggctctcaatagtaggcaggggataagtaacaaagagaagaaaaagctcgtggaacaggttaggggttgtattgctgccatacattcaatcaatgacgatactgtgttccagggctacgaagatatggcgcggcacttagaaaaatcgattgtgtga

SEQ ID NO: 10626 - RNA, 966 nt, synthetic construct
  source 1..966: mol_type = other RNA
atgtattggaaatcctgccctctgtacggcgtggaatcgaagcgaaagctgagctatttacttaaggtgtctttaaactccctcagagatgtcgatctaaattatccctccgagaattttgaggagaagggaagaaatctgaccaacccctcaccaaagctcaagacagttctcgaaactatcctgaactacctgtttaaattacgtattccccagtacgagttcgggggaataaaaggcaggaatgccgtgcaaaatgtgcagtgtcatgtcggtcatgggtatatcctgcggactgacatccggcactttttcccaaacaccaattataataacgtgtacgacttctttcggaacaagatgaagatgagcatcgactgcgctaccatcatatctctgctgacaaccaacatagctgctggagcgcagcacaggtcacttgctcagggctacccaacgagtcccgtcctatctctgcttgtgtacctgaacctgttcgacgagatcgattactacgccagagcacatgattttaccttcacagcctactacgatgatctcacactgagctcaacttctattatcaataagcagcacctgcgcaaagttaaacacattattcgaaagtatgggttcgaggcacaccctaagaaaactaagcttgtaattgtcaccgaaatccatagtaaaatcaagattacgggcgtgctcttgcagaaaaatgggttgtatattccgaagaagctgtacaagaaactccacgaagccgtcagcttgatcgatcctgtgttgaacggaaacctcaaatatagcgacgatgacaaaaagaagctagtagagcaagttaggggctgtattgccgccatagaagcgattagtttggaaaacgactttcagggttaccgcgaccaggcacgccatctggaaaaaacaatcgactatgagcaactttccgagaataaatga

SEQ ID NO: 10627 - RNA, 945 nt, synthetic construct
  source 1..945: mol_type = other RNA
atgcagttcacgacctgcaagctgtacgggattcagagcaaacggaagctgagttatatactaaagacatccctcgcttcgctcaaaaatgtcgacctctccttccagtctaaaaatttctaccagcagaacagactgctgacaaacccgagtgaggagcttaaagttattctgcaacggatcaccaagtacttatttacaatcggaatccctgaatacgagtttggaggtatcaaagaccgttcctttgtaactaatgtagagatgcatgttggccatgggtttgtgctcaggaccgatattcgccacttttttccaaacacccactacggcgatgtttacgtgttctttcacgaaataatgaacatgtcagtcgactgcgctaccattatggcgaaacttacaacttataggtgcaatcaaaactatcgctccctgccccagggctaccctacgtctccaatcctgagcttgttctcataccttaatatgttcgaggaaatcaatacctatgctgtgaaaaatgggttcacttttactgcctactatgacgatattacaatctcaagcaagagattcatcggacgaagccacctacgcgtgattattcatatactgaagaagtacggattccaagcacatccccagaaaacaaagttggtcaagatcagtaagaactctagcaggatcaaaattactggcttactgctccagaaagacgaaaccttggtgcccaaaaagctttataagaagttgcacgtggccatgaaaaacatcgattcagcactcaaacaatctaactcccgactgaacaaggctgatgccaagaagatagtgcagcaagcacgggggtgtatcgccgccattaacaccatcggcagtaatgatgaattccagggttatagcgaccagattagacagctggagaagaggtgttactattga

SEQ ID NO: 10628 - RNA, 1263 nt, synthetic construct
  source 1..1263: mol_type = other RNA
atgattaaaaagcataagattgtgcaggtaaagcagtggctcaaggagaagacttgcaaagatggaaagattaacttcacaaaaacctgcacctttctggccgcaattcaggtttgcctttggctgatagaaatcatttgtatgctgtgtggatttatcatcagtacgtttgtcgagattgcaccattccttgaggccttttttaaaatcctggaaaacctcgccagtactcttagttacaacctcaggcggtcattctttgtggacttttacaactctaagctatatggggttagcaacaaaaagtatctttccgagctcctgcacctggagaagtcaaccctaaagaagatcgacaaattctacgaagtgaaaccctttctgaagaaagtgaataagaaggagagactcttatataatccttctatgcagcacaaaatcgcacttaaacggatagtgaaaatgttgtcattcatcggatttcctgactacctgtgtggcggtgtgcccgaggtgtcctacgtgaccaacgccagcagacatctggagaagaataacctgcttctcttggatattactaacttcttcccatccactaaggatagctacgtctatgatttcttcctgaacacactaaatcagagtaccgatatcgcgaaaatcatggtcaatttgacaaccgccaaatcggaggacggtgattataggtttctcccccaagggtactcaacatcccctatgttgagcttctttgcctaccataagatgtatgaacgtttaaatgctttcgctgagaaaaatgacctgaccttcagcgcatactatgatgatttcaccttctcttctaaggactttatccctaagtacttaatgaaggaggctatcaaaattatctctgactatggcctctccgttaacgaaaaaaaaacaaagctcgtaaaggtgaatcacactaaaataaccggcgtcgtggtacataaagataagatgagcgtcccgaaagggctgttcaagaaaacgtatgagcactacctgactttgctggacatggacgaaaatacagagaattatacccaggataactttatcgacacgtgtaatcgaatgcagggctgcctggcggctattcaatccgttgagcccgaacgcaacctggaacactacaagaacatgatacgctatattaggaataagtacgacgtgccagtcgaaagaaaaaagaaggacaagtacttcaagaagaaagaagtgcggcaaacatga

SEQ ID NO: 10629 - RNA, 1227 nt, synthetic construct
  source 1..1227: mol_type = other RNA
atgatcaataaacataaaatcgtgcaggtgaagcagtggttaaaagagaaaacctgcaaggacgggaagctggacttcactaaaactattgcttttctcgcagcaatccaagtttgcgtatggttgttcaagatcatttgtaggatctgcggtttctctattagtatttttatcgagatcgcaccttttctggaggctttcttcaaatttctcgaaaatctggctagtacccttagctatataaaggagggcgtcttcttttacggattctataacacaaagctttacggtgtctccaacaaaaaatacctgtcggaattgctacacctagagaaaagtaccttgaaaaaggtggataccttttacgaagtaaagcctttcctgaagaacattaatgggaaagaacgacttctctacaatccatccagccagcataaaatcgccctgaagagaacagtcaagatgttatccttcattggcttccctgactacctgtgtggcggcattcctgaggtgtcatacgtgacaaatgcctctcggcacttggagaagaagaatctcttgcttctggatatcaccaactttttcccaagcaccaaagactcttacgtgtatgacttttttaagaacacgctgaatcagtccactgatgttgcgaagattatggtgaatcttacaaccgcgactaataactctggaaattcaagattcctcccccaggggtattccacttcgcccatgctgtcattcttcgcttatcataagatgtatgacaggctaaacacgtttgccgagaagaacaacctgacattttctgcctactacgacgatttcacttttagcagcaacgagtttatcccgaaatattgcatgaaggaagccattaagatcattaatgattacgggttatccgtcaacgagaacaaaaccaagctggttaagctcaatcacacgaaaataactggcataatagtgcatgaggataaaatgagcgtccccaagggactgtttaaaaaaaccttcgaacactatctgaccctcctggacatggataagtatcccgaaaagtacagccaatacaatttcatagacacatgtaatcgcatgcagggatgtctcgcagccatccagtcagtggagccagaacgcaatctggatcactacaagaacacaatccggtatgttaggagtaagtataacgtgccagtaaacaagaaaaacaaatga

SEQ ID NO: 10630 - RNA, 972 nt, synthetic construct
  source 1..972: mol_type = other RNA
atggattttagcaatacaaagcttcacggtgtatccaacaaaaagtacttatcagagctgatccacttagaactgcacacactcaagaaggttgaccaattctatactgtcacccccttcgtcaaaaacatcaatgataaggagaggattttgtacaaccctagtttaccacataaaatcgccctcaagcggattgtgaagatgcttgggtacatcgggtttccggactacctgtgcggaggaatacctaatgtgtcctacgtctcaaatgcatctagacatctgatgcagaagaatcttctgctcctggacattacaaacttctttcccagtactagcgattcctacgtttacgatttcttcaaaaacactctcaatcagtcgaccgatattgctaaaattatggtgaacctgaccacagcgaagaacgagtctaacaacgttcgctttttgccccaggggtattccaccagtccaatcctttcattcctatcttactttcgtatgtatgaacagctcaatgatttcgccttgaacaataacctggtcttcagcgcttactatgacgactttacttttagctccaataaattcatccctaagtactacctcaaggaaacaacgaagattatcaacaagtatggtctaaacgtgaatgagcgaaaaagcaagatcgtgaagataaatcacaccaaagtgacgggcgtaattatccatgacgaaaagatcaaggccgccaaaggcctgtttaggaaaatgtatgagtgttatctgactctgctggacgtggacgtcaataacaatttctatagcaaggacgacttgattaacacctgtaataaaatgcagggctgcctggctgcaatacagtccattgaaagagatcgcaacctcgagcactaccaaaacatgatcaggtatatcagacggaaatatgatgtgccagtgtcaaaaaaatctataaatcggtga

SEQ ID NO: 10631 - RNA, 993 nt, synthetic construct
  source 1..993: mol_type = other RNA
atggacttcgctaagtccaggttgtacggcgttagtaataagaaatacctgtcagaactgctgcagctggaactgaaaacgttaaaggatgtcgattctaattacgaggtggaaccattctttaaagaagtcaatgggaaaatcagagaactctacaacccctctgatgcccataagcgtgctctgaaaaatatcgttaagcgcctgtcgtatattgggtttccacactatatttacggcggaattcccctggtaggatacgtggataacgcttcacggcatctcgaaaaagagtaccttctccttttggacataactaacttctttccgtctactaaagactcttacgtctatgacttctttcacaatactatgtcccagcccgccgatatagccaaaattttaaccaacctcactacaatcaagaaggacgaagagcgatttctacctcagggtttcagcacaagtcccatgctgtcctttcttagctatcaccagatgtatgaggagctggacgtgttctcaaaacggaataactttacattcagcgcatactatgatgatttcacctttagctccgacaagtttatacatacgagcaagaggagagaggccatcgcgatcatagagaaatatggattgcaagtcaacaaaaagaagacacggctaacaatctgcaatcatacccgcgtgactggtgtgattatccacggcgacaccaagaaggcacctaagaagctgcacaagaaaatgtatgactactacaggctgttactcgacatggacaaagatccaacaaagtacacccaggatgagttcattgatacctgcaatagattgcaggggtgtattgccgcaattcaaagtatcgagaaggagcgaaaccttgaacattataaaaacaccctccgctacatcaggaccaagttcgacgtgcctgtagagaagaagaagaaacacctgtatttcaaaaacgtgcagatcaataactga

SEQ ID NO: 10632 - RNA, 999 nt, synthetic construct
  source 1..999: mol_type = other RNA
atggaattcactaaaagcaagttgtttgggattagcaacaagaagtacctatccgagttactgaacgttgagcttaagaccatcaaggatgtcgactcaaattacaaagtggagcccttcttcaaagaggtgaatggaaagaaccgggaactgtacaatccaagtgaagtgcacaaaaaggtcctcaaaaagatcgtgaaactgctctcttgcattgagtatcccgagtacgtgtatggcggtattccaaacgtaggctatgtggacaatgcatccagacatttggaaaaggagtatctgctgttgcttgacataaccaacttttttccaagtaccaaagatagctacgtatacaacttcttctacaatactatgtgccagtcgtccgatatcgcgaaaatactcaccaatctcacgactgtgaagattgagaacggtgacgagaggtttctacctcaaggcttttcaacgtctcctattctgtcatttctcgcttaccatgaaatgtatgagaagctggagggcttcgcaaagaacaataaatttacattctccgcctattacgacgattttaccttcagctctaataaattcatccatgccaacaaaaggcgagaggctatagccatcatcgaaaaatacggactgcaggttaataacaaaaagacccggttaacaatctgcaattatacacgcattacaggggttatcattaatgggaatattaagaaggcccctaaaaagctgcacaagaagatgtacgattgttatcgcctgctgttgaacatggacaagtgcccggagaaatttactcagaacgaattcatcgacacatgtaataggttccagggatgtatcgccgctatccaaagcatagaaactgaacgtaaccttgaacactataagaacacactcagatatattcggaccaaatttgacgtccccatcgagaaaaagaagaagcacctttacttcaataacatcctgattgcagattga

SEQ ID NO: 10633 - RNA, 969 nt, synthetic construct
  source 1..969: mol_type = other RNA
atggagttcaaggaaaagttcaaacagaagatagtgcaaatcaaacagtggctggactctctggaggctaaggcagataattatatatggctccagttcattctcatcattgtccggttatgtgatttcatcaaagtcatcagcatcatagccctggttatcaagtgttttctccggttgagttacatccttttgccctaccttattgagtttatcgagtttatcgagactctagcatccaccttctcatacaaacgcagatctttctttatggactttacgcaatcagtcctgtatggagtgtctaataaaaagtacctaagcgagcttctgcatctggaactgaagaccttgaagaacgttgataagtactatacggtgtatccatttgaaaagaaaactaacggcaaaacacgggaactgtacaatcccagcaatgagcataaacgtgcgcttaaaaggatgaccggtatgctcaacaagattaagttccctagctatctgtgcggagggattcagaacgtgagttatgtcgacaatgcctctcgacacctcaacaaggattatatgttactgctcgatattgccaacttttttccatccaccagagactcctacatttacgatttcttctacaatagcatgtcccagccttctgatatagctaagattttagtgaacctcgtgaccgccaaagttaacaaccacaggcatctgcctcagggctacagtactagtcccgtactgtcatttctgtcctatcacaggatgtaccaggaactttatgaatacagcttgcataattgcttcacattcagcgcttattatgacgacttcacattttcgtctaataatttcatccacccaaaccgccgaagagacatcatcaagatcattgagaaatacgactttaaggtgaactccaaaaagacaaaactggtaattgggaatcacgtgtcatccccgtga

SEQ ID NO: 10634 - RNA, 948 nt, synthetic construct
  source 1..948: mol_type = other RNA
atggattttaagagatctatcctcttcggagtgtcgaataaaaagtggctggcagacctgcttaaaattgagaaatacaagctcaccaacatctcttccaacttcataggtaaatctttctttcgggaagtaaacggaaaaaccagagagctctataatgcaggtctgatccataaaagggtcctgcgtcttatcgtgaaatacctgcagaaaatcgatgttcccgcatatctacacggagggatacccgggagaagttatgtcaccaatgttgagatgcattgcgaaaataacttcgccatcattgtggatataagtgacttcttcccttccacaagcgcccagaaggtgtttgatttctttaggtacgacatgaatcagagtccagacatcgctaaaatcttgaccgatttgacaaccgtaactaagtatgagaagtcatttttgccgcagggctacccaacttctcccattctgtcctactttgcctattataacatgtacgaaacgcttatgaggtacgcccaagctaatgactttattttcagcgcctactatgatgacctgacttttagctcaaagaagcctatacctaaacgatgtatgaaccgaattatcaagattatcgagtcccacaagctgaagattaacaaaagcaagtcaaagatccggaggattaacaatgtgaaagttacagggtgcattattgtgaacggcgagttaaaggcgccacgcaagctccagaaggagacatacgacctgtatatgatcataaagaatgacgtgctgagcacgaacgacttatcacggatgcttaagaagttcatcggcaaaatttccgctattcaaatgatcgagaagaaccgcaaattccccaattacatgaagctaatcaaagataagcaggccgaactggaagaactccgcgtcgagaaagcgaaagcttga

SEQ ID NO: 10635 - RNA, 951 nt, synthetic construct
  source 1..951: mol_type = other RNA
atggatttctcaaagtctatcctctacgaaattagtaacaagaaatggttagccgaacttctcaagatcgagaagaacatgctgtcaaatgtaggcgacaatttcgtcggcaaatcctttatgaaagacgttaatgggaaaacaagagaactgtataatgcaggtaccattcataaacgctccctaaagttgatcgtgaaatacttgcaaaagattaacttccccacctatctgcacggaggaatcccggggcgtagctacgttactaatgtcgagagccattctaagaataaattcgcggtgatcgtggacattagcaacttttttccatccacaaacgcccagaaagtgttcaactttttcagatacgatatgaatcaggctcccgacatcgccaagattctaactgacttgacaactgtgtctaaagatgagcactcattcttaccacaggggtatcccacgtcccccattctgagttttttagcctattatcacatgtacgagaaccttatgaaatatgcccagaacaacggcttgacattttcagcatattatgacgatctgaccttcagtagcaagaaacctatccctaagatatgtctgaaagagatcgtgaatatcattgaaagctttaacctcaaggtcaataaagagaagtcgaaagttagcaaacttgattacaccaagattaccggatgcgtgatcgtaaagggtgaactgaaggctccaaggaagctgcagaaggaaacctacgacctgtacaggtacctcaagaattctaatctctccgacgaggaactgctgagcctgctcaagaagtttgcaggcaaaatcagtgctatacagtctatagagaaggagcggcaattccctaactacttcaagcttattgagaacatgaaatcggagctggaagaacgacggatatccgagctcgattggctgtga

SEQ ID NO: 10636 - RNA, 936 nt, synthetic construct
  source 1..936: mol_type = other RNA
atggactttacccgcactattctctacggtgtcagtaacaaaaaatggctcagcgaactgttaaagatagagaaaagcaagctgaagaacatccgaaacaacttcaacacggtgcccttcgtgaaaaaagttaacgggaagaatagggagctttataatgccggcaaaatgcacaagctcgtcttaaagaggatcgtcaagtatcttcagtctattgatatcccaaactacatacatggaggcatcactggaaaatcatatgtcaccaacgttgaatcccacaagaagaatcggtacggcgtgattattgacatcagtaacttttttccctcaacggacgcacagaatgtatacaatttctttcgctttgacatgaatcagtccaccgatatcgcaaaaatcatgacagatctgaccactgtgtctaaagggaataaatccttcttgccgcaaggtttcccaaccagccctatattgtcctttctggcctatcataagatgtacgagctacttaataactatgcgaaggtgagagacttgacatttagtgcttactacgatgacttgactttctcttcccgtaaacgcatttcaaagcggtgccttagggagattgtgagcatcatcgaatcgaacagcttggagattaatctcatcaagagtaaggtaagcaaactgaattacaccaagattacaggctgtgtgatagttggcaacgagctaaaagctcctaataaactgcaaaaggagacacacgacctgttcctcaagatcaagaatggaaacttatcagagacagaactgtctatcctcctgaagagattcctggggaaaatctccgccattcagatgatagaaaaaaaccgaaagttccccaactatctgaaactgattgaggataagaagcgggaactgatgtctaggagaaatgattga

SEQ ID NO: 10637 - RNA, 975 nt, synthetic construct
  source 1..975: mol_type = other RNA
atgtatattcaaggaggaatcttcctttttcgggagagcttcttatatgagctgtctaacaagaagttcctctccgagattattcaggtcgacctctccgtattaaagaacctggaagatctgctcgaaacggagaagtggaaaccttacaagttggagaataaaaaacgcgatctgtacaaccccacagtgcaacataagcgagcacttaaaagactggttcgttccctttactccatcacttaccccacatacttgtatggcggtattaaaaacaaatcttacatcgacaacgccgccattcacaagaataacaagtatttcctcatcgccgacatcgagaagtttttcccatcaactcacgagagctatgtatacgacttctttaggaataagatgcagatgagtatagatatctcgcggatcctgactcttctagtgacgtatcaacatgaagaggactcttatcgatatcttccgcaggggttcccaacctcacccctcttgagctttctggcttacagcgacatgtttaaagaactggagcagtttgctgagacaaataatctggtgttcagtgcgtactatgacgatctgaccttttcatccgccagtttcatatccaagcacctgaaaagagaactggctctaatcttacggaggtacggcttcaatctgagcacagagaaaacccgttttcagaagaggaaggccaacaatataaccggtgtgatagttaccaaggatggcctcaaatctccttacaagctaaccaagaaactgatgcgcttgtctagtgatctggataacaacttgaaaaatagcagcctgactaaggaagaaatcattgtccagctcaggcgcattcgggggtgcatcattgcaatccagtcagtggacccttcgagaaatctccaggtgtacgaaaagcagattaacgaggtcaaaagagttcatgacgtgacattttcttga

SEQ ID NO: 10638 - RNA, 1158 nt, synthetic construct
  source 1..1158: mol_type = other RNA
atgaaaactcgcaacgaggtcaagaagacaagagggaaacacagaaaacagttggcacagtttaccttatgcaacatagtcgtgaactttttgatggactttaaagatgtgctcgaatctcttagagccgtattccgcttggtgagtttcgtagtggacagccttcagtattggatcgatctcctgtacagtctgctgttctacttctgtgaagtctacaagatgaactattcaacaagtccactatttgaagtgagctccaagaagcgactctcgtatctgctcaaaaccgatatttccaagctcaaacaagccgacatctccttttctgcgccttacttctcaaagatgaaaggaaggaaaactcgacagttttttaatccaactgacacacagcggattactataaacgctatcaagaattgccttgagcaaattgagatccccaattatatctacggcggaatcaagaatcgttcctacatcgcaaatgcccgtgttcacgagaatgctaagagtctgatcctgatcgacctcaaaaacttcttcccgagtacaagcgactcctacgtctacgatttcttcaagaacaaactaaatcagcctgccgacgtggccagaatacttacaattatcacaaccgagtctggcgaccatggccggtttataccccagggatatagcacctcacctctgatgagctttctggcctacgaatctatgtaccagcagctgaataatctggctaatcaacaacagctccacttctcagcatatttcgacgatatcaccttcagcagctctaaatacatcaacaaggctgtggaacgcagcgcgaagaaaattgtcaggtcatttggtctgcagattaatcaggagaaatccaggactttatttaacaacgcttccaaactgaccggggttgttattaccccaacgcaaatacaggcatctggtaagctccataagcagatgatcgataacttcgacttactgttgaactcgttgtattccaacagtaagcccagcaagaaggatcttctgaatctatgcaacaagacccaggggtgtattaattctattaaggccatcgaagagaacagggatctgtcatattatacgaataaggtgaaagaggtgcggcggctgattaaatga

SEQ ID NO: 10639 - RNA, 948 nt, synthetic construct
  source 1..948: mol_type = other RNA
atgattctcctcaaatataccaatagctcactatatggcattactaccaagaaacatcttagctacatcttgaaaatgaacctgggatcactctccaacattgaacccttattttgcgccaatagcttctccaagaaaaagaacaacaaatctcgggaattttacaatccgaccctggaacagcgggcagtattaaaccgaataaatgtggctctgtgtcaaatcggggctccaaattacgcctacggagggatcaagggtcgttcctatatcgacaatgcaaaagtgcacagcggtcagaaggcgttgtttcttatcgacatttcgaatttcttccctagtaccagggataaatacgtgtacaagttcttcaagaacaagctcgcaatgtccacggacgttgcgactattctcacactggtggtaacggagaagctgttcgattccgacaaacgctttctgccacagggctatcccacaagccctctgctatcactgtttgcctacattgagatgtttgaaagcatcaacaagatcgccatcaacaatgatctcaagtatacatgctactatgacgacttaactctctcttcaagcagttacatagacaaaaagatccttagacaagtgaaaaaagagatttcgagttatgacctgaaggtgaacgatttcaaaacccgcgctctttttaataaagcctctaagctgacaggcgttgtcgtgtctcctgagaagatagttgccccagggaagctgcagctgcagatgatcgacaatttctccaagttgatggatgctatttactctggcaaaatgaccactaagatcgagatcaacgaattgtgtaacaaggtccagggatgcctggcatccattaagagtatagagcccgatagggatcttacctattacgtcaacaagctgaaaattatcagacagatgttgtga

SEQ ID NO: 10640 - RNA, 957 nt, synthetic construct
  source 1..957: mol_type = other RNA
atgaactataaaaatagcaatctctactccgtgcagtcaaaggcaaaactggcccggctgctgaatattgacgcaaataagctcagagcggttagagaaaacttttccgtcgatgcatttgtggtcgagatcaacggcaagaaaagactgcttcataacccgtcatactgctacaaacagatcctcaaacgtatgcttttattgctctaccccattggcgccggagattatgtttttggtggcattaagaacagggactacattatgaacgctaaagtgcacaaaaacaatacatacttctgtctaatcgacatcaaagacttttttccctcgaccaactctgattttgtctatcgcttcttcaggtataagatgaatatgtccattgatgtggccaagatttgcacacttctgacgacagtttcaaattctgagacaagcaggccagacaatttaccacaagggtttcctaccagtccttatctatcctacttatcctatctggaactgttcgagcagttgaataacatctcgatatcaaagaacatgaacttttcttgctactacgatgacctgactttcagcagcccccgcttcataagtaaggggaccaagcgagacattatcaaactgataaacagctatcagctgcaggtaaacagttccaagacgcgactcctcaaaaactctaacggagtgaaagtaaccggtgccgtcatccgggacaaccagctgttgacccctaattctctgttccttaagctgtacaaggaatacgataatctcctgagcgagttctatttgaatagcttcgaccagaagaaaatccttaatatgtgtgaggtggtcgatgggatcctggcttccgtgactcggatcgaattgactgaaaatgccgagtatattaagaacaaggtgcaaatcatacgcgagacttctaatgctaccattagttga

SEQ ID NO: 10641 - RNA, 957 nt, synthetic construct
  source 1..957: mol_type = other RNA
atgaatttcgagaagtccatactttataacgtgcagagcaaaaagcacctggctaacctcctgaggattgatgctaggaagctcaaagccgtacgagaatacttctctgttgagcccttcgttgctgaaatcaacggtaagaaaagactcttgtacaatcctagctactttcacaagcagctgctgaagagaatgctgctactgctgtaccccattggggcagcgaattacgtgtttggcgggataaagaatcgcgattatattatgaacgccgaattccacaaaaacaacaaatgcttttgtctgatcgacattaaggacttcttcccttctacatcttcggacttcgtgtatagattcttccggtacaaaatgaatatgagtatcgatgttgccaaaatttgtaccctactcaccactgcatcatcgcgcgagacaaacaaactcgactacctgccgcaaggatatccaacaagtccatatcttagttacttgtgctatctcgagttctttgaacagttgaataacatcagcgtatctaagaacattaccttcagttgctattatgatgatcttacgttttccagccaacattttatatccaaaggtaccaagcgcgacattattaaattgatcgagtcctaccagtttcaggtcaataaagataaatctcggcttctgaagaactcaaatggcgtgaaggtcactggcgctgtgattagggatcataagctcctgatccccaatagcatgcatttaaagctgtataagacttacgacaagctgttaaatgatttttacctgtcctcatttgaccagaccaacatcgtgaatatgtgtgacgccgtcgacggaatattagcctcaatcagccgagtggagagcatcgaaaacatcaaacacatcaagaacaaggtccgtatcatccgggagatatccaatgcaattacatcttga

SEQ ID NO: 10642 - RNA, 1041 nt, synthetic construct
  source 1..1041: mol_type = other RNA
atgagccttcagatctcacttgcgctcgctttcattatcctcttactggagaaagaaatagaaaactacatgaacttccagaactcgattttgtacgggatcaaaactaagaaggaattggcaaaactcttagacattaacaagaagcttctcaatgacgtgaattatcacttttctacgaaaccattcgaagccaatatcaacggcaaaaagcgaatgctgtacaatcccaatgatatacacaaggagattctgaagaaactgatcgagctgctgtcaccaatcaaggctaaggaatacgtatttggtggaatcaagaaccggagctatataatgaatgccaccctccataaagattctacctttttctgcctcatagacattaaggacttttttccttccaccaaagagaagttcgtctataacttcttttacaacaacctgaagatgtctagcgatgtcgccaaggtatgcacgttactaacaactgaatatgatattcagcagagaaatcgtcatctgccccaaggctatcctagtagtccttatctctcctacttgtgctactttaaattgttcgaggaactgaatgcaatttcaatctccaagaatctaatcttctcctgttattacgatgacttcaccttttccagtaagcagagcatttctattaagaccaaacgcgagattatgaagtgcatcaagaaatataacctgactgtgaataccgataaaacgaaattggtgaagaacaaaaacggcatcaaaattacaggtgtggtgatcaggaataatgatgttatacccccgaataagaatctgcacaaactgtacattggatttaaggagcttaagataaagttcgagaacgatttctttgagaaagacgaagttctgaaactttgtgagaaggtgaaagggctgtacgaggccgtgcaaaaaatcaagtttaataacgacctgacgtatatggtcagctacatcaaggacattaagatcttctacgagaagaacaaatcaatcaaaaacaagagcgactga

SEQ ID NO: 10643 - RNA, 954 nt, synthetic construct
  source 1..954: mol_type = other RNA
atggtagattttaaactctcaaagctgtacggcatcaataacaagaaatacctatctgagcttctgaaagtggagctcagcaaacttaaagacattgagactcacttttctaccacccccttttatcagaagaatcagaaggggaagaggagaagactatataaccctcatcctgactataaaaaagtgttacagagactgaacatccacctctcacggatcgttgcccccgactatgtgctgggcggcattaaaaagcgatcttatgtcatgaatgcgaacttgcataaagagaatgattatttcctcctgctggacctgaaagattttttcccgtccacaagagataatcatgtgtactacttcttccggaacaagttaaagatgtcccaggacatcgcaaagatatgtacattgctgactaccgagccaagcgaagataggacctttaggcaccttcctcagggttattcaaccagcccttacctgtccttccttagctatttcgatatgtacaacggaattaagaacattagtgacaaccagaacattatcttcagttgttattacgatgacttgacattctccagtaagaagcgcatctctttcaaatttaaggagacgattagcaacattgtcgcagactaccacctgaccattaataaggacaaaactcgcttttacactaagaaacgcaaggtgatcaagatcacaggagccataattaataaggggcaactgttaaaagcccccaattcgttgcaaaagaagatgtacatctacttcaaagagctgactcagaaaacacagcagaggccagttgaaaaagaacacataatcaagctctgcaacaaggtgatcggttgcctgacggctattcaacacatagaacccaagcgtgaatttccacatatccgaaaaaaggtcaaggagatccggaaagctctccggtga

SEQ ID NO: 10644 - RNA, 948 nt, synthetic construct
  source 1..948: mol_type = other RNA
atgaattattcgactagtaaactgtttggtgtaacgaataagaagtatttgagcgagttgctgtccatcgatataaacgaactcaagaacattgaggagttctataacacaagccccttcaccaaaataatcaaagggaaagagagaaccctctacaatccacctttcaagtataagaaggtgcttaacaagataaacatctacttacagcagatcacacctccgagttttgtgttcggaggaatcaaaggcagatcatatgttatgaacgcgactctccacaaagatcatagcaacttcctgctgctggaccttaaggattttttcccctctacacgggacttctacgtctacaatttctttaagaacaagcttaggatggctacagacattgctaagatttgtaccctgcttactactgtgaagctcggtctaaatacccaggagaggaatctgccacaaggatttgcaacctcaccttacttatcttttctgtgctattacgacatgtacaacagcatctacaagatatcaaaccacaaacagattgtgttcagctgctactatgacgatctgacgttttcctcttccagttatatcagcaaggggttcaaacgcaatattgtcaaagtgataaaggagtacggcttggttgtgaatgacaaaaagacccgactattgtttaataagcacggcatcaaaatcactggcgccatcgtcaaagataactctttgctgtcaccaaacaacacacagctgaaaatgtactcccattttgaaaagctgatggtcctctactccaccgaccccactaaacagcaagaaattcttgagctctgtaacaaggtgaatgggctgttaatcgccctgaaaattgtagaaacaaatcgcgatctcgggtatattaagaataaggttaaggaaatccggaaaaccattaatggctga

SEQ ID NO: 10645 - RNA, 951 nt, synthetic construct
  source 1..951: mol_type = other RNA
atgctgaatatccaactgtgcaagctgaagaatctgaagtccaaaaaaatgctgagcttgtacctacgcatcgagctgtacaagctcaaagacattaccaaacactacagcactgccccatttgagaaagagttcgataatggtaagaaacggatgctgtacaacccaaacaaggactataaacaggtgctgaagaggatcaatttaattctgcagcagatccccatccccaattatgtctttggagggatacgggagagagactacgttcaaaatgccacggtccacaaagacaacaatttctatcttctgatggacctcaaaaatttcttcccctctacctccgattcgtacgtttacgacttcttcaagaacaagttaggcatgagtatggataatgctaagatcgtcactcttctagtgacagtgcctaacgaagggaattcagggatcaggagcctccctcagggcttttctacatcacctgtgcttagctacctcagttattcagacatgttcgaaaagatccatgatctggcagtctctcagggcataaagttcagctgctattatgatgatttgaccttttccagcagtaacatgatcggcaaatcttttaaaaaccgcgtgattgagatcgtggaacagtttaacctgaaggtgaataacaagaagacacatcttacacgaaatataaacggaactcggattaccggaaccatagtaaaaaataacacgttgtttgctccaaacaagctccaacgcaaactcactgaaaagttcaacgagctcgagaaaatggaacaggttgacattttaaacaagagggaggtgattcagctgctgtgtaacacagttcagggttgttgctccgcgattatgtccgtagagcgaaccagaaagtttccgcacatcttgagaagggtcagagaaattcggcgttcagtgtga

SEQ ID NO: 10646 - RNA, 945 nt, synthetic construct
  source 1..945: mol_type = other RNA
atgatagactatacagtgtgtacgctgtatggtgtcaagaacaaaaagtacctctcagaactgctcaagattgagctctttaaacttaaggagatcgaaaagtactacattactctcccattctccaagaaaatgggaaacaacaaaattaggctactgtataatccctccaaagagtacaaggacattttaaagagacttaactacttcctgcagaaaattgtgttgcctgactatgtttttggggggatcaaaaaacgggattacatacagaatgctagcaaacacaaagacaacaagttctttcttatcatagacttgaaggatttcttcccaagtacgtctgacacctatgtgtacaacttttttaagaacaagctgaacatgtcaatcgatgtcgccaagatatgtaccctgctggtgactgaacagagtgagatcaatacccgttatctgccgcaaggatatagcacatcacctattctttcctatctgtgctacttcgagatgttcaatagtattaatagcctgagcatcaacaacaatatcacctactcttgttactatgatgacaataccttctcatccaaaaacatcatcatcaaggatttcaagaacaagatagttgagatcatcaaatcttacaacctgcaggtaaatcccaaaaaaactatcctgctgaagaatacaaagggcgttaggattaccggcacaattgtcaataacaatatattgagcgcacctaatcccttacaaggcaagatgtacatcaattttaacaagctcgtgaattctgatctaactgacatgaatgaagcgaagaacatcatcaaattatgcaacattgtgcagggttgcagtagcgccattaagtcgatcgaacgccagcgaaaatttccccacattctcaagaaagtaaaggagattagatccttgatcaaatga

SEQ ID NO: 10647 - RNA, 954 nt, synthetic construct
  source 1..954: mol_type = other RNA
atggagtatcagaaatgcaagctgtatggaatctccaacaagaagtatctctctgagttgctgcacatcgatgcattcaaactgaaggacatagatagacatttctcgactgacttttacatctctaaaagccgaaataaagagcggcacatttacccccccaaaccctactataagaaggtactgaaacgacttaattggtacctcagcagaattgccgtgcctgattttgtgaacggcggcattaaaaataagtcctacatcatgaacggtctgtatcacatcaacagcaatcattttctgctccttgacatcaaaaatttctacccatcaacaagcgattatttcgtgtacaggttctttaagaacaggctcaacatgagtaccgatatagccaagatttgcactctgctggtgacagagccccacccaatgcacgacaactaccgccatctgccgcaaggctatcctacttcatccctgctgtccttcttggcctattctgacatgtacatacacttatacaactacgcgatgttgaacaacattaccttcacatgttttgttgatgaccttacgtttagctcagatgactacattagtaagagtttcaagcggaacatcaataaaattgtccgccagtataatctggaaatcaactctgggaagacaatgcatagacggatcaataaagggatcaacatcaccggtacctacataaaagagaataagctattcgctcctaatcgtcttcaaaaggacatgagcatagccttttccgaattatgtgcagcttatgaggccaacccaaaggacattaatcagctgaagctcctatgcaatcagttgcagggatacatcgtgaacgtcaaactcattgaagaagcaaggtcattagattacatgcagaatatgatcaccaaagttagacgctatattaagaataaggcttga

SEQ ID NO: 10648 - RNA, 960 nt, synthetic construct
  source 1..960: mol_type = other RNA
atggatatcaataactgtaagctgcagaacatcagcaataagaagtacttctcagagctaattcgaataccactcagccatctcaaaaatgtccgtaagtattacaccaccgtcccatttacccagatgacgcagaaaaataaacctcgaaccctgtataacccctctaccgaacacaagcgcatcctcaagtccatcaataggcacctgcagaagatcattattcctgaatatgtgattggcggagttaaaggtaagagctacatcaacaatggagaaatccacaacggccaaagttttttttgccttatagacttcaccgacttttttccatcgacaaatgagaaatacgtctacaacttcttccggtacaaattaaataactccgtggacatcgcgaaaatcctgactctgcttgtgacagagacttcacccagtactggggtggatattctgcctcagggctatccaacatctcccatcctaagctatttaagctatcacgggatgttcagtaaactcaaaatactggcagatgccaacaattacaaattttcctgctactacgacgatgttaccttttcatccaacacattcattaacaagaacttcaagaagcaagtaatcagagtcactagcgattatgggttgaaagtgcatcctcagaaaagtggcatatacatactcaagaatggaattcggatcacagggacgattgttagaaaagagggtctttatgccccgaacaagttgcaactgaagatgattaaccagttcaaggagctggaacagaaggctaaggtgtctgcagaccatgatgagattataagcctgattaatagggtacagggcactgtgtccgctatcaaatcaatcgaaaaagacagatccttcccccatattacacggcgcttgaaggagatcaggcactcttctaagattaacaatatcgccaagtga

SEQ ID NO: 10649 - RNA, 930 nt, synthetic construct
  source 1..930: mol_type = other RNA
atggattactcgagttgtaagctatacaaaatcgagacaaagaaatccctgtcgtatattcttcagactcccaagagttcactcaaaaacgtaaacctgtgctactacccaaaggtgaatatcttcaacaaaaacactagttcaggcaaagtgaggacgttctacaatcccaccggtgaacataagaaagctctgcgcaatatcaatcgatccttatcagtacttccgataccgccatatgttattggggggattaagaaacagtcaattatttccaatgcctctaagcatatgagtagcagattctttctgagcatggacatcaaagacttttttaatcacgtgcctcagaagtacatctacagctttttcaagaatgatctcaagatgtcaatcgatagcgcaaagatttgcacgacattggtcacctacgagatcgataaccactctatattgccacagggatatcccacttcccccatcctctcttacctgaccaataaaaagatgtttgacaagatctctcagcttagcagccagaacaacattattttctctctgtatgtcgacgacctaacatttagctcccccaaccctatctctaaaaaattcgaaaacgaggtcagaaagatactcaatttctatagctacaaggtgaattccagtaaaaccaaacgtcagtatatcactaagccagttctgatcaccggagtgattatcaacaatggcgagctgttacctcaaattaagcatacaaagcaaatgatcgactacatacacaacataaagagcagggatttgcacgaggtgaatattgattcctgggggaagaaaattcggggatattattactaccaccaagccttcgaatcctattctggtataaaattccctcagatcaagaactttctgggcaactataaaaagtga

SEQ ID NO: 10650 - RNA, 1029 nt, synthetic construct
  source 1..1029: mol_type = other RNA
atgttcatcgacgagaagaacagcctagccaacttgcagaaaaagaccaagttggccaagattttaaattgcgatgtggaatacctgaagaactttagcgattattcagaggtgaaatcctttgataagcgcgtaggtcccaagacaagacgacttttcaacgcagatcctaatcacaagaagattctccgcaaaattaacaaactgctgctcagcatgaatatccccgattacgtttacggaggaaggccgaacagggactatctttcgaacgcgtttctgcataagaaaaatccctatatccagacagctgacattagatcttttttcccatctacccatgaatcctacgtctacggcttcttcaagaataaacttctcatgtctgaagatgtaagtaagattctaaccgatctgactacctattcaagctccgaaagtcctcactaccccgagaaatcattgccacaagggttccctacgtccactatcatgtcttaccttgcttacttcgatatgttcaatggcatctataagcagtgtcgtgacaggaatattcatttttcactctttgtggacgatatgacttttagttccgacgtcaaaataccaaaatcttttatcaggcacatcaacaacattgtgacccaatatgacctgagcctgcatcccaataaaatccggcgcttttctgttgatcagccaaaactggtgaccggtgtcatcattgaccccaagacaaataattttcacataccgaacaagctgcataagaagatttacacaaacatccagaacttccacagcttgaacgtcaacacatacactgactacgtgaatttaaagcggatcatactgagcctcaaaggccaactcgcctcctgctcccggattgaccaggagaaaactttcaatcacatcatcaaggtcatacaggacgtggagatacactttatcgttccttcagtgaaaggggccacgcaccgacagctgtatgaagagtatattagtttcgtgagtttcagatga

SEQ ID NO: 10651 - RNA, 1017 nt, synthetic construct
  source 1..1017: mol_type = other RNA
atgctgatctcccagccacacagcctttttgaattacacaacaaacggagactggcatctctgctaaagacggacgtagagaatttcaatcgtatcgaagagagatatacagtctatccttttaagaagaaggtcggtaagaaagtgaggactctctttaataccgatcagcactacaagtcccttctgcgtcgcttgaacaagatgctttgcaagacgaatatccccgattatgtgtacgccggcatccccaagagggacttcttggacaatgcgctgattcatcgccagaagccttatattcaaacagccgacatccagaatttttttccatcgactagagattcttacgtgtacgggctgctgctccataagttccacaccagccctgatgtcgctaaaatcattacacagctgaccacctacccactcgattcaaagactgcattgcgacacatccctcaagggttccccacatcaactatactgtctttcttatcctacttcgacctatttaacggaatttataacctctgcaaacagaacgatatccattttacgttgttcgtcgatgatatgacttttagtagtcacaaaaggattcctaagtcattccttcggcatattaatagcattgtgaagaagtacgacctgcaattacacccgtctaaaattcataggatgaacccctacaattacaaaaccgttactggtgtcgtgatagacccatgtacaggacttctgaaggctccaaataagctgcagcggaagatgttcaacaactttaaagccatacacaactacagcattaacacattcaatgactatatccagttcaaacagctggttctgaaactcgagggccaactcaaaagcataaatcggatcgaaccgaacagacagatgccctatataaccaccgtagttaaagacatcaaacgcaactttatcacccattccgtgaaaggctcatcccgagacgtgctcaagagtgagtatgagttctttgtgaaatga

SEQ ID NO: 10652 - RNA, 1266 nt, synthetic construct
  source 1..1266: mol_type = other RNA
atggatgacaagtccattggtagggacagaaatcattacctggaaaccaggccctcacgcaaggagaaacacggaagaaagaaaactaagctgagaagcgtactgatagacgtgttcatccggaccctcctgtcacgtctgtttaccgaagtcttcaacattgtgagcaggtttgtcttacgaattattgacatgatctcgaacctgctgtaccagaaaaataaagtgatattcatgcggatccctgaaaaccacgcgttctaccagcttaagagtaaaaaacggcttgctgctatcctcggcattgattcaccagctttcttcaaacacctcgacctgcatttcacctgtacagaatttagtctgacgaagaacaataagacacggaccctattaaatccgtctaagcagtacaaacgtatactccgaaaaattaatcagctcttgcaggggattaatttccccacatacctgcatagcggtgttaagcagaaaaacgccctgtctaatgcatgttatcacaatagccatagtcacatatgcacgatggatattaaaaacttcttcccttcaacttctgaggcctttgtgtataagttcttcaaagacaagttcaagatgtctgaggacgtcgccaaaattatgacattgctggtgacgtataagaacgagaacgaagtcgcccgcttaccacaaggatttccaacttcctccatcttgtcatatttggtgtacttcgatttctttaacggcgtgaatgccctggcccatagcaggaatatgaagttctccatatacgtggatgatcttaccttttcctctaacagagcatttactcccagttttctgaaccgcatcgtcactatcgcacaacagtatgagctaacaatccatcccgacaaaacacagttttataaccgacatgcgcacaagaagattactggagtgatcttgaagcaggagactgttagagctcctctctttatccacaaacagatcaatcagcactaccttgacatcctggactgcgatctgctaaccttttccaacttcattaagttcaagcaaaaggtgatcaagaccctggggcaaatccagtacgtacgctccatcgaggggacccacaaatatattagcatcgagaggaatctcaacgatttcaaagaacacttttctgttctcagcgttaaggataagtaccggatacagcttaaacaggagtataagcattttcaaggcatgtttacacacagtattatcttttga

SEQ ID NO: 10653 - RNA, 1053 nt, synthetic construct
  source 1..1053: mol_type = other RNA
atgttgaatcaggggtaccctaagcttaatttatacacaaagaagcagctggcagacgctattcgggggaaagatctttctttcgattctgccatgaaactgatcgatgactgcctgatcaacaaagacaagtattggagcgacaacagtgaggaaagcaagtccaacgagaataagtgggtcagaaatgcctcaggtacccccctcggcaagctgcaaaagcggatagaccaaaaggtactagccctacacgacagcgaactccccatttttatttacggcggcgtggggaaaaaaggaatcaaaaatgccgttatcgcactccagggcaagagaaataagagaactctgctgaagctggacatgagccattttttcgagcacatatcttatggggacgtaatcaaaatcctggtgtgccattgtgggtgtggcaaagatgtggcccacattatagcagaaatcgcgtgcattcagagcggaaaaaagtcaagtaataacaccaacgagaaagtccttgctaggggcttctcaaccagctctcggctcgcagtgtggcgcaacttatctctttttcgttccttattctactgtatggctaagcgccttaataagcacgatccacgcatcgctgtctatatggacgatatcggtatcaccgcctcgcggatagatccagtgtcgctgagcagtttgtataaggatattacgaagctgattgagaattcctccaagctggtcgtgaacaaaaacaagactaagatcatcgattacctccagcatgaatatgacgttacagacggacatctgctcgaggacaagatagcgcagtttgaatttctgggtattggaatcggccgaaaccgactgtaccctggagtgaagattaggtccaaaatggctaaattgatcaaaaagagtcacctgtccgatgaggagctgagaacattgaaagggcagaaaaggtacgttaagttcattactggcaaaaaactaggtctgcccccgaacgatgcctcattgaacaggaagggactcctctggcaaaattga

SEQ ID NO: 10654 - RNA, 996 nt, synthetic construct
  source 1..996: mol_type = other RNA
atgatcaaccagggttatcctaaacttaacttgtatacccggaaacagttagccaacgctattcgagacaaagatctgtcctttgatgccgccatgaagctcatcgatgattgcctgataaataaggacaagtactggtcagacaatcctaaggagtccaagcaggatgatgacaagtgggtgcggaacgcttccgggactcccctaggaaaattgcagaaacgcataaatcaaaaggttctggccccccacgacagtgaattgccaatttttatctatggtggagtggggaaaaaaggaatcaaaaatgccgctatcgcactccaggggaaaaacaataagcgaactctgttgaaagtagacatgagaaggtttttcgaacacatcacctatgaggatattgtgcgtacactggtctgtcattgcaactgcggcaaggacgtagcgcagataattgcagagatcgcttgtgtgagaatggggaagaagtctctcgataatacgaacgagaaggtgcttgcgcggggcttctcaacttcaagcagactggctgtgtggtgcaatctgatcctgttcaggaaactcttttactgtatttcgaagagactgaagggccatgatcctcgtattgcagtctacatggacgatattgggatcaccgcaagcagggttgatccggccatgctgagtagcttatacaaggacattgtcaacctgattgaaaacacctctaaacttgaggtcaacaaaaacaaaacccgcatcatagactatctacaacgggagtatgacatcatcgacggtcacctgctcgaggataaaacggcccagttcgaattcctgggcataggaattggaaggtctagattatacccaggcgtgaaaacacgctccaagatggccaagcttatcaagaaacccaatagtagcgacgaagagcgcaggacactcaagggccaaaagcagtacgttaagtacatcacatctaagaattga

SEQ ID NO: 10655 - RNA, 1002 nt, synthetic construct
  source 1..1002: mol_type = other RNA
atgaacatgatcaattatcccaacttcaacataagatcaaagaatgagatcgccaaacgcatcagtagccgaaagcttccccagtccgaggcgctggctctaattaacgactgcctggtggacttcgatagtctgtgggtcgataacttgaagatgtccgagcctggaaaaaagaagtgggtccgcgacgccagccgcactaagcttggcaatctcttgagtcttattgacaaacggatttttgccccatacgataccaagctgcctagctttatacatggcggagtggccgggaaaggagtgaagtcagctgcatctagcttgctggggaaacgcaggaagcgtatgttactgaaagttgacatgagtcggttctttgaacatgtatcctccgagaggctcaaatatgctctcatccacaaactgggcttctcaagagaagctgccttaattatatgcaaactgtgctgtgtggatgcagggccgaagaatgggttggaaaaaggtaagaccatcgctcggggattcgcgactagcaaccgcctcgcaatatggtgtaaccttgagttattttaccggattaagtggctcaccgaaaagaggctaggtagatatgacgccaggctggcaatttatgtagacgatatcggtatcacagcttctcgaatcccacctaaaactatggcaaacttttactccggattgatcgtgctggttaacaaatacggtaatggacttgagatcaatcacggcaagaccaggattatcaattacctgggcaaccagttctctgtcaatggggaacccgccgttgataacggaggctcgccagtcaaggggagctatgaggtgctgggcatccgtatggaaaggaatagagtgacagccggccggcgaacaattgggaagattcaatcactgaaatctagaaagagcctcacgatcccccagaagaagtccctcaagggcctggagaaatacaaaagatacattggctcttga

SEQ ID NO: 10656 - RNA, 1005 nt, synthetic construct
  source 1..1005: mol_type = other RNA
atgaaaaaaaaagacaacccactcattccaatcaacataaggtccaagaatgaacttgctaagcgcatcagcaacaagtacctgtccgttaaagatgccctgaccctgattaacgaggtgaaaaacaactttgatgacctttggaaagacaatctgaaagacagtaagccggaggaaaataagtgggtaagaaatgccaagggcaccaagttggggaccttgcttagcctaatcaataagagactgttcgcaccttatgataactatctgccctgtaacatattcggtggtgtcagtggaaagaatacgaagtcagctactctccacctgctgggaaataaacggaaaaggacgctgctgaagatggatctgcatcgtttctttgaacagaatgactatgagaaggtgttggatttcttccataaaaaagccggttgtagcttaagaatgagccacttttttgccaccatttgctgcgtccctcttggacaaaaggggactttaggaactaagcgggttattgcccgtggtttctccacttctcccaggttggcaatttggtgtaacctccagattttcaagcagatagaccgcaaatcacggtctatgctgaaagggttcgaccccagggtatcattttacgtggatgatatcggcatcacagcttcaagagtgaacttgaagaagatgacagacgtcttccactgtgtgaaatctctactggacggcagtgggaattatcgacttgagctcaataccaaaaaatgctttatcgtggattacctcaacaatacttacgacacaaatggcgaatatatcgggaaaggccactttgagcacctcggcaacgaactgatgcggaactatgtgacacctggaatcaagacaatgtccaagctcaggtccgatgaggcgaagttaaaagctctgagcggccagaagtacaagcgctgcctaaactcgattcgagcacgcaagagatacgttcattacaccaagtcttga

SEQ ID NO: 10657 - RNA, 1005 nt, synthetic construct
  source 1..1005: mol_type = other RNA
atggccctcaaaccaaacaactatcctgcaatacgcatcaggagtaagaacgaattagccaagcagatttcctctatcaagaggaacccgtccagcagtttgaagctgattaacgatgtcgtgggaaattatgataactattggaaagaccatcccaagcttagccaacccgagaaaggtaagtgggtccgagactcatcacggactaacctcgggaaactccttagagatatcgacaaacatgtactgcgcccacacgacaatttagtgcccaaatttattttcgggggtctgaccgggctgaaccacaaggccgcagtgcttcacttactgggccggaggcgaaataggaccatcctaaagctcgacatcactaagttcttcgaacagatatcccaggaaagagtctatcacttgttttactcgaagtgcgagtgcagtaaggtggcctctaatctgctagcctcactctgttgcgtgccttatggcccgaaggagaagcctgaggattacaataccattgcaagaggatacccaacgtcacccaggctggccgtttggtgtaaccttgatacgtttattaagatcgagagagtggtgactcgggagctgaaagggaaagacccacgtatcgctatttacgtggacgacatcgctattacagcttctaatgtttccattgaggatatgatgaaactctaccccaagataaaggatatcttggagaatggcgataagaaccagaaactgcctctgaaccacgctaaaacaaagatcgtaaagcattccggcgaaacctacgatatagaaggcgaatatcagggaaaatgggcgtttgaacatctcggtttgcaaatgaataggaacagcgttactctgggaacaaaaacacgacggaaactgcgcaataccaatcaggacttcaagaagtctggcagaaaggaccgcattatccgccgtaaacggaaaagcttgctgctgtacaaaagctacatcgagaagtga

SEQ ID NO: 10658 - RNA, 1002 nt, synthetic construct
  source 1..1002: mol_type = other RNA
atgaaaaacaatcagcgcaattatccgaaaatcgccatccgctcaaagcgagagctcgcgaaacgcttgtctgacaagcgggactcagttgaggacatggccagacttataagcgatgtcaagactaattacgacaactattggaccgatcacccaactcagtctcaacctgaaaaaggaaaatgggttagagatgcaagtcggacagaccttggaaaactgctgaagctgattaacgtgaaggtgcttgctccccatgacagtctgattcccacatttgtcttcggcggagtctcagggcgaaaccacaaggtggccgtaacccatctcctcggggtaaaacgtaagaggattatcctgaaactggatgtctccaggttctttgaacagataaaatatgagcgcgtgtacagcttcttcttagccaaaggaagatgtggccagcggggcgcccgcttattagcagacctatgttgcgtgcccattggtgcaaaggataatcctggcacgtacaagacaatcgcccgaggcttttctaccagttctaggctggctgtgtggtgcaatctcgatactttcctgagattggagcggttggtgaagaaggaattgcaggggaaggacccaagaatcgcaatctacgttgacgatatagccatcaccgcttccgggatcactaaagaggatatgatgaagctgtacccaaagattaagacaatcctggagagcgacaaaaaccaaaagctccctctcaacgatgcgaaaaccaagatcatttaccactccggggacgagtatgatatagacggcatttatcagggtaagcggggatttgaacacctgggtctgcagatgaaccgtaacagcctaaccctgggcaccaagactagatggaagcttgctaatctgacgcatagatacaaggaatcgaggaggaggaataccacaattcgtaaaaagaggaaatccacactccgctataaagagtacgtggaacggtga

SEQ ID NO: 10659 - RNA, 978 nt, synthetic construct
  source 1..978: mol_type = other RNA
atgactgtaaggaggtatccgaaactcaatattcggtcgaagaatgagcttgctaagcacttgagcactaagaaaatctctaaagagagtcgcctggcccttatcaacgatgtgttaacgaactttgatacatactggaaggacaatctgcatgaaagtaaaccccaagaacgaaagtatgtgcgcaatgccaagcacacccatctggacaagctgctgcgtgcaataaatgaacaggttctgtctccacacgacaatcttttgccagagttcatatttggcgggatcaaaggcaagaaccatatcaaagccgccggccacctcctaggtgagaaacggaataggacattaataaagctggacatccaaacattcttcgaaaaaatcgatgacaagcgcgtgtactacttcttcaagaacaagtgtgggtgttccagtaaggcaagcaggattttagccaatctgtgctgtatcccagagggacctaaggataagcctggtaccaaaaaagttctagcacgggggtttgccacttcaagccgtcttgcgatttggtgcaacctggatacttttctgaagcttgactggatgataaaaaaagagctgaaggggtacgattctagaatcgcgatttatgtggacgatatcggcattaccgcttcaagagtcggaaaacagaaaatcttgaacctcgaacagaagattgagatgattctgtgcagcgataaaaacgctgagctccccctgaacaaggagaaaacccgcgtcatcccccatcaggaaggaatggaacacctcggaatcattttgagaaggaacaagctcagcctgggcaagaagaccagatcaaagctcgaggaaacaaaaaaacggatatctcgggctaaagacaaggacaaagtgaagaagattaaaacccagaagcgatccttgatgtcctataagagatccgtggagacgtacaagcctgcaaaatga

SEQ ID NO: 10660 - RNA, 972 nt, synthetic construct
  source 1..972: mol_type = other RNA
atgaagcacgaggacggctaccccaaactgtgtatcaggtcaaaaaatgagctggcaaagcacatctcccataaaggctttctgccagatgaagcactggccctgattaacaacgtcaagtccaatttcaacgattactggaaagactctaaaaaggcgtccaaaccacagaatgataagtatgtccggaacgctaagggctcacccctagggaaacttcttcgaaaaatcgatcggctcgtcctcacaccacacgacagcttacttcctaattttatttttggcggagtgaaggggaaaaatcatgctatggccgcctacaatttactggggaataagagaagaaggcggttgcttaagatcgacatcagcaggttttacgaacgtgtggaactgcaccgcgttattaacttctttcagtataagtgtgggtgccagtatcgggcggcaaaactcctggctgagttctgctcggtacccttcggcgccaaagacagtaagaatcccaggattaccatcgcccgaggattcgctacatctagccggttggccatttggtgcaatctgggagtgtttaagaaaatggagcgcctcgttatgcgaagactgaagggtcacgatccgagaatctctgtgtatgtggacgacataggtattaccagctctggagtaacgaaggaacagatggaaaacctccgcgatgaggtgatccaattattgcagactcacgacaagaaccagcctctgcctgtcaacaagaagaagacagcaatccaaagtcatgaggaaggtctgtacatactggggattaaactcaatcgcaacaacctaactatcggcagaaaaacccactcccgcattcataatttcaagcataagctcaaagtgagtaaagccaaaaaggagagggataagctgaaacagttgataaggggaatatcacgttacaagaactatgttgagaacatgtga

SEQ ID NO: 10661 - RNA, 987 nt, synthetic construct
  source 1..987: mol_type = other RNA
atgctcaataaaacgtaccccaagataaacattaggagcaagtgtgaacttagtaaaaggatctcacataagaagctgcctcggcaggacgctcttaccctgatcaacgatgttaaaaacaacttcgaaaagtactggaaagacaacattagcaaatctaagccagagaagaataaatatgtgcgtaatgccaaaagaacacctctcggaaagctgctgaagatcattaattctaagattctcgccccccatgacaacattgttcccaactttatttttggcgggccaaaaggacgagatcacgtaaaagcagcctattccctcttaggcacctacaagaaacgcaccctgttgaaggccgaccttcagggattctttgagcagatagacgaaaagaacgtgatagacttctttctgaaatgcgattgcgattacaaaactgcaaagttcctcggctatatatgttgcgttttcgacggtcaaaaagggagcaattccaagaagcgagtgctggcgcggggcttctcaacatcttccagactagctgtctggtgtaatctggatgtgtttatcgagctcgatcgcttagtaaaaaaaaggctcaaaggctatgatccaagactggcaatttttgtggatgacatcggtataactgcttccagggtccctatcgatctgatggacaacttatacaaggaaatcaaagaactgttcgaggggaaaaaacaaaagcagccgttgatccttaacgacaagaaaaaagacattaagcagcacttcgagggaatggaaatcctgggtagctttttgtatcggaataagctgaagcttgggaagaaaagtttcagtaacaagcagaagattaagtcactactgaaagagaagaatgtcacaaacatgaagaagatcaagaacaagtatcgctcgatcaaacagtacgagaagtacgtggagatgcaaggcaaacagaagaataagatcttgtga

SEQ ID NO: 10662 - RNA, 963 nt, synthetic construct
  source 1..963: mol_type = other RNA
atgcagaacaggagatatcccaaaattttcattcggtccaaaagcgaatttgctaaacacatctctcacaagaatttcacaaaggaggatgccctgaagctgattaacgacgtgaagatcaattttgaaaagtattggaaggactctaagcggagcgaccctaagaaagaaaaatacgttcgtaacgccaaaggtactcctttaggcatgcttctaaaaaagatcaacagtctcattctggctccccacgataagattctgcccaattttattttcggcggacttaaggatctgaatcatgcgaaagctgccaaacacctgttgggcaataaacgcaagaggaccctgctcaaattggacattaagcattttttcgagcagattggcctgggacgcgtgttcatttttttccagaacaaatgcggttgttcaaagaaggcctctaagcttttgagttccctttgctgcgtgagcctaggaccaaagggatccaataaccctataaaaacaatagcacgcgggttcgctacgagctctcgattagcagtatggtgtaatctcgatatctttatcgccctaaacaaactgatccagaaaagactgaagggtcacgatccgaggattgcaatctatgtcgacgatatagggatcacagccagtaggataaataaggagactatggagaagctgtacatcgagatcaagaaactcttttactcattcgacaaaaaccaattgctgccactgcatgatataaaggacaaaggcgggatcattactcataacgaaaatatgcagatcctgggcctccaactcaatcgaaatacccttagtatagggagcaagacccggtcaaaaaagaacaagctcatgaacaagttgaaaatctccaccgacaagaaaattctgaagaacaagtacatgtcgctcatcagatacaaaaactatatcgagtccttatga

SEQ ID NO: 10663 - RNA, 927 nt, synthetic construct
  source 1..927: mol_type = other RNA
atgcagacttccagatacccaaagctgtatatccggagtaagaacgaactggtcaagcacttatcccactcaaaatttcccaaaaaggaggtgttggccctcatcaatgatgtcctaaataacttcacccgctattggagagataatgaatatcggtcagagccagaaaaagagaagtacgtacggtcagcaaaaaggacacctctgggcagattgctggacaacatcaataaagctgttcttgcgccgcatgacaaaatgattcccgatttcatattcggcggggtgaaaaacatgaaccatgcgaaggctgctaaatatctcttaggaaagaagagaaagcgcacaagcctgaaactcgacatcaccaggtttttcgagcagattagcgaggaacgcgtgtatcacttctttcgggataagtgtgcctgctccaaaaaggccgccgctctgctggctagtttttgctgtgtccccgagggtcctaagggcaatgcatcagagcgcaagacaattgcccgagggtttgccactagtagccgcctcgcagtgtggtgcaaccttgatacattcataaagttagaccggctgattaaaaagaggctcaaaggaaacgaccccagagtagccatctacgttgacgacatcggtattacggcatctagggtgtctaaggaggagatgggcaaacttagcttggaagtggagagccttctgctaaacactgacagaaatcaaaagctgcctattaacaaacgaaagaccaaaatctcctcccacgaggaaggcatcgagcacttgggactgcgcctctacaggaataggctgtctataggggccaagaccaaatcgaagattgatcggatccgtaatcgttctgaacgaaaaccactgatacgttacaagcattacatcgaaaagatttga

SEQ ID NO: 10664 - RNA, 966 nt, synthetic construct
  source 1..966: mol_type = other RNA
atgcagtcacggagataccctaagctgtttattaggtccaaaaatgaactggctaaacacatctcccatgaaaattttcccaaggagaaggctttagtacttattaacgacgtcattgccaatttcgatttctattggaaggactctgtgcacagtgatcctctgaaagagaagttcatccgaaacgcaaagcataccaaactggggctcctgttgaggaagcttaacacgctggttctggcaccccacgacaaattgttgcccaaatttatatatggaggagtcaaggagatgtctcatgccaaggccgcgaaaaacctgttaggcagcaaacgaaagcgcattttgctcaaaatggatctgaagaaattctttgaacaggtcagcagtgagcgggtagcctattttttccagaataagtgtgagtgctccaaaaaaacatcggaaatgctatcatgtctttgttgcgtgcccattgggccaaagaataacggggcctccaaaaaagccatcgcgaggggctttagtactagcccaagactcgcagcctggtgcaatcttgacatattcattaagctggaacgcctgatccagaaacggctctctggtcacgaccctaagatctcagtgtacgttgatgacatcggtatcactgctagccgtctcccaagggaggttatggagaagctccgtgacgaggtgagctcattcctcctgacagctgacagcaagcagcagctggagattaaccaagataagaccatcataacttctcatgaggaaggaatggagtatgtgggcgctagattataccggaacaagcttggcctgggcaagaaagcaaagtccaaaagagatcaaaccaagaacaagctgaaaaagaactctgatccgaaagtgagggaatccctacgccgcaagttgaatgggatgaatcaccacaaaaagtacatcgaaacaacctga

SEQ ID NO: 10665 - RNA, 969 nt, synthetic construct
  source 1..969: mol_type = other RNA
atgtccaatcggtatccccagttaggcctccggagtaagaatgaaattgctaagaggatttgctctaaaaagctgagccaaaacgaggccctcgagctgatcaatgatgtgattaaaaacttcgacgactactggaaggactccaaagagtcagagccacggaaacagaaatatataaggagcgctgccgggaaccccttgaataaactcctaaaggctatagacgccaagatcttacagccacacgaccacttggttccgaacttcatatttggcggacttaagggcacatcacatattgatgcagcctattctctcatcggaagacagaacgcaaggaccatcttgaagatggacatcaagagattctataagcaaatcactcgggagagagtcttttttctgttttatcgcaagtgtggatgttcagtgaaagccgcgaatctgctcgcagatctgagttgcgtgccagtcggtaagaaaggctctgggagtacaaaaaagaccatcgccaggggtttccccaccagctcccgtctggccatttggactaacctcgatacctttctccggctgcagtgggaagtgtccagattgctgcgaaagcatgaccctaaggtggtagtgtttgtggacgatatcggggtgtcagcgtctcgcgtctccggtaaactgttcaaacacgtcaagcacgttgctcagacgattcttgctgcctacgatgagaaccagcccctacctgtgaacaaacgcaaaactcaagtcatccctttcagtgatggagcggaacatctggggttactgctgggccgcaataagatttcgatagggcgaaaaacaaagtctaagatggccagagtaaaaaataagattgcatccgctgttggccttgaaaggaaaagcctgcttaaaaagcgtagcagctactacagctacaagaagcagatcaagaaagcatacgacaattga

SEQ ID NO: 10666 - RNA, 966 nt, synthetic construct
  source 1..966: mol_type = other RNA
atggcgaatatctacccgcagatcagcattcgctcgaagaacgagctagcaaagcaaataagctcagtgaagttgccctttgagggtgccctgagcttgataaacaacgttattgagaattacgacacctattggaaggattccaaaaaaagcgagccccaaaagcgaaagtacgtaaggacagcagtgggaacccccttagacacactgctgaaagccatcgacaagaagctgttacagacgcacgacaaactgattcctggctttatttttggcggggttaaaggcaaatcccacatcgccgcagcataccatcttgtcggaaatcgcaataagcggattctgctcaaaatggatatctctcggttcttcgagaagatcactcgcgagcgggtcttctatttctttaacaagaagtgcaactgctcagtgaaggccagtaatctcctcgcggacctctgttgtgtgccaaagggaaaaaagggcagtactgatcctaccaagacaatcgctcgggggttccccaccagttctaggctcgctatctggactaatctggaaacctttcttaaacttcgtcatacagtgacaaaaaagcttaaaaaccacgacccacagacggtaatcttcgtcgatgatattggtatttcagcttccaggactagtaaagagtccctggacgagattcgtaagagcgttcagaaaattctgttgtcccacgatagaaaccagcctctccctgctaacaaaggaaaaaccaagatcataccattttctgaaggcgctgaacatctgggcttgctgctagggagaaataagatctctatcggtcgcaagaccaagagccgaatggccaccataaggtccctggtggggaaatcaagaggagaaactaaaaagagcctgataaaaagagaagcctcttactataggtataagaagcagatcgaggaaacaatcatttga

SEQ ID NO: 10667 - RNA, 981 nt, synthetic construct
  source 1..981: mol_type = other RNA
atgcagacaaattctaggtaccctattatcaatatcgggtctaagaacgaactggcgaagcgattatcttccaagaacttcagtaaggataaatctctcgagctgattaacaatgtgctggctaatttcgataagtattggtacgactcaaaaaagtctgacccagaaaagcaaaaattttttagaagcagcgtcggtacccccctgcataaactgctgaagctgatcaacgccaagattctcaaagtatacgacaaatccttgcctgagttcattttcggcggggtgtcggaccggaatcacatccttgccgcgagggaactcatcgggaataaaaacgacagaacgctacttaagattgacgtgagccgttttttcgagcagattactatgcagcgcatagttagattcttccaccagaaatgtaattgctcactgcgcgcatcctatctcttagcttccctctgttgcgttcccggcggccaaaaggattcctcggccaatatgcagaagtatctggcccggggttttccgacttcaagcagactcgctgtctggaccaatcttgatacatttttgcgccttaaatgggagacaaataaaaggctgaagaaccatgaccctaagatagtcatctttgtagatgatatcggcgtgagtgcttcacgagtggacatcaagaccatcaattgcttgaaggaaagcctgataggcctgctagagagttacgatattaaccagcccttaccagttaaccacaaaaaaactgagatcattgcattcaagaacggtgcagagcatcttggaatgcggctaggaaagaacaagatatccattgggaggaagaccatctctaataagagcaagctgaacaactccataaaaacaagtgatggattgggaaagagcttgctgctcaaaaaaaaagcagcctactaccagtatctgaaacagatcgaacaagtgaacgacatggcctga

SEQ ID NO: 10668 - RNA, 972 nt, synthetic construct
  source 1..972: mol_type = other RNA
atgaaaaagaacaattacccgcagttcggcattcgttcaaaaaatgaactggcaaagaggatcagctccaagtctctgcctgccaacgaggcactgatcctgatcaacgatgtcctcgaaaatcacgaaggctattggaaggatagcaagatgtccgagcccgagaaagggaaatacgtgagaagttgtgttggtacccctctacataggttactcaacctgatcgacaaacgaattctaaggccatatgacaaactggcaccccattttatcttcggtggcttgtcaaaaaagaatcacattcaggcagcccattatttgattgggagcaagaagagacggtccctcataaaattagacattaagcgtttctacgagcagataacacaggaacggatcttttactttttctataagaaggccggctgcagtgtgcgcgcttctagactgctggcctacatctgctgtgtaacacaaggcgctaaaggcaatccaggtgtccagagagtgttggcccgcggattttccacttcttcaaggctcgcggtctgggccaacctcgacacgttcctgaaattacggtggaagctgcaggccgagcttgggaaaaatgacccaaaaattgctgtttatgtggatgatatcggaatttctgtggcagacgtgtcacagactaagctggaagagatagcccttatgatggcggaaatcttggagagtagcgatgccaatcaacccctgcctattaataacgagaagctggacattatgtcctttgagaaaaacgcggaacaccttggactccgcctgggacgcaaagctatcttcatggggaacaagataatgagcaagatccgaaagatcaaaaacgactaccagagagctgagaacaacaccaaatttaagctcatgtcgaagaggattgcttaccggctttatcagaagcaaatcgataagcagaatgaacaatga

SEQ ID NO: 10669 - RNA, 972 nt, synthetic construct
  source 1..972: mol_type = other RNA
atgtttgagcaacttcgctatccaaaaataggtattcggtctacctgcgagctggccaagcggattagcgactcctacttaccttacgataaggctttgcttctgattaataacgtgattctgcacttcgatgagtattggcacgactccaaatcttctcaacccaaaaaggaaaagtacgttagaagcgccgtaggtaatcagctgggagaactgctacgtcggatagacaggaagatcctggctccacatgacgggaagctgcccgaattcatcttcggcggcctcagcgggagagatcatatccaggcaggaaagcgccttctcggcaaaaagaggaaacgagtcttactcggactcgatataactcgcttctttgaacagatcaaggagtctcgcatctcctatttctttcacaaaaaatgtggctgctcactcgaggctagtaccttgttagccaggatttgttgcgtgccactgggaccgaagggggggtctagtactaaccgagtcctggctcgggggtttgcaacgtccacccgtttggccgtgtggtgcaatctggatacatttctgagaatgagctggaaagcgaaaaggttgttgagacatcacgatcctaaagtaatgacctttgtggacgacattggcatcacagcgtctcgggtgagtcatgaggagatgaaggagatcgaaaaaaaggtcatcagcattctgagccacttcgacaaaaaccagcctctgcccattaaccctacaaagactaagatctgttccttcagtaatggtgctcaaatactagggctcggaatgggcaagcgactctcagttggtgccagatcacgcagcagaatctccaagacccggctcgccctaaagctggcaacatcgccccttgaaaagaggtatctgcttcagaaaaaacgtggccaggattcgtaccgaaggcaggtggcacaggcctcagactga

SEQ ID NO: 10670 - RNA, 978 nt, synthetic construct
  source 1..978: mol_type = other RNA
atgttttccagaccgcgatatccacgcctaagaattggtagcaaaaatgaactggccaagaccatatccgatagcgctctcccctacccacaggccctgaccttaatcaacgacgtgatccgtaactttgattattactggcgggataacagtgaaaactctcagcctaacagaggaaaattcgtgcgatctgctgcacggacacccttgggagtgctgttggagagaatcgacaaaaaggtgctggccccccatgataggctagtgcccaattacattttcgggggcatgactggaaggtcgcacatccaagccgctcgttcacttctcggccaagagagaggccggatcctggcctctctggacatcacacatttctttgagcagattagagaacagagggtctttttcttcttttataggaaatgcggttgttcacctcgcgccagcaggctgctggcttccttgtgctgtgttccagtagggcagaaggggagcatgagcacagaaaagaccctcgctagagggttcgcgaccagcacacgactggctgtttggtgcaacctcgacactttcatccacctggaccgggaggtaaaaaagctgcttaaaaagtatgaccctcgcgtcgccatcttcatagacgatatcggcattagtgcaagtagggtgagtcaggaaaaaatctcagccgtggtgaaaatagtcgagaagattttgtccgattttgacaataatcagcgcctgccagttaacccggcaaagaccaagattcgcacttatgccagcggtgcagagcacctcgggcttaagctcggcaggaataagctggccatgggatccaagtcccgctctaggagagattcagtcataaatctccttaagaaacgcggagcgtactctcctacgcgggcacgtcggttactgttaaaaaagcaagcgtaccagcgataccaaggccagattcggtcggcttga

SEQ ID NO: 10671 - RNA, 987 nt, synthetic construct
  source 1..987: mol_type = other RNA
atgcagaacaacggccgttatccgagaataaatcttcggtctaaaaatgagcttgccaaacgcatctccgataaatctttctcctttcaaagctctctcaaactgattaacgatgtgctcaaaaattacaacgactattggtacgactctagacaatcacagcccgagaaagggaagtttgttcgctcttccgtgggaaaacccttagggaagctacttaaacgaatcaatcggaaagtcctgattccttatgacaagctcgtcccaaactttatcttcggagggatttcgaagaaggatcacattcaagctgcttacagcctgttgggcaaacagaagaacagaatgctgttgggactggacattagcacctttttcgagcagattaggaaggagagggtgttctacttctttcatgccaagtgtgggtgctccgcacgggtgtcacggatactggccagcgtttgttgcgtgcctgcagggaaaaaaggatcaggttcaaaggtcgaggtgctcgcacgtggcttctccacctcgtcaaggttaagtgtctggaccaatttggatacttttcttagactgaagtgggttacagatcgaaatttaaggaaccatgatagcaaaatcgttatcttcgtggacgacataggcatttccgctagtagggtcacgaagaataacctcgaaatcctatccagaaagattcaggccatcctgagcgactttgatcgcaatcagaagctgcccatcaacaataagaaaacaaaaatccggtctttcactgaaggtgtggaacacctgggactgcgactgggtcgcaataagatcactgcgggctacaagacaaagaaaaaactcgacaagatcaagaccgaaataaaatccagcagtggcctgaacaagaaagacttgattaacaaggtgaaggcctactatgtatataagaagcagatcaagaacgtatacagtaacagcagtaatgtgtga

SEQ ID NO: 10672 - RNA, 990 nt, synthetic construct
  source 1..990: mol_type = other RNA
atgccactggaaaagagatatccgactattaatttgcgctctaagaatgaaatcgccaaaaggatcacagataataagctacccttcaaagagagtattaagctcctgaacagagtgatcaataatcattccgaactttggcacgatgtgatctctttcagtgagccaagcaaaggaaagtatgtccgtagtgccaagaatacacctctggggaaactgctttccttgttcgacaagaaaatcttaaggcctcacgataagctgattccaaagttcatatttggcggcgtttcaggcggcagccatgtacaagccagctatcatctccttggtatctgcaaaaaacgaaccaaattgggcctggacatcaccaagttttttgagcacaatagcgagcagcgggtgttttatttcttccacaagaagtgtaactgctccgtccaggcaagtaaaatactctcgaagctctgttgcgtgcccttaggggccaaaggatcaaataacagcaaaacactagcgcggggattcgcaacctctacgcgcttggctgtgtggtgcaacctggatctgtttctgcgcatttactgggaagcaaaaaaaaccctgaagtacaaagatgtcaagatcgctgtgtttatagatgatattgggatctccgcttcccgagttgataagagaacaatggaggacctcagcctgaagattagggacatcttggagaactacgataaaaaccaatgtctccctcttaacaacaagaaaactgaggtaaagtcatatctggacggagagattgaacacctggggctcatcctgggcaataagaagctgtcattcggtaggaaaaccagaaaaaaactatccgaccttaaaaaagacctcgacaacaagcagattaagggtaagcagcggaagtctttatatactgccaagaaatcttactacagctacaagaagtacattaagaaccccatagacgacaagaaatga

SEQ ID NO: 10673 - RNA, 981 nt, synthetic construct
  source 1..981: mol_type = other RNA
atgcgaaaagaggcccgataccccaaaattaatattctgagcaagaacgagctggcaaaacacatctcgggctcaaagctgaggttctccgatgcgttgaagctgatcaataacgcagccgacaacttcaataatcagtggtatgactcagagcattctgaacctgaaaaggagaaattcgttagatcagcggtggggacctgtcttgggaaactactcgagctgatcgacaagaaagtgctggccccacacgataatttggtacctgactttatttttggcggcgtgtccagtaaaaaccatatccaagctgctcatcaccttttggggaataaacgagagcgcgttctgttacggcttgatataaagcggtttttcgagcagatccacgaggacagggtgtttaattttttctatgccaagtgtcgctgcagtgccagagctagtcgcctgatcgccaggttatgttgcgtcccactggggcctaagggacagggctctgccactaaatcactggcaagaggcttcgctacatctccccgcctcagtttatggtgcaacctcgacctattcctgcggctgagctggatggtaaaaaaggagcttagaggtcacgatcccaagatagcaatctacgttgatgacattggagtgaccgctagccgtgtgtccctagagcggatggaagagatctccagaattgcagaaaacatactcgaaaactttgacagcaaccagaagctgcccatcaacccgtctaagaaggaaatactgtctaatgtcgatggaatggaacatttgggcctccgctttggacggaataaactttctttcggtgggaaaacgaggttcaacctgaacaagatctactccaagctcaaatcgccactcagcaagagcgaaaagctgaggctcctgaatcaattgaggtcctatcagcgttacaaacagcagattgtcaagacaagcaacgccatttga

SEQ ID NO: 10674 - RNA, 972 nt, synthetic construct
  source 1..972: mol_type = other RNA
atgctaaaggaccggagatatcccgtgatagccctccgcagtaagaacgagctggctaagcgaatcagtggcaaggaccttccatatccagacgcacttgccctgataaacgacgtgttgcagaattttgatgcttattggtatgatagcgatcgcagtgagccaaaaaaagagaaatacgtaagaagcgcaatcggcaaacctctcgggaagctcttgaagctaatagataggaagattctggcccctcatgattctaaggtccccggattcattttcgggggcctctctggtaaaaatcacatccaggctgcataccacctgttgggagaaaagcgaaaaagaacgcttttgcggctggatatcaaaggcttcttcgagcagatacatgaagagagggtgttccatttgttcaacaaaaaattcggttgttccgtcgaagcggctcaactgattgcccgattatgttgcgtcgctgtgggtccgaagaattcaggatctactaaaaaaacactggcacgtgggtttgccacatcacctaggctggcgctgtggtgcaatctggacctgtttcttaggttacagtggaagatgaaaagggttctgagacaccacgatcctcggatcaccatctttgttgacgacatcggggtgacagcgagccgcatcgaggaggatcagatgcgtaagttctccaccgaattagagaatattctggcccaccacgaccccaaccagtcactccggattaacccacaaaagaaagaaattctcaccgccggcatgcacaaggagcatctcggccttcagctgggacggaaccgcctctcgatcggaaagaaaactcgctttaagaggaacgaaatcgccaaggctctgaagcaaccccagagcgaggccgacaagaaggcacttctgaaaaaaagacattcctactttgcctaccaagaacagattaagaatatttcctga

SEQ ID NO: 10675 - RNA, 978 nt, synthetic construct
  source 1..978: mol_type = other RNA
atgagcgatctgcgctacccgcagattaatttagagagcaaaaacgaactggctaaacgcatttccgatcgttatcttccttattcagaatctctcaagctcataaacgactgtctggaaaatctagaccactactggtacgacagcagagccagtgagcccgagaaggagaagttcgttaggtctgcgaggggtaagcccttggccgagctgcttaagaggatcaaccttgccgtactggccccttacgaccggctggtaccagattttattttcgggggcctgtcctatagaaatcatgtgcaggctgcagccaatttattgggcttccagaaaaagcggactttgctgaaactggatatttcccgattttttgaaaggataggcgatgggcgaatattccacttctttaataagaagtgtggctgcagtgtgcgtgcgtcgcgcctgttatccaaaatctgctgcgtcccaaaagggcctaagggatctggcgaggtcagtaagacactggcccgaggtttcgctacaagtccacggctagcagtgtgggcaaacttggacatttttctgaaaattgacctgactgtccacaagatgcttaggggacatgatcctagattggtggtgtttgtggacgatatcggaatcagcgcttcaagagttgaaatgagcaagatgcaagaggtgaaggaaaaggtcatcgatattctccagaactacgaccccaaccagaccctccccgtcaatcaagacaaaaccaaggtgatccctttccagaagatcccagagcatctggggatcaagctcggccggaacaaactttccccgggtaaaaagacgcaactcaggatgaagaatgttagcctgctcctcggagaagcaaaatcaaaaaaggagcgcgaccgcctgatgataaagaaacaggcctacagacagtataaacggcagttgtcatctgtgaacatccccaaatga

SEQ ID NO: 10676 - RNA, 1005 nt, synthetic construct
  source 1..1005: mol_type = other RNA
atgggtaaacagtacacccataaacacccaaagctaaatctccggactgaaaaagacctgctcagatttttgaacgccgccaagactgtaaaaactaagaacaagacactgaagaagcaagtgacctctaaggacttacacttcctgagcgagaacgcacatctcgagtggagcgatcaccccactgagtccaatcccatcaagaagaaatatgtgcggtttgttaagccgggcagttcattaaatattaccaataggcgcctcaatgcagccctgaaactgacacttgacaagaaggttcctggcatcttttatggttcggtgagtaaaaagtcacacattcaggccgctgaggttttatgtaacggcaagaataccaccataatatctttggacatcacccgattctttgaatccatcagcccaagtcgagtcgctagattcttcgggaaggcaggatgctcacctgaaataattaaggtcctggtggatatcacgtgcgtccccctcggatctaaaaacgagcccttgagcgattatagccttgctaggggttttccaacatctcctcgtctggccctgtgggccacatacgaaatcttcgtgaagcttaacagggtgctgctcaaaaacttcccacacctctcacctaaaatggtgattttcgtagatgatgtcgggatctccattaaaaatgctaccattatcgacgtggaggcgatcaaggaaaccgctttcagtataatcgaaaacgacaaaaacgggatcaacttggaggtgcataaaaaacctccaaagctgaaagtgcggcatatttcccagacagcggagcacctaggcctggtcattggaaaaaaatccctggcccccggatttaagactcgggttaagattggggacgtgaagactaaacttagcgataagtctctgtccaagacggaacgcgagacagcacttcagcataaacgcggcctgatgaattacaagaggagcgtaagaccgtga

SEQ ID NO: 10677 - RNA, 1008 nt, synthetic construct
  source 1..1008: mol_type = other RNA
atgcggaaacagtttgcacataaacaccccaagcttaacctgagaaccgaaaaagaccttctcagatttctgaacgcatcgaaggagattaagaccaaacgagggactcttaaacgtcctgtgctctttaaggacctcacctacttgtatgaagagccacggttggattggtccgaccaccccactgaaagcgattctacaaaggagaagtacgtccggtctatcaagcccggatccatactcaacacagccaatcgcaggttaaatgaggccttaaggcgcacacttgatgaacaagcgtcccaaatattctacggcagcgtgtctaaaaaaagtcacatacaggccgctggatcgctgtgcaatgggaagaataccactatcgtttcacttgatatcacgcgtttctttgagagcatcagctccgaccgagttgctcgcttcttctgcaaggcaggctgtagtccagagatcgcgaagaaactcgttgctgtaacatgtgttcctgtgggcccgaaggaaaaacccgaagagaagtactccctggctaggggattccccacgagtccgaggctggcactatggagcaccttcgaaattttcgtgaagctgaatagggtcctgcagaaaaagttcgctcacctgagtcctaagatcgtggtctttgtggacgacataggtatctcactgaagaacgccacaggcgaagatattcaggccgtcaaagagatcgcctttagcgtaattgagtctgatactaaggacttatcactcaaagtgcacaaaaatcctcctaaactgaagattcagcatatctcagagaacccagagcatttgggtctggtcatcggcaagaagaatctgtctctcgggtttaagacccgaagcaaaattggggacgtgaaagtgcggttgtccgacagaaccctatcccaggaggatagatataaagccctgcagaacaagagaggactgatgaactataagcggtctattactcgcccatga

SEQ ID NO: 10678 - RNA, 1008 nt, synthetic construct
  source 1..1008: mol_type = other RNA
atgaggaaacactacactcacaagcatccaaagctgaacctgcgaacagagaaggatctcctgcacttcctcaatgctcggaaaacagttaaattgaaaggaaagaccgtgagaaggcaggtggctacgaaggacctctcctatctcgataagaattcgagatcagactggaatgaccatccttcagaatccaagcccgaaaacggcaagtacgtgcggtacattaaacagggcagcacccttgatatctcaaataggaggttgaatgccgccctcaaacaaacgcttgacaaaaaggtgcctagcatcttttacggaagtgtcagcaagaagagccatattcaggcctctcgagcattgtgcaacggcaagagtaccgtgatcatatctctggacgtcacccgcttctttgagtccgttagtttagcccggattttccgtttcttccgcaaggctggttgctcgaccgagatagcagatattctggtagaattgacatgtgtgcccctcggcgctaaggagcacccacaatctggattttctattgccagaggattccccacttctccgagacttgccttatgggcgacttttgaaatcttcgtgaagctgaacagaattctccagaaaaggtatggtcatttatcccctaagctggtggtatttgtggatgacgtcgggatctcactgaagaatagtactcctgaggagatcgaagaaatcaaggcactgtccttcgagacaatagaatcagacaaaaacgggattcaccttgttgtgcacaaagaggctccaaaactgaaggtacagagcatcgaccagaacgcagaacatctaggcctggtcatagggaaaaattccctgtctcccagctttgagactcgccacaagatcggttatgttaaagcgcaactgagcaaacagacactaagtaccgagaaccgtgatcgcgcccggaaaaataagcgaggcctgatgaactataaacggtccgtcagcaacgggtga

SEQ ID NO: 10679 - RNA, 1032 nt, synthetic construct
  source 1..1032: mol_type = other RNA
atgaaaaaaaactatacccacacgcatccgaagatcaacctccggacagagaaggacctgctcctgttccttaatgcgaaggccacaaaagatcggagatacaaaatacctaggaagctggtgagtcaaaaggatgtggcttacattaggcagaatgttcaccttgactggaaggattatgcatatgggggagactccctgaaattcgaaagcgccgctgagaagggcaaaatgactcgctcaatcaagcagaatagttgtttagacgtcgttaatagacgtctgaacgcaagttttcgacgggttctcgacaaacacgtgcctgatgttttttacggcagtgtgagcggacggacccatatcttagctgccaaggagctgacaaacgggaagaagactgtgttcctgtcgttcgacattcagaagtttttcgagtcaatttcctctaaccgtgtgcaacgattcttcgttaaagccgggtgcaccaaggaaattgctgattttttggtgagcattacctgcgtgcccctgggtgtgaagggattgcaaaaggacaaactatcactggcacgaggttttccaacgagcccaagactggccctttggtgtacttttgaaatattctctaagctcaaccgcatcttacagaaatccttctcccacctctttccaaaaatcgtcctgtatgtggacgacatcggcatatctctaaaaaatccctccgaggatgagatcgtccagatcagggacttggtattcgagctgatcgagtctgataaaaacgggctttctctcactgtgcaccgcgatccccctaaatttagagtgcagaaggtagaaggtcgcgccgaacatcttggcgtagcaattggcaagagcaagatagccgtcggaagcaagacagtcaggaatattgcgatcgtgaaaaatcagttgctgtcaaccaatgacaaggatgaaagaggacgcgtcttgcagaaaaaaaggggcctgatgaactaccggaagaccgtcacaaagaacaacctctga

SEQ ID NO: 10680 - RNA, 960 nt, synthetic construct
  source 1..960: mol_type = other RNA
atgtgtaaactgaatatctactccctgaaaactctctcagaacgatcctggattagtcgcgacttcctgctctcctgctctgacggtagcgggcggtttaggaaaaagttcttttccgaccataaaaactctaagatcaccgatgatatcacaacatgtaagtacataagagtggtcaagtatggctctcaaatgcaaaagttccataagtggataaactgggagctcaaaaggtttgacagcaaactcccattgactatttacggctgggtagaggagaaatccactattgatgccattagcatacacattaggggagtcccgtttgtttttataaagagtgatctgtccagattctttgaatctatccccaaagaacagatcttctcgctgttttgcggcaagtttaactgtgataagatcgttgctgaggtgatctctaattcaattacgtttcctcagtggcccctaggttcgaaaggggagcttttcctggcacggtggttgcacgttagttcacgtatcgcagtgtggagtgccctgaactttttcaaagatctgtgctacttcttccagaaaaaatacaagaagtacaagcctaagatctcatattacgtggacgatattggaattagcctcgtgacgacagatcagattattatcgacgaattcatggcggaccttgtctggttcgtgtggcagatccataagaactccgacttcctgaacttgcacccagacaaaaccaattgcaccattatcaaggataacaatgacttcgtagagtatctttgggggaagatctatatgaatcgcaaggacataagcaataaaactaccgaaaaaaccaagcagttatatttcctgtacaagaaagctaagacaatcgaggagaagaatttttatgccaagcggctaacccccttacgcagctataaaaagagaatgcgaagctcttga

SEQ ID NO: 10681 - RNA, 909 nt, synthetic construct
  source 1..909: mol_type = other RNA
atgaccaaacagcacaagatcggtcttgtgaaggtccttgaaatagtgacaaccattcttgccttcattaatgagagctggacatttgtggaaaaggtacttagtctgttcaacatcgtgcccaattacatgaattcatccatgaagcctgcctcagattggctgcataagttcgagatcaaggagaatcgctgggttttcattcccaatgaagacactctgaccctcggcagaaaaattcacaagtacatcaaaagcaagtggaagtttccactgtacatgtttcatttgcgggatggcggtcatgtcgccgcagcgaattatcacatagagaacacatatttctgcttgatagacatttccgattttttcggggcaacttctcagagccgtattacaagggaactgaacaaatttataccatacgaccgagccagagagatcgctaaattaagcacggtgaagaacctgaatagtaacgggctgaagaaagtactcccgtacggatacccccagtctcctatactcgcaagcttttgcttcaggcaaagctattgtggaaaggtgatccacactctcagtaaaagcggcaacatctccatctccgtttatatggacgatatcctactgagctctgatgacatcgagcaactggtttatgcattcaactccattaagaccgccttgaagaaatctggatacactgtgaacgaagctaagacgcagtcacctagtacctccgtgaatgtctttaacttggtcctgtcaaagaacctactcaaggtgtcgtctatccggattgtcgagttcctgcaagcctacatctcatctcagaacccagctgagaaaaaaggcattgcttcctatgttgggagtgtgaataaaacccaggcgaaattatttcagtga

SEQ ID NO: 10682 - RNA, 909 nt, synthetic construct
  source 1..909: mol_type = other RNA
atgaccaagcagcacaaaattggactggtgaaggttctggagacaactaccgtggtattggcctttatcaacgagagttggaccttcgtcgaaaaagtcctgtcccttttcaatatagtccccaattacatgacattgagcatgtcgactccaagtgattggcttcacaaatttgagatcaagaccgagaggtgggtgttcgtacctagtaagaagacgttagaaagaggaagacagatccacgcctacatcaagcagaagtggaagtatccacgatatatgtttcatctaagaaacgggggtcatgtggctgccgcaaacttccatctgaagtctaactatttctctctgatcgacgtgtccgacttctatggcgctacttcccaaagccgggtgaccagggagctgggtaggctagtgccatacgtgaaggcccggcagatcgcacgattgagcactgtggccaatcccaaccgcaatggcttcaaacacgttattccctacgggtaccctcagagtcctattttagcgagcctctgtttccaccattctttttgcggcggcgtcatttcctctatatccaaatcggagcgcgtctttgtgagcgtatatatggatgatatcctgctgagctctgacgacatgaacctcctggttgaagcgtttgatacagttagacaagcactgaggaagtccggatacaaggtcaacgagaataaaacgcagtctccttcacccaagattcaagtgtttaatctcgaactggggcacaatcatctccgggtcacaccgaaacggattgttgagttccttaaggtgtttatatcaagcgctaatgaacacgaacgtaaagggatcgcctcatacgtgggctccattaacaaatcacaggctaaactcttccgctga

SEQ ID NO: 10683 - RNA, 930 nt, synthetic construct
  source 1..930: mol_type = other RNA
atgaaaaagtttaaactgggcctggtgaaagtgttatggggagtctatgcactctaccactttcttaaggacttcgtgcccttccttaacgaatctatctctttgttcgagaagttgctcagctactttaacattgcccttaactacttattcctgaggcgcttttttctgatggtgaaatgggaatctaagttcgaaatcaagaaggaccgctgggtgtatgtcccaaccgatgaagtccggctttatggggagaaactgcataattaccttcggaaaagatgggtccccccactgtacttctatcatctgcgtgatggaggtcacgttgcttgcgccaaaaaacatctggccaatgaatatttcgctctgatagatatcaagaacttttttgagagcaccggccagtcgagagttacgcgggagatcaagaattactttaagtacaacgatgcacgcgagattgccaagttatccactgtaaggaatccactccctgtgggacctaaatacataattccttatgggtttcctcagagtccgattctgtcaacattgtgcctgcacaagagctattgtgggggactattcaaaaagatagattccagctttgggatcgacatcagtatctacatggatgacattattatctccggtaatgacctggagctatgtaacctcaattataaactgttgtgcgacggcctcattagaagcggctatgaggtaaacgaaaataaaagtcaggcaccctccaagtcaatcagggctttcaacctcgaattgaagaaggacagtctgcgagtcctatcctctcgagtgatagagttcctcgtggcctacatcaagagcgacaacccccacgtgaggaagggtattgcctcatacgttggctcaatcaatgctgagcaagcgaaactgttcagatga

SEQ ID NO: 10684 - RNA, 939 nt, synthetic construct
  source 1..939: mol_type = other RNA
atgaggaagggcgcattaagaagaattccacggggatttaccgcaatcccggccaagtggaggtggggcagattccacctagcccccatcgtgatctttttggagaacatgcgaaacgtagcccgctccttccttaaggatggcactcggtacttcgtgctgactaagagctacgccggatggcgtacctttagtgagggcggtagagctgcttatgacggggaggaggaatggcggctgctcaaagaacgtgtcttttcgcattggcagccaaatgccgcttttaccgcattcgcgaagagggctcatgttgccgccttgcgccctcacctggttaataagtgctttgctgtgatagacctgaaaggcttcttcgaccatgtaaccaggacgaaagtgtgtcgggcactcgaagcaatcgggctggcgagatcttcagctttcaaaatagccggtgagtccacaattcggcaaggggataagtgcaccttgccccgcggatttcgccagagcagccttctcgctacattagtgttagagaagtcactcttcggtagtgccttgacgggaaacagatttgagtctaaagttactgtctatagcgacgacataatcttcagttctaatgatttcgagacacttgccgacgaacactcacaggctatcgcactcctgcgccgctctcacttcgccattaaccctacaaagacacagaccgcgcgggctgaagtcgacatttttaatctgaggatgagccaccgtactctgaggtttaccgatgagcgaatgtggaagtttctggagcaagccgcctccttcgtgaaaggggaggatgcagaacataaactgcacctgtacgaaaaactcttcggcgattatattaggtccatcaaccctgaacaggagaagagacttcgaacttccctggggctaccctga

SEQ ID NO: 10685 - RNA, 933 nt, synthetic construct
  source 1..933: mol_type = other RNA
atgcctaaagggctgaacttccaaagaaagtccgatatagtaaagaggttgggaatcgaacctaaggtgctggaggagatcctgtacgacaaggagaaattgttttacgtggaggaggaaatcatcaaggggaagacccgggactttcacaaatgtaggggttccctatacggctttctcccccagctgaacaaagccataatgtcactcgacgctctcccccctgaactgtgcggtggcgttcgaggtaagagcatctttaaaagcgcctctcagcaccaaaaaaaaaagttcgtcctgaagcttgacctcaaggatttcttccattccgtgaagccctatcaggtgcaggctgtgtttgaaagactgggctgtacaccgagcatgtctaagttattgacatatacatgcactgcgaataatcacctccctcagggcttcagtaccagcccaattttagctgcgcatgtgctcgcaccattcgtggaagatatgcgagcacttctgcgcccacatcacctgtcatttaccatttgggtagacgatatcacaatttccgggtacacaaatcccgtgcggctgctcccaaccattagatctatctgcaaaaaacacaaagtccaccttaacgagaagaaacgtaaactgttaagggccggaaagcagactcaggaagttactggcgtccggatttcgtatgataagttgagtactggagccactttctttcgtgacacggagaggatggtgtatgtgcttaaaaaatttgggtggcatgaggttaagaaaaagttcgccttcaacgttaccgacaagcgcaaggtcatccaaaaaataaagggacgcattaaccatattcggcaggctaatgctcaccaagcaggcaagctagacacggccctgagagataccctggaggtccaggcacactga

SEQ ID NO: 10686 - RNA, 960 nt, synthetic construct
  source 1..960: mol_type = other RNA
atgaacgacaccagactgaacctcaggtctgagaatgatgtcgtcaatagacttcacctgcgcgacaagaagtttttgcaaacactgtgtgagaatcgcgaccggtactttcagaaaaggatgctaaacactgggacaaaagaacgtgaaatatgtattccgcatgacccattaggccactttcttagaaagtttaatgcggtgctccgtacgctgcctgttccaccagaatgttacgggggagtccccggaagatccgtcaaggacaacgccagcaagcacaccaacaagcgcttcgtgatgaacttggacatccagaattttttcccgagcgtgaccgccaaccaagtgttcgaggtacttcggaggcacggctgctatagagagacgtccgaactccttactaaactggtaatgatagataatcgcctgccccagggattcaacacttcacctctgctgagcatccaggtgttaacacccataatcgaggagctgaggcccctcttaagtgaacaggatgccacattcaccgtctggatcgatgatattgcaatctctagtgacaaatcacctgaaccactggtgaagcgaatcgctgagaaatgccgacgccacgggttccggctgaacactgacaagtaccattgcggcgaaaggggtgtgagcgtccaagaggtaaccggcgtggttattaatggtgatgaactaagacctgccggtgggtttatcaaacagacagaaaagatgatccatgtgctcgttaagtatggcctggaggatctgaatgcagcattcgatcgggagtttctcgacaccgctaaagcccaggctcacattgagggacgaattgtgtggattgacgagttcgactccgccaaagctgataagctgaaacaacagctccataagttggtggtgcccgcgtctttccggtcggttttggttactgcacagtga

SEQ ID NO: 10687 - RNA, 906 nt, synthetic construct
  source 1..906: mol_type = other RNA
atgagaaatgccctgaattttcagtttcccaatcagatcgcccggcggctgaagataaagtcttctatgcttcagaacgcactccacaatatgactgatctctattgtcaccaagagcgcgacattgacgggaaggtccgggatatttacatgccctatcctccccttaagaccgtgcagaggaaactgcacctgacacttaggaagatccctttcccagctgaatttatcgggggaatgccaaagcacagtatatttgataacgctcgacggcacgtgggtaggaattttgtactgaaccttgacctgaagaacttttaccctagcatcaagccctcgcaagtggagtcagtctttctgagattggggtgtaacaaaggtatgagtcgcctgctcacctacttgacaacagccgacggccatctgccacaggggttccctacctccactatgttatcagcactggttttagtcccactcgccgatgatctgagagctctgttacagcctaagttcgtgttctccttctgggtggacgatctcactatttccggagactctgatcctacaccactcattcccgctgtgcgcaagctatgcagaaaacatggcttcaggcttaaagaggagaaaaaacatctaggagttcgggggaaagttccgcaagaagtaactggcattatcataagcggaaaggacttcagtccggccaacggttttttgccccatacaaagaatatgttgcgagcgctgaataaggagggatgggaatatctcaacaccattgaacgttggggctgcaccagcaagagagaggtgacgtcacgcctgaaaggccgtatccgattcatcggccagttcgacaaaagcagggcagaaaaactgtacgactccttgaacatgtga

SEQ ID NO: 10688 - RNA, 963 nt, synthetic construct
  source 1..963: mol_type = other RNA
atgccacggtgcaagatcatggtcacaaagagtgccaacaagaccataatctccactaggcggctatgcgtggaaatcctccaaatccacaaggacgaactgctgtcactcgtggcagacacagacagttactatagaccttacgtgcaaaaaaagaagagagccgatggcaccgctaaggagaggcgcattgaaccatcctacggatatttgaaaactgcccagagactggtaaataaacgcatcctgaagcccgccatggcagacttaccaattgagattatgggaggccggcccggcgtaagtgtcgttaataacgcaaaccatcatgctcagagcaaaagtctcatgaaatatgacgtgaaaaacttcttccccagcattaagtacgggcacgtctatcacatctttaggtaccgtcttggcttctgcgaagaagcagctaacattcttaccaaactaactacctatccgtccacaggagatgtccatgtgcctcaaggcgcccctaccagcactagcctggccatgttcgcgctggagcctatgtgtgatagactcaaggtttactgtgacgataacgatttacgctcctctatctggatagacgacattacaatatctggggacccaaaagccctgagacagcatcgaccccggattaatcacatcgtcaatggtacgccctttcagatccaccctgataaggatacaggcgtgttggtgaaagggggtaaggcgggccatgagaaggggagaaagattactggggttgtgatcgataataacaataggctgacgataggtcgacagaaactgcgaagcctccgttctaaagtgcggaggtccaaagtggtttcagacaagttggagggatcacttcagtttctgaggcacgtaaatccgacccagggaaacaagctgcttcgcgagtaccgctctaagcacaaacggtcggcttga

SEQ ID NO: 10689 - RNA, 918 nt, synthetic construct
  source 1..918: mol_type = other RNA
atggtcaaccagaaatgcatcaccaccaccaaattgtgtagagacattcttaagataccgaaagaggagctactggctctgctggctgacaggcagtcatactatgtgccattcgaaaaaaagaagattacagccggaggacgggtaaaaatccgtaccattgaacctcctcacggatatctgaagcgggtcttgaagaaaattaacattactgtgctccagccccagatggaacggctcccatacggggtgatgggggggagaaagggctactcggtggtggataatgcaaaataccatgcatctgctcccgcgctgatgaagtatgacataaaggactttttccccagtatcaagtatgcagatgtctttcacatctttcgctaccagctcaattactgtgaagaggcagccaacattcttgcccacctgacaacgttcgagaactcccagcatggtgttcacgtgcctcagggcagtcctacatctatgagcattgccatcttcgctgtcgaaaagatgagctgtgccgtggacgactattgccgtgagaatggtttaaagttttccatctgggttgacgatattacaatcagcggcccctatgataaattatgccgccacaggagcactataaaccacatcctcaattccactcattacagaatcaacccagacaaagattctgggatcgttaagaagggccaaaaaggccgatccgtcacgggtgtaattatcagcaatgatgggagactgactgttggacattcaaaactgtctaggctccgacgccaggtgaagagatcaacccgcccaagtgataagctacgaggccggctgcaattcctgttgcaagtgaacaaacaccaggcccggaggcttatacatgagtacgcggagaagcacaggaagaattga

SEQ ID NO: 10690 - RNA, 918 nt, synthetic construct
  source 1..918: mol_type = other RNA
atgaatacctcctccaagaaagtgtgcctttggggcagtgtggaggccttggccaaaacgcttaaggtgcccgttgatgatctgtttgcttggtgcggcagaaagaaaagattcgttacagaagaggaacgtctcatcggtgccaaatataggcagctgaaagtccctcatggcgaattcaaggaactgctacgcaagatcgaccagcagctgaagaggtgtcccattcccaactacttttatggctctcggaaaggagtgagcgccatagactgtgcccttgtccatttacatagcccctatattctcaagctcgatttgaaggattttttcccatctactgattaccggagagtaagtaactccttgagccaggtgtgcgacaaggaagcggtgctcaaactgcttaccgagctatgtaccttccagcaccacctaccacaggggttcccgacttccaccaccatcgcagagctgacgctgattcctctggctcagagactcttcggaatgtgtaatcagtacgggctccaattatcaatctacgttgacgacatatgtattagtggtagcccagtccttctgcggctggaggcacgcatcttacgaatgtttcaggaaatgcactttaggttgaacctgaagaaaaaggagctgcgctctaagcaagagggaatcgccgtgactggtgtatttatgcagaatggcttctgcaccacaaaacctaaatttgacgagaaactcttgaagaagatatgggcatatgagctggctcagatgatttgcgactctactctcgctgaggatttgctgggctcaatcaggggacaacttctgtggacacgacaactggacgaatcgaagtacctgtgcttcctcagcgaactgcggcaagggcagatgatgtcagggacatga

SEQ ID NO: 10691 - RNA, 927 nt, synthetic construct
  source 1..927: mol_type = other RNA
atgaagaaaagacagcttctgaacatcaatacgctaaatgaactggcgctccagctagagatcccctacgatttcttaattaaaatggctgatcgaatggacaacaactactataccttcgataagaaactgatcaagaagaatgggaaaatcaagatcaggaaattcttcgagggcaataacaatctgaagattattcaccggaaaatcaatcagttgcttgaccatatcaattatcccgattcgattcaaggaggcattgtggggaagtccatagtaacaaatgcctctattcacgccagtagaaaatacgtcgcaaactttgatattagcaactttttcccttcaatcgactatcgcgtagtgtatcgggtttatcgatttttgaaatgttcaccggacgtggctcggattttgactaagtttaccactgcagacgcacatctcccacagggtttcggtactagcccaaaagtgtccggactggtgttgtttgaagtcgacatgcgtttaaacaagctcctgtctcgctatgggctcaaacattcattctggatcgatgacctcacaatttctggcgatcacagcataaagaagttcaagaacatcatttgcaagatctttcagcaaagtggatttaagcttaaccacgacaagacggagtttactaatagtaagcaaaagcaggtgtgtacaggcctgacaatcaattaccagcctaatgctgacaaagccatcagagacaaagttaggaaagagctgtttctttgcaagaagtttggcgtcgagaacttcctcaacgaacacggatactccatagataaggataagtacctgaggtccatggccgggaaaatcagcttcctgtatagcataaaccccaagtacctgacctacaaaaaaaccttccaggaaataaccacctga

SEQ ID NO: 10692 - RNA, 918 nt, synthetic construct
  source 1..918: mol_type = other RNA
atgaagaaacgacagttcttgaagataaatacagtaaaggagctttcctatcagctggggctgccagaggcttttctgattagctcagcaaataagatcgacaattgctaccgaaaattcacagataaggacaagaagggcaaagaaagaactttttatgtggctaacgagaatctgaagaaggttcatcagaaaattaacaaactcctcgatactctggactatcccatcaacatccaagggggcattgctggcaggtcaattgtgacgaatgcgagcgtccatgtggggaagaaatacgttgcaaactacgacatcaaaaactttttcccctcggtgaattataaaattgtctatcggagcttcgagaaacagaagtgtatgcctgaggtttgcagaatgctcactaggtttaccaccgccgacggatgtcttcctcagggcttcgccacctccccaaaagtgtctggtcttgtcttgtactcaagtaacttcagaattgagacgctattaaaaccttatgacctgatccacaccttctggatcgacgacctgactgtatccggaaataggccgatcaagaagtttcagaagctgttttacaagatattcaagcaggaaggcttttccctgcatgatgaccccaaaaaagcccgcatcaccgatagtcaacaccggcagacatgcacagggctaatcataaatcaggaactcaatcccgaaaaaggtctgaaagataaggtgcgtaaggaattatttctctgtaagaagttcggagtcaacaattttttgaaagagcacaacagcccattcgataaagatcgctacctgcggaagctcgccggaaacatttcttttttgtgctctgtgaacaagaaaaacttcatctacaaggagcaactgaagcttataaagtga

SEQ ID NO: 10693 - RNA, 951 nt, synthetic construct
  source 1..951: mol_type = other RNA
atgaagcggaagaagtacttcaagttctattcgatcaaatccttagctaaacacttaggggttagcgaaggctttttgattgatctggcaaacaaacaggacggaaactataaattctgtcagggtgttatgatcaagaataagtcccgggacctgtataaagcaaacacctccctgaaaatcgtgctcaacctaatcgacaagaagatactgaactattacgatttccccaaaaccttccaaggcggaatccgtgggagggcactcagagataatgctcagttccataccggaaagaagtacattcttaagattgacatcgccgattttttccccagtatcagccctgagaagatctttaagactctgaagcagcttcaaattgccgataaacctgctagcctgcttacgactttggttacagtgaaaaatccccacccacacctacctcagggcttttgtacatccccaaagatcgccagtctcgtgttgctcaatttggaaaagaggtttcataacctgtttaaggagaaaaaatgcgactactccttttgggtggatgacatcacgttttcttctgacatgcccatcggaaagttcaagaacctgatactcaagattctcaaagatgaagggttctcagtgaaccagaagaaaatagagctgctgaccaataaagaaagaatggtagtaacaggggtcgtggtcaattcatttcctaccctctctaatgatcgcaaaaaggaaattgagaaaccactttattgcctggtgaaattcggtattgtcgactacttcaagaagaacaaaatcgagatttctgaggcgagcataactaaaattcgaagcagtctgttgggcaaaatcaactttgccaagtcaataaatccggagctgggcatcaaatacaagaaggacttcctgaagattacatgggagttaaagaaatga

SEQ ID NO: 10694 - RNA, 1152 nt, synthetic construct
  source 1..1152: mol_type = other RNA
atgaatgctctttgtaaagcgctggatctgaccctcgatgagatctctgaggccttatcactgacggctgcagatagatacaaggagaggtcagtccccaaaccaaatggctccattaggattgtacacaacccgcatcacctgatccgcaagattcaaagacgaataaatcggcggatcttttctaacccagatatcatcctctggcctgaccacgttttcggaagtattcccaacgaagagttttcggatagccccgccgccgagaaggactacgttaactgcgcgcggcagcattgcagagctaaatctgtcctgtctgtagacatcaaagatttcttcgacaacatccaccgagatagggtgcatcagatattctccgacttcctgaagtgcgaagaggaagtgagtgacgtcctggccaacatttgttgtaggggagataatttagtccaaggtgcactgaccagcagttacatcgccaccctgtgcctctattccaatgagggactcgttgtggagagattgcggaacaagggtgtggcatatactaggctagtggatgacatcacaatatcttccaaaattgctgactatgactttagcttcgccatgcgccagatagagaggatgctcgacgaatttggcctgcccctgaacacaaataagactaagcttcagaatgcggggatgcaacctctcatcgtccacgggctacgggtggacttcgatcagcctagattacctccagacgagccacggagaattagagcagctgtgaagaacttggagctcctcgccagcacacccgggtacagagcatcccgcgcttatcgtaaagatttcaataggtgtctgggacgcgtgaacaaactggatcgtgtggggcacaagcagcataaggttcttttggcaaggttgcgatccgtaattcctctaccatcacatatggacatcgaacgggccgagcagcaggtgactcgattgcaaaatgacagtgccaaagccggctacaaggaaacctactggttttatcgcaggtggtatgtggccagccagcgtattggcatacttaaacgctcatttccgggcaaggctagcgaactgcgcgaacggcttaatcagctgcgacccatcaagaactacgaatga

SEQ ID NO: 10695 - RNA, 1209 nt, synthetic construct
  source 1..1209: mol_type = other RNA
atgcattccccaataagactccagccgatcaaagtggctagaggttcggtccccaccttagccgccttgtgctccgccctcgacatccaacgggctgagctcgatgccgcccttgctcttacggcagccgaaagataccaggtcagaaccgtgccgaaggccgatggaagcgaacgcattgttcacaatccccaccatctgatcaggaaaattcagcggcgtctgaatcgaagattttttgccaaccctgacgtcatcaagtggcccgatcatgtgtttggctctatacccaacgacgacttgagcacaagcccggcagcggataaagattacgtgaactgtgcgcggcagcactgcggagcgaagtctattctgagcgtagacattaagaatttcttcgacaacatccaccgcgataaggtcagggacgtgtttaccctattctttaagtatcctacagacgtggccgaagccttagcagacgtgtgttgcaaggaagaccatgtagtgcaaggggctctgactagctcctacatagctacgctgtgcctctacgatgtcgaagggcttgtggttagtaagttaagacacaaaggactggtgtatactcgtctggtagatgatattacagtgagttcacgcgtgactggctatgatttttcttatgcattgaggctcattgagagtatggtggattctgccgggttgccactcaatacacgaaagaccaggattcagagcgtcggcatgaggcctcttctcgtgcacgggctgcgagtggacttcgctgaaccacgcctgcctcctgaggaaccaaggaagatccgggcgtcagtaaaacaggttgagctgctggccgcatcacccggttatcgcgcttctagggcctaccggagggatttcaaccgatgtttgggcagagtcaataagttggcacgcgttaagcatacccaacacctgcctctgctgaagcggctacagaaaatagttcccctgccatcccacaaggacatcgagcgcgcagagaaacagatcacccggctggagagggactccctcaagcctggctacaaggatacatactggttctataagcgatggcatgttgcatccgagagactgactatcctcaaacggagtttcccaaaaactgcttcagacatgcgtgaccgccttagaaaactacaccccaaaaaagcttacgagtga

SEQ ID NO: 10696 - RNA, 1209 nt, synthetic construct
  source 1..1209: mol_type = other RNA
atgacttatactgccaaacttcacccggagaaagtcgccctctccagcatctccaatattgataacttgtgtgatgctctcgacatcagcgtggccgagttgacagctgcgatgaagttgtccccagaacagcgttacacctccggagttgtgcccaaaaaggatggttccgaccggattataaataatcctcaccacctgatccgtaagatccagaggaggatcaacaagcggatttttagcgaccaggacgtgattagttggccagatcacgttttcggaagcattcctaatgacgatctctctatttccccagcgtctgacaaggactatgtgaactgcgccagacaacattgttgtgcaaagagtgtgctgagtgtcgatatcaaggatttctttgacaacatccactacgaagcagtcgtgagcatattcgagtcgttcctgaaataccctgcagatgtggctgatgctctggctaacgtttgctgtaagggggaacatgttgtccagggtgcattaacatctagctacattgctacactctgcctgcatgccgttgagggcgatctggtaaaacgccttaggcacaagggcctggtgtataccagactggtggacgatataacgatctcctcaaagctcgctaattacgacttcggattctctctcaaacaagtcgaaaagatgctgcatggcgctgacctgcctcttaacgatggtaagacccgaattcagcatgcatctatgcagcctctcatcgtgcacgggctgcgagtagacttcagtcagccgcgattgcccccatcagaaccccgaaatataagagcagcagtgaagaaccttgaactaatggccaatagccccgggtatagagcgagcagggcctaccggcgggactttaaccgctgcatgggcagagtcaacaaactgggcagggtgaaacacaatcaacactcagagctgctagcccgcgtacggcgtgtcttgcccttaccctcacataaggatatcgagagggccgagcgccaggtagacagacttgaggttgactttctgaagcctaactaccggagtacctactggttttataaaaggtattacgtggccatggaaaggttagggattctcaaacggtcttttccaaagaaagccgccgagttgcgcgcgagactgatcgtgatgcgcccatcaggaaaatatgagtga

SEQ ID NO: 10697 - RNA, 1209 nt, synthetic construct
  source 1..1209: mol_type = other RNA
atggcccatactccccggtttcatcccgtcaaggagagcgccggctcaattgccgatgttgcctccctgtgcgtggctctagacgttgcactgtccgagctctctagcgccagaaacttaccagcagaccagcgctattttcgcagggaggtccgtaagaaggatggctcaatccgggttgtctacaacccacattacttgatacggaagatccagcgcagaattaaccgtcggatttttagtaatagctccgtggtgtcatggcctgaccacatcttcggaagcattcccaatgatgacttctctgagtcagatgcaagtgaaaaggactacgtgaattgtgccaggcagcactgtggagcaaaatctgtgctgagcctcgatatcagagattttttcgacaacatccaccgtgaaatcgtgcgcggcattttctctagattcttcaattacccagacgatgtgagtgacgctcttgcggacgtgtgttgcatgggggaccacgtagtacagggtgctctaaccagcagctacatcgcgaccttgtgcctgtgggatgtagaggggcaggttgttcggaaactcgggtacaaaggtctggtgtatacacggttcgtcgacgacatcaatatttcctctaaagtcgctcgctatgacttttcttacgccttgcggctggtggaggagatggtgtccgaagctggactgccactcaacgggaagaagacaaaaatacaatatgcgagcattaagccgctgattgtccacggacttagggtagatttcgaccaaccccgattaccacctgaagaacctagaaacatcagagcagccgtgaagaaccttgagctgctagccgcatctcccggctatagggctagtcgatcctatcggaaggattttaaccgatgcctgggacgcgtcaataagctcgccagagtggggcatcagttacacgaatttctgatgcagagactgaggaagatcctccccctcccttcgaatatggatatcgaacgcgccgaaaaaatgatttcaagacttgagagggatgctgtgaaatccggctataccgaaacttactggttcaaaaaaaggtacttcgctgcctcggagaggataggtatattgaaacgatcctttccgaacaaggcaaaggagctgagggagaagctgaaaaatatcggccctagtacgtaccgagagtga

SEQ ID NO: 10698 - RNA, 1206 nt, synthetic construct
  source 1..1206: mol_type = other RNA
atggagacgcccaaatttaatccagtaaaggaagcgcccgggtctatctcaagtatcgctgggctgtgctctgctttggatatcagccagtccgaattggatgaggctcttgccctgcccgtggaagagcgatacaagaagggagaggtgcccaaaaaagacggcagtatgaggatagtcaacaatcctcattacctcgtccggaagatccagcgcagaattaacaagcgcatcttttcagattccaatgtgatttcttggcctgaccatatattcggatctattccaaacgatgacctcagtgacagcgtagcagcagataaagactacgtgaattgtgcacgacagcattgcggcgcaaaaagtgttctcaccctcgacattcgcgattttttcgataacatacacagagacagggtgtttgggatcttcttcaagtttctcaagtatagcgaagacgttagcaatgtgctagctgacatttgttgtaagggcggggccatagctcaaggcgctcttacttccagctacatagctaccttatgcctgcacgagacagagggtgacctggtcaggagacttcggtataagaacctgacttacacccggtttgtcgatgatatcacaatttctagccgtgtggcgaattacgactttaagtacgccctcggtctgactgaatcaatgctgtccgaggccggcctgccaattaacggacagaagacaaagatccagtatacatcaatgaaacctctgattgttcacggtttacgagttgatttcgaccaacctagattgcctccagaagagcctagaaaaatcagggccgcggtaaagaatttagagctgttggccgcaggcccaggttatcgtgcaagccatgcttatcggaaagacttcaacagatgcatgggacgggtgaacaaactaggaagagtgggccactcacagcacagcattctccttaacaggctgcggaaaatcctgccgcttccctcccacatggatatcgagcgagtggaacgtctgatcgcccggctggagaaggatgtcgccaaaccgaattattctgaaacctattggttccgcaaaaggtactacgccgccagtgagcgcatcgggatcctgaagagatccttcccaaagaaagccgaggagttcagggggaagttgagggaaattcgcccctcctcgcagtacgaatga

SEQ ID NO: 10699 - RNA, 1209 nt, synthetic construct
  source 1..1209: mol_type = other RNA
atgacccagcctcaaagatttgacccgatcaaagtgtcagctgagagcatagccacaattgattctttgtgcggggccttagggattggagcggccgaactcgctcaagcacgaggtctggccccatccgagagatatatccaaaaggagctcccaaaaaaggatggctctactaggatcgtgcataatcctcattacttagtccgtcggattcaaagacggatcaaccggcgcatttttagcaaccctagtgttatttcttggcctgatcacatcttcggttctatccccaatgatgatacttatgagagcctggtttatgagaaagactacgtaaattgcgcgcgccaacactgtggcgccaaatccattctttccatcgacatcaaggatttcttcgacaatatccacagagatcaggtgtccaggatattcaaaaacttcctccactactcagacgtggtggctgaagccttgaccgacatctgctgcaaggatgcctcgatcgtccagggagcactcacctcttcttacctcgctacactgtgtctgtttcgagaagagggcgcactagttaagaggttagggtacaagggcctagtctataccaggcttgtcgacgacattacgataagtagcaagatcagcaactatgacttcagctatgccctgggacaggctgtccagatgctgagtgaggccgatctgccactcaatgctaagaaaacacggatacagtacgcatccatgaagcccctgatggttcacggtctgagagtagactttcagcagcctagacttccaccggaggaagccaagagaattagggcggccgtgaagaacctggagctgctcgctgctagtcctggctatcgagccagtcgcgcctaccggaaagacttcaaccgctgtatgggacgcgtgaataaactgcggagggtggaacataatcagcatccagtgctaatcgctaggctccgtaaaattctgccccttccctcacatagcgatattgtgcgtgcagaacagataatccagcgactgaagaaggacatgtcccgccccaactaccaggggtcattctggtttcacaaaaggtgtcacgtagcagcagaaagacttggcatcttgggacggtcctttcccaaaaaggcgaaggagctgcgggaacagttgaaattgattcgcccatcaactgggtacgagtga

SEQ ID NO: 10700 - RNA, 1206 nt, synthetic construct
  source 1..1206: mol_type = other RNA
atgccccagttccagaagctacacccgattaaggaaagctccggttctattgcgaatattgatgccctctgccgagccctggacatctcatccaccgaacttgcccaagttcgggctcttagcagcagccagagatacgagaaaaaggaggtcccaaaaaaagacggatccactcgtacagtccacaaccctcattacgcactgcgtaaaattcaacgccgaattaatcggagaatatttgcaaacccagatgttgtgtcctggcctgactacatttttggttcaatacccaatgatgaaagtgctgaggatcctatagatcgggattatgtgaactgtgcacgacagcactgcggagcaaagagcatattgagtgtggatatcaaagacttcttcaataacatccacaggcatcaggtgatcggcatcttcaaaaacttcctcaagtattctgaggaggttagcgtgatcctcgctgatatttgctgtgacgatgaacacgtggttcaaggcgctctgacatcgtcatatattgcctcgctctgtttgttcgaaaccgagggcgacctggccaagaaacttgggtacaagggactggtctacacacgatttgtggacgacatcactatcagttcaaaaatcgctaagtacgagtttagttacgcactgacgctcactgagcaaatgttaaatgacgccggtctaccactgaactctggcaaaaccaaggtgcagaacgcctctatgaagcccttaatagtacacggcttgagggtagacttcgaacagcctaggctgcccccggatgaggctcgtaggattagagcgtcagtgaagaatctcgagttgctggcggccagtccagggtatcgcgcaagcaggtcctaccggaaagatttcaataggtccatggggagagtgaataaactggcccgggtcggccatagccagcactctatcctgctttctaggctgcggcgcatccttccattaccctcccacgccgacattggaaaagcagaagaattgatccagcgcctgcagaaggacttttggcgccccaactatcagacctcctattggtttcataagagatatcatgtcgccatcgagaggctggggattctaaagcgctcttttcctaagaaggctgaagagctcaaccggatcctgaagctcatcagacctgctagcagaaacgactga

SEQ ID NO: 10701 - RNA, 1206 nt, synthetic construct
  source 1..1206: mol_type = other RNA
atggaggctagacagatcgacatatataacccaaagaagataagccttgaaagtatcggatctctggccaagctcgcctcgtgcctggatgtgaccctcgaggaaattcaagaagcccaagagctaagcgctagcgagcggtacaagatcaaagagacacctaagagagatggatcattacgtaaggtctattccccccactttttgattcggaaaatacagcgaaggattaacgcacgtatcctgagtaactcagacgtaattgcttggcctgaccacatttttggctccgtgcccaatcagcattgcggcgaaagcctagtcgtagagagggactacatttcgtgcgctcgaagacactgtggcgccaaatccgtgctcactctcgacatccgcaatttcttcgataacattcaccaatcctacgttgagaatatctttacggagttccttaaatatgacgttgaggtgtccaaagtgttgagcgatttgtgttgcttagacgggcatgtggtccagggggctctcacctctagctacatcgcatctctctgtctgtgggacgtcgaaggagagttggtcgtgaaactcggccacaagaatcttgtgtatacacgctatgtggatgacatgaatgtgtcttctgtgatcagcgattacgatttcacctacgcagtgagagccatagaagttatgctggacaagaaaggtcttccgctgaaccccaataaaactaagatccagcatatttcaacggaacccctaaccgttcatggtctgagaattggtttcaaggagcctaggctgccaagttccgaagtccgaaacataagagccgcagtgaagaacatcgagatcctcgcgtcagagcatcgttaccggacatcccacgcattccgcaaagactttaacaggtgtatgggccgggtaaacaagcttggccgcatcgggcataaccagcaccagaagctggtcctgaggctgaaaaaagttatcccattgccaagcaaaaaagatattgtacgcgcgaagaagattgtggaaaggttagagaaggattactccgccaataaatctactttctggtatatgaagcgcttttacctggctcacgaaagactgaatatcctgcagcggacttatttcaagaccagtgccgaactgaggggacggctgaagtcaatcagtcctacatacgggttttga

SEQ ID NO: 10702 - RNA, 1188 nt, synthetic construct
  source 1..1188: mol_type = other RNA
atgacgcaatataaccccgaaaagaaagcatccgggtcaattgccggtctggacaatctgtgcagtgctctggatatacatagaagcgagctggacgaggccctggcgctgtctagctctgctcgctacactgctcggtcgatccataagaaagacggctcactgcgcgtcgtacacaatccacactacctgattagaaagattcagcggcgcattaacagaaggatttttagcaatgcgagcttgattagatggcccgaccacatcttcggatctatcccaaaccagagttctgacgacggtgtgcctatcgcaaaagattatatgagttgcgcctctagacactgtgaggccaagagtgtgttaaccctggacattaagaatttcttcgacaatatccatgcgaccctcgtgaggagcgtattcctagatttttttaagtactgccctgaagtgagcgatgcactttccgacatctgttgcctggactcccaccttgtgcaaggggctcttacttcgagctatatagcttgcctctgtatgcatgacatagaaggcagcgtggttgagaagctgaatcgaaaaggcctcgtttacacaaggctagtcgatgatatcaacatctcatcccgtatctcccaatacgacttttattacgccatttccatggttgacaacatgctcttagagaagggcttgcagctcaaccttgacaaaaaacgggtccagtacatatcaaccgagcccttgaccgtccacgggctgaggatcgcttttaaggaaccaaggcttcccgcagatgaggttcgacggatccgtgccgccgtgaggaatatagaaacaattgcctcagagcgggattaccgcacgacacacgcctatagaaaggatttcaataggtgtatggggcgggtgaacaagttatctcgcgtgggacacaaccagcataaactcctagtgggaagactgaagcgagtgttcccactgccttctaaaaaggacatcgatcgcgtcaccactattgtaactaaactcgaagctgatagtggccagaagaaaggaacatactggtactggcggcgtttctatctcgcacatgagagattgaccatcctgaacaggtcctttcctcacgccgcacaggatttgcgccagcgactgaaactgttgaagccgctctatgaatga

SEQ ID NO: 10703 - RNA, 1203 nt, synthetic construct
  source 1..1203: mol_type = other RNA
atgatccctgtctcttctacaacccgcctgtaccccgttaagactgctacccacgccatcactacaatccaaggcctgtgcgaggctttggacatagtggtggaggagcttgacgatgtgctgctgatcccgccaaaagataagtattctagccaggaaaggcggaagaaagatggttccgtgcgggtcgtccacaatcctcaccatcgactaagggtgattcaacggcgtattaacaagaggctgttcagcaaccagaatttcgtatcctggcccgatcacatattcggctccattccaaatcagaaattcgagggcagtaaacaccccaaagactacgtggcatgcgccaaagtccattgtggagctaaaagcatcttgaccttggatatagagaacttctttgggaacatccatgtctcccaagtgatcaaggtattcactcagcttctcaagttttcacctgaggtcgccgaagtagtttctaagatttgttgccacgaggactacctcatccagggagccttaacatcatcatacattgcaggactgatcctgtttgatgtggagggcatggtcgtcgaaaggctcctgcgaaagaatttacgctatacgcggctggtggatgacatcaacgtttccagcgtggtgagtgactataacttttcgtacgcaaagacaatcattgaagacatgcttatagggaaggacctacccgtcaaccattctaagactaagattcagtacagcagcactgttccccttaccgtgcacggactcagagtggggtttaaggaaccaagactgccctccgacgaagttagaaaaatcagggccgctgttcattcaatagagctcatggccaaggagccaaactacaaaacaacccacagctatcgccgtgattttaaccgttgcatgggccgagtgaacaagttgtgtcgggtggggcataatcaatatgacaaactgcttctgcggctccagaaaaattacccactccctagtaaaaaggatatcgagcgcgctatcaaaattgttacgaagctggaagtggattatcctaccaagcagggtaatttctggttcgccaaaagattttatctggcacacgaacgcttaaatattctacagaggagttttccgaatgtggcgtacgacttgagattcagactgaaggcgattaaaaccgtatacgagtga

SEQ ID NO: 10704 - RNA, 1194 nt, synthetic construct
  source 1..1194: mol_type = other RNA
atggtgagggtcccgcaattatttccgaagaaaaccgccgtaggctcgatcgcaactattgaccagctgtgtaacgctctgtccatcaccgaagacgagctgagagaggtcattctgcttcccgatatccttcggtattcctccaggccaatccctaagaaggatggctctctccgattcgtgcataatcctcacttccgattgcgccgcattcagcggagaatcaataatcgccttctgtccaatcagagctttctgtcttggccagatcatatctttggctctatccctaaccagcaattcgacgatggcatccatgccaaggattacatcgcctgtgcgcgggtgcattgtgaaagtaagtcaatactgacgatcgacatagctaactttttcgacaatgtgcacatcagccatgtcctgcaaatatttcgggatttgctgaagtgctcagagattgtttctgaggtgttagcagacatatgctgccacaatgacgctctaattcaaggagcactgacctccagttacattgccgggctagcactctacgacgttgagggtcgcgtggtcgagagactggcgcgtaaagggctgcgatacacacgcctggtcgacgacatcaatgtgtcgagcaaaaacagcgagtataactttgattacgctaaaaagatcgtggaggacatgttgttcagcaaagacctccccgttaataccagcaagacaaaagtacagttctcctcaacactgcccctcgctgtccacgggttgagagtgggctttaaggaaccacggcttcccggggaagaagtgtctaggatccgggccgcggtccattccattgagatgatggcaagggaaccaaactatagaacatctcacgcttatcgcagagatttcaaccggtgcatgggtcgtgttaacaagctaagtagagtaggtcacaaacagcacggaggacttgttcaccgcctccaccagattatgcctctcccctcacagaaggatgtgcagcgtgccattaaaattgtggagaaacttgaagccgatttcagcttaaagcggcatacttattggtacgccaaaaggttctacttggcccacgagaggctgaacatcctcaagaggagttttcctggaataactgatatgctgaggctgcgactcaagccaattaaagccagatatgaatga

SEQ ID NO: 10705 - RNA, 1197 nt, synthetic construct
  source 1..1197: mol_type = other RNA
atgcccaccgtccctcagctgaatcccgtcaaagtatcaacagagagcatcataacggttgagaacctctgcagcgcactgtctatcactctggaagagttgaacgaagtgcgttccataccaaatggggagcgctacattgcctcccagatcccaaagaaggacggaactatgcgcgtcgttcacaatcctcattttcggctgagacggatccaaaggcgaattaacaaacgaatactgtcacggcagagcgtggtttcatggccagatcatatctttggatctatccccaatcagctggatagtgaacggattgaacacgagaaggactatgtggcctgtgcaagagtccactgcgaggcgaagagcattttatcgattgacatagctaacttcttcgacaacattcacatcaccaagatttccaaaatcttttgtgagttcttcaagtattccacagaggtgagtaatattcttgcagaaatctgctgtcacaacgacaatctgattcagggcgcattgactagttcatacttggcgacccttagcttgtatgaggtcgagggcaaagtggtggaaaggctgttaaagaaaaacctgaggtacacacggctggtcgacgatatcaccgttagttcaagactggccggctacaacttcgattacgctaaagccctcatcgaggaaatgcttattgatatggacttgcctatgaactcctctaagacaaggatccagtacaacagcacagtgccgctgaccgtgcacggcctacgagtagcctttaaagaacccagactgcccggggatgaggttcgaaagatacgtgctgccgtccattctattgagcttatggcttccgagcccaattacagaactacgcatccttatcgcagggactttaataggtgcatgggtcgggtgaataaactaagccgcgtggggcaccagcaacattctgtgttagtaaacaggcttcggaaggtgatgcctctccctagtccaaaggatatcgagagaaccattaagatcatcacacgcctggaacgggactatccaactaagcgtggaaccttctggttttcgaagagatattacctcgcccacgagaggctcaatatcctgaaaagatctttcccgggtataagcaaagaactacgaaaacgcctcaaaccactccgctccaagtatgaatga

SEQ ID NO: 10706 - RNA, 1191 nt, synthetic construct
  source 1..1191: mol_type = other RNA
atgattatactgaggccctacaagaaaattccctcgagcatcgctaacatagacaacctgtgtagcgcgttagacattagcacaactgagctggacgaggccatcagtctggctgaaacagacaggtaccaggtccgagagatcgccaaaaaagacggtagccctcggcgcatctataatcctcactatttgatccgcaagattcagagacgcataaaccaccgcatattcacggatcaaaattttctcgggtggccagattatatcttcggaaccattcccaaccagaaaaagtcggacggaagaattgtgcagcgagactacatttcttgtgctaagatccattgtaaatccaaatccatagcgtctatcgacatccaggatttcttcgataatattcacatcgatcacgtggagaacatcttctccaaattctttaagtacccagacgaagtgtcagaggtcttggctaatatctgctgcctgaattcccatgtgatccagggggccctcacatcttcctatattgcttctctttgcctgttcgatgttgagggcgatgccgtggaacgcctcattcggaagaatctgcgatatactagactggtagatgatatcacaataagctccactgtctctaactataactttgactacgcactaagtatcatacgtaagatgttggagagtaaggaccttcccatcaacgagaataaaacgaagatccaatacgcctcaaccgtgccgttaaccgtgcacggtcttcgggtcgccttttctgagccaagatttccatcagacgaggttcgtaggctcagagccgcagtgaagaacattgaaactctgtcccaggaaaaaaattaccggacatcacacgcatatagacatgattttaacaggtgcatgggccgcgtgaataaactcagccggatcggccacaaacagcacgcagcactagttaagaggttacaaaaggtaatgcctctgccgagtcagaaggatattgaaagggccttcatgattattgaaaggctcgagaaagattattctacccataatagctcctactggtacagtcggcgctactatttggctcatgagcgactgaacgtcctccaacggacctacaccagaatcgcctcagacctgaggagcaagcttagatatctgcgtcctagctacgaaaagtga

SEQ ID NO: 10707 - RNA, 1197 nt, synthetic construct
  source 1..1197: mol_type = other RNA
atggaaaagcagcctcagctgaatccagtgaaaactgccgtggacagcatcgcctctgttgcaaatttgtgccacacgctgaacgtgacacaggaggaattggacgccgccctcaccttagaccccgaagagaagtacgaacgcagagctattcccaaaaaggacggaagcgaccgtcttgttttctcccccgatcgccgtctccggaaaattcagcgaagaataaataaacggatcttcgcggcccaaagtgttgtcagttggccggatcatctttttggctcaatcccaaatcaaaacggccccgaaaacattaaaatagagaaggactatgtggcttgcgccagacggcactgtcagagtaaatccatcctcaagattgacatcaagaactttttcgacaacatctcggaattccacgtgaaggatatcttcgttaacttcttcaagtacagcgacgacgttgctaacgtcctcgccaacctgtgttgccttaacggacatgtcattcagggtgcattgacctcatcttatatcgccgggctctgtttatatgatgtagagggagatgtggtacgaaggttggctaggaaaggactggtgtacactcgtctagtagacgatattaccgtgtccagcaagtccgcagattttgatttcggtttcgccaaaagcatcattgagcagatgctcgtggggaaggacctgcctataaatgagtctaagaccgcagtacactacgtgtccacaacccctcttacagtgcatggtctgcgggtcggctttaaagagcctcgactgccctctgatgaggtgcgcagaatccggagcgctgttaaaaacatagaaacgcttgccaaggaggactcttatcgcattacccatggctacaggcacgattttaatagagctatggggagggtgaataagctgggccgcgtcaagcacaaacagcacgagccattggtgagacgcatgaggaaggtcctgccgctgccaagcaaaaaggatatcgaaagggcaactcgcattatcgacaggctgcaggcagatcatgcggggaagcatgacacttactggtactggaagcggttttatctggctcacgagcggctgaatgtcctacaaaggtcatttcctgaagtgtcaaagaaactgcgaacaaaactcagattactgagaagttcctatgagtga

SEQ ID NO: 10708 - RNA, 1197 nt, synthetic construct
  source 1..1197: mol_type = other RNA
atggcccacattccactactcaatcccctgaagacagcactcggctctatttcctcaattgactcactctgcgaggcgttgaatatcactcgggaagatcttgaggaggcacttcagctcgaccctagtgagaagtacgttcgcttgaccactcctaaaaaagacggatcggacagagtaattttcaagccagattatagactgcgaaaaatacaacgaagaataaacaagcggattttttctaaccagaacgtcgtcacgtggcctagccacctgtttgggagtattccaaatcagttcgatgcggataagacaaaaatcgaaaaggattacgttgcttgtgctcgtagtcactgcgaatctaagtctatcctgaagatagacatcaagaactttttcgacaacatacatcagcactatgtggaggacatctttttgaatttcttcaagtacccggaagacgtatctagtaccctagccgagatttgctgtcacgagagccatgtcgtccagggagccctcacctcaagctacatcgcatccctgtgtctgtatgacgtggaaggagagactgtgcggagactcacccggaagggcctgacctacacccggttagtggatgatattaccgtgtcctcaaagatcgctgattacaactttgactacactaaaaacgtcatcgaaaccatgcttgtagggaaggaactgcctattaactcctcaaaaaccatcactcagtacatcagcactacagcactcaccgtgcacggtttgcgcgttgggtttaaagagccccggctaccgtccgacgaagtgaggagaatacgctccgccgtcaagaatgtggagacactggccaaagaggacagctacaggacatcccatggttatcgccgagatttcaatagggtcatgggcagggtgaataaattaagccgggtgaagcataaacaacatgccagcctcgtgaaacgaatgaggattgttctgccccttcccagtaaaaaggatatcgataggacgacaaggatcgtggaacgtctgttaactgattatgctagcagacatgacacgtattggtattggagacgctttttcttggcccacgaaaggctgaatgttctgcagcgctcgttcccagaggtgtctaagcacctgcgtaagaaacttaagctgatcaaacccacatacgagtga

SEQ ID NO: 10709 - RNA, 1191 nt, synthetic construct
  source 1..1191: mol_type = other RNA
atggccgccattctcaacccaatcaaagtggcaacaggttcaatttctagcatcgacaacctgtgcgcagctcttgacatcacacgggcagaacttgatgctgcccttgaactggatattctgacgaggtatcaacgtgatgaaaccccaaagaaagatggatcaatgagagtcgtgtacaagcccgactacagaatacgaaggatccagcgcagaattaacagacgtatcttcagtagggctgacgtaattctgtggcctgaccacctcttcggctcgatcccaaaccaagagtcagacgatggcgatgagattcagaaggactacgtggcttgtgcaaggcttcattgcgaggccaagtccattgtcagtatagacatccagaacttctttgacaacattcatagcgatctggtcctggatatctttgaaaagttcctgcagtacccgagcgatgtcgcccggacgttgaccgatatttgctgtaggggcgaccatatagtgcaaggagcgttaacttcctcctatattgccagcctctgtttgtatgacatcgaaggaaaaaccgtggagagattgagcaagaagggcctcacatatactcgcctggtggatgacattactgttagctctaagatcgccaattacaaatttgactacgccatgtccgttatagaggacatgctgacctctaaggatctgcccattaacacctctaagactaaaatccagtacgtgagcacaacaggtctattggtgcacgggctgcgggtaagtttccagcagccccgactcccttccgatgaggttcggcgcatccgagctgctgtccagaatatcgagacactcgccgctgaaaaggggtatagacagacccacgcatacaggcaggactttaatcgatgcatgggccgtgtgaacaaattatcacgcgtggagcacaatcaacatgctaattttctccggcgcttacagaagatcctcccacttccttctaaaaaagacatcaaccgcgccaccaagataatcgaaaatttggagcgggatttcgaaaagaaaagtgggacttactggtacgcaaaacgcttttatctggcgcacgagaggctgaatgttctgaaccggtccttccccgccataaccaaaaggctgagagcgagactaaagcctctaaaacagaattatgagtga

SEQ ID NO: 10710 - RNA, 1191 nt, synthetic construct
  source 1..1191: mol_type = other RNA
atggccctgctcaatccaagaaaggtgtcaaccggatccataagttctattgaaaatctctgcagcgccctgtccgtgagcttagaggagatctatgcagctctgtcactgcctgacgaggagaaatatgccgtctcccaagtgttcaagtcagatgggagtgtcagactggtccacaacccccacttcttgttgagaaagatccagcggcggattaataagagaattttcagcaggctttcaatcatcgaatggccagatcacctttttggtagcgttccaaaccagcgagaacaggacaccaaacgcctaattaataaggactacgtgagttgcgcagcaaagcactgtggcgccaaatctctgctgaaagtggatgtgaaagacttctttgataacattcacaaggacctggttctggatatcttcagtaactttatgaagtttgaccgtgaggtatccgagttgctcgctgagatatgttgtttccgctcccatgtaatccagggggcccttacatcttcataccttgcctccctctgcttgcatgatattgaaggcgcagtggtccacaggctgagccggaaaggactcgtgtataccagactggtcgatgacatcactgtttctagtaagatctcgaactacgatttttcttttgctctcgacatcattagggctatgctaacctccaaggacctgccgctgaacatagttaaaactaggagcatttacgtgtcttcggaaccactcacagtccatggattacgcgtcgcgttcccccaaccgaggttacccagcggcgaaatcgcccggattagagctgccgtgcgcaatattgagaaccttgcgagtgagcgtggctatcggactacccatgcctatcggcatgacttcaataggtgcatgggccgcgtaaataagttggttagagtgggtcacgaccggtacgatagcttgctcgctcgccttaagcagatattccctctgccttctaagaaagacatagaaagggcaagagcgatgctggatcggctagcccgcgattgtgctacaaaacgatccacgtactggtatgccaaacgatattacaagctgcaggagcgactcatcatcctgaagcgtagctttcctgcagtgacaaaagaaatcaggaagtcactgaaggggttaaaacccgactacgagtga

SEQ ID NO: 10711 - RNA, 1191 nt, synthetic construct
  source 1..1191: mol_type = other RNA
atggtgctgctcaatcccaaaaaaattagcgcaggttccataagtagcatagagaacctatgctccgcactagatatcacgttggaagaaatttatggcgccctgagcctcagcgaggaagataagtacgccgttacagagatttccaaaagcgacgggggcatccggctcgtacataacccaaattatttgctgcgtaagattcaaaggcgggtaaacaagaggatattctctaggccgtctgtcattcaatggcccgaccatctttacgggtccgtgcctaaccagagaaataggcagaacagtgagatgttaaacaaggattacgtctcatgtgccgccaagcactgcggcgcaaaatccctgctgaagatcgatgttaaagatttctttgacaacatccaccagaatctcgtgctcgacatctttaacaactttatgaagttcgatggtgaggtaagtggactgcttgccgagatctgctgctttaaaagccacgtcattcagggcgctctcacttcttcataccttgccagcttatgtctctatgacgtggaggggagtgtcgtggagcggctgatgaggaagggcctgatctataccagactggtggacgacattaccgtttctagcaaggtttccaattatgatttcgggtatgcgcttgatatcatacgcactatgctgacctctaaagacttgcccgtgaatctagctaagacacgcgcgatatatgtgtcgtccgaaccactcaccgtccacgggctgagagtgggattttcacagccccgtcttccatcaggagaagtggccaggattcgctcagctgttcgaaatatcgaaagtctggcctccgaaagaggttaccgaaccacacatgcttaccgtcatgatttcaatcgctgtatgggccgggtcaacaagctggtaagggtgggccacgatcgctacgaatctttgctgaaaaggctgcggaaggtgttccctcttccttcgaagaaggacatcgagcgagcgcacgcaatgctcgcccgactgaatcgggactatagcgacaaacggggaacttactggtatgctaagagatactacaaattgcaggagagattgatcgtgctgaaacgctcttttcctgctgtcacaaaagagattagaaaggcaatcaagggattacagccagactacgagtga

SEQ ID NO: 10712 - RNA, 1194 nt, synthetic construct
  source 1..1194: mol_type = other RNA
atggccacacaattggcccctaagaaggtaagtaaacgttcaattgcatcgatcgagaatctttgcagcgcactcgatatctcactgtccgagatttactccgcgctgagcctcagcgatgaggaaaaatataaggtcagtacgagagccaaatccgatgggaccgataggatcgtccacaacccgcacttcctactgcggaaaatacagcggcgcataaacaagcgcattttctccaagccttccgtgatcaagtggcctgatcacttgtttggctcagtgcccaaccagctcgatcagagtatgacccatatcatcaacaaggactatgtctcatgtgctgcaaagcattgcggcgctaaatctatactgaaggtggatatcaaggacttttttgacaacatccatgaggatctcgtgctggacattttccgcaacttcctcaaatttgatcaggaggtcagtgagacgttgactaatatttgctgttttcatagcagacctgtgcaaggcgcactgacttcttcttacctggcatctctgtgtctatacgacgtggagggctccgtggtggaaaaattgtcccgcaaaggccttacttatacacggctggttgacgacatcacagtgagcagcaaatctaacaactacgactttagttacgcccttgatattatcaaaggtatgttaacagccaaagaactgccacttaatgttgcgaagactaagtccatatacattagctcagaaccgctgagcgttcacgggcttagagtcagtttccctcagcccaggcttccctctggagaggtttcacgtatcagggctgccgtaaaaaatattgaaagcttagcctctgagaggggttatcgcaccacccacgcttatcggcacgacttcaataggtgcatgggacgggtgaataagctcgtaagagtggggcataatcgccaccagcccttgctcgacaggctcagaaaggtcttcccactgcccagcaagaaagacatagaccgtgccagagccatgctgaagagactgatgcgggacaaggattccaaaagggacacctactggtacgcgaaacgatattataagctacaggaacgattaatcgtgctggagcgatcgttcccagcctcagctaaggaaattcgagcttctctgaagggactgaagccatcctacgattga

SEQ ID NO: 10713 - RNA, 1188 nt, synthetic construct
  source 1..1188: mol_type = other RNA
atggccgctgtgaaccctaaaaaggtgacttccgaatcaattgctaatatagataggctatgcgctgccctggatataactgccgaggagctctgtcaggtccagaatcttcatgaggatgctaagtatcaggccagcaccgtggaaaaatcggatggaagtttccggaaaatttacaacccagactttcgattgcgaaaaatccagaggaggatcaacaagagaattttttccaactcgaaggttatagcctggcccgaccatctgtacggctcagtcccaaatcagatcaatgacgacttcgacctgatcaacaaggattacgtttcttgcgctgcaaaacattgtggggctaaaagcatcctgaagctggacattaaggacttttttgacaatatccacaagatcattgtgcacgacatcttcctgaatttcctgaagtatccacaagacgtcagctctgccctggcttcaatctgttgcctcaacgatcacgtagtgcagggcgcattgactagcagttacctggcttctttaagtctgtacgatgtggaggggtatgtggtggagaaactgcaccgcaagaacctagtgtataccagactggtcgatgatataacagtgagctctaaaacctcaaactatgacttctcttacgcgattaacctcattgaaggaatgctgacagaaaaggaactccctttgaacaagaagaaaacaaaggtccaatacaccagtagcgagcctctcactgtccacggccttagagtggccttcaaacagcccagactcccgtccgatgaggttgcacgcatcaggacagcagtgaagaacattgagacattggcaaaagaggtgggttataggaccaccctctcttaccggcaagactttaatcggtgtatgggacgcgtaaataagttatcccgcgtaaatcatgagaagcacttgggtcttgtaaagcggctggttaaggtctatcctcttccctcaaagaaagatatatcccgtgcggaggcaatcgttgcccgtcttgaaaaagattacgcctccaaacactccacgtactggtatagcaaacgcttccacacggcgcatgaaagactaaatatcttaaagcggagttttccctgcgccgaaaaggccctgagaaaaaggctcaaaagcctgcgaccaatttacgactga

SEQ ID NO: 10714 - RNA, 1200 nt, synthetic construct
  source 1..1200: mol_type = other RNA
atgacccggaatgtgaccgcccgtagctttaagatctctacccgatccatctcgaatttggagaatctgtcttctacgctgtccatccccttgaaaactctccagaaaacactggtgttacccaagccagacagatatcggagagacgaactgcccaagagtgacggaggcatcaggatcatatacaacccttcccaaatgattagacttgtgcagcggaggattaattcacggatattatcaaacaaccagattctcgcctggccgccttttctgtttggctccatcccaaaatccaaagacgcgcttggtaatgagatcacgagggactatattacttgcgcagcccagcattgtggggccaagtccttactcaagctggatgtgaaggactttttcgacaatgtacacgcagatctggtctatggggtctttagccaacttctgaagtttccccacctggtttcagcatctctcacgaatatctgcaccttcgaatcccatttaatacagggtgccctcaccagcagttttttggcaaacctgtgtctccacgatgtggaggctttcgttgtcgatagactggctaagaaaaatctcacctatacacggtttgtggatgatattactatctctagcaaaacctcaaagtatgatttcagctacgcgctgtcaattgtggaagagatgctgacatctaaagacctacctctcaatcgccaaaagacaaaggtgtacttcagcagctctaccccgcttactgtacacggcttgaggatatgtttcgccgagcctcgacttcccagtgacgaggttagaaggattcgcgctagtgtcaagaacctggaaacaatcgctaacgagcgctcctaccgaatgactcacgcctacagacacgactataacaggtgcatgggaaaggttaacaagctcgcccgcctaaagcataaccagcatattccactgctagatcgactgcgcaaaatccccccattgcctagtaaaaaagacattagccgtgcaatacagattgtgagcaggcttgaacgcgatttcttcctgaaaaaaaacacttactggtactaccggcggttctacatcgcttatgagaggcttaacgtcctgaagatctcgtatcctcgtatgacaaaactgttgaagattagactgaagaaactcaaaccaatctacgaaaagtga

SEQ ID NO: 10715 - RNA, 1197 nt, synthetic construct
  source 1..1197: mol_type = other RNA
atgaccagaaccgtagctgcacgtagctttaaagtgagtaacagttccattgctgacctgcagaatttagcaaccgcgctttctgtcccgctgctgacactgcagaagacactgaccctgccgaaatcggaaaggtacagacgggatgagcttccaaaatctgatggagggttgcggataatatacaatccctcccacgaaatcagacttgtgcagaggagagttaatactagaatcttctccaatagtcacatcctggcctggcctcctttcctcttcggttctattcctaagagcagggacgccctcggaaacgaggtgactagggactacatcacgtgtgcggctcagcattgcggcgcgaagtctatcctgaagctggacgtgaaagacttttttgacaacgtgcactcagatcttgtatatggagtgttcaataagctgctcaaattccctcacctcgtcgcagcctctctgactaatatctgcacattggattcccacctgattcaaggtgcactgacctcaagcttcctggctaacctttgcctgcatgatgtagaggcctttgtggtcgaccgacttgccaaaaagaacctggtttacacacggtttgttgacgacattacgatctcctccaaagtggccaagtatgatttcagttacgctcaggctattatcgaggagatgttaatcagcaaggatttacccctaaactcccagaagacaaaggtgtctcacgccagcagtactccactgacagtccacgggttgagagttagcttctcaaagccccgcctaccctcagacgaagttggccgtattagggctgccgtgcgcaacattgaaaaaatcgccgacgaacggagctatcgaatgactcatgcctacagacacgattttaatcgatgtatgggccgcgtcaacaagttggcacgtgtcgaacataatcaacatcgcccactgctcaaaaggttgttgaagctcccccctctcccatcgaaaaaagatatttcccgagcaattcagatagtgagccggctcgagcgcgatttctatctcaagaaaaacacctactggtattcacggcgcttttacatagcctacgagcggctcaacgtcttgaaaatctcttatccaaggatgaccaagctgctaaagctgaggcttaagaaattaaagcccgtgtatgagtga

SEQ ID NO: 10716 - RNA, 1197 nt, synthetic construct
  source 1..1197: mol_type = other RNA
atggccgggatcgcggaagtacagcgctataaagctagcgtgcattcaatcagctcgattgaaaaccttgcctccgccctgggagttagcctgtcctttctgcaggaagtgttgcagattccagatgaacataggtataagaaatctgagttgccaaaaagtgacggtggtatccggactgtgtattcacccgactaccggattcggctgatccagagacgtataaataagagaatcttctcaaactcccgcgtgattacctggccggactttctattcggatccatccccaaccacaaagataaatgcggccaggaggtcactaaagatcacatcgcatgtgctgctagtcattgcggcgcaaagagcttactcaagctggatgtgaagaactttttcgataacgtgcacagcgacatagtttacggcgtgtttcgcgatcttcttaaatatcctgatgaggtcagtcgcgccttaacgaatatatgcacattcaagtctcaccttgttcaaggggctctgacatcgtcctatttggctagcttatgcctccatgatgtggaggcgtatgtcgtggacaggctttcaagaaaagggattgtgtacactaggtttgtagacgacattaccctatcctcaaagatctcttccttcgactttggattcgcccggggggtcgtggagcaaatgctgacagccaaggacctgccgctcaactccggtaagtctaggacgcagtacctctctagtgagcctttgatggtccacggcctgcgaatctgtttcaacgagccacggctacccgccgacgaggttaggagaatcagagcatctgtgaagaatattgaggttatcgctaatgaacgtggatatcgcctgacccacgcctaccgccacgacttcaatagatgtatgggcaaagtaaacaagctggcacggctgggccatacccaacataccgcgctggtggccaggctggttaaggtctaccctctccccagtaagcgagatatcagccgagccattcagataattatgaggctcgagagagatgtcagcgcaaaagcttctacttactggtacgccaagcgattttacatggcacacgaaaggctgaatatccttaaacgcagctatcctagaattacattgctcctccgaaatcggctgcggaagctgcgtccaaattacgaatga

SEQ ID NO: 10717 - RNA, 1200 nt, synthetic construct
  source 1..1200: mol_type = other RNA
atggccatggacgcctcagccgctggtggattcaaagtgagcaaaaactctattggtagcgttgacaatttgatccagattctggctgtttcacttaaggattttgagagcgtactgatgatgccgtctgaacttaggtatataaagaccgaaatcccaaaatccgacgggggggtaagaaggattcacaaccctcacttcctcatccgactccttcagaggcggatcaacacacgcatcctctctaatcccagagtcatcggctggccatctcacctgttcgggtctatccctaaccagagagacgaaaagaataatatagacagccgtgactacattgcctgcgcgaaagcacattgcggcgccaagtctctgctcaagctggatgtcaaggattttttcgataacgtgagcgaggatctggtatatggagtctttcacgatttgctcaagtactcagaagatgtttcttctgtgttaactgacatttgtacctacaattcacatttagtgcaaggggccttgaccagcagttatctagcatccctttgtctgcacgacgtggaggcccatgtggtggacagattgaggaagaaaaaccttgtgtacacgcggttcgtggatgacataaccatctcctcgcgaaccagtaattatgatttcgccttcgcacgaagcgtcgttgagcagatgctgatctcaaaggacctgccactcaattccggcaagtcccgggttttttacacgagcagtgagccgctgacagtccatggactcagagttagtttttccgagcccagattgccttccgatgaggtgcggcgcattcgggctgctgtacgcaacgtggagacaatcagtagtgaaagggcatatagactgacccatgcctatcgccacgactttaatagatgcatgggccgtgtcaacaaactggccagggtgggccacaaccagcacaagcccctgaagaaccggttactggctgtctatcctttgccctccaaaagagacatttcccggagcatccaaatcgtgtcaaggctagagcgggatgtggcggaaaaacgagcaacttactggtactcgaggcgtttctacattgctcatgaacgcctcaatattctaaagcgcacttacccaaggatgacaaagatactgcgcgcgcgactgaaaaaactgactcccacctacttttga

SEQ ID NO: 10718 - RNA, 1197 nt, synthetic construct
  source 1..1197: mol_type = other RNA
atgatcaaagacaaggcgcatcggatcttcaaggcaagcacaagctccatctcctcactggagtccctagcaagtgcattggacctgcaagttgatgacttcgagcgggtttgggcgaaggaagaatcatctaggtacacgagaaaggaaatacctaaatctggtggtggcgtgagagtggtctttaacccttgtgttgaggtgagaaagatccagcgccgcgtgaacacacggattttctccaacccacacgtggtcaaatggccaggctatctctacggaagcatcccaaaatcgctgaactcagaagatgagttggccagcagagattatatttcctgcgctaaacagcattgcgaggcaaaatctctcctgaaaatggacatcaagaacttcttcgataacgtccatgatgacctggtctatggggttttcaaagatgttctaaaataccccgaagtagtctcaaatgtgcttactcgaatttgcacctatcgcagttctctcgtgcaaggcgccctcacctccagctacctcgctatgctcagtctctataaggaagagaacgacgtagtatctaagctaaagagaaaaggactcgtctacaccaggtttgtcgacgacatatctatctcttcaaaagtgagtggatacgacttttcctacgccagaagcctggtggagaagatgcttttgaatgccgggctgccccttaatagcaataagacaaaggtgctgtacgccacagccactcctctgacccttcacggcctgaggatatgttttaaggacccaaggctgccgccggaagaggtgagacgcattcgagctgccgtgaaggagattgaaattgtagctggggagagtaactatcggaacacttacgcatatagacgcaatttcaaccggtgtttagggagggtgaataaactttcacgagttaagcataagcagcacagtaatttagtgcgccggctgtccaaggttctgcctctgccctcgcagaaggaagtcaattatgtgcagcacgccctggtgaaattggaaggcttgtttcagagcaggggagatacgtactggtaccgtaagcacttttaccagttgggtgatcgtctcaatttagtcgctcggagctatccccgcctggctgaggagatccgacgtaggctgagggaggtgaaacccacctatgagtga

SEQ ID NO: 10719 - RNA, 1197 nt, synthetic construct
  source 1..1197: mol_type = other RNA
atgcggcggagctcagctcaccgagcttttaaggtggcatccggttccatcagcaatgtggaaaacctggcggccgcgctcggacttactaccctgcactttgaaaagctgtgggaaatcccggaggagttgagatacagctcgaaaacgatacctaaattatccggggaattgcgagaagtacacaatccttgcagagaattgcgcattatccagaggaggattaacactcgcatttttagtaatccagatgtggtcaagtggccatcttacttgtatggctccatcccaaaaggagacaatcccgaggacgagttcaattctcgggactacgtggcctgcgcaaagcttcattgtagggccaagtccatcctgaaactggacattaaagatttcttcagcaacgtgcacgacgatttagtgatgggggtgttctcagaagtgctcaagtatcctgatgtagtgtcacaggtcctcactcgcgtatgtacatacaagagttcgcttgtgcagggagccttaacaagctcctatctggctatgctgagtctgtatggggccgaggacgatctggtgcatcgattgagaaagaagaacctcatctatacccgctttgtggacgatatcaccatttcttccaaagtggccaattacgatttctcatacgcagcaagactggtagagcaaatgctcgttgaaaagggtcttcccctgaataccaaaaagaccataacacagtacgcttcacttgctccactaactgtgcacggactgcgggtctgctttgccgagcctagactccccgcggacgaagttcgtaggatcagggcagccgtccaaagcattgagattgtcgctaaggagaaaaattaccgccagacctacccttatcggaaggactttaaccgttgtatgggccgggttaacaagctggctcgggtcggccataaccagcactctaagttcatcagccgcctgcataaaatactgccgcttccatctgccagggaggttgagtatgttaaagcagccacactcaaactagagtctctatacgccacgaaacgtgagagcttctggtataagaagctctactacagagtcggcgatagactgaacctggtgggcagaagtttccccaacctggcaaaaagtttgcgagaaaggctcagggaggttaagcccgcttatgaatga

SEQ ID NO: 10720 - RNA, 1197 nt, synthetic construct
  source 1..1197: mol_type = other RNA
atgaaaaaagattttgcacaccgagcttttaaggcctccagtggaagcatcgccagcgtcgagaacctcgcaagtgcactgtccctagaagtgtcagattttgaacggctgtgggagattcctgaggagaagaggtacaaacttaaagaactgcctaagtcctcgggcggtttccgtacagtatacaacccatgcgtggctctccgagtcattcaaagacggataaacaccaggatctttagtaacccctatatattccagtggcccgtgcatctgtatgggtcaattccaaagtccccaaacgccgacgacgaatataggtccagagactacgttgcttgtgctaaacagcattgcggagcccggagcctgctgaagctggatatcaaggacttctttgacaacatacacgaggacgtggtcttgtcaattttccgcaaggtgctgaagtatcccgaggacgtctccctagtacttacaaggatatgtacgcataatagcaaagtggtgcaaggggcgctgactagttcttacatcgctatgttgtctttacatcaggaggaacagggcgtggtggatcgcctacgtagaaaaggcctggtttataccagattcgtcgatgatatcacagtcagctctaagtgcaccaactacgattttagctatgctcagtctatcatcgagcagatgctcaataatgcggacctccctgtcaacacaaaaaaaaccgaggttcagtacgccactgcagcgccgctgatggttcacggccttaggatctcattcaacgaaccccgattaccatcgaacgaagtcaagaaaattcgggccgctgtgcagggactggagatcgttgccaaggagaataattaccgccagacgtatccatatcgaaaggacttcaacagatgcatggggcgcgttaataaacttggtcgggtgaagcacaatcagcaccaaaagctcgtgcggaggttagtgaaaattctcccgttgccttccgcaaaggaggtggcctacgtaaaaactgcagtagaacgtctggaggccacatatgaaaccaagaagtcttctttctggtacaaaaaacactactaccgcgtgaatgatagacttaatctggtgaagaggagctacaagaccttggccgtcactctcagaaagcgcttgcaatgtattccccctctgtatgaatga

SEQ ID NO: 10721 - RNA, 1197 nt, synthetic construct
  source 1..1197: mol_type = other RNA
atgaagcggacattggcacaccgagagtttaaagccgccagtggatctatatcaagtatttccaacttggctaaggcgctgaatctgcaggtcagtgatttcgaacgactgtgggaaattccagaggaaagtaggtacaagagcttagaaaagccaaaaaccagcggaggtatgcgagtggtatacaatccttgtccccaactgcgtttaattcaacgtaggattaatacccgcattttttctaacccgtatgtcatacgctggccgtcctacctgtacggctctatcccatctagccctaataagtccgacatcaatcactcaagagattatgtggcgtgtgccagactgcattgcgaagccaagtcgatcctgaagctggacattcagaactttttcgataacatccatgagaaacttgtgatcgagatcttctcagatattttgcgctatcccgaggatgtgagtgagatcctcgctaggatctgcacttataaaagcagactggtccagggggccctgacttcatcttatctggctatgctgtccctttacaaagaggaaccagaaattgtggcaaagctaaagaggaaagatctcgtgtacacaaggttcgtggacgacatcactgtttcaagtaagatcgctaactacgactttagctacgcacagaagataattgaggacatgctcagcaacgccgaatttcccgtgaactccaagaaaacgcagacccagtacgcatctgcctcccctctcaccgtgcacgggcttagagtatgttacaaagagcccagactcccctcgcgcgaaatcagcaatatccgggcagctatccgaagcctggagatagcctccaagcatggcaattatcggcaaacctatgcgtaccgtaaggatcacaaccggtgcctgggcagggccaacaaattagcccgggtgaagcaccctcagcattcaaaattcgttgctcggttgtcaagaatcctccctttgccatctcagaaagaggtcaattacgtaaagagcagcgttgagatacttgagcgggattatcttcataaaaaggactccttccgctataagcgccactactacagaacaaatgacaggctcaacgtggtccagcgatcctatccttctctggttagggacctaagaaaacggctacgccccattaaaccaacatatgaatga

SEQ ID NO: 10722 - RNA, 1164 nt, synthetic construct
  source 1..1164: mol_type = other RNA
atgacaacccgccacacctttaaggtcgccacaggcagcattgctaccctggataacctcagtctggcgctgggagtttctcattgcgagctggaaaacgctctctctatgcctcaagacgagaggtacactcgactcgaaagacacaaagctgatgggagcgttcgctcggtgtacaaaccccattatttaattcggctcctgcagcgccggatcaaccataggatattggctaatcctgatgtcattgcctggccttcctatctatttggcagcattccctcattcaagaatgaagacggtgaatgggtggctaaggactacgttgcctctgccagattacactgcggcgcaaagagtctcctgaaaatggacattaaggactttttcgacaacatccacagttccgtggtggaggacatattccttgggctcctgaattacccgggggaggtggcaaaagccctgacgaacatttgtacatacaacagccacctagcccagggcgcgttgacatcatcctatatcgccaatatgtgtcttcatgggctcgaggatgaggtttttaccaagctgtcccgcaagaacctcaggtattcacgcttcgtggatgatattactgtatcaagtgtggtgaataggtacgacttttcctatgtgaaatcgatcatcgaaggcatgttgttggaaaggggtctaccagtcaatagcagaaaaacaaaagtccagtactccaccaccgaggcactgactgtacatggtctgagggtatgcttccccgagcccaggctgccatctgacgaagtgcgtcggatcagagcagccgtcaagaatgtggagatgctggctcaagagaacggataccggatgactcatgcgtaccgccgcgactttaataaatgtatgggaagagtcaacaagttgagcagggtcagtcacaaacagcacggcaatcttgtgcgtcgactggttaaggtatatccacttccttcaaagaaggatatctctcgagctcggtctatggtggcccggctggaacgggattatctggagaagagagatacgtactggtattccagaagattctacatcgcccacgaacgattaaacatactgaaacgaagctataaggcaagcgcaatcgagcttcgtggagcctcctga

SEQ ID NO: 10723 - RNA, 1191 nt, synthetic construct
  source 1..1191: mol_type = other RNA
atgaagaaaaacaactatctcaaaatcagcaagtcctcaatctcttctgtggaaaacctctgcctcgccctggacctcactcttgatgactttctcaatctaaagatgatgagtggctgcgataggtatgtgctgaacgaaaaaccaaaacctggcggaggcattcgaaagacttacaaccccaataatctggtcagggtcttccagcggcgtattaataatcgcatcttcagcaacccacacatcataaaatggccagatcatatttatggcagcataccgaatgatatgaactccgatggggggattaggaggcgggactttgtcgcgtgtgcctctgttcactgtggtgcaaaatctatactgaaggttgacgtcaaagatttctttgacaatatctccaaggacatcgtgtacgatatctttaacggtttcctgaagtttaacagcgaggtgagcgaggcattaaccgatatttgtacatatgatcgttcgcatctggtacaaggggcccttacctctagttacttagcgaccctggccttgttcaacatcgagggacgcattgtgcagcggttggcccttaaaaaattgaagtatactcggttcgtagacgatatcacgatttcctccgttaactcacgctacgatttcgattttgctaaaagcatcgtgatcaatatgttgcacgagaaggacctgcccgtgaacctctccaagacaaaagtgtactattcaggttcagaacctctgacggtccacggacttcgggtgtcctttaatcaggtgagattgccaagtgatgaagtccgcaaaattagagcagccgtgaagaacatcgagattattgctaacgacaccagctacagaaaaacaggcagttatcggaaagactttaataaatgcatggggcgcgttaataagctgtctagagttgggcacaaacagcatgagagcctagtcgcccgtcttaacaaggtgtatcctctaccttcattcacagacatcaagaagaccaaggacctgatagaaaaaatacgaagtaagtacgacgacggcaagaactacttctactatcataagatgtactacgctgcaatggagaagttaaatctcgtaaagagatcgttccccaatactgctaagaatctgcgactgaggctgagaggactgaggcccgagtacgactga

SEQ ID NO: 10724 - RNA, 1224 nt, synthetic construct
  source 1..1224: mol_type = other RNA
atgtctctgccaattagacacacaaagaaaaagacagttagctcaatcaactccatttcctcactgtgttcgacattgagcatcacgcgcgccgaactggaaaccgccctgagcacccccgataaagagcgttacaccccctctgaggtggagaagtcagatggcacgatccgcaacatctacaatcctaagagtttaatccgtaaaatccaacggaggatcaatcgtcggatcttcaatatttatactcctaagggacgcgagaaaaagaaccccccgataatctgggcgagttacctgtttggaagtatacctaatcaattccttgatgaagacatagagcagaaagattatatagcttgtgccagggtccactgccagagtaagagcttgctgaaagtggacatcaagaactttttcgataacgtccaggctattcatgtggagagcatcttttccaaatttttcttcttctccgacgacgtttctcaggccctcaccaatatctgttgctacgaagggcacctcgtccagggcgcattgacatcatcttacctgtcgtgcctgtgcctccatgatgtggagtggaagattgtcgatagactgagccggaagaatctcagatatactagactagtggacgacattaccgtgagctctacggtcagtaattatgatttttcctacgccaaggatatcattatcaacatgctccacgaaaaagacctgcctgtgaacttcaagaaaactcagcaatactatacctccaccacaccacttacagttcatgggctgcgagtaagcttcagtgagccccgcttaccctctgacgaagcaaagcgaattagagcatcagtacggaacatagagtctcttgcagctgagcgaaattacagaactacacacgcgtacaggaaggatttcaatagatgtatgggccgcgtgaacaaattgaaacgcgtgaatcactcacagtatgagtccctcgtgaatcggctgttcaagctatttccgctgccaagcaagaaagacctcgatagggtatttatttccattgctaacttagaagacgactttcataagggtaaacacgacacttattggtactggaaacgatatcatagggttcacgagcggatcaacatacttcagaggactttcgtgagggaagccaccatctttcggaacaagaccaaaaacattaagccatcctacattcagtga

SEQ ID NO: 10725 - RNA, 1224 nt, synthetic construct
  source 1..1224: mol_type = other RNA
atgagcttccagattaggcacacaaaaaagaatactgtgagtgccataaattccatccagggcttgtgtaacgctttagacattagcttgcacgactttaacatcgcactgagtacccccgattctgagagatatacccctagtgagatcgaaaagtccgatgggagctttcgtaaaatctacaatccgaagtcgttcctgcggaagattcagagacgcattaatcggaggatttttaacctgtataccaaaaaggggagagagatcaagaacccaccaataacatgggctagctacctgtttggctctattccaaaccaatttctggatgagaacatcgagcagaaagattatattgcttgcgcccgcgtgcattgccagtcaaagagcctcctgaaggtcgacatcaagaatttctttgacaatgtgcaggatgttcacatcgaggacgtttttagaaacttcttcctatttgacgaagaagtatcacgtgccctaactaatatatgctgctttgaaggtcatctggtccagggggcactgacctccagttacttgtcttgcctgtgtctgtacgatatcgaaggaaaaatcgttgataggctcgctcgcaagaatttacggtataccaggctggtggatgatattacggtcagttccgtggtgtctaactatgacttcagctacgccaaagacataatcatcaacatgcttcacgagaaggatctgcccgtgaactctaagaaaacccagtgttactacacgagcacttcacccctcacagtccatggactgagagtaagcttctctgaacctcgactgccctccgacgaggccaaaaggatcagagccagcgtacgcaacatcgagtcactctcctcagaaacaaattaccgcacaacccacgcatatcggaaggactttaatcgctgtatgggcagagtcaacaagctgaaaagggttaaccactcccagtatgaatcattgttcaataggctcttcattcttcttcctctgccttcgaagaaagacatcgagagggtgagtgtgtctctcctacgactcgagaatgactacaagttgggtaaacacgatacatattggtactggaaaagataccatcgcattcatgaacgacttaacattttacaacgtactttcacccgggaggcgtccgtgttccggattcgactccggcttgtgaagactacttatatacaatga

SEQ ID NO: 10726 - RNA, 1224 nt, synthetic construct
  source 1..1224: mol_type = other RNA
atgagttaccacattcgacacacctctaaacgcaatattacagctattaactccatagaagccctctgcaaagccctgtcaatatccaaggaagaattagagaacgccctcgctactcccgaccattttcgctacaccccgagcaccgccattaaaagcgatggatcaccaagaaaagtttacaaccccaaaccgatgattaggatgatccaaaggaggatcaatcgccgcatttttaattcctacaataataaagggcgggaaaagaaaaatcccccaataatctgggcgtcctacatttttggctccattcctaaccagtactacgatttggatctggaaaacaaggactatattagctgtgccgcaatccactgcggggcaaaaagcctgctaaaggtcgatgtgaaaaatttcttcgacaatattcacgacatctacgtgaagaacgtgttcgaaaatttctttcacttcagcaacgaagtctctgaggctttaacaaatatctgctgttatcagggccatctggtacagggagcacttacgtcatcctatcttgcttgtctgtgtctctacgacgtggagggcgatatagtgcaacggctcgcgagaaagaacctgaagtatacgagattgatcgatgatataacaatcagctctgaaatctcgaattatgatttcagctatgcaaagagtatcgttatagacatgctccataagaaagacctccctatcaacaatgaaaagaccaaagccagttacattagttctgagcctctgatggttcacggactgagagtggcctttaaggagcctagattgcccagcgatgaagtccgccgcatcagggcttccgtgcggaacatcgagtgtctggcctcagagacaaattaccgaactactcatccatatagaaaagacttcaacaggtgcatcggtcgggtaaataagctgaagcgggtcaaccacacccagtacgacaatctcgtcgcaagactgctgcggatccttccactgccctcgaagaaggatatagagcgaatttcagagcagatcgacaggttggagaacgagtattctaacaatctgcacggtagttattggtattggaggcgtctaaacaaggtgcatgagcgtattaccatccttaaccggacatttaaatctgaggctaaaacttatagggaccgcttaaagaagattaaccattgctacatccagtga

SEQ ID NO: 10727 - RNA, 1182 nt, synthetic construct
  source 1..1182: mol_type = other RNA
atggcagtcctgaagagagtggcaaaaaaaagcatatcatcactgacgaacctttgtgatgctctcagtattaccatccacgagcttaacggagctcttgcgctgtcagatgaccagaaatatcttagatcaaccactcctaagcccgacggctcccttcggatagtgcacaatccacaccggttgttaagaaaagtgcagaggaggttgaatagccggattttttctaattccgccgtggtgacatggccagattatgtatacggatccattcctaatcagattgatgtaggcggggccattgtggaaaaagactacatcgcctgcgctcgcgtgcattgtggtgctaagagtatgctgaagatggacatcaaagacttctttaacaatgtccacgaggaggccgttcgagacatcttcctcagattcttcaagtacagcaaagaagtttctgacgccttaacttcgatctgcacatttgagggggggctggttcagggagcactgacaagctcttacattgccaatctctgtctctttgatgttgaggactccgccgtggagaggctcaggagaaagaagctgagatatacccgtctggtggacgacatcactgtaacgagcactatcgcaaactacgatttcagttttgccaaggacgttattacaaccactctggtcgataaggatctccccgtcaacgaacggaagacccgggttctttatatttcatccgagcctttgacagtccatggattacgtgtcaactacaaagaaccacgactgcctgccaaggaagtggcacgaatcaggtctgcggtaaggaacgtggagctactggcttctgaaggcagctacagaaccagtcattcctatcgtcacgatttcaatcggtgcatgggccgagtgaacaagttgaaacggataggtcatcgccaacacatggtgctgatcaaacgcctgctgaagatcctcccgctaccggccaagagggacatcgagcgcgcggaaaagctcttgatacgcatcaagaaggactggctgtccaatccagattcttatggctacgctaaacgcttttatattctccatgagcgcctgaacgtgctagctcggagtttccccgcagtcagcgccgtcatgagaaaagaaatgagggggctgcgacccgtgtacgattga

SEQ ID NO: 10728 - RNA, 1203 nt, synthetic construct
  source 1..1203: mol_type = other RNA
atggcacgcgactccatgagctttcgtgggaccagcggtcccatcgctagcgtggagaaattggcttctgccctacgactgcccgagagcctccttctggaagtttccgaacgccctatctggcgaaattacaaacccgctagcgccccgaataggagaggcggacgaccacggctagtctttagtccatcccgggatgttcggctgattcagaataggattgtgcggacattcttcaaaaacccaaaagttatcaactggcttccctttatatacggcggcattcacaaggatgcactgaaatctggcgacagtagagatcatgttgcgtgtgccagacggcactgcggtgccaagagtattcttaagctggatatcgaagacttctttggcaacgtatcattcgatttagtggaagatgtgttcgtcggtctgctcggttggagtaaggacgccgggtcattagctgccaaactttgcacgagagacggcgtgctgccgcaaggagggataactagttcgtatttggctctgctctgtctgcacgatatcgagcctaaattggtccgccagctttcctataagaaactgacctacactcgctatgtcgatgacatcacaattagctctggctcctttacccaggaattcagcgggccaatgagaatggtggagcaacagctggcgtctaagggcctaggaatcaattccgccaaagtggaatcactcactgtgggcctggaggctatgtcagtccatggactgaacgtagcctatagggaccctgtgctgccaaagtctgaggtcaagagaattaggagcgtttgcaggcagacaatacttgacgcccgggaggtgggacggagaagcatcaattacaggcgaagatacaatcgagccatggggttggtaaacaaactgtcccgcgtgaactcttctagtcataagaagttggtgcagtcgctcaggctcgtgtcacctctgccctcacaggcagactttgagtatgctaccaagatcgcatacgatatgagggacgactatgataagaagaaactgggatactggtactggaggcgtttcaaccgtctcatggcgcgcttgacactcattggcgtcgataatcccggatgggcagggaacctccgcaaatatatgaagtcccactttttacctgggttcaaggacgataaggacaagtga

SEQ ID NO: 10729 - RNA, 1194 nt, synthetic construct
  source 1..1194: mol_type = other RNA
atgggaaaagactcaatgtcattccggggaacatctgggccaattgcaagtgtggaaaaactggcagacagcctaaggctcccaatcagcctgctgaaagatgtcgctgcccgccctgaatggaaaaagtataagccggccaaagcacccgataaaagaggtggccgcccaagactggtgttttccccctctaaggatgtaagattgatccagcatcggctagtcagaactttctttaagaatccgaaggtggtgaattggctccctttcctctacggtggcattcataaagatgccctggctgcaggggacagtcgtgaccacgtcgcttgcgcgcgtagacactgcgaagcaaaatcgatccttaagcttgatatcgaggactttttcgggaacgtaagtttcgatcatgttgagggcatctttgtgcggttgctgggttggtctagggaagccggccatctcgccgctctgctgtgtaccagagacggagtactgccccagggggggattaccagcagctaccttgccctgttatgtttgtacgacatggaaccagcgttggttagacaactggcctacaagaaactggtttacacaaggtacgtggatgatattacaatctctagctcatcattcaaccaggactttaatggcattaagagattagtggagcagcagctcggcgctaaaggattcaccatcaatagttctaaggtcgaggatttaacggttggcctagaggccctgaaagtgcacggactgaatgtggcttatgctaaccctgttcttcccaagtctgaggtgaggcgcatccggagtgtctgcaaacaaactataatggacgctagggaggtgggacgccgcagcataaactatcgacgacgctacaacagggccatgggccttgtaaacaagctcgcccgagtgaagtcttcctcccacgcggcgttggtgtccaagctgcgtgcagtctccccacttcctagccacgccgatttctcctatgctactgagatatcctacaacatgcgggaggggtatgacaaaaagaagtattcgttttggtacaggaggcgctttaatcggctcatggcacgactctcactgattaagtccgacaatcccgtctgggccgccaatctccggaactacatgaccagccacttcctgcctgaatataaggaagagtga

SEQ ID NO: 10730 - RNA, 1182 nt, synthetic construct
  source 1..1182: mol_type = other RNA
atgaccctgaggggatctgccgggccgattagatctaattgcgccttggccagagctctcggttgcactgaaaaatttctatctgacgtgatcgcgagggacacctctagcaaatataggctggtggaggccccagctaagctggatgggaccagacgggaggtctatagtccgtctcgagacgtacgtctgatccagcgccgcatcgttaaccgattcttcaaaaatccacgggtcataaagtggccaccttttatatatgggggcattcacagagacgccttggcacccggagagagtcgtgatcacgtggcatgtgctcaaaaacattgcggagctcgatcaatggtgaaattggacattaggagcttttttgacaacgtcacacacgatatggtggtggaaaccatggtaatgcagcttggctggtccaggggacccgccattcttctcgccgatctctgtacgcgcgacggcagccttccacaagggggaatcacttcctcctatctggccctgttaagcatttatgatgtggaatcgaagatcttcaacatagttggttacaagaagttggtctacacacggtacgtcgacgacatcactatctcttccaggaattctggctatgatttctcacccatcgtgaagatggtggatcagttcctcctttcgaagggactgagtattaatgatgcgaagacaagtgtctccgttagcggtttagaacctctcgtcgtgcatggcctgaacgtagctaataaacaccccgtactgcctaaggcagaggtgaagaggataaaaagtgtttcacgccagaccattaacgacgcttccgaggaagggagacggacgcatggcttcagacgacgatactaccggtcaatgggcctgattaacaagctgtcacgcgttagaagctccagccacaagagctcattgagtaaactgaaaagcgtgtcccccctccctaattttgcggactacgacatcgcaacagtggtggcatacagactgcgtgatctgtacggcgccaaaaagggcggtcgctggtattggagaaaatttaacgttcttatggcccggctagatctcatcgctgtggagaatcccgggtgggcaaagactttacggaggtacatgcgccggcattaccggccagattataggcgccctgagtga

SEQ ID NO: 10731 - RNA, 1104 nt, synthetic construct
  source 1..1104: mol_type = other RNA
atgcgggatgttgcctctcgggcctcaacgacaaactatagatcagtcgacgcgcccatcaaaagcgacggcctcccaaggcgggtgtataaccctgccagggacgtgcgcctggttcagtctagaatcgccaatcgcttctttaaaaaccctgcagtcatcaagtggcccgcccacatttttgggggtatccacaagaaggccctgcctgctggagatagtcgagatcatgttgcctgcgctgcaaagcactgtggcgctcattcccttctgaaactcgacataaggaactttttcgacaacgttactcacgagatcatagtggagactatgacacgccaacttgcatggtctaggagccccgctgtcctgttggctgatttgtgcacccgcgaaggtgtgctgcctcagggtggcattacctcctcatacctcgcactaatctccatatacgacattgagagcaagctcgtgaggaatctggaatacaagggattggcttacactaggtacgtggatgatattacaatcagtagtaaggtggccagctttgactatgcaccaatcgtgcgcatggtagataatctgctcctgtccaaggggttatcaatcaacgaggccaaaaccagtgctagaataagtgggctggaaccattagtggtgcacggattgaacgtcgcaaatcgcagccccgtattacctaaagcagaggtggctagaattaagcgagtgggccggcaaaccatcctggacgcccaggaggaagggaggcgatctcatggatttcggagacgatattatcgttccatgggccttattaataaactgtcgcgcgtaggctctgcgtctcatgccagctcacttgagaagctcaaggccgtcagcccactgccaagcttcgacgactacaaaatttccaccaatgtcgcacataaacttagagccgattacgatattaagaaatccggggtctggtattggcggaaattcaacgttctaatggctcgtctcgacctgatcggagcggaaaatccgagatgggcgaagacactgagacggtatatgaggcagcactaccggcccgagttcaagcgtccgaaatga

SEQ ID NO: 10732 - RNA, 1110 nt, synthetic construct
  source 1..1110: mol_type = other RNA
atgaatctccttcttgacgtagccgagcgtagcgcagaagagaattataggcctgtgtctgcacattcaaagcttgatggcactgaaagacgtgtattctcaccctcccgggatgtgagactcatacaaaggcggctggtgaataggtttttccggaaacctcaggttgtgagctggcctccgttcctgttcggtgggatcccaaatgacgcattaccccaacgcgatgcccctagggattacgtcgcttgcgcggctcagcactccatcgccaggtctgctttgaagctcgacgtgaggtcgttttttgacaatgtccacagcgacgtggtggagcctatctttagtggcctgctgagatgggatgaggaaccggccgtgttggcaacacgagtgtgtacccgattagactcactgcctcagggcggaattacctccagttaccttgctctgctgtgcctgttcagagaggaagggaacgttgcaaggaccctgcgcaggaaagggctgacttacacccgttatgttgacgatattacgatctcaagcacatctgtgctgcaagaattcgatttcgcgcatgccctggtggagcggatgctcatgaatcacggcttgttcatcaactccagtaaggtcaacctgcagaaggccggatccagccccctcgaggtccacaatctcagagtgggctgcggtccaccacgattaccacagagagaggtgaagcgaatcaaacaggtttgtcggcagactgagctagacgccagcgaaggacgcagatcttactcttaccgccggcgctattttcgcgctgttggcttggtgaacaagctggcgcgagtaggaaacaaccagcataggcacttgatcacgagacttagcacaattcgccccctccccagtcagaaagattacgaactagccacaaatgtcgcccatgacctgagggaacggtacgtcctggggcacgaccggtattggtatagacggcgttttcatatactcatggagcgccttaacctgattggtgtagaggacccagcttgggccgccaacctaagaatttacatgaaagctcactatgctcccacctccgtcgatgcatga

SEQ ID NO: 10733 - RNA, 1203 nt, synthetic construct
  source 1..1203: mol_type = other RNA
atgaaaagcaagccttattcctcaatgcgaggtagtaacggcccaattcgtaatttagatcatctgtgcaccattttggacgttgagcgcagggtcctagacagagtcctggccatgcccggaagccaaaggtatgccctggctcgctctcgggccgctaaatccgacggcagtgcacgcgaagtatttaacccctgccgggaggtacggcggatacagctcaaaattgtgaagcggattctgaaggtgccaggcgctgtcaggtggcacgactttctgtacggatccatgcccaatcagatcgacgcccacggcaatgagttgaaaaaggattacgtgacatgcgctgcacagcactgtgacgcgagaagtgttctgaagatcgacataaaggatttcttcgggaacatccattctgacacaatcatgagaatctggactgagctatttgggtatccgggagatgttgcatttgtgctcactaacctctgtttaaaagatgataaccttcctcaaggcggaatcacgtcttcctacctcgcaatgctttgcttgttcgatctggaagccaagacagtggctacgcttaggcttaaggggctccgatatactaggtatgtggatgacattaccatcagctctcctctgtcaaactacgatttcgagttggcgctggcgctcgttagagcgatgctcatttcacgtgctctccctataaacgagtccaaggtgaagagggtcagtctgagcaccgaagccatcaccgtccacggtctgcgggtcaatttcgaaactccgcgcctacccgctgctgaagtcggaaggatccgggcatctgtgaaaacaattgaactgcttgccgccgatacatcttttagcagcacccccgggttccgcaaaagcttcaataagtgtatggggagagtgaataaattgaaaagagtgggccatagccagcactccaaactgttgaagagattacaggctgtgcgcccactcccatcacgcagagacatcaaaaaagcagtagcctcgattcgaactctgtcagccgagttccatagtaggggcaatacctttggttacaggaagcgatattacattctgatggagcggcttaacctgatcgccagatcgcacaaggagctggcagccatgctgcgtgcccatgtgaagcgaataaagccatcctacgttgactga

SEQ ID NO: 10734 - RNA, 1122 nt, synthetic construct
  source 1..1122: mol_type = other RNA
atggccattacacaggacgagttgttccaggccctgaggttgacggatgatgtcaggtttcagcctattccagagaaacggaagccagatggtacaatccgcgaaatatataatccccacccactcatcaggaagattcaacgcagacttgttacaagactgcttagtgggtctgcggcttttcagtggcctgaccacctgtatggcagcatccctaacgtttcaagccccgatggagaggtccagagtaaggattatgtggcctgcgcaaggcggcattgcggagctaagtccttgctcaagctcgacatcaagaatttctttgggaatgtgcatcatgacaccgtataccggattttccgcgaactcctcggctatggttccagggtcagtaaagtgctcgcctgtctgtgtactcacaaaggatctcttcctcaaggcggtcttacttcttcatacttggccatgctaagccttcatgacttagaaggctacgtggtggaacgcctgagattaaagtccttagtgtacacgagatacgtagacgacattaccattagctcaaaagtactcaactacgacttcggctatgctcttaagattgtggataacatgctggtggagagagggctgcccctgaacctaaagaaaaaccggatagagcgcatctccaccagcccgctgatagtgcacggtctgaggatcgccttcgacaagccccgattgccggcagatgaagtgggaagaatccgtgcctcagttaggtacactgaactgatctacctcgaggcaaattttcggtttacctcttcttacagaaaggcttttaaccgatgcctagggcgagtcaataaactgaaaagagtcggacactcgcagcatggggttctgttaaggcggctgctgagagtccgtccactcgcaagcaaaaaagatcttatccgtgcccacgtgaccgcaagtcgcttggctaatgagtatggccgctataaggagacatatggctaccaccgaaggttctatctgttgcaggaacggctgaacctcattcaacggacttaccccaagatagcgaaatccctgcgcctgaagctgaatatcatccgacctgagttcaactga

SEQ ID NO: 10735 - RNA, 1119 nt, synthetic construct
  source 1..1119: mol_type = other RNA
atggacgtccccattagtgacttcagagcagctctgttgctaagcgaggaagagaggtttcgcctcctccctgataagaagaaagccgacggcactgacagaatcgtgtacaatcctgatccactcatacgcaaaatccagcgaaggttccttactcgcatcctttctagaccttccgcggtcaagtggcccgaatttcttttcgggtcaattcccaaccacagttttaatgggatcgacgtgagcagggactatgtggcctgtgccgctcgacattgcggctctaagtccctgctgaaactcgacatcaagtcctttttcgaaaacgtacactcagacttggtgctcgagattttccgaggggtcttctcctatggagatctggtcagtcgggttctcacaagaatctgcacccacaagggcggattaccgcagggaggtattgtgtcaagctatctggcgatgctttgcttacatgacgttgaggcccgggtggtggagagactgagacagaagagattgacatatacccgctacgtggatgatataaccgtttctagtaagagctctaaccaggacttcgatttctcgaaaaggattattgaagagatgctgctcagcaagaatctgccactgaactacaaaaaggtgttggtgtcccgggtcagtacaaccgccctgacggttcatggtctgcgggtcgggtttaaggaaccaaggctgccggcagatgaggtcaagcggatccgagcatctgtaaaatatctcgagattctttacgttgatggggactacaaatataccagcagctaccgtaagaacttcaataaatgtatgggccgcgtgaataaactgaagcgcgtaggccattcacaacacggtcagctgaaatcaagaatcatccggttaatgcctaaagcttctcggtccgacttggccagggtgtttaaaatatccaaacgtctgcaaagcgattacctcgaaaagaaggatacgtttggattctacaagcgttttcacatccttgccgagaggctgaacctagtggctcgcactcaccccggcatcgcaaggctgattcgaagacggctaagggagataaagccaacatttgaatga

SEQ ID NO: 10736 - RNA, 1056 nt, synthetic construct
  source 1..1056: mol_type = other RNA
atgagacagcccaagctgaatggcagcgacaggatcgtaaacaaccctcattatttaattcggaagatacagagacggctcaataagcgtttctttgcaaatcccgattttattaggtggccacgacacatctttggctgtatcccaaattacgtggacgatgacggcgagttagtcactacagattacgtctcctgcgccagtaaacactgccaatcgaaatccatcctcaaaatggacatttctgatttcttcggaaacgtacatcaggaccacgtctataaggtgtttctcaaccttttgtcatttccagaagatgtgagcaagatcttgacagatctttgtacccttcgcggatcccttcctcaagggggcctgacaagctcttatttggcttcactttgtctgcatgataaggaagggagtgtggtgaggcgactggagaacaagggcctggtgtacacacggctggtcgacgatattaccgtgtcttcccacgtggcgaactataacttctcttatgccaagaaaatcatcacggatatgctaatagagaaagatctccccatcaatgaagacaaaactattgttcagcgtctgagcaccgagcccctgactgttcatggtctgagagtgggattcaaggaacctagactgccggccggtgaggtaaaacgcattcgggccagcgttcagagtatggagcagttggcaagagagcccaattacagagtcagccatgcatatagaagggactacaacaggtgcatggggcgggtcaataaactatccagagtcggacacaagcagcacagtattctggtgaggcgtctgaagtcaatcaggccactgccttcacgagctgacctcgaccgactagaggttatggtttctcgcttagaaaaggaccatgccgaaaagcgggctaccttctggtactggaaaaggtaccaccgcgcgcacgagcgcttgaatgtgctccaactcatctacatagctaaagccaaaaagtttcgcgaacggctgaagaaggtgaaaccgctgtatgactcctga

SEQ ID NO: 10737 - RNA, 1200 nt, synthetic construct
  source 1..1200: mol_type = other RNA
atggatgattttctgtttcataaagtcagtaccgccagcatttcaaacgtgaaaaacctgtgtaccgccctggatataactgaaacagatctggaaaaggctctaagcctcgagcccagtgcgagatacgaagaagtgcaggtaaataagagtgacggaagcctgaggacagcctttaagcctcattatctgatcaggcgcatccagagaagaattaacaaaaggatctttgcacctcagaaaaacgaaccgaatactatccaatggccaaattacatcttcggcagtatcccaaatcagatcatagatggagaggagatccagaaagattacatttcctgcgcgagacggcattgtaaagctaaatctcttctcaagatagacatcaagtctttctttgacaacatccatagcgacctggtgtacgatgtctttaacgagtttttcaagtatcctaagtcagtctgcgaggttttaaccgatatatgttgccatgagaatagggttccacaaggcgggctgacctcctcatacctggccagcctcgtgttgcacgacattgaacccactgtcgtgaaacgattgcttagaaaaggtctgcattacactcgactcgtcgacgatatcaccgtatcctctaagatccacgactatgacttctccttcgccaaaaaaattatcaccgacatgctttatgagaaggacttccctattaacgagcagaagacccgaatagagcgggaggcaagcactcccctctgtgttcacggcctgcgcatttgtttcaacgagccccggcttgcttcccacgaggtgaagaatatccgcgctgccgtgaagaatattgagattgtggccatggaacggcactatagaacaactcacccgtaccgtaaggattacaaccggtgcctgggtagggtaaacaaattagctcgggtgggacataatcagcatgcaaagctcgtgtcgcgcttgaagaaagtggaaccactgccctctgagagagacattaaaaggtgcacgacaatggtcacaaatttagaaatggatcactccacgaaggggagccgttattggtattggaggcgttaccacaaggcccaccagcgcctcaatattttgcaacgaacattcgttcacaccgcaaacgacctacgcgcacggctgaaggtgatcaggccttcatacgaatcttga

SEQ ID NO: 10738 - RNA, 1194 nt, synthetic construct
  source 1..1194: mol_type = other RNA
atggggcagtttcagcctacgaagaatccaaaaggcagtattgccaccatcgatgccctctgtgctgccctgtctatctccattgacgagttgaatcaggcacttgctatgcccatcgacgaaaggtataccctccccaagaaagaactctttaagagcgacggatccccgcgagtcgcatacaaaccccatcatctgatacgaaagatacagcggcggatcaataaacgtatcctgggacaagaaggctacattgattggcctaatcacatcttcggatctgttccgaacaagaaggtgcctgatggcgaggatatagtcaaagactacattaactgcgccagacagcactgccttgcgaaatcgatgctgaaaatggacgtgaaggacttcttcgacaatattcacgtcgacctcgtgttcagcatcttcaactcatttctctccttctcagatgtggtgagtaataccctggccaatatctgctgtcggggcgaatttgtagtacagggcgggctgacttcctcctatttagcatgcctctgtttatttgatgtggaagccgacgtggtggtgcgacttaagaacaagggactaatctatacaaggctaatcgacgacatcacagtgagcagtaaaagatccggttatgattttagcttcgctcgacaaatcatagaggacatgctgttctctagaaatctgcctgtaaacagcaaaaaaaccgctattcactatcatttcagtgcaccactgatggttcatgggcttcgcgtgagctttaacgaaccccggctgcccgcctctgaggtgaagaagattagggctgccgtcaaggatattgaggttttggcaaaggatcacttatacaggattactcatgcctatagacatgacttcaaccgcgttatggggcgggtcaacaagttgtcaaggatcggtcacacacagcacgagaacctgaagaatagactgctgaagtgctaccctttgccatcattcaaggatattactcgcgcgcgtctggctgtcgagcgtgttgaacgggattacgaggagaaatgtgccacatactggtacaagaaacggttttatagagcacacgagcgcctgaaccttctcaaacgctcttttccagacaccgcttctgagctaagggacagattgcgcgatctcaggccagaatacgattga

SEQ ID NO: 10739 - RNA, 1200 nt, synthetic construct
  source 1..1200: mol_type = other RNA
atgtctacaaacaacaacctgtatttccagaaaaacgcatctaattccatcggctctattagcaatctcgccaatgctctgaacttgaccgtaaatgagattgtcagggccgtgaatcttcccaacgaggtgaaatacacagctaatccgcaacagaaagccgatggatctcagcgaatggcttacaatcctcaccgttatctgaggaaggtgcaaaggcggattaacaaacgcatcttcgcagatcctagcgtagtgtcgtggccagattacatcttcggctctgttcctaacaccactcttagccttagcgaagtgatcaagaaggattacgtgtcctgcgccgctcggcattgtcttgccaaatccctcctgcgcttggacatcaaggattttttcccaaatattggcgaacatttagtccgggcagtttttgaagatttttatcactttccgcctgatgtgagtgagatcctagtttcgttgtgtacgaaggatggcggggtcccacagggtgccttgacctctggatacctggcgtgtctctgcctgtttgacgttgagcctgaagtcgtcagaagaatcgaaatgaaggggctgacctatactagatatgtggacgacatagtcgtcagtagcaaggtccacgaccacaactttagtttacaggagaagctaatcagctcaatgctggaagataaagacctccccgtaaacgacactaagacattaattcagcgatccagtactgcccccctgatcgtccatggcctcagggtgtcatttaaagagccacggctgccatccgacgaggtgagaagaatacggtccgccgtgcgaaatctcgagaaacaggcctctgagcccaacttcagaacaacgcgcgtattccggtcagcacataaccgctgcgtgggaaaagttaataagctgaagcgggtggggcacaagcagcattccgaatacctcaggcgcttgaacctgattaagcccctagctcgacgttcagacgttgaaagagtggtgagtatgattcgtcgcctggagaatgaccacggtagcatatcagacacctatgcataccacaagaggtatttcagggcgcacgagaggcttaacatcatccaacgcaattacgagaacatagctttcaaactgcggcagagactgaagtccattcccagcaattacgtgaaatga

SEQ ID NO: 10740 - RNA, 1188 nt, synthetic construct
  source 1..1188: mol_type = other RNA
atgatcatcatgaacaactacaagattaagggcagtgtcatcgcttcaccacagaacctggcgaaggcacttaatctaaccctggaggagataaacgcagccaacgccttaagcaccgaaaagagatacaaagagaagaatctcccaaaggcagacgggaacttcagaaaaatctacaaacccaaccacaggatccgtacgatacagcggcggttgaataaacggatcttctcttccagcaatgtaatcgaatggcccagttatctctacggttctattccgaacacaattggagatgacgaaatcgagatgaagaaggactatgttacctgcgcctccattcactgccaggctaaaagcgtgttgaaaatcgacgtgaaagatttcttcgataacatccatagcgacctcatttttaacatcttcatcaagctcttcaagtatcctcaggaggtagcagagctcctgactgatctgtgcacatataagaataagctcccacaagggggcttaaccagcagttaccttgcttgtctgtctctgtttgacgtcgagcccgacgttgtgaaacggctggaaaataaagacgtgaagtatacaaggttcgtggatgatattaccatttctagccagcatcccaactatgacttctctttcgcgaagaaattggtctttgatatgcttcactccaaggatctcccaatcaacgaagctaagacaactgtccagaggctgtcctcagcccctattctagtgcatggactgcgtatttcctttaaggaaccaagattgccccccgaggaagcccgacaaatacgggccgcggttcgcaatattgagaaactgtcgaagcaccctgattaccggacttcaaacgcatacaagaaggactacaataaatgtattggcagggtcaataaactggcccgagtgaaacacattcagcacaagaaacttatctcacgcttaagaaaagtgaaacctctgccaaatcgccaggctgtgattagggctaggagtatgatccgccagctggagcatatataccctactcacctgcacgactattggtacaagaagaagtactttcaagcccatgagcgccttaatatcatccaacgatcctttccgaatatagccaaaaccctgagatttaaattgaagacgataagacctcagtatgaatga

SEQ ID NO: 10741 - RNA, 1236 nt, synthetic construct
  source 1..1236: mol_type = other RNA
atgtcctgggttgggagagcaacattcatctctaatggcctggtgatcctgctgactaaccccatcaaacattctaagaacagcatttctaaccgtgagaatctgtgcaaagccctccgcgtgagtgacgactttctcggctccgtgctggcattgtctcagtcagagcggtacacaaaaaaagatcacgtcaaaaaggctggaggagggtcccggccaatctataatccccatcgattccttagaaagatacagaatcggatcaacattgccttctttagtaactactacgttattagatggccccactttatatacggaagcgtgcctaaccagaagaacggcgacgggtatgactcaaaagattatgtcagttgcgcgggtcgccactgtggagctaagtccctccttaaggtagacgtctcatcatttttcgacaatatccatcaggatgttgtgttcgcaatatttaacgacttcctcaaatacgatgcagaagtcagctcgattctgaccgatttgtgttgtcaccattcacacttggtgcaaggcgggctgactagcagctacatcgcaagcctatgcctgtacgacgtggagggagcggtggtggacagactcaatcgcaagggcctcacctacacaaggttggtcgatgacattacagtatcttctaaatcccttaacacggacttcacctacgctctgaagattattagcgacatgttaaccggcaaggatctcccaatcaatgagagcaaaacccgagtttttcggacttcgactgaacctctcactgtgcatggtttaagggtcagtttcgacaccccaagactgcctgctgatgaagtgggtaggattcgagccgccgtgcgcaacgtcgaatccctggctgcccagcccgggtatcgcatcagtcacgattataggcatgattataaccggtgcatgggccgtgtgaataagcttctgcgggtcaagcacacacaacacaaggtcttactgcgcaggcttaatgccgtgaagccgctgcctagccgtagggacgtgaatagagccaaggatatggtagcccgattggagatggattttgactccaagaagcacacgcattggtataaatctagatatcaccgggtaatggagcgcctaatcgttctgaatcggatatacgataaaacctcagttcagctgaggtccaaactaagacgactgaggccagtggtggaaaactga

SEQ ID NO: 10742 - RNA, 1194 nt, synthetic construct
  source 1..1194: mol_type = other RNA
atgctgctgaaccctattaaggtgtctaaaaactctgtctcttctcgagaaaacttgtgcaaactgttgcgcgttagcgatgaatttcttacctcagtactggctttgagccaggaggagcgttacacaaagaaggaccacgtcaagaaggctggcggattgagtcggccgatctttaatccacacaggttcctgcggcgaattcagaaacggatcaacatcgccatcttttccaacaattacgttatcaggtggcctcactacatctacggatcaattcccaaccaaaaaaacggcgacggttatgattccaaggactacgtaagctgcgcgggccgacattgtcaggccaagagccttctaaagattgatgtgagtagcttctttgataacatccatgcagatatagtgttctccatcttcaatgattttctgaagtatgatcgcgaagtttcggtgatcctgacagatctctgttgccacaattctcatctagtgcaggggggtctgaccagttcatatatagcttccctctgtctgtatgacgtggagggtgacatagttgagagactgaatcgcaaaggattcacatacacccggcttgtagacgacattacgattagctcgaagagcctcggaaccgattttacttatcctctgaagatcgtgggggacatgctcgtcgctaaagatctccccatcaatgaggggaagactaggatttatcggacctctactgaacccttgacagtccacggattacgtgtgtccttcgactcaccacgacttccggcagacgaagtgggcaggattagggccgccgtcagaaatatagaaagtctggccgcggagccaggctatagaacaacgcacaactacaggcatgactacaatagatgcatgggccgggtaaacaagctgcaccgggtggggcataaccaacatgggccactgctggacagactggacgcagtgaggcccctaccttcccgtcgcgatgtgaatagagccaaagacatggtcgccagactcgagaaagatcacaaaggtaagggccatactcactggtacaaagcaagatactatcgactcatggagcgcttagtggtccttgatagggtgtatgacaagacctgttaccagattcgcctcaaattaaagactctgcggcccgaacgcgaggttgagaaatga

SEQ ID NO: 10743 - RNA, 1206 nt, synthetic construct
  source 1..1206: mol_type = other RNA
atgctagccaatcccctcaaaatctcgaaaaatagcgtttccagccgggagaatctgtgtaagttactccgcgtcaccgacgaatttttggctagcgtaatgaccctgtcacaagaggatagatacacaaagaaggagcacgttaagaaagccggagggattagtcgcccaatctacaatccccataggtttctccggaaactccagaaaagaatcaatatcgcaatcttcagcaaccactacgtaattcgatggccgcactttatttatggctctgtcccaaatcagaagaacaacgatgcgtacgatagtaaggactatgtctcttgtgctggtaggcactgcggcgcaaaaagtctgctgaaggttgatgtgagctccttctttgataacattcatcaggacatcgtgttctcaattttctctaactttctgaagtacgatgaggaagtgtccaggatcttaacaaatctgtgttgccataactcgcatttggttcaggggggcctcactagcagttacatcgcctccctgtgcctttatgatgtcgaaggtgacgtagtggaacgcctgaacaggaaggggttcatctatacgagactggttgatgatattactgtgtcctccaaatcacttaataccgactttacctacgctctgaaaataattagcgacatgctgaccgcaaaggacctcccaatcaacgaatccaaaaccagggtgtttcgcactagcactgagcccttgaccgtgcacggactgagagtctccttcaacacaccgcgactacccgctgatgaggtggggagaatacgggccgcagtcaggaatctcgagtcactagccgaccagcctggctaccgtacaactcacggatatagacacgactataacaggtgcatgggacgggtgaacaagctgctgcgcgtgggccacaatcaacacaaacctctgcttgccagacttaacagtattaagccattgccttctcgtagggacgtgaatcgcgcgaaggacatggtcgctcgattagaaaaagacttcgatgccaaacgccacacacattggtataagtctcgattccatagagtgatggagcggctcatcgtgctgaaccgggtgtacgatataacgtctaagcagctgcgttctaagcttaagcggttgcggcctgaatcagaggacataattgacaaacatgtatga

SEQ ID NO: 10744 - RNA, 1185 nt, synthetic construct
  source 1..1185: mol_type = other RNA
atgctgaccaatcctttgaagttcacaaagaactcaatatcatcaagggagaacctttgcaaagcgctgagaatcccagacgactttcttgcaactgtgttggctctgccccccgacgaccgttacaccaagaaggaccacgtgaagaaagctggggggatttctaggcccatatacaatccacatagatttctgagacgtatccagaagaagatcaacattgctatcttcagtaataactacgtcatccggtggccacatttcatctatggctccgtgccaaatcagaccaacaacgatggctacgacagaaaagactacgtgtcatgcgccggtcggcactgtggagccaaatccctgctcaaggttgacgtttcttcgttcttcgataacattcaccaggacatcgtttttagcatctttaaagacttcctgaactacgagaaggaagtcagcgagatcttaacgaacctgtgttgccataattcccacctggtgcagggagggttgacatcctcctatattgccagtttatgtctctgggatattgaaggcaaagtcgtggaaagactgaataggaaaggcctgacttatacccgacttgtagatgatatcactgtctcaagcaagtccctggaaacagattttacgtacgctctcaagattattagcgatatgctgacaacgaaggacttacctataaatgagtctaagacacgcatctaccgcacctctaccgagcccctaaccgttcatggtctgcgcgtaagttttagcactcccagactccctagcgatgaagtgggccgcattagagccagtgtgaggaacctagaaagcctggcggcagagccgtcgtacaggacatctcatggatatcggcacgattataaccgatgcatggggcgggtgaataagctgcatagggtcgagcacaatcaacacaagcctctcctgatgcgcttgagggccatacgaccattgccttcccgacgggatgtgaatagggccaaggacatggtagcacggctcgagaaagattatgacacccaaagccacactcattggtataagtctcggttccaccgcgtcacagaacgccttatcgtgcttgatagaatttacaccaaaactagtactctactccggtccaaactcaaaaaactgcgtccggtgggagagtga

SEQ ID NO: 10745 - RNA, 1209 nt, synthetic construct
  source 1..1209: mol_type = other RNA
atggtgagactctttccgcagaaagtgtccaccgcaagcatagctaatgtcgactccttgtgccaagccctttctatcccccggtcagtacttgatcaggttctggctctggggctggatgaacgctacaaagaggtaatgcacattaagaaggccgatggaactaaccggcctatctacaatcctcaccatcttctgcgccgcattcagaagaagatcaatgagaggatttttagcgatactaagatcataaagtggccggggttcttatacgggtctattcctaatcagaccggctcctcaggacaggatgtctctaaagactacgtggcctgcgcagctgtccactgtggtgcgaagagccttctgaagattgatgtcgaaagtttcttcgacaacatccaacgggacattgtgctcaacatctttagcaagttcttaaagtaccccgaggatgtggctgacgtgctgaccaacatttgttgctataaaggtcggctggttcagggggccctgactagttcttatatcgcaagcctctgtttgtgggatgttgaagggaacgtcgtgaggcgacttaatctgaaaggcctaaggtataccagactggtagacgacataacagtgagctcagtgggactggctacagacttcagttacgcgaagaagttggtcgaagatatgctcagcgacagggacctccccatcaaagcatcaaagactaaagtctataggatgagtagtgagcccctaacagttcattccctgcgagtgaacttctctagcccccgattacctgccgacgaagtgggccgcattagagccgctgttaaacacgtggaacgcctcgcgtcagagccaaattacatcacgacgcactcctaccgtaaagtttataacagatgcgtgggaagggtgaataagctgtccagagtaggccacaatcaacataaaatcctgctcgcccgcctgaacaaaatcaaaccactcccatcgtttagtgatatacgaagagccaaagccatgctagcacggctgaagtccgactttggctccaagggccatacccattggtaccggtctaggtattacagactggaccagcgtttgaggattttgtcaagacggtatgagcgcaccagcgatcagattcgtgaggagatccgaggtatcaagccatttaagaaacactcttcggagacacactga

SEQ ID NO: 10746 - RNA, 1095 nt, synthetic construct
  source 1..1095: mol_type = other RNA
atgctctcccttcctgacaatattctttacactgagaaggaaatcccgaaagccgggggcaaagttcgcgtggtctacaatccccaccggctgcttagacgcgtgcagaggaagataaacacccagattttctcctcaagcaacatcatcgagtggcctacctacctgtacggatctatacccaatcaggagtacgaggctgagctgaagcatctaaataacaaggattacgtctcctgcgcagctcgtcattgcggtggtagaagcgtcctgaagttagatgtggagtcattttttgacaacgtccatgaagatgtagtccgatccatctttgctgacttcctcaaatgcagtccagaagtgagcgatgtgctgacaagcttgtgttgcaaaggggaacatattgtccaaggagccctgacctcctcttatctggccagtctgtgtttgtacgacgtagagggcacagtagcagaacggctccggaggaagggcttcgtgtatactcgcctggtggacgacatcacggtttcttcaaagaagctcggggttgacttttcatacgccaagagcttaatcgttgatatgttgaaagagaaggacctaccagtaaatgaaggtaagacgaaagtgtatagagcctctaccgctccactgactgttcatggactccgtatcggattcagcaccccccggttgccctctgatgaagtgaggcgaattcgggcggccgtcagaaacgtggagctgttggcgaaggaaaacaattataggacatcgcacgcctatcgccacgactttaatagatgtatgggccgggtgaacaaactcgaaagggtgaaacacaaccaacaccagagtctggtgcgcaggcttaaggatattaagcctctaccaagtattcgtgatataggcagagctaaaaaaatgctggagaggctgcgcaaggactacaaacttcggtcccacacctattggtatcgagcaagatattttaaagtgctcgagagactcaacgtcctgcagcgaacttacgagcacgttgcattcgatttcagggtggagctgaaggggttaaagcctacacagaattga

SEQ ID NO: 10747 - RNA, 1203 nt, synthetic construct
  source 1..1203: mol_type = other RNA
atgaacctcgttggcaataatctagacattcccagaaaaattagcaccggggccatcgcctccctcaattccttgtacaatactcttggctgcaccgaaagcgagatcacgagcgtcctgaatatcccccccgaccaactctacactgagatacgcatctcaaaagcgggcggcaaacagcgggtggtgtacaacccacaccgacttctgcgacgtctccagaagaagataaacgagcagatcttctcaaactcggacgttattagctggccttgctatctctacggatccatcccgaatcagaattatgaagatgggctggagatctattctaggaaagactacgtctcatgtgccgccaggcattgcggggcaagatctctgttgaagctggacgttgaaaacttcttcgataacatccattacgatgtggtgtacgcagtgttttctgactttttaaagtgctcatcagacgtatctgatattttatctcggctgtgctgtaagggggaacacctggtgcagggagctttgacctctagttatctggctagcctgtgtctgtacgacctggaaggagccgtggcagagagattgcgccggaaaggtttcgtgtacacacgtctggttgatgatgtcaccgtgtcctccaaaaagctgaacgtcgactttacctttgctcggaacaccgtggtcagtatgcttgaaggcaaggatcttcctgtgaacgaatcgaaaactaaagtccaccgcgtctctactgtaccactcagcgtacatggcttgcgaattggattttcaactccaagactgcccgcggatgaggtacgccgtattcgcgctgccgtccggaatatagagagtctggcaacagagagcaactacaggacaacacatgcctatcggcacgagtttaaccggtgtatgggaagagtgaataagcttctaagggttgagcattcccagcatcccagccttgctagtaggttagaaaggattaggcctctaccatccttccgcgacatcgcccgagctaagggtatgattgacagattgcgaagtgatcacacatcccgcgcacacacacactggtataagaccagataccacaaggttctggaaagactcatcgtgctccaacggacgtataaacacgtgagctatgagttcagggtggagctcaagggtctgaagcctatatga

SEQ ID NO: 10748 - RNA, 1215 nt, synthetic construct
  source 1..1215: mol_type = other RNA
atgatcgacgcgcggtttgtgaacccaatcaaactttcagctgattctatatcctccgtgagttccctctgcgacgtcctggatatctcccagaaagaattgggggaggtactggctctaagcggcgaggagcgatattctagtaaggaaatcagtaaggccgggggcaagtccaggatcgtccataacccccataagctggtgagaaagatccagagacggattaataaccgcatattcaccgccgagaactacatacaatggcctagctatctttacggctccgtttcaaatcaggagtacgatgtggaggacgatcagacatacctgaacggtaaggattatgtcagttgtgctgctagacactgccaggccagctcgattctgaaactggacgtgcaggatttctttgataacatccacatcgggctagtggaacaggtcttcaaggattttttgtgttttccggagcctgtggctaaagtcctcgccaatttgtgctctcgaaatgaacatctgttacagggagcactgacgagctcttatctcgcctcactgtgcctatgggacgtggaaggcaaggtagcggaaaggctggggagaaagggattagtttacacaagactcgtcgacgacattactgtctcaagcaaatccattaaaaccgatttcacatatgcaaagaacattatcatcggtatgcttgagagtaaagacctgccagtcaatgaagcaaagacacaggtgcacagagctagcactaaaccgctgaccgtccatggtcttcgggttggcttttctactccacgcttgcctgctgatgaagtgaggcgtattcgggccgcagttcgcaacgtggagtcattggcagaggaacccaattatagggtgaagcacgcatacagaaaagactttaatgtatgtatgggaagggtgaataaacttcaaagggtgggacattcgcagtacgacgccctcgtgtctcgcttagagaaggttcaacccctcccatccaaacgcgatattggaagggtaagaagcatgatagaacgactccgcagcgactaccccaaacgagcccacacctattggtacagggtgcgtttctataaggttcacgagcgtctgaacatcctgaagcggacctaccggcacgaggccctggacttccggattgagctcaaggccctgaaacctcccaagtctggccaatga

SEQ ID NO: 10749 - RNA, 1191 nt, synthetic construct
  source 1..1191: mol_type = other RNA
atggccgtcttggttccttacaaaaaaactaacacatccatagggtcgatagagagcctctgtggcaccctgggcataacccaggaggagctagcccgtgctatcgctatgcccctggtgatgagatacactacagtagaagcgcaacccaaagctgacgggtccgtccgcagcgtttcaaaccctcatttccttattaggaagatccagagacgtctgaacaaacgcatattcagcaacggtgcactgattggctggcccgattacatttttggatcaatcccgaatcaattcgacgctctcggggtggaggccgacaaggattatattgcctgtgcagcccgccattgcggcgctaaaagtatcctccacctggacgtccagagcttctttgataatatccatcgcactcaggtacttgcaattttcgaagattttctgaagtactccgaggccgtctctgatcagctggcggacatctgctgtaatggagagaacctcgtccaaggtgctctaaccagttcatacttggcaactctgtgcctttgggatgtcgaaggtgaaatggtgaaccggctgaaccggaagtcgttgacatacacgcggtttgtcgacgatatcacaatttcctccaaggtggccagttatgactttagctatgcccagggaatcgtgcaggacatgctcgcctcaaaagacctccccatcaattctggaaagacgagagtgcggaggatctcttctgaagccctgaccgtgcacggccttcgcgtgaattttagccagccaagattaccaagtgatgaggtgagaaggattaggtctagtgttcaaaatgtggaaaagttggcagtagaatccaactatcgccagtctcattcctataggaaggacttcaatcggtgcatgggccgagttaataaattaaaacgagtgggacacaaacagcacgctgaccttctgaagcgcctccgagagatcttaccactgcctagcttcaaggacattgagcgtgcacacctcatggttgcgaggctgaaggattcataccaggctaagggggattctttttggtaccggcgaagattctatgcaacccacgaaaggttgaccattctggatagatccttccatgccatagccgtgaagctgcggggggagcttaggctgatcagacctagctatgactga

SEQ ID NO: 10750 - RNA, 1227 nt, synthetic construct
  source 1..1227: mol_type = other RNA
atgtcatacaaatatgatttcggcaaacgctcgaaaaggtccattggctctattgcaaagctaatcgccgtactggatattactcaaaaggagttggatatcgtgaacctcctgaccgaaacacagaaatacaagaagaaagaaactgtgaagagcgacggtaccgtcagagtggtgtacaacccggacaagactctccggaagattcagcgccggattaacaaacgaatctttaaccagcgcggaaataagggagggcttatatcctggcccaactatatctacgggtccatcccaaatacgccacaatacaactctaatcagaaaaacctggatttctctaaggactacgtggcctgcgcggccaatcattgcggctctaagtctttgctgaagatggatatatcagacttcttcgacaatatacacagtgtccatgtgaagtccgtctttacagacctcttaaagatccccgacgacgtcagtgacttgttgaccgctctgtgttgcttgaaaggaaacgttgtgcagggggcgcttaccagctcgtatatcgctagtgcagtgctgtttgatgtggagggtgacgttgtgcgtcggctccacttcaaaggccttacatatacacggttagtggatgatatcacggtatcttcccagaagcttaattatgagtttacatttgcccaaaacctgatagccgacatgctgtcaaaaaaggatctccctatcaacctgaataaaaccatcattagcaactgtagcactgaagagctgatcgttcacggtctgagagttaatttcaaggagccacgactcccctcttccgaggtcagtaggattcgagcaagcgtgaagcacctcgagctgctaagccaggactcaatttaccgtgtaagtagggattataggaagtcctatgatagatgcttgggcagggtcaataaactggggagattaggccacaaacagcatgccactttactgaccagggttctgagaatctggcctcttcctaacaagaaagatattaatctcgcaagcaacctgataaagaagctcgagggatggcacctgaccaccaaagctgacgaatactggtactaccgcctgtgtaataaggcccattcagaactaaatatcctccagcggagctatagcaaaacagctctttccctgcggaagagacttaaaaacattactcccaatcgcgaagactacctgtga

SEQ ID NO: 10751 - RNA, 1014 nt, synthetic construct
  source 1..1014: mol_type = other RNA
atgagttataaatacgattttgggaagcgctcaaagagaagtatcggctcaatcgcaaagctactcgacgtcctggatattaagcaagaagaactcgatctggttaactcactgacggaagaccagaagtacaaaaaaaacgaaatccccaaaagcgatggtactgttagggtggtgtacaacccacataagacccttcgaaaggtccaacgccggattaataagaggatctttaatcagcggcacaataaaggaggcctgatctcttggcctagctacctatacggaagtatccccaatactccacagcagaacagcacaacaaaaactttcgatctcagcaaggactatgtggcttgtgccgcaaatcactgcggttcgaaatctctgttgaaaatggacatcagcaatttcttcgacaacattcacgaaacccatgtaaagaacatcttctccaatttgctcaagtttcctgaggacgtgagtaatacccttacttccctgtgttgcctgaaaggcaatgtcgttcagggagccctgacatccagctatatagccagcgccgtgctctttgatgtagaggcgcaagtggtcaggcgactacacttcaagtccttaacttacacccgtttagtcgatgatattaccgtgtcctctcagaaacttaactacgactttacattcgctcagcggcttatagcagacatgctgcagtccaaggacctgcccatcaacctctccaaaaccattatatttacgtgttctaccgaggagttaattgtgcatgggcttagagttaactatagtgagccacggttgccttcttctgaggtcgccagaatcagagctagcgtgaagcacctggagctgttggctcaagattcagtgtacagggtatcacgcgactataggaagtcgtatgaccgttgcctcggccgcgtgaacaaactgggcagactggggcataaacagcactccattctgttggagcggacagtgaagataaagccgtga

SEQ ID NO: 10752 - RNA, 1203 nt, synthetic construct
  source 1..1203: mol_type = other RNA
atggcctttagatacgatttcataaagcggaatcgtaatagcatatcctccatcccaaatctgctggatgctctgggaattgagcaagtgcagttcgaacagttccaaaacttacgcgacctggataaatacaaagccagtagcgtgccgaagtccgatgggaagatccgcacagtttataatcctgcccagctgattcggttgtttcagagacgaatcaacacaaggatatttcaccctaaacattctcaggggggtcttattacctggcccagttatctatttgggtccatcccaaataacccccaatcacccgagtctagtagccgtaactatatcacctgcgctggaatgcattgcggcgcaaaatctatcctgaagatggacatctctgacttctttgacaatatccaccatagagaggtcatcaacattttcgaaaagttgctgaagttcccaaacgatgtcagccgcacgctggcggacatctgttgccacaagggtaacgtagtgcaaggtgctttaacatcctcatacatagcgtctgccgtattgtttgacgtggagccaaatgtggtacggcggatgcacgagaaacacttggtctatactcgccttgttgacgatattaccatttcatcgaagatctacgattatgatttcagctacgccaagaacattgtcattgatatgctcaggaaaaaggggctccctaccaacgaaaataaaaccattgtgatcaactcttccacaaaggaaggcttagtgcacggcctccgtgtgtgttttaaagagcctcggcttcctgctgatgaagtgggaaaaatcagggcatcagtccagcacgtcgaacgcttcgcaagggacgccgagtacaggactagtagggagtatcgaaggatctataacagatgcctgggccgagttaatcgcctcaaacagctgggccataatcagtatcagaacctcaaggacagacttataaagattgaaccgaagccctgtaaggctgacatcaaaaaagccagaaacctggtgagaaaggtgaagactctccataaagactacggatccggctaccgatatcgccggctgtactacaaggcccaatacgagctgaatattctacagcggactttcagcgttacggcagacagcctgcggaaacagctcagaagggtgaagcccacctacgagcagtga

SEQ ID NO: 10753 - RNA, 1227 nt, synthetic construct
  source 1..1227: mol_type = other RNA
atggagaatacactcaactatcgaaagcggtatacgagcagtatcgggagcgttagcaacctcctctcatgccttgacatcacgcagcaagagtacgacgctttttgcgctctggcttcagaggagaagtacaaatcttttaaactgcccaaacctgacggaacaagcagagaagtgcatgctccacacaaattggtgcgcaagattcagcggcggattgtccgacgaatattcggctccccgaacagaaatcagtgggataagaagaggcctaaagggggagccatcatctggccggagtatatctatggttccgtacccaacgattactataacaacaccccaatctccaaagattatgtggcttgtgcctctaatcattgcggatgcaagtcaatattaaagatggacctgaaggatttcttcgataacatcacccctgatctagtcttcaatgtgttcaacaatctcctgaaatatcctcgcccagtcagcaatgccttagtgaaaatctgttgtcacaacggcaagctgattcagggcgccctgacatctagttacatagctagtgcagtcctgtttgacgccgagcctaaactggttaagcgtttgaaatcgaagaatctgatttacactcggcttgtagatgatattaccgtgagcagccttaaccaagattacgacttctcttatgcaaccgagttgattcgtcaggtgctgtacgaaaagaatctaccactgaacgagtctaaaacaattgttttgagggtcagcacttccgacatcctcattcacggccttagggtgagtttttccaaaccacgcctgcccgccgatgaagtatcgcgtatccgcgcgtccgttaagaatttagaatcccttgcaaagattgccgactacagggtgtcccgcgactacagaagaagtttcaatcgatgcctgggtagggtgaataaattgaagagacttggccacaaccaatacaaagcactccagcgcagggtgatcaaaatcctgcccatgcccagcagaatggacataactcggttggactcttttgtctacaagctggaagggtggtatcagaatcactctgattcatactggtacaagaggctgtatcatcgggcatactatgatctcaatattctcaacaggacctttaaggcgtcagccgaaaagctaaaggcccggctcagactgatcaagcccaactgtgacgactga

SEQ ID NO: 10754 - RNA, 1227 nt, synthetic construct
  source 1..1227: mol_type = other RNA
atggagaataccttgaattataggcgtagatacaagaactccatttccaccgtgtcaaatcttctgtcttgcctggatgtatcgagttcagagtacgaggactttaaagctctggcccacagcgatcgatacaaggaattctatgttcctaaagcagacgggacttccagacatgtccatgccccgcacaagttagtgcgaaagatccagcgcaggatcgtccgccggatttttggtagcccaaaacggaatccttgggataagcatcgcaagaagggcggcgcaatcatatggccagaatatatctacggcagcgtgccaaacgattgctacaacaatacaatgatctccaaagactatgtcgcttgtgctagcaagcactgtggatcccagtccgtgcttaaaatcgacataaaggactttttcgacaatatcactccagagctggtattcaacgtttttaacaagctgctgaagtaccctagagcagtggctaatgcactagttgacatctgctgtcataataacatgctgatccagggggccctaacttcctcatatattgcgtctgccgtcctgttcgacgttgagccggccatcgtgcaaaggctgaagtctaaagggcttagctacacaaggttggtggatgatattaccattagcagtagaaaccccgaatacgatttttctttctctctggagcttgtgcgccagatgttatatggcaaaaatttgcccctgaacgaaaccaagacaaacattattcggagctccacaattgatatactcatacatggcctgagagtgagttttaaggagccccgcctccctagtgacgaagtgtcccgaattcgagctagtgtcaaaaacctcgagtcgctggccaaaatcgccgactatcgcgtctcaagggattacagacgttcattcaataggtgcctcggtagggtaaacaaattgaagcgtctaggacataaacagtatatctcactccagacccgggtgctgaacattctgcccttacccagcaaaatggacatcacgcgcctcgactcttttatccacaaacttgaaggatggtacgccaaccacaaggaggaatattggtatcggcggctctaccaccaagcgcactacgatctgaatatattgaacaggacgttcgagcacagttctcggcggttcagaagcagactcaatgatattaagcctatgtgtgacgattga

SEQ ID NO: 10755 - RNA, 1224 nt, synthetic construct
  source 1..1224: mol_type = other RNA
atgacatccaaatacgagtaccacgtcaggaaaagaaccaaccggtccatcccatccataaagagtctgaagcgcgctctgtcaatctctgatacagagatcgacagtttttacgagctcattaaagaaggcaaagcctataagagggtcctgggacatttgaagtcttctggggatgagcgtctcgtctatgatccccacccactcgtccgcaagatccagagattgatcaattcacgagtgttcaatcctcgtaaacctaaggagggcctaatagtgtggcccccttacctctacggcagtgttcccaataccgtgaaagtaattaaaggaaaggtggaagttacgtctcgagactacattagctgtgctaagaaccattgcctgaccaaatcgatccttaaaatcgacattaaggacttctacgagaacattcacaagagcgacgtgttcgacatttttagcaaggtgctaaaatacccagatgacgtttcaacacttttggcagacttttgcacttataaggataaaattccccaggggggtctgactagttcctttatcgcaagtgctgtgctgcacgatgttgaacctaagctggtacagcggctccacaaaaagaagttgatctatactcggttagccgatgatatcaccgtgtcctcatttacaaacaactacgacttcaatctttgcatctcattgatcaaagagatgctcattagcaaggacctcccaataaacgaagataagcttgtcataagcaatcactccaattctgcgactttagtgcacggtctgcgggtaaatttcaaggagcctcgactgccggaagacgaaatctccaaaatccgggctagcgtgaggtctttggaaaagctggcccaggacagtaagtaccgcacctcaagagattataggaggagccactctatttgtatggggcgcgtgaacagaatgcaatcgataggacataacaaagcaagacaactgatggttagggtcctgaagatcttacccctcccgtcctaccaggatattattacgagccataaactcgtgtataagcttgaaaaatccttcaaaaaggacaagtgtgagtacttttataagcggctgtataacctggcccagtatgagctgaatattctgcagaggagcttctctcgcgaggcccatgagctacgcaacagactgaagagagtgaaaccaaatgaagtctga

SEQ ID NO: 10756 - RNA, 1224 nt, synthetic construct
  source 1..1224: mol_type = other RNA
atgaagacccacttccaataccacataaagaaacggactaataggtcaataccctccatcggtgttctcaagcgcactctttcaattaccgatgaggagttcgattctttttacaccttgatagcgaacgacgacgcgtataagaaagtgagtggtcattttaaatcgtctggggacgagcggttggtgtataacccccaccccttggtgcgcaagatccaacgaatgatcaattcacgtattttcaaccccaaaaaacctaaggaaggcgtcgtgatctggccaaaatacttgtacggctctgttccgaatactcttaaatgggtggacggaaagctggaagtgttccatagagactatatatcttgcgcaaaaaatcattgtctgacgaagagcatcctgaaggtcgacatttctgacttttacgagaacattcattggcaggatgtatacgagattttcaataaggtcttcaagtatgcagatgatgtctcaaaggccctggcagatttttgtacatacgataataaggtacctcaaggagggctcacaagcagctttatcgccagcgctgttctacacgatgtggagcctaaacttgtccagcgcctccataagaaaaagctcatctacacaaggttagttgatgacatcaccgtcagtagttataccaagaactacgattttactctggccgtaggactgatcaaggagatgctgctgtccaaagatctgccgattaacgaagagaaactggtgattagcaaccactccaacagttcaaccctggtccacggcctgcgggtgaacttcaaacagccacggctcccagaggacgaagtgtccaagatccgcgctagtgtgagaagcttggagaatctcgctaaagactccaagtatcgcacctctcgggactatagaaagtcccatgccatgtgcatgggcagagtgaaccgaatgcagtccatcgggcataaccaggccaagcagttacttaacagggttttaaagattctgcccctcccatcctaccaggacataattacggctcacaagctggtatataggctggagaaaaactttgaaaatgacaaaggcacatactcgtacaaaaggatctataatcttgcccactatgaactaaatctgcttcagcgttctttcagcagccacgccaaaggactcaggctaagactgaaggaagtgcgacctaatgaagtgtga

SEQ ID NO: 10757 - RNA, 1161 nt, synthetic construct
  source 1..1161: mol_type = other RNA
atgaagcacttagaaaaagtgccatctgccaaatctataggctctctgaacaagctctcccacgctcttggaatcgaaaaaagcattctgatcgatgtcgcagagtccatcggaggataccggaagtcggagcgcacaaaagataatgggaaaattagagtggtctactcaccatctagaatagtacggaagatccaaagcgccattaatgaacggatttttacagatcccaggatcatttcctggggcgagtatctgtacggtagtattccgaatgatgagtatgtcacccgcgactatatctcatgcgcggcccggcacggcatgtgcaaaagcattttgaagatggacattagcgactattttgataacatccatgaagacgctgtgttcgatgtgtttaacggcttcctcaaatatcccaatgacgtgagcaccatcctcgctggcatatgtacccacgagggcagggttcctcagggaggactgacgagtagttacctagccaacttagtcctctacgacgtggaggagatcgtgatcaacaagttagagaagaagaagcttacctacacgaggtatgtggatgatatcacagtctcatccctgtcttacgggtatgacttcacttacgcccaggaccttattaagaacatgctgcatgggaaaggttttccagtaaatgaagaaaagtgtgtcatcgaaagaagcgggactattggactgagtgtgcatgggctgcgcgttggttacgaccgccctagactgccaagggaggagatgagaagaattcgtgccaacgtgcagaaagtggagatcatctctaaagagcctgggtaccgaacaacccattcctataggcgagactttaatcggtgtatgggcagagttaataagttggttcggctcaagcacgatcagggcgctaaattcataaagcggttgaacgcaattaagcccttgccttccatcaaagacatcaatcgttgccgcaagatggtatggttcctcgcaaaagattacgagaacaaaaagaggcgtctgtcgtatgaacgacgattttacatatgccacgaacgcctgaacatactgaagaggtcattctatcaggaggaacaatacctacgctccaatcttaggactattagacccgtgagctga

SEQ ID NO: 10758 - RNA, 1269 nt, synthetic construct
  source 1..1269: mol_type = other RNA
atggataaggtcttccttgacagcagctatagtatgggccgcccctcgttgttggtcaggtcagaaaacatggaactcatcgattactatgacaaggacagcgggaactcaatcagctctataaagaacctctgtctagccttggacatcaatgagtctgagttagatgagatttctcagctgggagatgaccggtacgtgaaatccgaggttccaaagtcctcaggaggagtgcggatagtgtataaccctcacagaaccctgcggaaagtacaaaggcgtatcaacaacagaattttcaacccgaaaagtggggcgatcattcgctggccaagttttatctatggttccatcccaaaccagcaccttttgcatggagagctcgagcacaaagattatgtggcttgcgtgaaaaatcactgtctgaggtcttctattctcaaggttgatgtgcaagacttcttcaataacatccatatagaccacgtcgtggaaatttttacatcgttcttcaagtaccccgatgatgtaagcaactgcctggcagagctctgttgttataaggactttgtggtccagggggccctgacctcctcctacatcgcatctctgtgcttgttcgacgtggagccagatgtggtccgtagagtgaagaggaagggcctggtgtacaccagactcgtggacgatatcaccatttcatccatggatagggactacgactttagctatgttaaatccctggtcatagatatgctgcatgaaaaagaccttcctgtgaacgttgagaagacaaacgtatttagagtcagtgaaggccctcttctggttcatggtctgcggattagctttcaggagcctcgtctgcccgccgatgagataagtcgcattagagcaagcgtcaaaaatgttgaacgactagcttcagaacccaagttccgcacgactcacgcttaccgacaggactacaacagatgcatgggccgagtaaataagctaaaacgcgtgggccacaatcagcacaaaaagctcacagaacgcctgctcaaagtccatcccaagccctcaaagaaagacctgaaacggattaaggtgatgatctctactttagaacgagattatgagaagaagggggacaattattggttttacaaacggttctatcgcgcccaggagaggcttaatctgatcgccaagagctacccaaattacgtgaataaactgaggcctcggttaaagaaggtttttccgaattacgacaaatcctga

SEQ ID NO: 10759 - RNA, 1200 nt, synthetic construct
  source 1..1200: mol_type = other RNA
atggaggttatcgactacttcgcgaaagacagcgacaacagcatttctagcatcaagaatttgtgccgtgccctagatctgaccgaatcagaaatcaacgaagttcgcgccctgggcagtgactcttatatacagagtgagattcccaaatccagtgggggcctgagacgcgtctataaccctcactacaaacttcgaaaggtgcagcgccgtataaacaacagaattttcaaccccaaatccggagccattgtccactggcccagtttcatctatggaagcatacctaatcagaatctgcttgatggggacattgatcataaagactacgtggcttgcgtctcaaatcattgtctgagcagaagcttgctgaagattgacgtgcaggacttttttaacaatatccacattgaccatgtgaccgacatctttaagaatttcttcaagtacagcgatgacgtttcggaatgcctcgcagagatctgctgttataacggatttgtggtgcagggggctctgacttcatcctacatcgcttctctgtgcctattcgacatagaaccagaggttgtcaaaagggttagaagaaagggcctgcgctacacgcgcttggtggatgacataacagtctcttccttggaaagggactataactacagctatgtgaagaacttgatcattgatatgctccatcagaaagacctgcctatcaacgaggagaaaacaaatgtgttcagggtgtcagaaggtccgctacttgtgcacggtcttcgagtctcattccgcgagcccagactcccatctgatgaggtgagtcggatccgggcgtctgtgcggaatctcgaaaagctcgcatccgagcctaagtttagaacaacccacgcctaccggaaggattttaaccggtgtatggggagagtaaataagttaaaacgagtcggccacaatcaacacaggaagctgatcactcgcctgctgaaggtatcccccaagccatccaaaaaggatcttaagaggattgaggtaatgctcgagaggctggagcgtgattatgataaaaaggccggcaattattggttctataagcgattttaccgggcccaagaaaggctcaacctgattgcaaaatcgtacccgaacttagctaaaaatttaaggctgcggctcaaatgtgtatttccaatctacgataagcattga

SEQ ID NO: 10760 - RNA, 1200 nt, synthetic construct
  source 1..1200: mol_type = other RNA
atggccacagatgtactgttcaagaaagtttctgctccaatagtgtcgattgagaagctatgcttggcactggacatctcaaaggaggagttgaatgatgcactcaagttaactagctctgagagatacacgaaatcagaagtcccaaagcccaacggaaaggtgcggatcgtccacaatcctcataagctgatccgtaagatacagcggcgaatcaacacaaggttgtttaacccaaagcctacagggaggggtgtggtggaatggccttactatatctttgggagcgtgccgaacgtgaaagatcctattaaacccattgagcgcgattatatcgcctgtgcccggcagcactgtctgtcacagtccatcttgaagattgacatcaccgatttctttgacaacattcacatcgatcacgtctactatatcttcagacatcttcttgactacagtgacgaagtatgcaatgttatctccgatatttgcagcctgaatggagccctgctgcagggcgctctgactagctcctacctggcctgcctctgcctcttcgacgtggaacctaatgttgtgattcggctccagcgtaagggccttcgctacacccgacttgtggacgacataactgttagcagtattaaagacgggtatgacttcaccctggcgaaaaacataattgtcgagatgctggagtccaaagatcttcccgtcaatgatgcaaagactcagattatacacaaatcttccgtgccactcgtagtgcatggcttgagagtaaacttcaaggaaccgaggctgccctcaagcgaagtctctaaaattcgcgcaagtgttaagaatatcgagcaactagctaaagagaggcattacatcacgacacatgcctatagaaaggatttcaatcgatgtatgggccgcgtcaacaaattaaagcgtattggtcacaatcagcaccaatcgctcgtggaaagactcaggaagatactgcccctgccttctaagaaagacattgaacgctgtaaagagatggtgagtggcctcgagagcgattttccaaacaagaagggacatttttggtaccacagacggttctatcgcgcgaacgagaggatcaccatcctagaccggacctttaaatccatcgctaaagaactgaggttaaagatgaaggatatcagacccctgtataaagactga

SEQ ID NO: 10761 - RNA, 1200 nt, synthetic construct
  source 1..1200: mol_type = other RNA
atgttcgacaggtttacctttagcgcagccaaggcgccaatcaccagcatcgacaagctttgtgagactctttccgtctcccgggaagaactttacgatacattggaccttcccgacgaactgaagtatacagaaacccaaatcccgaaatcttttggcaaagttcgaaaagtccataacccacacaaaaagctgaggaaactccaacgccgaatcaatagacgattatttaaccctaagggcaagagtgatagcgttataaactggccggtctatatttacgggtccgtgcccaatcaagagatcgagggagtcacatacaatcgcgactatgtcgcttgcgccaggcagcactgcggaagtcgttctattctgaagctggatatttctgacttcttcgacaacgtccacgaggatcacgttaaaaatgtgttcgctaacctactcaagtacgaggaggaggtggctgaagtcttgacccagctctgttgttttaacggtagtctcgtgcagggcgccctgactagcagcttcctggcatgcctgtgcctctacgacatcgagccaaagctagtgaagaaactctcccgcaagaacctgcggtatacgagacttgtagacgatataacgatcagctcaactcagccacacttcgacttttccatggtaaaagacatagtgctgcggcagctgtacgaaaaggatctccctgtgaacaaggataagatcgtagagttgtattctggcacttcacctatgcttgttcacgggctgagagtgaactacagcgaacctcggctcccatctgaggaagtgtcacggattagggcagcggttaaaagaattgaactgcaggctatcgagcccaattataggacatcccatacatttcgcaaggatttcaaccgtaccttaggaagagtgaacaagctcgcccgtatgggtcataatcagcataagaagttgagtgcacgcctgtcgaatgtgcgacccttaccctcaaaaaaagacatcgagagatgttggtccatgctggccagactgcagcgcgattacaattcacagaagaattcttactggtacaaacggaggtatcacagactgagtgagaggttgattatactgaaaaggaccttccataagactgaagcccggattcgcgaggccctaaagaaaattaaacctgggttcgtggattga

SEQ ID NO: 10762 - RNA, 1278 nt, synthetic construct
  source 1..1278: mol_type = other RNA
atggcaaacgtctatactgacgagatggagctgtgccagttgccactgaacaacaagtacaacttcaagtacataatcaactcaggcccaatcaagtctattcaagatctgtgcgagaaagtgctggacatccccatcagtgaactctacaaggctctttcaatagcggaagaggagcgataccaacgggcctctgtgccgaaaaaagacggcacaatcagagtggtctataaccctcattacctgattcggaagatccagagaaaaattaattcccgcatcttcaatccaaaggtcaagttaggcaagaatccaggtgtgattaagtggcccccctacatttttggatgcattccgactcagtatcaggaggtcgacgaaggggaactgatcaccgacagtagggattatattgcgtgtgccaaaaaacactgtctgtccaagtccattcttaagattgacatatccaacttcttcgacaacgtgcacaagtctatagtagaggacattttcaaagaactcctgaagtatcctgatgacgtggccgaggtgttggccgatatctgctgtaaaggcgagcatctggtccagggaggacttaccagctcatacctagcatccctcgccctctgggacgttgaacccgaggtggttaaacgccttaacaataagggcctcaagtacaccagactgattgatgatataacagtttcgagcaagaaacagaattttcagtttgacttggtgaaggatgtaatcgttaatatgctacacaacaaggacctccctgtaaacaactcaaagacggaagtcagctacgctagtaccaagccactgatagtccacgggctgcgcgttaatttcaaggagcccagactgcccagcgatgaagtgagccgaatccgggctaatgttcacaacgtggaaaaattggcaaaagagcgacactaccgcacgatccacccttatcgcaaagatttcaataggtgcatggggcgtgtgaacaaactaaaaaggctcggacataatgctcataagcctcttttgaagagattacaagctatcttgcccctcccaagtaagctggatatttctaggtgtgaaaaaatgatcactcggctggaggccgattttgacaaaggtaaagggaataccatctggtattggagaaggtataatcgggcaagccagcggctcatcgtattaaagcgtacatttattcatcaggccctggattttcgtgagaggctgaaaaatgtgaagcctacagtggtgtga

SEQ ID NO: 10763 - RNA, 987 nt, synthetic construct
  source 1..987: mol_type = other RNA
atgacctatcgaatgtattttgaaaggaaagtctcagggcctatcgatagccgagctaagctttgccaggccctctctatcggggacgaagagctgacacaagcattggcattgaccgaagccgagcgttacaccgaatcaagtgttcctaaggctgatggaacaacgcgcacaatctataaccctcaccacaagatcagaaaactccagaggcgaatcaatactaggttctttaatccttcgaagaaaatccacggaaatgatagcggcattatccggtggccaagttacatttttggttgtgtgcctaacgatataggcgacgacggcgaaaccgaggtacagaaggactatgtggcatgtgcaagagttcattgtccaagcaagtccattctcaagatggacattagtgacttctataacaatgtccaccgcgacttggtgttagaagtcttcaaggatatgctgggtttcacggacgatgaggtggcgtccttactgactgatatttgctgcaaaggcgattcacttgttcaggggggactgacctccagctacctggcctgcctggccctatacgacgaggagccagaggtggttcggcggctcaaacgtaaaggtttcaggtacactcggctgattgatgacataactatatcctctcccaacgaaaacgtgaactttgactacgtcaaggatttggtggtgaacatgctgcacgctaaggagctccccgtgaaccgcgacaaaacaaaggttcaatacgtatctacagagccgctgctggtacatggccttcgggtgaacttcaaagagccgagactgcccaaaggagaagctgcgagaatcagggccaatgtgcataatgtggagagactcgccaaggagagacactaccgcaccattcatccctataggcgcgattttaataagtgtatgggccgtgtcaataaacttgctcgggtcaaccccccactagccgggtga

SEQ ID NO: 10764 - RNA, 1209 nt, synthetic construct
  source 1..1209: mol_type = other RNA
atgaccaccgcactgatcaatgacaagatcaagaagagcaatagcgccctcatagggaacttcaagaatcttcttcacgcactcgagatctctgatgacgacgtcagcaagttgagggcctttctgccccatgacaggtacaaggaaaaaacaatcaagaagaaggacggatccgaccgtaaggtgtatgcccccatcccagtgctcaagaaaattcagaacagaatcaaaaaccgcatccttgctaatcaggatgttatatcttggccatcctacatcttcggttcaatcaagaaccagaaaattgagggcgggggtatcgatagtcgggactacgtgagctgtgccgccaagcactcaggcgccaagagtctgctgacagttgacattaaagacttcttcgataatgtgcacgaggacatagtggcagctgtgtttgagcgctacgtctcgacagataaagaagtgattaattggttgctcgacgtatgctgctacgagcaacacctggttcaaggagcccctacctcttcttatttggcgaacatgtccctatatgacattgaacctcagctggtccataaactggccagaaagggcctgatctatactcggctggttgatgatatttccgtatccagcaagatctatgactacaactttagctacgcattgaaactgatagaggatgccttatcagaaaaaggactctacctaaaccctgagaagataagtcaaaggtcagtggggtcagcgcctctcaccatgcatggactgagaattgactatcagactgctcggctgcccgcagctgaagtagggcagattcgagcgcacgtgaagaatctagaggatgccgccaaaagttataaatctaggacctcctatgcttaccgccaggattacgctcggtgcatgggcagagtcaacaagctggcacgagtgaagcacaaccagcatagtaaatatctcgctagattaagggctatccagccactgcccagcggcaatgaatccacatactgtctcaagaagttagaggtcctggagaaaacttatcttgaagcaaaggagacgttctcctaccgtaaaaacttttaccgcttgcaagagaaaatcaatattctgtcgcggagctttccgcgctctgcggaagatatgaaaaagcgaatgaagcttattgccccaccgcccaaagatggtaaatga

SEQ ID NO: 10765 - RNA, 1218 nt, synthetic construct
  source 1..1218: mol_type = other RNA
atgagccgaccaaccatccgcaatagtgcacccatcaatacactggaaaccctcctaaaaaccctgagtatatcttccgatcagctggaagaaatccttgcattgtctgccggtgagcggtacactaaacctctcaatgacgttcacaagaaggatggatcaatacggaaaatcaggtgtccacatcattctctgcgagtgattcagcggcgcatcagcaaaaggctgatatacgacaaggtgatctggccagagtatctgtttggcagcattagaacccgggattatgaggacttatcggagagggattacatcagctgcgcggccaagcattgcggggccaagtccttgattaagattgacgtggagaactttttcgataatgtgtcaagagaaacggtggttgggatttttaaagacctgatcagatgctccgacaaaaattccgagctgcttagtgagatttgttgctatgaggacaatctcgttcagggggctattacaagctccgcattagcgatgctcgccctgtgggacattgagggcaaggtcgtcgatagactcgctcggaagggcctagtatatactagattagtcgacgacataactatcagttctaaatcccataacttcaacttcgatcacgccctgaatatcgtgaaacaaatgttgtacgaaaaggatctgcccttcaaccaagccaagaccaagatcgaacgtctgtcctcagaagcattgacggtgcacgggctaagggtcgcttttaaggaacctagactcccgagcagcgaacctcgggtcatacgaagttacgtacagcgactcgaaaaacttgctagcgacggtttccacaggcgtacagccgattaccggaaggattacaacagatgtgtgggcaaggtggtcaaactgcacagggtgaagcacaacaagtaccggcccctgaaagaccgattggatagaatcccaccgcttccttcaaagagggaccttaaggtggttgagaagctgatctgtcgcctggagagggattataattctgagacaaaaggaattggtggaggaaagtatcaggacacttactggtacaaaaagcgttattctcgcattatgtatcgcctgtcaattgtaaaacgctcctacaagaacaaatatgacgagtatatcgagcgccttgacaaggtgaaacccgataccaaaggcctctacaacgattga

SEQ ID NO: 10766 - RNA, 1203 nt, synthetic construct
  source 1..1203: mol_type = other RNA
atgatcgacccacgctttcctctattcccagagaagaccaccgagaaaagcataagcacactccagtcactggccgacgctttcagcatccctctggccgacctggaaaaagcccgccagctgagccccatcgagcgctatcgagcgaaagaaatacccaaggccggtggaggaattaggcaagtctacaatcctagctacctgattaggctcatccagtctagggttaacaaaaggatttttctggacctggtgcgctggccgggctatttgtacgggtcattacccaatacttatatcgacgatgagcctgtgtatcgggactacattgcatgcgctaaaaatcactgcctctccaagagtctgcttaagattgacatctcgaactttttcgacaacattcacagagatcatgtttaccggatcttcaacggcctgctgaagtttcctccaccagtaagcgagtatctaacggatatatgctgttatgaggattttctcgtgcagggtgctctgacatccagttatctggcaaccctctgtttttggaattgtgaaggagatgtggtgaaacgtttgtcaagaaaaggactggtttacacaagacttgtcgatgacattaccgttagtagtcggagacatggcttcaatttcgactacgctgagcaccatatcaagatgatgcttatcgacctggacttacctgcgaacgacagaaaaaagcagatactcagggatgggattgaaccccttcacgtgcatgggcttcgggtgaattaccagactccccggcttccagccgatgaagtgcgacggatcagatcagccgtgcataatgtcgtaaagatggccaagatcaataactacagaacatcttcctcctatcgctcattgcacgaccggtgtgttggtcgggtgaacaaattggcacgcgtaggccacaacaaacacaagatctttaaggaccaactgttaggcgtgctccccctaccgtctcgaagggatgtcgagaaagccgagggcgctatttctttcctggaatccctcgatagaagccgaatcaaggagaggagatacactaggaagtaccacctcgtgcgttacagggtcagtataattgcacgtacctatgaaaaggaggcacgctctttcgaatcccgattgtacgccctgtctgattgcgtcgggtcctatgattggtga

SEQ ID NO: 10767 - RNA, 1203 nt, synthetic construct
  source 1..1203: mol_type = other RNA
atgattgacccacgatttccactgttcccggagaagacctcaaaacaagccatttcttctctggaaagtttagccgaagcactgtctgtgacagttaaggatctcgaggaagttcgctcccttgaaagcgacaagtgttataggttgaaggagatcccgaagaatggcggcggactcaggaaagtctatgacccccaccctctgattcgccgtctgcagtcaagaatcaacaaaaggatctttctcgacctgatacaatggcccggataccttttcggttccctgcccaatatcaatattgacggacagctcgtaagtcgcgattacattgcttgcgcacagaaacactgcaaagctaaatctctcttgaaggtagacgtaaataactttttcgacaacatacaccgagatcatgtcttcgacatctttcgcatgtttctgaagttttctgatgaggtgtccaattgcctcgctgacatatgctgttataacggtttccttgtgcaaggcgcgcttacgtcgagctacatagctacactctgtttttggcagaatgaagggtacgtggtgaaacggttatcccggaaaggtctgatctacacacgactggtcgatgatatcactgtgagctctaagcgccacgatttcaacttcgaatatgcagaacaccacattaaaatgatgttggtggacttggatctccctgccaataagcggaagcgtgaaatcctacgcgatggaatcgagccactgcaggtccatggcctaagggtgaactacgccagtcctaggctgccagccgatgaggtcagacgtatcagggccgccgtgaagaacgtggtccggatgtccaaaattaacaactaccggaccagcctatcatatcgagctatgcacgatcggtgtatggggcgggtaaataaattagcgagggtggggcataacaagcatggggacttcaagagagagcttgttgacgtgatccccctgcccagtgttagagacttagagaaggctgagagctccattagcttcctggagaaattggaccctgagcgcctcaaactgcggaagtacaccagaagataccatctggcaaagtacagagtgagcattgtggccaggacttattgccaggaggcagatgacctgtcgtttagactgcagaagttgtcagttttcgtcggcgattatgaactttga

SEQ ID NO: 10768 - RNA, 1197 nt, synthetic construct
  source 1..1197: mol_type = other RNA
atgaatacaatgataagctctctctatccccagaaatcaagtacaagcagcattagtaacctggagaatttggcagaatcattgagcttggataaaaacctgctcgagtattctcagaaactgacacaggaagaacgatacaagaagattaaaatacccaagtccaataactcctacagaactgtgcatgatcctatcgacatcattcgtaagattcagaatagaatcaacacccgcatattcacccaacttgtggactggccagattatctctttggtagtattccaaatgacatcattgacagcagagattatatttcatgtgcccgtaaacattgtctggccaagtctatcttcaaacttgacatttccaacttctatgataacattcatcgcgacttcgtgtacgacatcttcaacaactttttcaaattcccgacggaggtgtccgattttctcaccgatatctgttgctacgacgattacctacctcagggggccttgacaagtagctacatcgcaaccctgtgcttttggaatgtcgaaggcgatctggttaagagattccaacgaaagaatctcgtttatactaggttggtagacgacatcacggtgtcttccaaaaaacacgattacgactttgagtacgtggagaagcacattaagaacatgctcctgcactttgacttcccagtgaataattctaagaccaaaatcatgcgggatggccttgaacctctaaacgttcacgggttacgcgtaaattatccagagccgagactgcccagtgctgaggtgaacaaaattagagctgctgtgcataatgtcgtcaaaatgtcgaagatcaataactacaggacttcaaagtcctaccggaacctttacgatagggcactgggaagggttaataagctggcgcgggtcggacacaataagcactctgaactgataaataagcttaagaaggtcacccctctgcccagcaaacgggacctgaactatatcaagaacaacatccggactctcaagaaccttaatgagctggactgcaaaaaactacgccagctcaaatataagcgcaaataccatctgatcaattataggatatccatcttgaaccgaacctttcccaacaaggcctcaacattaaggaacgagttaaaactgctgaaggataagattctcgacaagcagtga

SEQ ID NO: 10769 - RNA, 1107 nt, synthetic construct
  source 1..1107: mol_type = other RNA
gtagcagagctcgaagcgatcagaggcattcctttgtctgaaaggtacagggagaagcctcttcaaaaaggccatggaaagatccgcttggtgtataacccctctttcaaaatccgtttaatccagaacctgatcaacacacgcctgtttaaagatctcatctggtggccagaatttctgtttgggtcgctgcctaattcactgcacgaagagcgactgatcgagagggactacatagcttgcgcttccgtccattgtggggctaaaagcatatataagatcgacatcagcgatttctttgactcgatacacaaagacttcgtgtatgagatattctccaagctcttctcatacccccacgaagtggccgaatacctgaccgatgtttgttgctatgaaaataagatcccccagggtggactgaccagcagttatattgctactgcatgcttctgggatcttgagggtgaggttgtgaaaaaactcagtaggaaggggttgaaatacaccaggctcgtcgacgatattacagtgagcactacggtttcaaactacgatttctcctacgtggaccgccatgtccgcgacatgctgattgctaaggacttgccagtgaacgagagtaagacactagccctgtattctggcatggcccccctgtttgtgcatggattacgggtcgattttaaacagcctcgcctgccagctaaggagatcgccaacgtcagagccagcgtgcacaatgtttgttcttgggctaaggtagacagctacagaacttccgtgacatatcgggccgcgtttgataggtgcttgggccgggtgaataagctggctagagtgggccacgaaaagcacgcagtatacgtggccaagcttcgtaaagtcgcaccgctaccctcccagtttgacattgatagtgccgaggcctcaatctctcgacttgaaaaaataagcaccgccaagctcgtgtctgtaaaatacaaacggcatttcgcactggtcaggtatcggattaccattattaagcggagattcccatccattgcggagaagttcaagttacgactcagagcccttgaggttcgcagaaatgcagcactgtga

SEQ ID NO: 10770 - RNA, 1278 nt, synthetic construct
  source 1..1278: mol_type = other RNA
atgactgtgacaccatgttatagcgccttggactatgggggggtaggccacgacattaagctgccccggatggctgtggaaatgacagacctgaggcctgagaagatcactaaatcctcaatcggtagcattagcaaattgtcagttgtcttaagtatcccagagtctgacctgtcagcaattctcaagatactgccagaaaatcggtataagaagatcacaatacccaagggggtgggcggcgaaaggatcgtctatagtgccacacccctactcaggaaaattcagcacaggatcaatacgcggatcttcaaaaagctgattaagtggccgccttacctgtacggctctttgcctaatgataaagaactggttggaggtcagacgaagaccaccgtccagcgggactatatagcctgtgcccaaaaccattgcggggccaagtctattctgaaactcgatatcgccaatttctttgagaacattcatcgtgatacagtgaaaaagatctttcgcaaattcttccactatcccgagaatgtgtcggactatctgaccgaagtgtgctgttacggcgacaccctcgtgcagggcgctcttacctccagctacctggcttctttgtgcatgtgggatactgagtacaaagtgatacagaagcttagccgccgtaatctagtgtacaccagactggtcgacgatattacaatttcctctaagcacaggggatatgacttcagaaatgcagagtcacatgttagagccatgatgctcaaaaaggattttcctctgaacctgtccaaaaccaaaattatgcgagcgggatccagcccattgctggtccatggattgatagtaaactttcgcacccccaggctgccttcttcagagatcagccgcatcaaggctagtgtaaacaatctagtgaaggcaagtgccactgataactaccgaacaacttactcttttcgtgcacaatacttcaggtgcttaggtcgagtcaatagactggcgcgcgtgaaccacaacaagcacgaatacctcattaacaagcttaaaaagatccggccaaagccgtgtaaaaccgatatcgagagagttgagaacgctatcgaccggctcaagtccctcaaagataagacgactgactcgtaccgcaggatttacaacatcgcaagatatcggatcgggatagttagtcgaagctttgacagaaaatccatgattttactttccgaactgaaaaagcttgagaagcccgtgagcaaaatcgattga

SEQ ID NO: 10771 - RNA, 1230 nt, synthetic construct
  source 1..1230: mol_type = other RNA
atgatccacacttatttttccggcgctgcaatgttgccgggtaaaggagttcagaaaattgcgaggcattcgattggcagcgtgagatcactctgccgcacgctgagcatagaggagtccgaactggacgaattactgacttggccagcagacgcaagatttaaaaagaagaagatcgagaagagctctggtgggcaccgtacggtgttcgttcctaattggaaatttagacgcatccagaggaagattaataagcgaatcctgggaaacaccaagataatccgctggcccaaatatatatttggctccgtgccctccagtagcgcggatgcagaagaggttgtcggacgtgattacatcgcttgtgccgctgtccacgcagggtcaaaaagtatcctgaaggttgacatcagtgatttctttgataacgtggaacacgacgtagtctccgatgtgttcgagaagttcctgaaatatcccccagaggtagttgaagctctctgtaacgtgtgttgccttaaaggccggcttccccaaggcgctccaacctcatcttacctagctaaccttgcattctgggacgtggaacacaggctcgtgcgtcgtttgcatcaaaaaggcttgagatacacacggtatgtcgatgatattaccatttcctctagaaaacacgcccaggactttagcctggccctgcgactggtagacggtatgctcattgataagaacctttcccgcaatgagaaaaaaactctcaccctgcggtctggaatcaacccattagtggtgcatggcctagccgtcgaacatagcgtcccccggatgcctgcccaggaatacaagcggattagggcgtctgtgcgggccttggaaaatttcgtgacagaccctggattcaggacttacaacgcttatagaaggatgtttaacacatgccaggggcgcgtcaataaactgtctcggctcaagcgcgttgcccacgccagttacgtgaataggctgaggaggattcgccctctgccttcgcaccgagacttagcctggtgcaagaaggtggccgagcgactccttgcacggttcaaggtaccgggggctaccgatgggtatttctttaagagagacttgttcagactacgcgagaggctgaatctgctgagaagaacatacctccatgaggccgccgagcttaagaatcggatctcacacatacgaatctttagccatgagtga

SEQ ID NO: 10772 - RNA, 1200 nt, synthetic construct
  source 1..1200: mol_type = other RNA
atgtcgctcaagagccacgtcacgaaggtcagtcgacatagcattggatccgtgagaagcctgtgcaggaccctgagcatcgatgagccagaattacaagcacttttgtcctgggtgcctgagtcaaggtttaagaagaaggccgtgacaaagtcatcaggtggaagtcgtacagtgtacgtgccgcattggcgttaccgcaagatcctgcggaagatcaacaaaagaatcctgggaaataccaaaatcatacggtggcccgactacgtttttggctctgtccccagttccgatgctgatgacgcgcggctgattggcagagactacatcgcatgtgccgccgtccacagctcttccaagagcatactcaaagttgatatttgcgacttctttgacaatgtagaacagccactggtccgcaacatctatactgacttcctcaaatatcccccagctgtggccgaaacactttgtaatctgtgctgtatacatggcaaaatacctcaaggggctcctacatcatcttatcttgctaacctggtgttctgggatctggaggctaatctggtggccaggctaaagcagaaaggcctcacctacacccgctacgttgatgacatcacaatttcgagtcgtaaatacagccaggacttttcactcgcactgaaactggttgaccagatgctgatggataaagacctcacccggtctgaggtgaaaactcaggtactcaggtctgggaccaaacccctgctcgtacactccctgagagtggaacacgccactcctagaattccaagtccagaatatagaaggatcagatccgccgtgcgcacgctggagaattttgcagcagatgccgggttccggacttatgatgcctaccggcgaatgtttaacgtctgtttgggtcgggtcaacaagcttagcaggttgcgcaagaagtcccatactgcttacatcacccgcctcaatcgagtggggccgctaccttctcatagggatttacgatggtgccaaaggaccgcgagggaggtgcttaagagattcgcgattcccggcgagtctgagcgctttttcttccggaggaaacttttccgcttacgtgaacggctgaacctattgcagagaacatatgttcacgaagcatccgccatccgagacagcttggctcagattaagatttattcacacgagtga

SEQ ID NO: 10773 - RNA, 1167 nt, synthetic construct
  source 1..1167: mol_type = other RNA
atgactaaactcatcgaggatttcaccaagcgagttgctgggtcaatctcttcgattccaacactggctaatgccctcgatatcaatcttagcgaaatagagaacttgctgaataccccagccgatcagaggtacaaggaaaaattcatcgaaaagaagcatggcggtgtccggaaagtttacaaccccagcgccctggtccggaaaatccaacagagaattattaatcgcatcttcaagccactggtagactggcctttttttgtgtacggatcaatccctaagagcaacggccagccggcaaaagactatgttgcggcagccaatgtccacgctggcgctggatctctgcttaagatggatattaaggacttctttgacaatatccaacgcgaggtggtctttgacgtgtttttcgacttctttaagtacccgtatcccgtgagtgagattctaacagacatctgttgtcgcgatgataggctgtgtcaaggcgcgttgacgagttcatacctcgccgcattatgcatttttgacgtggaggcaaagatggttaaaagaattgagaagaaaggggtcacttatactagatatgtcgatgatatcaccatcagttccaagaacaggtcctacgatttttcctacgtggagaaggttgtggaggaggtgctgatgagcaaagacctgcccgtaaataaaggcaagacctcagttataaacctgactagtaagcctctcctggtgcacggtttacgggtgaacaccagcaatgccagactgcccattgcagaagtaaaacgaataagggccgctgtgcagcaccttgaagtggcctccagggagcccaactatatcacactgccaacctatcgtgaagaattcaacaaatgcatgggacgcgtcaataaactcgctcgcgtagggcatattcagcattccgctctggtgaatagacttaagagaattcggcctaagtctacgcgctctgacctatacgtggccattcagatgttgaaaatcatacggcgtacatctcagcaacggagacagcactatttcttcaaaaaacagtgcgcccaggccaagactctcttgacattgatcaagaagaacaacaaatacagccgaagggcagcgatactcctgaactacttaaggaagatctga

SEQ ID NO: 10774 - RNA, 1188 nt, synthetic construct
  source 1..1188: mol_type = other RNA
atgctaacagaccttcccatcaaccgcagttcatcaggaataagcactcttatttccctgagcaagacgcttggatttagcctcgaggagttggaagacatccgaaatatccctctcgataaacgttacttcaaactcgagaaaccaaagatcgatggcactaagagagttgtctaccgggtgcatcacaaactcaaaaggctgcaaagacgaattaattcacgcattttccgggagctcgtgatctggcctgagtttctgttcgggtccatccctaatgacaatgatgaagtgtcgctgaaacgggattatatttcctgcgctagtagacattgttcagcaaagagcatactgaagatcgacataaagaactttttcgacaatatccacagagacttagtctctgacatattctctgacttcttcagaattaagagcgaagctaacgagtacatcgtcgacatttgctgtttagaaaacttcatcgtgcagggcgcgctgactagtagttatatcgcctctttatgcctgcatgatcttgaaaccaatgtgtaccgcagggccaagcgcaaaggacttatctatacgaggctggttgacgatattacagtgtccaccaaggtaaacgatttcgactttacccagataaagaaacacatcgagacaatgctcgccgagaaggatttgcctattaactatgagaaatccggtgtttttcagattagcacaaaaccactgctggtgcacggcctgcgtgtcgactattccaaaccgaggctgcccagcgatgaggtaaagaagatccgcgcatcactgcataatctcattgggaatgcagtaaagaacaataataagaccactatcgcttatcggacagagtataatcgctgtatgggcagaatttccaaactggggaggctaggccacgaaaaacacaaggttttcatgggaaagattaaatgtatcagacccatgccatcctacctcgatgtgaaaaattgcaagaaaaagctgaaggggttggaatctctatactcgaggggttttaaccgttctaacaaatactctcgggaatttaacgtggtcagccattacatcaccttgatcaagaggagtaactcttttatgaagattgccaacgagtttcgggagcgattgaacaagataaagcccaacgtggaaaaatga

SEQ ID NO: 10775 - RNA, 1191 nt, synthetic construct
  source 1..1191: mol_type = other RNA
atgtccaatgacctccccagtaacaagtctaacagcggaatttctacactcacgagcctctctaaagcattggggtttagtatcgacgagttagtggaaattagatctattcctcttgataggcgctaccataagctggaaaaacccaaaagtgatggaagcatgcgcatcgtgtatcgcccacaccacaagctgaagcgcttgcagagacgtatcaataacagaatttttcgggagctggttatctggcccaattttctgtttggcagcgtgccaaacgacaatgatggggaggattctctgaatcgggactacatcacttgcgccaatcagcattgtggggccaaaaccctactgaaggtagacataaagaacttcttcgacaatattcacaaggagctggtcagtgacatcttctccgatttcttctatatcaacgccgaggccaacgattacataaccgatatatgttgcgctggcgaattcatcgtgcaaggcgccttaacgtcctcctacattgcttcgctgtgcttgcacgatgtcgaaactaccgtctatcgcagagctaagaggaagggccttgtttatactaggctggtggatgatatcacagtatcgagcaaggtttatgactacgacttctcacagattaagaaacatatagaggatatgctagcagagaaagaccttccgataaacatcgttaaaagcggcgtgtttcaggtttctaccaagcctttgttagtccacgggctgcgcgtcgatcataataagcccaggctcccttcatacgaggtgcggaaaatccgggcgtcactgaacaatcttatcggtaactccatcaaaaacaataacaagacatccctggcctatagagtggagtacaaccgatgtatgggaagaataaataagctcgggcgactgggccacgaaaaacatgctgtgttcatgggtcgtattaaaaaggtaaggccaatgccaagtttccaggacgtgcgtgaatgcaagaagaaaattaaatggcttgagattcagtacagcaaaggatttaacaagagcgacaagtattttcgggtctttcaaatcactggtcacgtcatttccctcatcaatcggtcagacgcgttctcaaccattgcaaaggaactcaggacacgactgaataaggtgaaacctgacgtggaaaaatga

SEQ ID NO: 10776 - RNA, 1191 nt, synthetic construct
  source 1..1191: mol_type = other RNA
atgccaagcgatattccaatcaataaatccaactccggtattagcacactcaacgccttgtctaagacattggggttctcactactggaactcgacgagattaggaatatcccgttggataagcgatatgtgaaactggaaaagccaaaggccgacggaagtgtgcgggtagtttaccggccccatcacaaacttaaaaggctgcagcgcaggataaattctcgcatctttcgcgagctcgtggtgtggcctgattttttattcggctcagtgcctaatgacaatgatgaggagcagtcattaaagagagactatatcacttgtgctgggcaacactgctccgcaaagagcatcctgaaaatcgacataaggaattttttcgacaacattcaccgcgacctagtttctaacattttcaacgatttcctgtgcattaagtcggaggccaatgagtatatagtggatatctgttgcgcgggcgacttcatcgtgcagggagctctgacatcgtcatatattgcaagtctgtgtctgcatgatgtcgaaaccaaagtgtgccggagagcccgtcggaaaggtcttacttacacccgtctcgtcgacgacatcaccgtgtcttccaaggtctatgatttcgacttcagtcaaatccgaaaacacattgaggatatgctggccgaaaaagacctccccattaattccgataaatcaggggttcaccagatcagtaccaagcccctccttgttcatggcctgagaatagatcacagcaaaccaaggctgcctagcgacgaggtcaaaagaattcgagcttctcttcataacctcatcaataactctagcaagaacaataacaagacgtccctagcataccgggtggagtacaataggtgtatgggcaggataaacaagttgggacgactgggtcacgaaaagcacactgtctttatgggcaagatcagaaaagtgcgccctatgccgagctatcgggacgtacgcgaatgcaagaagaaattaaagagagtcgagtacctttactcaaagggactcaacaagagcgagaagtactttcggaactttcagctggttgggcataacatctccttgattaatagatccagcagtttttctgtcctggctaaggaattccgtgtaaggctgaacaaggtgaaacccgatgtggaaaaatga

SEQ ID NO: 10777 - RNA, 1191 nt, synthetic construct
  source 1..1191: mol_type = other RNA
atgagtagcgaactgcccattaaaaaaagcaattcagggatcagtaccttagattctctatcaaaaaccctgggatttagcttggaagagctcgaagagatccggtccattcccttggagaaacggtattttaaactggagaagccaaagacagacggtacaatgcggacagtttacagaccgcaccataagctgaagcgattgcaaagacgcataaataaacgcatctttagagaactggttatttggccagattttctcttcggcagcgtccccaatgacaacgacgatgaagacagtatcaaaagagactacatcacttgtgccagccttcactgcagcgcgaaatccatcctcaagattgacattaagaacttcttcgacaacattcacaaggaccttgtaggtgatattttcgaagggtttctgtgcataaagtcagaggctaaagagtacatgattgatgtgtgttgcgccggagaattcatcgtgcagggcgccctgacctcctcttacattgcttccctgtgtctgtatgacgttgagactcaagtctacaggcgcgcaaagcgcaagggcctgacatacactaggctcgtggatgatatcactgtgtcctcaaagatctatgatttcgacttcacgcagattaggaagcatatagaggacatgctggcagaaaaggacctgccaatcaatttcgacaagtctggggtgtttcagatttctaccaagcctctcttggtgcacggtcttcgaatagatcataataagcctagactgccatctaatgaggtgcggcgaattcgtgctagcctacataacctcatcaacaacgccacgaaaaacaattcgaaaaccagcctcccgtatcgcatcgaatataacagatgtatgggacgcataaataagttaggccggctagggcacgaaaaacacgccgtctttatggagaagatcaaaagggtcagacctatgccttccttctccgatgtaaaggagtgcaaaaagaaacttaagaagttggaggagctccacgcaaaaggatttaataaaagtgagcgttaccttaggaactttcagttagtgggccattccatctcgctgatcaaacggtctgattcattcagtatcctggctaaggagctgcgtatgaggctgaacaggataaagcccaacgtcgaaaagtga

SEQ ID NO: 10778 - RNA, 1191 nt, synthetic construct
  source 1..1191: mol_type = other RNA
atgagccccgatctgccgaccaaaaagagttcctcagggtttagtaccctgacttccctgagtaaaactctgggcttttccctggaggagctgaatgagattcgtgacatctcaatcgataaaaggtatgtgaagttagagaaaccaaagacagacgggtccatgcgaatcgtctatcggccccatcacaagctaaaaaggctgcagagacgcattaacaagaggatcttccgtgaacttatcgtgtggccaagctttctgttcggaagcgttcctaatgacaacgatgaggaggacgctctcaagagggattatattacgtgtgcttcacagcattgttcggcaaagtctatcctcaaaatcgacattaagaacttctttgacaacatacatcgagacttggttggagacatcttcgagaatttcctgtgtattaaatcagaagccaaggaatatatggtagatgtttgctgcgcaggcgactttatagtgcaaggcgctctgacaagctcttatattgcctccttatgcttgtacgatgtggagactacagtgtatagaagggctaagcggaaagggctcacctacacaagattggtcgacgatatcactgtttctagcaaagtgtacgattttgatttcacgcagataaggaaacatattgaagacatgctggccggaaaagatcttcctcttaaccacgacaagagcggtgtctttaagattagtactaagcccttactagtgcacggtttgagaatagaccatgataagccacgcatcccttccgacgaagtgaaacgtattcgcgcctctctgtacaacctgacatccaactcgaaaaagaataataacaagacctcagcggcataccgagtagaatacaatagatgcatgggacggatcaacaagctcggccgactcaaacacgagaagcacgtcattttcatggagaaaataaaacgcatccgcccaatgcccagttttcgggatgtaaaggagtgtaaaaaacggatcttgtggcttgaaaagctgtatagcaagggcctcaacaagaccgagcggtacttccgcgtgtaccaggtgaccgggcacaacatttctctcatcaataggagcgcctccttctctgacatcgccaaggaacaccggttcagacttaataaggtcaagcctaatgtggaaagatga

SEQ ID NO: 10779 - RNA, 1194 nt, synthetic construct
  source 1..1194: mol_type = other RNA
atgcttagtgaccttcccaggaataaatctatttctggaatttccaccctcctgagtctggccagagctctgggtctgcctcgcgaatacctcgaggaaattaaaaatatgcctctggagacaagatatagcaagttggagaaaccaaagatcgacggcagcatgagagtggtgtataggccacaccacaagctgaaaaagctccagcggcgaatcaataaccgtatattccgggaactgatcatctggccagaattcctttttgggagtatccctaatgacaacgactcagacgatgacgccctaaaaagggactacatcacctgtgctggccagcattgctccgcgaaaagcatcctgaagatggatatcaagaacttcttcgacaatatacaccgagatctggttgatgatatttttgagaactttctccacatctcactggaggcaaaagaatacttagtcgacttctgctgtagcggcgattttatcgtccaaggcgctcttacttcctcctacattgcctccttatgcctctacgatatagagactaaagtctaccgtagagcaaagagaaaggggttggtgtatactagatttgtggatgacataaccgtttcctcagagatctataacttcgacttttcacagattcgaaaacatatcgaggacatgcttgccgacaaggacctccctattaatctggagaagacaggtgtctatcaggtatctacaaagcccttgctggtgcatggactaaggattgatcattctacaccccggctgccaagttatgaagtccggaacattcgcgcatccctacacaatctcatgaagaattcgacgaagaacaacaataaaaccagtttggcctatagggttgagtacaaccgctgcatggggaagattaataaactgggacgcttagggcacgagaagcacgacgtgttcatgaaaaaaatcaagaagattcgccccatgccctcttacaaggatgtgaaacattgtaaggagatgctgaaaaagcttgaagatctctacgaaaagggctttaacaaaagcaacaagtattaccgtgaataccaaatagtaggacacaacatcagcctgatcaaaaggtctaattcattcttggtggtgagcgaagatctgcggaagcggcataacaagattaaaccgaatttcgagaagtga

SEQ ID NO: 10780 - RNA, 1188 nt, synthetic construct
  source 1..1188: mol_type = other RNA
atgagctcagataggccaataaaaacaactgccagtgccattcctagcctgaagaaactgagccagaccctggggttcagtatcgaagagcttgaagagattcgggccatccccctggagaaaaggtatgttaagctggaaaaacccaagattgacggcaccatgaggaccgtgtacaggccacatttcaagctgaagcgcttgcagcggcgtattaactctcggatttttagacctttggtcatctggcccgtttacctgtatggctctgttccatgtgacaatgacgatgaatcaatcaaacgcgactacatcacgtgcgcaagtcagcattgcgccgcaaagacaatcctcaagattgacatcaaaaacttcttcgataacatccaccaggacatcgtccgcgatgtgtttgacaaagtgctcaatattaaggacgatgctttagactacattgtggacgtatgttgtgcaggagactttattgtgcaaggggcgctgacatcctcctacattgcttctctttgtctacatgatgtggaggctgatatttacgctcgcgctaagagaaagaaactcgtgtacactaggctggttgatgacatcaccgtgtcctcaaagatccacgatttcgacttttcccaaatccgcaaacacatcgaagacatgctagccaaaaaagacctgcccataaatgtggaaaagtctggcgtctttatcacaagtacgaagccgcttgtcgtgcatggactgagaatcgaccactctaaacctaggttaccttcagatgaggtcaagaagataagagcgtcattgcacaatcttatcgccaacgcatcgaagaacaacaataaaacttccttggcctatcgaatcgagttcaatagatgcatgggcaggataaacaaacttggtcgggtcggtcacgagaagcacctggtgttcatgagcaagataaaattgatacgaccgatgccatcctataaggatattgtagattgcaagggaaaactagtaaaactcgagaagctgcatgccaaagggtataataccagcgatatctactttcggagatatcagctggtcagtcacctgttaagcctcattaatcgctctagctccttccatgaggttgtgaaggatctcagaaagcgtctcaaccgaattaagcccaacgtgcagcggtga

SEQ ID NO: 10781 - RNA, 1188 nt, synthetic construct
  source 1..1188: mol_type = other RNA
atgcccagtgatatagctatcaataagtctgactcaggcatttcaacactgcagtcgttggccaagacgctgggtttttccctgcaggagctgcaggagatccaatccattcctctcgacaaacgctatcagaagctggaaaagcccaaagtggacgggaccaaaaggatcgtttacaaacctcatcacaaacttaagcgcctgcagagaagaatcaattcccgtatctttcgggagttggtggtatggccagatttcctctacggaagcattcctggcgataatgacgaagatgacctaataaagagagactacgtcaattgcgccagccagcattgtgctgcaaaaagtatactgaaggtggacataaagaacttctttgacaatatccacaaggacctcgtgcggtctatttttgagaatttcctccacattaacagtgatgctctcgattatcttgtggatgtgtgttgcatgggggatttcattgttcaaggagcacttacctcatcttatatagcctccttgtgtctatacgatgtggagactaaagttgtgcgacgagcccggagaaagaagctagtttacactaggttggtggatgatatcacagttagctccaaaatctacgacttcgacttcagccagatcaagaagcatattgaagatatgctggcggacaaggacttaccactgaatcaggagaagaccggtgtcttccaaaccagcacaaagcccctgacggtccacggccttagggtggaccacagtaaaccccgcctcccttcggacgaagtaaaaaaaatcaggagctctttacacaaccttgtcatcaacagcaaaaaaaacaacaacaagactacagctgcgtaccgtgtggagtataatcggtgcatgggcaaaattaataagctcgggagagtaggccacgagaaacacgagcaatttatgttgaaaatcaagtccatccgcccaatgccgagcaagcgagatatcatagaatgcaacaagaagattaccactctggagaaactgttcaaggccggactgtcctctcatgaaagttacaaacgcaagttttatctggtgtcacatcagatttcaatcgtcaaaaggtctaatgcatataagaacattgccgacgaactgcgggagaggttatccaaggtcaaaattaacgaaaactga

SEQ ID NO: 10782 - RNA, 1191 nt, synthetic construct
  source 1..1191: mol_type = other RNA
atgaccacggacgtgcccattaaaaaatcgtcaagcggtatcagcagtctggagagcttgtccaagacattagggatttctttgctcgagttgagcgagatacgcggcatccctactaataaacggtatgagaaaattctggtgcccaaagctgacggatctcaacgcatagtctataagccacattacaagatcaagaaaatccagcgtagaattaacagcaggatttttagggaattggtcatctggccagatttcttatttggatccattccaaacgataacgacactgaggaatctattaaacgggactatgtttcctgttcaagcctgcactgcggcgctaagtctatcctgaagattgatatcaagaacttcttcgacaacattcacaaggatctggtgagtgacatcttttgcaactttttctgtatcaagggcgacgccttaaactttctggtcgatatttgcgtaaaagacgactttattgtacagggagcactgacctcctcttacatagcctctctttgtcttcacgacgtggagagtaaaatcgtgcgaagagcacgcaggaagaatctggtttacacacggctcgtcgatgacatagttatcagctccaaggtcttcgattttgacttcagtcagatccgaaagcatgtggaggacatgctcgcagacaaagatctgcccctcaaccatgaaaaatccggcatcttctacaattcgactaagccactcacagttcatgggctgcgagtggaccatcacaaacctagactgccgagtgatgaggtgaagagaatcagggcctctgtgcacaatctagttaccctatcccggaaaaacaatgcgaggacgagtctcgctttccggaaagaatacaaccgttgtatgggtcgcataaataagcttaccagagtaaagcacgagaaggacaaggtcttcaagaaaatggtggaattcatttaccctatgccttcatacggcgatatcatatcatgcaaaaaggatatcagctcacttgaaacctcatttaaaaatgggttcaacaagacagaatggtattaccgtaagtataatctcgtgtcctataagatctccatcattaaaaggtctagcgcctttattaatctggccgatgaactgcgcgatcggataaagaaggtgaaacccaatgaggatagatga

SEQ ID NO: 10783 - RNA, 1188 nt, synthetic construct
  source 1..1188: mol_type = other RNA
atgtcatcggaccttcccaaaaatacttcctccaaggggattagcagcctgagtctgctttcaaaaaccttaggaatagctgtggaagaactgcgagagattagagctatccccctggacaaaagatacgagaagattctcgttccaaaatccgacgggacaaaccgtatcgtatacaagccacattacaagatcaagaaggtccaaagaaaaatcaattctcggatcttccgcaagctcgttgtctggccagattttttgtttgggagcgtgcctaatgacaatgatgacgaggactccatcaaaagggactatgtgacctgtgcctcactccattgcggtgcaaaatcaattctgaagattgatatccggaacttctttgataacatacacagggagctagtttccgatattttcagcaccttttttaagtgcaagtctacggccttggactatctcgtcgacttttgcacaaagggcgatttcattgtgcagggcgctcttacttcttcatatattgcctcgctgtgtctgtatgataaggagacgcacgtggtccgtagggcaaggcgaaagggcctgacatacacccgcctggttgacgatataacaatctctagcaccgtgtttgatttcgacttcaaccagattcggaaacatgtggaggacatgctggcagataaggatttacccttgaattacgagaaatctggagtgttccataacagtactacaccactcatggtgcacggtctgcggatagatcatttgactccgcgactcccctctgacgaagttaaaagaattagggcttccctaaacaacctgattaatctgagcgagaagaacaactctcgtaccagtcttgcattcagaaaagaatacaatcgctgtttaggaagagtgaacaagcttggccgcgtggggcacgaaaagcaccctatctttctgaagaagatcaaggtcatctaccctatgccttcatataaggatgtcatctcctgcaaaaaagccattgcgagtctcgaaaccagttacgtaaatggctttagcgacaaagactggtattcccgcaagttcaatctggcgagccacaaaataagcatcatcaatcggagtctcgccttccagttgatcgccaaacagctacgggtaaggctgaacaaagtgaagccggacgaagagtga

SEQ ID NO: 10784 - RNA, 1221 nt, synthetic construct
  source 1..1221: mol_type = other RNA
atgggccggccctatgtcaccctcttcggcgaaattatggacaagttcaagccatattctaagtccaaagctcctatctcaacactccaaaagttggcccaaactctgtctattagcatcgatgaacttaacgaaattagtgcattaccagaggatgaaaagtacgagcggaaggagctgcctaaagccgatgggtctaaaagagtcgtttacagcctgcatccaaagatgcgcttactgcagagcaggattaacaagcggattttcaaagagctggtcatcttcccgccttttctatttggctccgtgcctggcaagaatgacggcgccaatagtaatattaagcgcgattatgtctcctgcgccaaagcccattgcggtgccaaaaccgttcttaaagttgacataagcaacttcttcgataatatacacaaggaccttgtgagagacgtgtttaataatgtcttgaacatcagggacgaagcgttggaatatgtgacaaacctatgttgtaaaggggacttcgtggtccagggcgccctgacatcatcttacattgccacactgtgtctctacgagcaggagggaaacgtttaccagcgggcaatccgaaagaacctggtctacactaggctcgtagatgacatcacggtgtcctcaaaaatcaatggttacgatttcacccagatcctgagccatatcgagaatatgttgtcaactcacgaccttccagtgaacaaacgcaagacaaaaatattccactgtagtagtgagcccattaaaatacacgggctcagggtggattacaactctccccgactcccttcagatgaggtaaaaaggatccgggctagcctccataacctgaagaaattagcggtgaagaacaatactaagacgtccatggcttatagaaaagagtttaaccgttgcatgggacgcatcaataaactggggagagtaggacacgacaaatacgagctgtttaaggaacagttgctggcaattaagccgatgccatccccccgagatatcactatagttgaatcggctgtgacctccctggaaatcagctgctctaaaggaaatgggaataagcactggtataagcgtaagtataaccttaccctgtacaagctgatcattctcacccgcagtaaggcatttgacggtattgtggacacctttaaggagagactaaagaaggtgaaacccgcttga

SEQ ID NO: 10785 - RNA, 1185 nt, synthetic construct
  source 1..1185: mol_type = other RNA
atggacaagtttaagccctttagtaagtctaacgctcccatttctacattactaaaacttagccagaccttgtccatctctgttgacgagctgcgcgagatagaagcattaccagatgacgagaaatatacacgcaaagacctcccaaaggcagatggatcaaatcgggtcgtgtacagcctgcatcccaagatgcgtctggtccagtcaagaattaacaagcgcatattcaaggagctgctggtttttcctcctttcctgttcgggagtgttccatccaaaaatgatggtgtggattccaatgtcaagagagactacgtgtcgtgcgccaaagcgcactgtggggctaagacggtactgaaagtggacatcagtaacttcttcgataatatccacaaggacctagtgcgagacgtgtttagcaatgtgatcaacattcaagacgaagcccttgattatgtaaccaagatctgctgtaaaggcgacttcgtagtgcagggcgcactgacttcatcgtatatagccaccctctgcctttacgaacaggaaggagttatttaccaaagggcattacggaagaatctggtgtacactaggctggtagatgacataacggtgagctcaaagattaacaactacgactttacccagattcttggccacattgaggatatgctggccgagcacgacctgcccatcaacaaaagaaaaaccaaaatcctccactgtagctccgaaccaatcaaaattcacgggctgcgggtcgattataagtctccgagacttccgtcagatgaggtcaagaggatccgcgcctccctgcataacctcaaaaagctcgccgtgaagaataacaccaagacaagcgtggcttatcgtaaggaattcaaccgatgcatgggtcggatcaataagttgggccgggtgggccatgaaaaatacaaagtcttcaaggagcagttgctggagatcaagcctatgccctccctgcgcgatagtaaaataattgatgccgcgatcaatagcctggagttgtcctattctaaaggaaactctaataagcattggtacaaaaggaagcatgacctcacactctataagcttatcattctcacaagaagccagagttttgacaagactgtttctttgtttcgagctaggctaaaaaaagtctcccctacttga

SEQ ID NO: 10786 - RNA, 1185 nt, synthetic construct
  source 1..1185: mol_type = other RNA
atggacaagtttaaaccttacagcaaatctaatgcgcccattacaaccctcgagaagttgtctaaagccctcagtatcagcgtggaggaacttaaagctatcgcagaattaagcctggatgaaaagtacacactcaaagagatccctaaaatcgatgggtcgaaacggattgtatactcactgcatccaaagatgagactgttgcagtcccgaattaataaacggattttcaaggagttggtcgttttcccaagcttcctgttcggatcagtgcctagtaaaaacgacgtgcttaactctaatgtcaaaagggattacgtgtcctgtgccaaggctcactgtggagcgaagacggtactgaaagtagacatcagcaacttctttgacaacattcaccgtgatctcgtgaggagtgtgttcgaggaaatcctgcatatcaaggacgaagcccttgagtatctagtggacatctgtaccaaggatgacttcgttgtgcagggggctctgacttctagctatatagcaacactctgcttatttgccgtcgagggcgacgtcgttagacgcgctcagcgtaagggcctggtgtacacacgcctggtagatgatataactgtcagctccaagatctcaaactacgattttagccaaatgcagtcgcacatagagcggatgctgtccgaacatgacctgcccatcaataagcataagaccaaaattttccactgcagttcagagcccatcaaagtgcacggcttgagggtggattatgattcccctcgcctaccgtcagatgaggttaagagaattcgcgcatccatccacaatttgaaactgctggctgccaagaacaacactaaaacgagtgtggcctatcgaaaggaattcaataggtgcatgggtcgggtcaataagcttggaagagtggggcatgaaaaatacgagtcctttaagaaacagctgcaagccatcaagccaatgcccagtaagagggacgttgccgtcattgacgcagctataaagtctctcgaactttcatattccaagggtaatcagaacaaacactggtataaacgaaagtacgacctaacccgctataaaatgattattctgaccagatccgaaagctttaaggagaagctggagtgctttaagtctcggttagcatctctcaagcccctctga

SEQ ID NO: 10787 - RNA, 1194 nt, synthetic construct
  source 1..1194: mol_type = other RNA
atgttcaaaccctccttgaagaacacaaatcagggctacatcagtagtttagagtcactcagccggaccctgagcataccgatcgacaaactgattgaaatatccaatatccctgtggatgataagtaccttttgaaagaaattcccaaggcagatggttctactaggcatgtatataagttgcacccagacctcagactcctgcagtccaggattaattcccgaattttcagagagctgatcgtgtggcccgactttctcttcggctcgattccaaatgataatgacccttcttctgaagacgtgaagagagattatatcagctgtgccggccttcattgccaagccaaaacgattctgaaggttgatatcaaggactttttcgataacatccacgaagacctagtgaaagacattttttctaacgtccttaacatcaaagacaaatccctcgaatacctaacacaggcctgttgccggaatggatttatcgtgcagggcgcactgacaagctcttacatagcatccctttgtctcttcgacatggaagggaagatcgtgagtcgagcgcggaagaagaatctagtatacaccaggttagtggatgacatcactgtgagctccaaaatcagcaattatgacttctcacagattcgtcagcatattgagtcgatgctggccgaaaaggatcttcccatcaacaacaaaaagaccaaggtgttttatagctccacccaaccactgtacgtgcacgggctgatagtcgattattcaaaaccacgactgccgtcagatgaagttagaaagataagggcttctctgaacaatattagcaagctggccgtgaaaaacaatagtcgtaccagtgttgcgtacaggaaggagtataataggtgcttcgggaagattggcaagctgaaaagagtcggacacaacaagtacgaggtctttctgggaaagatcaaaaagataaagcccatgccttctttacgggacgtcaagatggcaaaagccacagtaaaaagcctggaggtttcacacgctaaaggtaacaacaacaaatactggttcaagcgcaagtacgatctcgctcgctataagatcgtgattttgaaccgcactaaagagttcgagttgctggtcgctgagctccgggagcgcatgaaaaatgttaaacctaactttgagcgctga

SEQ ID NO: 10788 - RNA, 1215 nt, synthetic construct
  source 1..1215: mol_type = other RNA
atgctgaataatgagaattattgtccccacaccccatacagcatcgccaaaaagcggatcacgtctctgaaaatactgagcgacactctttccattagcgagagtgaactcattcggatcaatagcttgtccgaccatgaaaagtacaccgagcttaaagtgcccaagattgatggcaccgacaggatcgtctactccttaaactcagacctgagaaaggtgcagtatcgaatcaacaaacgcatatttcgtgagctcattaaatggccgaatcatctatttgggtcggtgcccagtaacaacgactccaataaggaccaaattaagcgggattacgtcgcatgcgcatcgttacattgcggcgcgaagagtattctgaagatcgacatcaacaacttcttcgataatatccacaaggatattgtgaccgacatcttctcaaacgtcttgaagattgaaggatacgccctagaaattataacagacctgtgttgtaaaggaaacttcatcgtccagggtgctctaacctcaagttacatcgctagcctgtgtctccatgacttagaggccgatattatcaaacgtgcagagagaaaaaatctggtttatactcgcctggtggatgatatcaccgtgtccagcaaactttccaatttcgatttctcccagattaaaagccacatagaaaacatgctggccaataaggatctgcctgtgaataaaaacaagtccaagattctcaaggaatcaatacagcccctcgtagtacacggactccgagttgactttgagcagcctcgcatacctagtgacgaggtgaaaaagattagagcttctcttcataacctctgcaatttggcgaaaaagaataacatgaggacgtcctctacatataggaaagaatataatcggtgcctgggccgaatcaatcgcctcgggagactgaatcacaacaagcactctagctttataaagatcatcgagaagatcaaaccactgccttcatggcgcgatgtccaaaaaacaaaggccgcccttaactcattgaaggctagctattctaaggggaacaacaacaagtcttggtatatcaggaaataccacttgacttactacagaacatctattctgaacaggagtactgagtttcacgatatggttatttacctgcgggaaaagctgaaaaagatcaagccaaaagacaaaaggggttga

SEQ ID NO: 10789 - RNA, 1188 nt, synthetic construct
  source 1..1188: mol_type = other RNA
atgacgagcaataagccaataagcaagagtaaaaagccaatcctaaacttggacgtcttgagcgcaaccttgtcaatagataaggtggaactcttaagagtggactcacttccgtctgatgagaagtataaacaaatcactctggccaaaatcgacggctctaagcgaatcgtctacagtctcagcgccgatctgaggaaaatacagtcaagaatcaataagcgcatctttcgtgagctaataatttggcctgattacctgtttggttccgtccccaacgaaaatgataatgacgactctattagaagagactacgtggcttgcgcagagcttcattgtggggcaaagtccattctgaaggttgacatcaaagattttttcgaccatattcacagggatctcgtcaagcagatcttcgagaacgttctgaatatccacaacgatgccttggaactgatcacaaacctctgctgtaaagatgacttcattgtccagggcgccctgactagctcctatattgcaaccttgtgtcttttcgaccaagaacatgagattgttaccaggacgaggcgcaatggactggtgtataccaggttggtggatgacattactgtaagcagtaaactgagtaactttgactttagtcacatccagatgcatatagacaatatgttagcttccaaagatcttcctatcaacaagtctaaatccaaagttaccaaagtgtctatggaaccactgaccgtgcacgggctgcgggtggattttatcagccccagagtcccatccgacgaggtgaaacggatccgggcctccttacataacctgaatatgcttgtgaagaaatctaacagccggactagtgccgcttaccgaaaggagtacaaccggtgccttggacgcatcaatcggctcggcagactggggcacaataagtaccccattttcctggagtcgatcaagaaaattattcccctcccgtcttggcgtgatgtgctcaaaacaaaggcggctctgaaaagcctggagtcatcgtactcaaagggtaacaagaataagtcatggtacattcgtaagtatgacctgacatatcaccgaacagcgatactcaaccgctcccctgtattcaataagctagtaatctatatccgcaacaaactcaacggaattaagcctgacgaaaggtga

SEQ ID NO: 10790 - RNA, 1185 nt, synthetic construct
  source 1..1185: mol_type = other RNA
atgagcattgatatccccacccgcaagcagaatatcaaaagtctgcgatccatgcactcactttcaagttgcctggatatttctttgggcgacctgaacgaggcacgggctctgacgagcgaattaagatacaagaagaaggaggtgaagaagatcaatggagacaccagagacgtgtatgatcctcatcaactaatcaggagaatccaaaagaggatcaacaatcggatctttaagcccctcataatctggcccaattatatttatggcagtgtgccatcaaacaaagaagagaagaaactgggtatcgaacgccactacatagcttgcgcgaagcagcactgcaaagctaaaacaatcctgaaagtggacattaaaagcttcttcgataacatccataaggatattgtgcgcgatatttttaaccgcgtcttcaagttcaagggcgatgcgctggagtaccttactgatatttgttgctacgagcataggatcgttcagggcgcattaacttcatcgtatattgcatcattgtgtctgttcgaccttgaagcagacgtcgttaatagaacccggagaaaacaactcacttatactaggctcgtcgatgacatcacagtatcctccccactggtcaatttcgatatgtcccagatattggaacacattaaaaacatgctggcccagaaggacctgcctgtgaacgagtctaaaacccaggtgtataacatctccacggagtctctcaaagtgcatggtttacggatctccttcaatgagccacgcctgccttctgatgaagtagggaggatacgtgctagcgtgcacaatctcgaggggctagccaaaaaaaataattctttgaccagcgtcgcctacagggtagaatttaacagatgtgttgggcgagttaacaagctgggacgtgtgaagcacaagaagtacaagacactcagcgacaaactacgcctgatacagccgaaagctgccaagagggacctgtccaaaattgaacgagccatatgttttctcgagaatagttatctgggcggaaacagcaagaagcattactacaagaaaaagtacgaccttgctctctttaacttgatcattcttagacggacagcagcctacatttctttcgccgacgggtttaaggcccggctgagtaaaattaaatattga

SEQ ID NO: 10791 - RNA, 1185 nt, synthetic construct
  source 1..1185: mol_type = other RNA
atgattactgatataccgatcaaaaagccaaatacgaattctctgcgcagtctccacagtctaagcagctgtctgaacatcagtttaagcgacctcaatgaagcacgggagatgccaagccatctcagatacaagaaaaagcaggtcaaaaagatcaacggcgactcgcgtgatgtatatgacccccatcctctcatccgcaggatccagaagagaattaacaaccgtatcttcaaagagctgataatttggcccggatttatctatgggtctgtgcccaccaataaggaggaaaaaaaggcaggtatcgaaaggcattatatagcctgtgccaaacaacactgcaacgcaaaaaccattcttaaggtggacatcaagaactttttcgacaatattcaccgagacgtggtctacagcattttccagagagtgttcaaattcaagggagaagtcttgaactatcttacagacatctgctgttttgatcacaaaattgtgcagggcgccttgacatcatcctacatagcttctctatgcctgttcgatttagagcacaatgtggtgaaccgggcgcgccgaaagcagctggtttacacaagactggttgacgacatcaccgtaagctccaaacttgtgggatacaacatgaaccagattctggagcacatcaaatcaatgctagatgaaaaggatctgccactcaatgaggacaaaactcaagttcacaatatttcaactgagtcgctgaaggtacatggcttgcggatctcttttaatgaacctagacttccctcagatgaggtcgggcggatacgggcttctgttcacaatttggagcagctggctaagaaaaacaactccatcacctccattgcttacaggctcgaatacaatcgctgcgtcggccgagtgaacaagcttggaagggtgaaacatgggaaatataagatcctgagtgccaagctgaaactcattcagcctaaagcagctaagagagacatagacaagattgagagggccgtgcaattcctggaaaactcctataaggggggtaatagccagaaggattattacaagaagaagtacgatttggccttctttaatctgatcatcttacgcaggacagcgggctttgtgtccattgccgatggttttaaaaaacggctggagaaggtcaagtactga

SEQ ID NO: 10792 - RNA, 1185 nt, synthetic construct
  source 1..1185: mol_type = other RNA
atggtcgcgagaaatcccataaaaaagccaggggcccagagcttgaggagcctccaatccctctcatcttgcctggatattacactcgctgatctgaaaactgccattgcaatgccaagtcaccagcggtacaagaaaaagcaagtcaagaagattaacggagagctccgagacgtctacgatccccaccagctgatccggcgtatccagaagcgcattaacaacagaatcttcaaggagctgattctttggccagattatatttacggttcagtgccgacaaataaggacgaaaaaaagaaaggcatcgagagacattatattgcctgtgcccgcaagcattgtaacgcaaaaacgatcttaaaagtggacatcaagaactttttcgacaatatccatcgcgacatcgtgtattccatattctctaaagtactcaagttcaaaggggaggctctggaatacctgaccgacatatgctgctatgatgacactatagttcagggcgccctcaccagttcgtacattgcatccttgtgtttatttgatgtcgagtctgacattgtaaaccgggccgagcgcaaaaagttggtttataccagactggttgatgacatcaccgtgtctagtaagctggtcaattataatatgaaccagattctggaccacatcaaagacatgttggctggaaaagatctccccatcaacgaagataaaacacaggtgcacaatatcagcactgagagcctgaaggtccacggattacgcattagttttaatgaacctcggcttccttctgacgaagtgggcaggataagggcgtcagtgcacaacctggaaaaactggccaaaaagaacaattccattacatcagtggcctaccgtatcgaatataatagatgcgtgggcagggtgaataaactgggtagattgaaccataataagtacaaagtgctaagcctgcgtctgaaggatatccaacctaaggctgctaagagggatattgtaaaaatcgaccgggcaataaagttcctagagaattcctacaaggggggaaacagcaagaaggattactataagaagaaatacgaccttaccctgtataacctaatcatcctccgacggacgcccgggtttcttcttatcgagaaaggctttcgagacaggctgcagaaggttaaatactga

SEQ ID NO: 10793 - RNA, 1143 nt, synthetic construct
  source 1..1143: mol_type = other RNA
atgagaagtttgcagtctttatccagcgcgctggatatctcattgcaggagctggaaatggcaaaaaacatgccttgtaacatccgatacaagaagattgagctgaagaaggtgaatggcgatatccgggacgtctataatccacactcactgattcggaagattcagaagagaataaacaatcgcattttcaagaccctcataatttggcccgactatctgtttggatctgtgcccagtaataaggaggaaaaaaaacaggggattgaacggcactatattgcctgcgcaaaaaagcattgtcaagccaaaactattcttaaggtcgacatcaagtctttctttgataacatccatcgcgacgtcgtgtattccatctttaagaaggttttcaagtacaaaggcgatgcactggagtatctcgtggacatctgctgctacgagtcaaatgtagttcaaggggccttaacatcttcatatattgccagcctgtgtctgtttgacgtcgaatacgaagtattccgccgggccgagaggaaagaactggtgtataccagactggttgatgacataacagtgagttccaagacggtgggatacaatatgtcccagattctcgaccacattcgaaacatgctgatggagaaggatctacctcttaatgaagagaagactcaagtccacaatatctctaccgagagcttaaaagtgcacggactgagggtgagttttgatacaccgaggcttccagctgatgaagtgggccgcatccgggcctcggtgcataacctcgagcagctcagtaaaaagaacaattcgttgactagcgctgcttacaggctggagtataaccgttgcataggtagagtaaataaactgaagagacttgggaacaacaaacatccaatgctgcgagacaaacttaaagctatactgcccaaagcggccaagcgtgacatcgacaagttgaaaagggcagtcagctacttggagtcttcctttgcatccgttaacagcggcaagttctactacaaaaagaaatacgatctgaccatccacggtctaatcatcctccggcgcacacctgccttcagcagcatcgaagcttccctcagacagaggctctcactagtgaaatactga

SEQ ID NO: 10794 - RNA, 1074 nt, synthetic construct
  source 1..1074: mol_type = other RNA
atgccgtaccacgagcggtataaggagatcgaactcaagaagtcatccggagatgtgcggatagtatataatcccgctcacttgataagaaagatccagaaacggatcaacaatcggattttcaaaccactcattctctggcctaactacctctttggctcaatccctaaaaatgagcttgataagaaggaaggtattgaccgacattacattgcctgcgcaaggaagcactgtgaggccaagacaatcctgaaagtggacattaagaacttctttgacaacatacacagagacattgtgtacgacgtttttaagaaggtcctgaaatataagggggaggctttggaataccttgtggatatatgctgctttggagataagatcgtacagggtgccctgacctcttcttacatagcaagtctttgtctattcgatctggaatttgatatcgtcaaacgcgccgcgaggaaacagctggtgtacactaggctagtggacgacattactgtgtcctccaaaattgtcaatttcgatatgagccagatgctaaatcacatcaagaacatgctgctgaacaaggacttaccaatcaatgagaagaaaacgcaagtccacaacatctcaaccgaatctctgaccgtgcatgggcttaggatctctttcgcaacaccccgcttgcccgcccacgaagttggcagaatccgcgctagcatccataatctggagcaactgtcgaaaaaaaataacagtctcacctccgttgcttaccgtctggaatataaccgatgtgttggccgagtgaacaagttggtccggttaaaccataataagaaggacgagttcaaaagaagattaaaagccatactccctaaggcgagtaaaaaagatattaaggagatcacaaggtcaattaactttctcgagagcagctatgcactggggaattccaataaggcttactacaaaaagaagtacgacctgacaatctataggcttatcattctgaaacgcactccaagctatcatgagatggaggccgaattccgtaaccgcctgttgaatattaaatattga

SEQ ID NO: 10795 - RNA, 1146 nt, synthetic construct
  source 1..1146: mol_type = other RNA
ctgcggtccctgcagtcgctgagcaacgccctagatatctctatctctgatctgaatgctgccattaatatacccgttgagaagaggtaccacaggcttgagttgagtaaagtcaacggagagaaaagaattgtcttcgatccagatcatagagttaggaaaattcaacgcaggattaacaagcgcatctttaaggaactcattctatggcccgagtacctttttggctctatcccaactaaccaatcggacaaagagaacaagatagaacgacactatatagcctgcgctgcaaagcattgcaaagcgaagaccattctcaaactggacatcaagaacttctttgagaacattcatagggatatcgtcgtaagcatcttcagcgatgtcttccagtacaaaggagaggccttgaaatacctcgtggacatctgttgttacaatgagtacatcgtgcagggggctcttacctcatcctacatcgcatctttgtgcctgttcgatgtggaatatgacgtctttcgacgggctgaacggaagggcctggtgtacactcgcctggtagacgacatcacaatttcctcaagggttgtggactatgatatggcacagatcaagtctcatgtcgaaaatatgctgaacgaaaaagatctccccatcaatcagaagaagacggaggtgcacaatatcagcacagaagccttaaccgtacatgggctgcgcgtatctttcaacgagccgagactcgccagtaacgaggttaaaagaattaaagcctcagtccacaacatagtgaatctgagtcagaagaataatagcaagacttcagaagcttatcgcatcgagtataatcggtgtatgggtagagtgaataagttagggcgggtgggccacaataagtataaactgctactggacacacttaagaaaattaagcctaaggcgagtctgctcgacttgcagtccgtgcacaaactcgtgggagagctcgaaaagctgcacgtgaaaggtagctacaacgaatttgaatttaagcgtaagtacaacttggcagttttcaaacttattgtgataaaccgaaccgactcctataaacctttcagcgactggattaaatcccgtttagagaagataaagccttgctga

SEQ ID NO: 10796 - RNA, 978 nt, synthetic construct
  source 1..978: mol_type = other RNA
atgagtgtgaattttccggtgaagaagcctggagccaagtccctgcggagcttgcagagtctaagcgatgcccttgacatttccatctctgacctgcaagcagctaaaaaactcacaaaggaggaacgatacaaacgcatagaaatcccaaaggtcaatggtgacgtaagagtcgtgtacaggcccgaccaccgcattaggaggatccagagaaggatcaacaagcgcatttttaaggaactaattttgtggccttcttatctctttgggagtattccctctacgaaacctgagaagcgcgagggcatcgagcggcattacatcgcatgcgcccaaaaacattgtaacgcgaaaatcatccttaaattggatattcggaacttcttcgaaaacatacacaaggacattgtcgaggatatcttctctaaagttctcaaatacaagggagatgcgcttaattatctggtggacctgtgttgctttgatgataatatcgtccagggggctctgacatcatcatacatcgcttccctgtgtctgcatgatctggaatacgacgtttatcgaagagccgagcgtaagaaactggcttacacccgacttgtcgatgatatcactgtgtcaagcaaaaccgtaaattatgacatgggacagattcgcggccacattgaggaaatgctgaacaagaaggacttacccatcaacataaataagtcagaagtgcacgacgtgtccactgagcccttaaccgtgcacggcttacgggtttccttcgacaagccaagactggccagcgatgaggtacgtaggatcaaagccagcgtgtataacataactcagctggccatgaagaacaattcgaagaccacagtggcatataggattgagtacaatagatgcatggggagagttaataagctgggtcgggtgaagcacaacaaacatctcgtcttgctcaacatactcaaagcaatttga

SEQ ID NO: 10797 - RNA, 1197 nt, synthetic construct
  source 1..1197: mol_type = other RNA
atgtctattatcagacctgagaaacttaaagacagcggaagtctcaaaaagctcgagtccctgagccgagccctagggctgtcagtaaacgagttgaaagaagtgaaatccctcccactgtcgaagcgctatacagaagtgaaggttcccaaaatcgatggcacctttcgtatcgtttacaagcctgattaccgcctgcgaaaggttcagagacggattaataaccgcattttcaaggaattggtgagctggccgtattatctttttggttcagtgcctagcagtccagatgataaaaagaatgggataaagcgggattacgtcaattgtgcaaagaaacattgcaacgccaagaccattcttaaggtcgacatcaagaacttctttgacaacatccatagggacctggtggaggacatcttcaagaactttttcaagtataagggcgaggctctggaatacctggtggatctttgctgtaacggcggatatattgtgcaaggggcgcttaccagttcttacattgccacactctgtctctacgacattgaatttgatatcgtcaagagggcagagaggaagaatctcgtgtacacccggttggtggacgatatcactatctccagcaaagtgtcgaattttgacttcagtcagattaagatgcatgtcgagaagatgatgttggaaaaggacctgcccctgaatctcgagaaaactaagattcaccacatttcaacagaacccctgagcgttcatggactccgtgtaagcttcgatacgccgcgtctagcttccgacgaggtaaagagaataagagcatctctctctaacttaatcgcgctgtcaaagaaaaacaactccataacttccgccacatatcggaaagaatatgatcgatgcatgggcaaagtgaacaaactgggtcgcgtggaacacaataagcaccctatctttctgaacaagctgaaaaatatccgcccccttccatctgagaaagacgcttgtcgggccttggctaatatacacaggttagaggtcatgtacaaaaatggcaattccgccaaatattcttacatccggtccttccacctagcctcatacagactgatcattttaagcagaaccgcatgcttctctaggctggtcaacagtttgcgcgttaggctgaagaaaatagagccaaaactgcagaattga

SEQ ID NO: 10798 - RNA, 1200 nt, synthetic construct
  source 1..1200: mol_type = other RNA
atgtatatcaagaaaccccagatcaccacactgaatgccatcgctaatgtgtctaacctgtgctccgttttagacatttctgaggaggagctcaatcaggcactagcattaagtgattacgatagatatgttcaggccaaaaccgagaaaaatgatgggtcatttcgcaccattcacaagcctcattacttgttgcgaaaggttcagcgcaggataaatacccgaatctttcagaagattgtgaggtggccatcttacatctttggaagcgtccctaatacaaaggatgaagggaacaacgtggtggaaaacaaggattatgtgtcatgcgccgctcaacattgcggtgctaagtccctcttaaaactggacataaaggatttcttcgataacatcgatatcttccacgtgaagaagattttcacaggcctgttcaagtacaattgtgacgttagcaacgtcctgtcagacatctgttgctataggggggttgttgtacaaggagcactgacttcgtcctacatcgcttccctgtgtttgtgggacgaggaatacaaaattatagagcgtcttcagagaaaaggacttgtctacacccggcttgtggatgacataacagtatccagcaggattagcaattttcagttcgaccatgcccaaagtatcatcagtaagatgttgcaagacaaagacctccccattaacaacaacaaaaccaaggtctttcatgcaagcattgaaccacttatggtgcacggcatgcgcgtcaatttcaaagagccccggtatccgagtgatgaggtgaggagactacgcgctgccgtgcagaatattgaaaagctgtcatccgaggtgggttaccggactacgtttgcgtatcggaaagactttaaccgatgcatgggccgcgtcaacaagctcaaaagagtaaaacacgaaaagcaccaggtgctcatcaataagcttaataaaatcctgccactccccagcaaaactgacctccgtcgttgtaagctggcggtgaagcggctggagaacgatttcaacaacaaaaaggagtcttattggtacaaaaagcgctattacatggcccaggacaggctgaacgtgctgcagagaacgtactacaagactgccttgaaactgagatctcggctgaatgtcattaagcctgaatatgacaacgtagaaaatgcctga

SEQ ID NO: 10799 - RNA, 1197 nt, synthetic construct
  source 1..1197: mol_type = other RNA
atgcaaaaagataagccatatatcacgaccacaaatgtcatttcttctatccctaacctctgcaaaagtcttaatataaccgaggacgaactgtctcaggccctgtctcttggaagcgacatgtacgtgagagacagagtcgaaaaatcagacgggagctaccgggtgatccacaagcctcactatctcctccggaagattcagagacgcattaacaagaggatatttcagaagcttgtgggctggccaagttacatattcggtagcgttcctaataccgtaaattataagggcgaggtcgtcgaacccaaagactatgtgagctgcgctgctcagcactgcggagctaagtccttattgaagctggatattaaagacttcttcgataacatccacatttatcatgtggaacgcattttttcggggttctttcattacaacgaggaggtgtctaagactctatcccagatttgtacttacaataacgtggtcgtgcaaggggctttgacaagttcctacatcgcatcattatgtctgtgggacaaagaacttgaggtggtcgagaggctgaaaaggaagaacctcgtatacacacggttggtggacgatatcactgtttcctcaaaggtgtccaattaccagttcgacaacgcatccgccttaatcgtggagatgctgcgaagcaaagatctgccagtgaataacaacaaaacaaaggtgttccatgccactatcgagcccttgatggtccacggtatgcgagttaactttaaagagcctcgctatccgtctgatgaagtgaggcgtctgagagccgcggtgcgaaacgttgaaatgctggcctcagagccaggatatcgcacaacctttgcataccgaaaagatttcaaccgttgtatgggcagggtgagcaaacttaagcgggtaaagcacgaaaaacataaacatctggtagagagactgaataaggtcctgccgctgccctcgagaaccgacctcagacgctgcaagctcagcgtcaggaggctggaaaacgactataataaaaagcgcgagagttactggtacaagaagcggttttacatggttcacgatcgcctgaatgttttgcaacggacctacttcaagacggcctatcagctcagagagcggctaaaaaagatccgtccctggtatgatcacgttgagaatgaatga

SEQ ID NO: 10800 - RNA, 1188 nt, synthetic construct
  source 1..1188: mol_type = other RNA
atggataggctgatccctgaaaagagcacgtttcagtcaatctctaatatcaagaacctgtgcgccgctctggacatttcggagaaagatttgtcatccgctctatccctgcgcgacaatgagaaatacgtcatagaccatgttgagaaaagcgatggtaccctccgaaaaatccataagccgcattatgaaatccgaaagattcagaggcggatcaataagcgcatcttcaaaaagattgtgctgtggcccgactatatctacggctgcatccccaacgaaatctcgtccgatggcaagctcattaaagccagagactatgtaagttgcgcaagccagcactgttccacaaagagtctgctcaagatcgacataaaagacttcttcgacaatatttctgcccatctcgtgttcgagatgttttcacgctttttcaagtacaacgatgaaataagccaaacactgactaaactctgctgtttcaagggaactctgatacaaggcgcccttaccagcagctacattgcagcactctgtttgtgggacctggaacacaaagtcgtttcccgcctgaaacggaaacagttgacctatacgcgcttagtggatgacattactatttcttcaaagaccagtaacttccagtttgattacgctcttactctagtcagcaacatgctattagaaaaggagctgcctataaacctccataagaccaagtcttcttccagcagcattcttccactggtcgttcacggaatgagggtgaactttgaagagcccagataccctagtaacgaagtgaaaaaacttagggccgcagtgcacaatatcgagaaactcgcgtccgagcccggttacaggatcacacatgcctaccgacgggactttaacagatgtatggggcgggtaaacaaattaaagcgtgtggggcacaattctcactctaaactggttgagaagctgttgagggtcctcccattgcctgcgaaggtggatctgaaacggagtcataccattgtggctagactggagaaggattttaaggaaaagcacacatcatattggtatcacaagagattctacaaggcccacgatcgtcttaatatcctgcagcggacatactccaagaccgctcaggagctgagattgaaacttaaggccattaaaccaaagtatgagaattga

SEQ ID NO: 10801 - RNA, 1194 nt, synthetic construct
  source 1..1194: mol_type = other RNA
atggaacgactctctccgatcaaaagttctagtaagagcatatccaacaagttgaatttatgcaagacactggacatcaccattgatgaactcgattcagctctgacattgcccaacaatcagaaatatatcactgcatacatcgacaagcccaatggcgagcagagaaaaatacataagcctcactacaagataaggaagatccagagaaggatcaacaaccggatattcaaacgattggttctgtggccatcgtacatttatgggtgcattccaaacgaaaaggatgagacaaccaatatcactattcaagcgcgcgactacgtgtcatgtgctgccgagcattgtacaagcacttctttactgaagattgacatcaaggatttcttcgacaacattagcttctacctcgttaacgacatgtttctgaatttcttcaagtatcccactgaagtaagtaaaattctgtctgagatctgctgttacaaaggcaacttgattcagggcgcactgacgtcttcatacatcgcagccctctgcctatgggactgcgaggagaagttagttgctagactgaaaagaaaagggctccgctatacccgtctggtggatgatataaccatcagctccacaatcagcaattaccagtttgactacgccattagctgtgtaaccaatactctcaatgagaaagagcttccaattaatcctgagaaaacctccatttcatacgagagtattacgccgctaatggtccatggtatgaggatcaactttccagaaccaagatatcccgcgaacgaagtgaaaaagcttcgggccgccgtgcacaacatagaaaggcttgcatccgagcctggatatcgcatcaccttcgcctatcggaaagatttttccaggtgtatgggacgcatcaacaagctgaagcgggtgaaacatagctctcacggtaagctggtgagccgtctgcaaaaaattctgcctcttcctgctaaggtggatatcaaacgggccaagatcatggtcgacaggctggtcaaggattttgatgaaaagaaggacacctattggtaccaccggcgattttatcgcgctcacgacagacttaatgtcttgcagcgtacctataataaaacatccaagatcctgcgcgagaagctcaaggggaaatcccccacttacgacaacaaatga

SEQ ID NO: 10802 - RNA, 1200 nt, synthetic construct
  source 1..1200: mol_type = other RNA
atgtgtaatctgtcaccgaagaagaccacagaacatagcattagtagtatagccaacctttgcgacgcactggacatcacaccaaacgatcttgatgagctgtccctgctttctgatcaagaccgctacacgcgggacacagtggagaagtccaatggcactctgaggactatttacaaaccccattttctcctgcggaaaattcagagaaggatcaatcgacgcatttttacaaggatcgtggagtggcctgattacatatttggaagcgtcccaaataccaagggcccagacaagaaagtgattcagcggaaggactacgtcagttgcgccgcacaacattgtgaaagcaaaagcttgctgaagatcgacatcaaggatttcttcgacaatatacacatctaccacgtgaagaagatcttcttagacttcttcaagtatcccgaagacgtgagtgagctgttagcggatatttgctgtttcgagcagcgagtagttcagggggcactcacctccagctatatagcctcactgtgcctgtgggataccgagccccagctcgtcaaaaggttgcagcgtaacaacctgacttataccagattagttgacgacattactgtttcctctaaagtgtctaactttcagttcgaaatggctatgtcccagattacccggatcctagaggacaaggatctgcccatcaactacagcaagacaaaagtatcttacgtctcaatctctcccttgatggtacacggtatgagagtcaatttctccgaacctagatatccatcagatgagctgcggaaactacgagcgtctgtgcacaatattgaaaagttggcttcccagactggctatcgcactaccttcgcctacaggaaagattttaaccgatgtatggggagggttaacaaactcaaacgcgtgaaacataataaacacgctgtgctgttgaaaaagttgaagaaaatccttcctctcccttcgaaaacagatctcaagagaatcagcctgagcgtgaagcggctggagtcagactatctcgacaagaaggaaacgtattggtatcgcaagcgtttttacatggcccaagataggcttaacattctcaatcggacctttaaccagagtgctgcccaatacagagagcgtctaaatagaatcaagccgctgtacgatcgcgtggaaaacggatga

SEQ ID NO: 10803 - RNA, 1101 nt, synthetic construct
  source 1..1101: mol_type = other RNA
atgaactctttatctcctcagaagaacactactgaatccattgctagcatcacaaatctttgcaccgcccttagtatctcaatcgacgagcttaatactgtactgcagatggagccaagtgagtggtatgtcaaggattatgtgcccaagtccgatgggagtgaacgtgtgatttacaagccccatcacttactgagaagaatccagcgccgcattaataagagaatcctatctcggatcatcaagtggcctgaattcatttacggaagtgtgccaaacgagaaggtagacgccaacaccataattagaaaagactacgtgtcctgcgctgcaaaacattgcggtgcaaagagcattctgaaagtggatataaaagacttcttcgacaatatccagcagtatcacgttctcaacattttcagaggatttttcaactactccgatgaagtttctaagacattggccaatttgtgttgctataatgagagggtggtccagggcgccctgacaagttcctacattgcatctctatgtctgtgggatgtggaaaccgaagtcgtcaaacgattgatgcgacatcgcctggtttacacgcgacttgtggatgacatcaccgtgagctccacagtaagcaactttcaatttgactcagctctgtcatacattcggtctatgctggaagggaaagacctcccactgaacatggccaagacaaaaagcctgtatgtctccgttgagcctctgctggtgcacggcatgcgggttaattttcctgagccccggtacccgtcagacgagatcaggaaactccgcgctagcgtccacaacctggagagactggcgtcacaagtcggttatcgcaccacatacgcgtataggactgatttcaataggtgtatgggccgagtgaataagttgaagcgggtgggacataacaagcacgccgtactcctcaaaaagctcaaaaagatacttcccttgccatcgaagaccgatttaaaaaggatcaacgtgactataagccggctcgagagcgattttgaccgcaagcgtacgaggaccgggatcaggaaagacatcctgagacgtatgattggctga

SEQ ID NO: 10804 - RNA, 1188 nt, synthetic construct
  source 1..1188: mol_type = other RNA
atgtatcaactggagccaatcaaaaagacaaagcaggtgattgcatccatcccaaatctgtgctccgccctagatatcactatagacgaactgaataaagctttatcgctatcaagtgaggagaggtacgtccaggggaaggttagtaaatccgacggctcttacagggacgtgtacaacccccacaatctgattaggaagattcagcgccgcattaaccgaagaattttcatcaagctggtgggttggccctcatacatctttggatccatcccaaacaacatagacaagaacggcaaagtgctggaagctaaggattacgtgaattgtgccgcccagcactgcctggcaaaatcgctgctgaaaatggacttaaaggatttcttcaacaacatccacatagaccatgtgaaggagatgttcgagaaattctttaactaccccaaggacgtctctgaggcactgtccaatatatgttgtcgaggcgattccttggtacagggagccttgacaagcagttatattgccagtctctgtttatgggacctggaacctcatctggtaaaaagactcaagcgaaagcaactgatttacacccggctggtcgatgatatcaccgtttcttcaaagatctctaattttcagttcgacatgaccattgaacacattactagcatgttgcacgaaatggacctcccaattaataatagcaagaccaaagtcgcatacacaagcatcgaaccgctcacggtccacgggatgagggttaactttaaagagcctagatatcctagcgatgaagtacggagactcagagcggcggtgcataatatcgagtctcttgctagcgagccaggatacagagtgacttttgcctatcgtaaggattttaacaggtgcatgggtcgggtcaataaacttaaacgggtggagcatgagaaacaccagacgctagttaacaaactccttaagatccttcctcttccctcagaaaaagatcttaagaggtgcaaagctagcatcttgcggttggaaacagacttcccgctgaagggggacacctattggtatcgcaagagattctacatcgtgcatgaccgcctgaatgtgctccaaaggacctataagcgcactgccctcaagctgcgtaaccggatgaagcccatacgccctgagtatgatgattga

SEQ ID NO: 10805 - RNA, 1188 nt, synthetic construct
  source 1..1188: mol_type = other RNA
atgtaccagcttgagcctattaagaaaacggacgagtccattgcctctatagagaatctctgtaataccctcgatatcagcctcaaggagattaacgaagccttgagcttgagccctgacgagaggtacgtgtataggaaaatcccaaaatccgacggcagttacagagaagtgtataaccctcacaatctcatccgtaaaatccagcgcaggatcaacagaaggatctttattaaacttgtcaagtggccttcctatatcttcgggtcgattcccaataacgtagattcagtggggcaggtcttagaagctaaagactacgtaagttgcgccttccaacactgtcagtcgaagtctcttctgaaaatggatctgaaggatttctttaacaacgtccacatcgatcatgtgcatgatatctttgaggggtttttcaactacccctctgaggtgagtcgggtgctgtcagacctgtgttgcagagaggactccttagtacaaggagctctaacatcatcttacatagcgtccctgtgcctgtggcgtttcgagccgctgcttgtcaagcggctgaagagaaaaaatctcgtgtatactcgcttagttgatgatattaccgtcagctctaagatatcaaatttccagttcgacatgacgatcgaacatatcaaaaatatgctgtacgaaatggatcttccactcaacaatgagaagactaaggtcatttatacaagcatagaaccactcacagttcatggtatgagagtgaattttaaggagcccagatatagttcagacgaagtgcgaaaattgcgttccgcagtgcataacatcgagtgcctggcatccgagcccggttaccgggttacttttgcatatcggcgagacttcaaccgctgtatgggacggattaacaagctaaagcgcgtgggccacgagaagcacaaaaccctggtgagtaagctgttgaaaattttgccactgcctagcgaaaaggacctaaagagatgcaaggctagcatcctgcgactggaagccgattatccgctgaagggcgactcttactggtacaggaaaaggttttatatactgcacgaccggcttaacgttctccagaggacctacaataaaaccgccgacagcattcgcgaccgcatgaaggaaatcacacccaaatacgatgattga

SEQ ID NO: 10806 - RNA, 1203 nt, synthetic construct
  source 1..1203: mol_type = other RNA
atgtacgcattccaatttcaccccattaagaagtcaactagtgtcattgccaatttcaagaagctgtgcgaggctctgaatatcagtgaggtggagatgaagaaagcgctcagtctcccacccgaggagcgatatgtggcctcctccgtgaaaaaagccgatggaagtactcgggccattttcaagcctcacaacttgatccggaagattcagcggagaataaatcgaaggatttttaaaacgctcgtgatctggcctagctatttatacggctctattcctaacactattgaccctaccacgaagaaagtaattgaacacaaagactatgtcaactgtgccgcgcagcattgtagcagcaagtctctgctgaagatggatataaaggatttcttcgacaatatccatcgcgactatgtcagcgacatattcacagtgtttttcaaatttccaccagatgtgtccgaggcactgacatcgatttgttgtcgtgaaaatactttggtgcaaggggctcttacatcctcctacctcgctaatctggtgttatgggatatcgaaggtgacctggtaaaaaagcttaaccgcaaaaacctaacctataccagactggtggacgacatcacagtttcatccaaggtatctaatttccaattcgatcttgccatatccctgatcagctctgctctgatctctaaagagctgcccatcaacaccagcaaaacacaggtttcttacgtctcaagtaatccgctaaccgttcacgggatgcgggtcaattttcccgaacctagatacccgagcgatgaggtgaggaagctgagggcatcggtccataacctgcagtgccttgcatcacaaccaggctaccgacagtcacattcctatcgtaaagactatgcttgctgtatgggaagggtgaacaagctgaagagggttaaacatgaaaaacacgccgtccttatcaagaagctgaacaaaatcaagcccctaccaagcgaagtggaccagagacgctgcaagcagatgctcagacgcttgcagaacgactacaagaataagcacttggattactggtactgcaaacggttttatcggttgcacgatagactcaacgttctccagcgcaaatcttgctttcgtgatttagccgaaaagatccgcgaggagatgaggctcataaaacccacctacgaccagtga

SEQ ID NO: 10807 - RNA, 1203 nt, synthetic construct
  source 1..1203: mol_type = other RNA
atgcggaacatccgacctgcccttacaacctctaagccgatcaagtcactggcaagtctcgaatccaccctggggctttctagcaagcaactctctgagattcttgacattccagagtgtcagaaatatgtcgagaaggctgttccgaagccagatggttccctgaggactgtataccgacctcatcctttgatcaggaaagctcagcgccgcattaacaataatatcttcaaggagatcgtgatctggccctcatacgtttttggctcactgcctaacagtgtcatcaatcaggatgaaattgagcgtaaagactatatttcctgcgctgcccagcattgtggagccaagagcctcctgaaaatggacatcaaaagcttcttcgacaacattcacattgactacgtgaaccacatgttttgcaatttcttcgattattccagtgacgtcgccgatatcctcagccggctttgctgtcgaggcgatttcatagtgcaggggggcctcacaagctcttatgtggcttcacttattctgtgggagtttgaacccaagctagtaaagagactaaccagaaagaagctgatatacactcgcctagtggacgatattagtataagcagtaagatctccaactttgacttctctatgacaaagtccttagtgacgaatactctccacgagctggacttgcccgtaaacgagaggaaaaccaaagtttcatatgtcagcacagaaccattgtccgtgcatggcattcgagttaattttaaagaacctcggctgccctcgaatgaagtccgctgcatcagggcagcagtgcacaatctgacggtgctggcgagccagcctggatatcgtaccactcatgactacaggagtgattttagccgctgtatgggcagggtgaacaagttaaagcgggtcgagcatgagaaacacaaggactttctggaaatcttgcagaacatcaagccccttccatcaccaaaagatctgaagagagcccgtgagatgctcggaagactggagcgggattacacaacccaatccggttctagagggtaccggaccaggttcttcagattacaagagagactgaacgtgctgtcgaggaagaaagaatacctgaatgacgcgaaaaagatacgccacaaactcaaatctttgaaacccgatgaaactgcccggtccaacttttga

SEQ ID NO: 10808 - RNA, 1194 nt, synthetic construct
  source 1..1194: mol_type = other RNA
atgaggaatctcaatcctactctcactaccgtcaagcccatcacaacattggagaggactctcggcttggatagtaatgagatttctaccatcctggctatccccgagaatcagaaatacgttgaaaaaacagttccaaaagccgatggctcgctccggaccgtatacaggccccatccgctgattcggaaagctcagcgaaagatcaacaacaacattttcaaggagatcgtgatttggcccagctatgtcttcggctcactgccaaatagtgtcatcgacaaaaacgagattgagaggaaggattacatatcctgcgccgcaaagcattgcggggccaagtccctgctcaagatggacatcaagaactttttcgacaacatccacattgaccatgtagtctctatgttcataaatttcttcggatgtaaggcggaaattgctaatacactgtcacgcttgtgttgtaaaggtgagtttattgttcaagggggcctgacaagtagctacgtggcctcgctcattctgtggcaactggagccggagcttgtccggcgactgtctcggaaaaaactgacatacacccgcctagtggatgatatcagcatcagcagtaaaacctcccactttgacttcagtatggtgatatcactcgtgaccaacatgttacatgaattagacttgccagtgaatgagactaaaacgaaggtttcccacctgagcacggaacctctgtctgtgcacggaatccggattaattttaagcagccacgactgccttccaacgaggtgcgccgcatacgtgcatcagtgcataatctaactgtgctggcatctcagcctggttacagaactacgcacgattataggggcgattttgctcggtgcatgggaagagtcaacaaacttaaaagagtggaacacgagaaacactccgagtttttatcaatcctgcagaagattaagccactgccctcccctaaagatcttacccgtgcgagggaaatgcttagcaggctagaaagagactatagcgacaagaacgagacaagagggtatcggacccgatattttcgtcttcaggaacgcctcaacgtattgtatagaaagaaggactacatctgcgaagccaagagcataagaaagaagctgaaatctatcaagcccaacgaaaatgcccgcaacaatttctga

SEQ ID NO: 10809 - RNA, 1203 nt, synthetic construct
  source 1..1203: mol_type = other RNA
atgtatctttctcaaccctccttaaacactaaaaatgccatcaactctatggccgccttggagaaaacccttggacttactgctaaagaaatccaaagcatcattagcttgcccgaatcacagaaatacttcgagaagaaggtgccaaaaagcgatggatccatacgactcgtgtactgtcctcacccacaggtgaggcgagcccagaggaagatcaacaacaacatcttcaagaaactggtgaagtggcccagctacatctttgggtccatacctaacacaaaaattagtaaggagcagatagagaagaaggactatatttcttgcgctggacaacattgtggcgcgaagagcctcctcaagatggacatcaagtccttcttcgacaacattcattttgaccacgtcttggatatgttcgtgaatttcttccattacgacaaagatgtgtcttttactttagcgaagctgtgctgcaaatctaactatattgtgcaaggtggcctgacctccagctacgtcgcctccctgattctctggaggcatgagcccgagctagtaaagcgtttgcagcggaaaaacctgacctacaccagactggtggacgacattagtatcagctcgcatgtcagtaatttcgatttttccatggttcagcagctagtcacaaacatgctgtatgaaatagacctgccggtgaataacgataagactaaggtataccatctcagtacagaacctctgacgatccacggcatccgcgttaacttcaatgaaccacgcctgcctgctaacgaggttcggaagatacgtgcagctgtgcacaatctcacgattctggcatctcagccggggtataggacacttcactcatatagagaggactacgcaagatgcatgggtcgggtcaataagctaaagagggttcagcacgagaagcacagtgaatttctgaaaaccctgcagaatatcagacctttgccatcagaaaaagatttaaagcgagcacgcgtggtctaccaccggctcatgaggaattactcagaaaagaaagatacaagagggtatagaacctcattctttaaacttcaagagcggctcaatgtactgtgtcggaaaaagtgttttcgtgaggaggcccagaaaattcgccgcaagctgaaagaaatcgcccccagcaagcaggccaaagagaatttttga

SEQ ID NO: 10810 - RNA, 1203 nt, synthetic construct
  source 1..1203: mol_type = other RNA
atgacgattatcgagcccagccttaatactcctaatgtgatcgcttctataagggcgctcgagaagaccctcggattgactcagcaggacataactactgcgttagagattccggaatctaagaaataccacgtgaaacaggtcccaaagcagaatggggagttacgttcggtgtatcgacctcatccactgattcggagggcacagagacgaatcaacaacaacatctttaagaagatcgtgctttggcctagctatatctttggcagtcttccgaataccattaacaagaacaatgaagtggagagaaaggattacatctcatgcgctgctcaacactgcggcgccaagagcctcctgaaaatggatatcaaggacttcttcgacaatatccacatcgatcatgttcgctcaatgttcatacactttttcaagtgtggggatgatgtagcagatattctggccaaactgtgctgtaaagagaaccacgtggttcagggtggactgacaagttcatatattgcctgtctaattctgtggaacatagagcacaaattggtgaatcggctcgcccgtaaaaacttgacttatacaagactgatggacgacattacagtgagctccaagatttctaattttgacttcagcatgaccactaatctcatcgccaacatgcttcaagaactggatctccctatcaacacctctaaaacaaaagtgtgccatttgtccaccgaacccctgaccgtccatggtgtgagagtaaattttaaagagccacgcttccccagcaacgaagttaaacgaatacgggcctccgtacacaatctgacaatcctggcatcccagcccggctatagactgacacatgactataggagtgattacgcacgctgtatggggagggtcaataagttgaagcgggtgaatcatgagaagcacaaggaattcttagtcatcctccagaaaattctgcctctaccaagtgtcagggataagaaacgcgctaaacaaatgttcataaggctaatcaaggactaccgcattaagtataaaaccaaaggatacagaaccaggtactttcggctccaggaacgcctgaacgttctttccagaaagaaagactacctgaacttcacgaaatacatccggaagaagctgaagaacattaagcccgacgagcactcaaagacggacttttga

SEQ ID NO: 10811 - RNA, 1206 nt, synthetic construct
  source 1..1206: mol_type = other RNA
atgactataatcaaaccccagaagatccatcctacaaccattgcctcaaagtctgcactgtgtgtaaccctgggatttactctgctggagctgaatgaagtactaagtgtgcctagctctgaacgatataaaagaaaggagatcgacaaaccagatgggtccaagagggtagtgtataacccacatcccctcattcgacgtgcccagcgacgcatcaataccaacattttcaagaagcttgtgagctggccatattatctctacggcagcattcctaataccgtgataaaggagtcaggtttacctaagattatcatccgcaaagactacgtcacgtgcgcgagcaaacattgtggcgctaagtccctgttgaagatggacattaagaatttcttcgacaacatccacgaaaaccatgtcaggaacttattccttaggtttttccactttagccccgaggtggctcacattcttacaaatatctgctgtcacgaatctaatgtggtgcagggtagtcccacctcttcgtatattgccagtctcatactttgggatgttgagcacctggcagttaagaagatctccagaaaaaacctggtttacacgcggctggtcgacgatatttccgtgagctccaaatcatccaaatacgattttagcatgatcgaagacatcatcactcagatgctgacctcccgcgacttacccgtcaacaagaaaaaaaccaagcattgctatctatccacagagccgctaactgttcacggaatacgcattaattacaaagaaccccggtttccttcagatgaaatacggagactccggtcatacgtgcacaacctccagactttggctaagcaacctggctataggacaacacattcttaccggactgactatgcaatttgtatgggaaaggtgaacaaacttaaacgggtgaatcacaacaaacacttcatttttttggagcagttgcgtgccatcagaccactgccaagtgaggacgatctggataggtgccgctacgtcatcgcacgcttggatgcttataatacaatccatgggaacgagtctttcagctacaggaagcggttctacaggctgcaagagcgactcaatgtcctgcagagactctcgaagtacaaaaccgccgccaaggaaatgagagcgcgtctgaagagtctcagaccgccaaacgaggtttga

SEQ ID NO: 10812 - RNA, 1227 nt, synthetic construct
  source 1..1227: mol_type = other RNA
atggctaagcctcttttgtttaacctgaagacaatgtaccagatcctaaaaccagagaagattaactcgaaatccattagttcattggacaatttatgcgaggctctgaatatctctgttgacgagttaaacgaggccctcaacctcccggagagtgaaaagtatactgaaaaaaccgtcccaaagtctaatggcgcaattcgacacgttttcaaaccccatcacctgctgaggaaaattcagcggcggatcaataaaagaatatttaccaagctggtgaagtggccatcctacctgtacggcaccctgcccaacgatctggatggaaacggtgacattatactcaaccgagactacataaattgtgccagacaacattgccagtccaaatctctgctgaaggtggacattaaggatttcttcgacaacatccacgaggattacgttttcgaaattttccacgtttttctcaagtatcctgatgatgtatctaaagcactgacaaagatctgctgccacaataaaaacgtggtgcagggggcacttacgtcgagctatatctcatgtctctctctttggaatatggagcacaagatcgtgaagagactgcaacgtaagaatttgatatatactcggttggtcgacgatatcaccgtgagctccaaggtgtccaactataactttgatgcggccctctcacacataaaaaacatgctgtatgagcgtgacttgcccctgaacattgaaaaaacacgcccctactatatcagcatggagcctcttacagtacatgggctgcgggtgaattttgacactcccaggctcccaagcgatgaagtcagaaaaatccgagcggccgtccataatatttccaaattatccagcgaacctggttacagaaccaccttcgcttatcggaaggactacaatcgctgtattgggcgggtgaataagttgaagcgcatcggacatgaaaagcacgaggccctgctgaaaaagcttatcgagattccacctctacccagcaggaaggatatcgaacgtactagggcatcaatcgagaggcttgagagagacttccagtctaaaggcagcagttattggtactacaaacgcttctaccgagctcatgaccgcctgaacgtgctccagaggaggtttgatgtcatcgccagtgaattacgcgatagactcaaggaaattaagccgctatacgacaaaaattga

SEQ ID NO: 10813 - RNA, 1266 nt, synthetic construct
  source 1..1266: mol_type = other RNA
atgagcatcttgcaatacatgaatgagaatcagccaatccaggctcctatcaagcccactttaaagaccagtaaaaagatctcttctcccgaaaatctgctggtggcccttgggctgagcgcatccgagctgaattgcgctctgtatatgacctccgccgaaagatatactgcgaagaaggtccccaagtcgtcaggcggtgaaaggattgtccacattcctcacccgttgatcaaaaagattcagcggaggattaataacagagtgttgtcgaagattgttgtatggccatactacttattcggcagcgtgccttccgagatcgatgttctgtacgaagacgccatcctgaaacgcgattatatatcctgtgcccagcaacactgcaaagcaaagtctatcttgaagtatgacatcgagaactttttcgataacatccattacgatctggtgaacgacatcttcatcaacttctttaagttcgactgcgataccgctagaattctgagtgacctctgttgtattgactcagaagacgggtcacatattgtgcagggggccccaacttctagctatctcgcctgcctctgcctgtgggatatagaacatgacatagtgcagcgacttaagaggaaaaaccttatctatacacggctcgtggacgacattacggtcagtagcaagatatatgactacaactttgagaacgcaaaaaaatcaatcgaggacatgattcatgagaaggacttccccattaacaaagcaaaatccagagctctgtctacctctagtgaacctctgctcgtgcatggcttacgtgttaattttcacacacccagactaccatctgatgaagtaggacggattcgtgcctccgtgaaaaacgtggagctgcgagcggcaactaataattttcggacctcaaaagcttaccgcaaggcgttcgagcgatgtcttggacgtgtccacaagctcgctcgggttggccacaacgcccacacaaagcttcgcgataggctccttaagattcagccactaccgtcccaaagggatatagatagagtaaaacacaatgtgacgaggctggagatcttggcagccaatggctgtgatgacctgcgctactcccggagctattacatcagcatgtacatcctgaatatcattaacagaacagaacgctacaaacctctagtcagcgagctgcgcgccaggctccatgctatagcccccagtaaagaggtcggtggaacctattttgattga

SEQ ID NO: 10814 - RNA, 1227 nt, synthetic construct
  source 1..1227: mol_type = other RNA
atggctccattgcagcctacactgaaaacaaccaagaagattgcatcttccgccaatctgttgaccgccctcgggcttgatgagagcgagctgagttctgccctcgcaatgacaccggcggaaagatacacagccaagaaggtgcccaagtcatctgggggcgagaggactgttcatatcccccatcctctcatcaaaaaaatccagcggcggattaacaaccgcatcctgagtaagatcgtgatctggccctattatttgtttggctctgtgcccagtgagattgatgtcctgtacgaagacgagatcttgaagagagactacataagctgcgctcagcaacattgtagggccaagtccattcttaagtacgatatagagaacttcttcgaccacattcactacgacctggtgtatgagattttcactaacttcttcaactacaatgacgagacttccaagactctctcaaatctttgttgtatggagtccgatgatggacatcacattgtccagggcgcacccaccagcagctacctagcatgcctgtgcctgtgggatatagagcataaagtcgtgacaagactggaacggaacaatctcgtgtatacccggctggtagacgacatcaccataagctcaaagattcacgactataactttgagaatgccaagaaatcgatcgaggacatgattcacggaaaggattttcctatcaataaagcgaaatcacgcacattctctattagcaatgaaccattactagtgcacggcctgagggtgaactttaacaccccgcgcttaccaagtgacgaagtgggaagaataagggctgccgtgaaaaacatcgaactccgagcggccaaaaataatttccgcacctccaaggcttatagaaaagcttttgaaaaatgcctgggtcgggtccataaattagccagggtaggtcacaattcgcacattaagttgcgagatagactgctaaagatcaaaccactgcctagtatgcgcgatataaacatggtcaagaggtatatcgatagactcgaagttcaggctaagtccggggttgacgacattaagtactcacgttcctatcacatcaccatgtactaccttaatatcatcaaccggactgaacgataccaaagcctggttagcgaactgcgtgcaaggctccatcttattacgccttctaaagaggatcgcggcacgtattttgactga

SEQ ID NO: 10815 - RNA, 1227 nt, synthetic construct
  source 1..1227: mol_type = other RNA
atggcgccccaaaaaccaacgttgaagacagataagaagatcgcctccttagcaaatctcctgaccgctctgggcctggatgaatctgagctcctgtctgccctgagcatgacttacctcgagagatacacccccaaaaaggtcccgaaaagttccggtggggagcggaccgtgcacattcctcatccactcattaagaagatccagagacgtatcaataacagaatcttcagcaagatcgttatctggccctattatctgtttgggtcagtacctagtgagatcgatgtgctgtatgaaaatgagttgttgaaacgcgactacatatcctgtgctcagcagcattgcaaagccaagagcattctcaagtacgatattgaaaacttcttcgaccacattcattatgaccttgtgtacgagatcttcactaagtttttcaaatacgaccacgaagtctctaggattctttctgatttgtgctgcattgacggcgaagaggggaatcacatagtgcagggcgctcccacatcgtcctatctagcatgtctatgtctttgggatgttgagtgtaacatcatcaaaagactggaacggaaaaaccttgtgtatacaaggctagtcgatgatattactgtcagctccaagatccatgactacaacttcgaaaatgcgaaaaagactatagaggacatgattcatggaaaggactttcccatcaacaaggaaaagtctcgaacctttaacatttcgaacgagccgctctccgtccacgggttacgggtgaattttaatacacctcggctgccttcagacgaggtaggcaggataagggccagcgtgaagaacattgaattgcgcgcagctacgaacaactttagaacctcaaaagcatatcgcaaagccttcgagcgatgcctgggtcgtgtgcacaaactggcccgggttggacatgaggcccacatcaagctcaaagagcgtttacgaaagattaaacctctgccaagcccaaaggacgtaaataaagtgaagcactatgtggatagactcgaagttatcgctaaaacaggatgcgacaatatcaagtacagtcgctcttaccacataaccatgtactatctgaatatcgtgtacaggactgaaaagtatcgcccactggtcagtgagctgcggtcaaggcttcatgcaatagcccccagcaaggaagagaaaggcacctacttcgattga

SEQ ID NO: 10816 - RNA, 1269 nt, synthetic construct
  source 1..1269: mol_type = other RNA
atgtctatcctcaagaatgttactaatagcagcgtgtctgtcgcccccaataaacctacgctcaagaccaccaagactattgctagcctggccaacctgtgtacagctttaggtattgatagcagcgaattggatgccgcacgctccatgacgtcctcgcagagatatgtcgagaagaaggttccaaagagctctggaggagaacgcaccgttttcatcccacacccgctcattaagaaaattcagaggaggatcaataaccgggtgttctctcgaatagtggtatggccctactatttgtttgggagcgttcctagtgaaattgaggttactcaccataacgatattctaaagcgggactatatatcatgcgcgaatcagcattgcaagtccaaaagtatcttgaagtacgacatcgaaaatttcttcgacaacatccattacgacctggtgtatgaactgttcacagatttcttccactattctgatgacgttgccgaggtgctttcagatctctgttgcatcaatggcgtaaacggatacgtggtgcaaggggctcccacctcctcctatctggcctcactgtgcctgtgggacgtcgagtacaaggtggtcaagaggttagagcggaaaaatctggtgtatacacgactcgtggacgacattaccgtcagcagtaagatacacgactacaattttgaaaacgcacgtcaggctattgaagagatgatcctgaacaaggatctccccatcaacaaatccaagtcgaagagttttagtatttcatctgagcctctctccgtgcatggcctgcgggtgaactttaacaccccgagattgccaagtgacgaggtggggagaatcagagcatccgtgaaaaacatagagcttcgtgcctctactaataatttccgaacaagcaaagcttatcgcaaagcttttgagaggtcattgggccgggtccacaagcttgcccgtgtaggccacgaagcacatcggaagcttaaagacagactactgaagattcagccacttccttccaaaagagatgtccagcgagtgaaacgcgcagtcgatctgctggagcaaaaatctaaaggctgtgtggacgaaatcaggtatgccaggagctaccacatcgcgatgtactacttaaacatagtgaaccgcactgataggtacaagcctttggtcgagtcactgcgcacaagactccacctgatcgcccccgataaagagaaacatggtgactactttgaggaagtatga

SEQ ID NO: 10817 - RNA, 1173 nt, synthetic construct
  source 1..1173: mol_type = other RNA
atgcccaaattgatctcaaaaaacaagatctcttccgtggataacctctgtcgggctctggatatcagtagatgcgaactggatgccatctacgccttaaatgatgatgaaaaatactcagagccttctaagctggcgttcaaaaaggacgggaagaaacgcgtcattaaatgcccgattcctattataaggaaagtgcagaacaggatcaactcacgcatctttaaaactctggtgaagtggccagaatttctctttggcagtataccaaatgatgagttcgaggacattgaattaaagaaggactacgttacatgcgcaagcctgcattgcgaagctaaatctttactcaaaatcgacatcagcgattttttctccaacatacatgaagacttcgtccgagaacttttccttgacttcttcaattatgatgaggacctggttgactatctcattaagatctgttgttacaaaggtaccctggtgcagggagctcttaccagttcctatattgcatccttgattctatggaatgaggagagatatgtggtgagaaagctggagcgctggggcctagtgtatactcgtctggtcgatgacataactgtcagctctaagcgaagtaagtataattttagcatcgccgaacaccatatatacgagatgctattcaaaaaagacctgcccgtaaacaaggaaaagtccaagaccttctttagctcaagctccccactcacagtgcatgggctgagagtgtcatttaagacccctaggttgccttctgacgaagtacgcaggattcgagcagccgtccagtgtctggagaatctctactccgagcccaattataatacgagctattcgtatcggaaggactttcaacggtgtgtgggaagagttaataaactggctcgcgtacaccacgagaagcacaagccattgatgaacaggctgaggaaaatccgtccgaaaccctcggaaattgaccttaagatttccaagaagatcctgagcaaacttaagatggagtacgacgacaaaaaggataaatactggtacaagaagcagtactggcaattggtggatcgggttaacctcatctctagtacataccacaaagaggcctgctacttccggaacgagctcaagaacatcaagcccgagtttgattga

SEQ ID NO: 10818 - RNA, 1173 nt, synthetic construct
  source 1..1173: mol_type = other RNA
atgccgaggctgatctccaagaataagatttcttccgtggataacttttgtcacgctcttgacatcccaagacaggagcttgatttgatttacagtctgacagacgaagacaagtatacagagcctgctaaattggcctttaaaaaggacggaaaaaaacgcgtcatcaaatgccccactccgtcaattaggaaggtccagagcagaataaacagccgaatctttaaaaagctcatcaagtggcctgaatttatctttggaagtataccaaacgacgactttgaggagcacgagctgaagaaagattatgtgacctgcgcctccctgcattgtgaagccaagtccttactgaagatagacatcagcgattttttctctaacatccatcaggatttcgtggaggaactgttcaaaaacttctttaagtacgacgaagagctggtaaagtacttggtccacatttgctgctataaaggcaccctcgtccagggcgcactaacatcttcctatattgcttccttgattctgtgggatgaagagaggaaagtcgtgaagaaacttgatcggtggggtctggtttacacccggctcgttgatgacataactgtgagctcaaagacttcgcgatacaatttctcagtggtggagcaccacatatacgagatgctgttcaaaaaagaccttcctgtaaacaaggagaagtcaaaaatcttcttcagcagttctagtccactcacagtgcacgggctgcgggtaagtttcaagactccaaggcttccctcggatgaggtgagaaaaattcgcgccgcagttcagtctctagaagtgctgtatagcgaacccaattataatacgagcttcagctacagaaaagattttcaacggtgtgtcgggcgcgttaataagctcgcacgtgtgtctcatgaaaaacataagcccctgatgaatcgtctccgcaaaattaagcccaagccttccgaggtggacatcaaaatcgcgtataaagtgttagccaagttaaagaaagactacaccaacaagaaagacaagttttggtacaagaagcaatattggcagctcgtcgatagagttaatctgatctcaaccaccttttacttcgaagctgcctccattaggaaggatttgatcaacattaagcctgaattcgagtga

SEQ ID NO: 10819 - RNA, 1170 nt, synthetic construct
  source 1..1170: mol_type = other RNA
atgcctaagatcatccccaagaataagatctctaaagtcgataacttctgccaggtgctcgatatatctagagaagaactagaggccattattcagctcaacgatgaggataagtacctcgaaccgaaaaccctggctttcaaaaagaatggtaagaaaaggctcgtgaaatgtccaatacaacctctcaggaagattcagaaacgtatcaataatcggattttcaaggagatcatccaatggccagagtttgttttcggctcagtgcccaatgatgatgagctagaaattcagaaagactatgtcacctgtgctagcctgcactgcgaggccaaatccctgctgaaggtggacataagcgattttttcttgaacattcatgaggactttgtgcgagacttattcaagcggttctttaattacgacgaggaattgtgtgattatctcgtagcattatgctgctacaatggcaccctggtgcagggagccctgacatcatcatatcttgccagccttatcctgtgggacctggagcggagcgtcgtcaacaagctcaaacgctggaagctgacttacactagactggtggatgatatcactgtctcgtcgaagatttccaaattcaactttgagattgcggaacatcacatcaagaatatgctcatgcttaaggacctgcccgttaattccaacaagtctaaggtcatctactcttcatcttccccactgatggtgcacgggctgcgcgttagctttaaaacaccgaggctacccagtgacgaggtgagaagaattcgggcagccgtgcagtccttagaacggttgtataatgagcctaactacaacaccagtttttcctacagaaaggaccaccaaaggtgtacagggagggttaacaagctggcacgcgtgaaacatgaaaaacacaaggctctgatgcgacgtcttaaaaaaatacgccctaacccaagcattgtagacgtaaaaatcgccgagaagattttggtgaagcttaagaaagactaccccacaaagcatagtaaatattggtatgcgagacagtattggaagctgatcgaccgcatcaacattatcaaccagagcttcataatcgatgccaaaaggttgcgagctgaagcaagtaaaatcaagcccgaaaatacgatatga

SEQ ID NO: 10820 - RNA, 1176 nt, synthetic construct
  source 1..1176: mol_type = other RNA
atgccgaagataaccacgactaagaaaatctctaacatcgacaactttgcaaaggcaataggagttagcaaagagtacatcgattcagtgatctctctgtctgatgatgataagtatacagacccaaagaagaaggcctttaagaaggacggaaaaatccgaatagtgaagtgcccctctagcaagctgcggaagattcaatctagaattaacacccggatcttcaaggatttgataaaatggccggactttctgtatggctccatccctaatgatgacgacggtgaaatcgagattaagaaggactacattagttgtgcaagccgccattgtgaggcccgctcgttacttaagatcgacatcagtgacttcttccttaatattcacgagtccttcgtctatgacctgttcaacaagtttttcaaatacgatgatgagctttgccggtgtctagtaagtctgtgctgttacaaaggtaccctcgtgcaaggcgctctcacgtcatcgtacattgctagcttgattctctgggatgtcgaaagtaatttggtgaggcggctggaacgttggcagctggtctacacacggctggtggatgatattactgtgagttccaaagtggaaaaatataacttcgacatagccaagtatcacattaaggaaatgctcttttccaaagacctgcccatcaatgaaaaaaaaaccagcgtgagctacaattcatctacacctctgatggtacacgggctaagagttagctttaaaacccccaggcttccctcatatgaagttaagaggattcgcagctctgtgcagtccttagagttactgtttaaggagcccgggtataatacttccttcggctatcgaaaagattatcagaaatgcatggggcgagtcaataaactcgcgagagttcagcataacaagtttcctattctgatgaatcgcctgaagaagatcagacctaaatgctccaaattggatgtcaagatatcaaggcgtatcctcagaaaactccaggaggactacccacagaagaaagacatgttctggtacaagaaacagtactacaaacttattgacaggatcaactttatctcaaacacattcaagagcgaggcccatgaaattcgcctggacgctaagaaaatctccccaccagaggatgactga

SEQ ID NO: 10821 - RNA, 1188 nt, synthetic construct
  source 1..1188: mol_type = other RNA
atgatccaacccaagtataagttcggaccaatcaaagatttgaaccagttggccgccagtctctcctacacactaaaagagctgaacacactgctgtctaccccagacgataaaaaatattccgaccccagccagcctgcgtataagaaggacggctccatccgtaaaataaagaacccctctgatgattttagacgggtacaaggccgcattaaccacaggatattcaaacaggggattgagtggcctagttatctgtttggatccatccctaaggaatcagcaggtagagagactgattatatcgagtgtgcacgtagacatgtggaggccaaaagtatttgtaagatcgacataaccaacttctttgacaacattcacgagatcttcgtgtacgaaatgtttctggaactgtttaggtttcccgaacctgtcgctaaagcactgacgaatctatgctgctataacaaatcattggtccagggtgcaaggacctctagttacattgctacactgatcctctggaaggaagaagggcgcatcttcgagcggctctcgcggaaaaatctggtgtacactcggcttattgatgatataacggtgtcttcaaagatcgctaactacaacttcgatgttcccaaaaagcacatcgagaacatgctcctggagattgacttgcctgtgaatgaagacaagtttaagatccagtacaccagcatgaccccccttgaggtacacggcgtgcgcgtgacttattctaagcctagcttcagcaagtccgagatgatgaatattaaagctgccgttcaccatctcgaggtcctagtcaaaactccaaatacacgaaccgagatgtggtaccgaaaggactacaataggtgcatggggcgggttaataagttagccagggtgaagtcccccaggcataagaagcttgtcaaaaagcttaaggtgattagaccactgccgtctttaaaagacctgaactacagcaaaatacgcttgaagaacctgaaagaagacagcaaaaacagcaagaaaatcgcgtcgtattcatactacaagagatacttcttactcatgaatcgcacaaatctcatcaagctgacttatccagataaggccaaagcccttcgaaatgaactgtacaaaattaagccgaagtataatccaaaggacttcaaatga

SEQ ID NO: 10822 - RNA, 1173 nt, synthetic construct
  source 1..1173: mol_type = other RNA
atggacatcccaaaatataatcaccctccattcgtcgaattggacaagctatgcaagatgctcagaatctctcgaacagagctggaaaatatactgagttccccctccgatgtgcggtacaaggacccaaagactactgcttataaaaaggatggctccattaggaaaattaaatgtccgctgaaagaacttcgctctattcaggagaagatcaacaataacatcttcaagaccgggttttattggcctaagtacttatttggctcaattcctaagaaagcagcactctctaatagggattatgtgagctgtgttagcttgcattgccgcgccaaatcaatctgcaagattgatattagcaacttctttgacaacgtgcacatctctctagtcaaatccgtgttcaagaatctgtgccacttttcggatgaggttacagatgtgctggctgatctgtgttgttacaatgatttcctggttcaaggagcgctgacaagctcatatctcgccaccttgattctgtgggacaaggaacccgaactggtggagaatctcaaaaaaaaggggctcgtctacactcggctcgtggacgacataacgatcagtagcagaatttccaactacaactttgatatcgccaccaagcgggtggaagtgatgctgctggagaaagaccttcccatcaacaagtctaagtacgagtataactacctctccatagagcccttaaccgtacacggcctcagagtctcatttgacaaaccgaaactgcccaaacacgagagcagcaacatccgggcatctgtgaaaaacttggagaatcttgcccagctggacagtgcccgtaccaaaatgtggttcaggacagactacaatcgatgcatgggtagggtaaataagctggctagagtcaagaaccagaagcatcaggcgttagtagaacgtttgaaggttatagaaccacttccctcaataaacgacattaagtatgccagactgaggctcaagaatctggaagctgattactccaccaaaaagaaaacgttcaattacaagaagcgctactataaactaaaccaacggatccatcttatcagtaagacttatcctgatgtcgcaaaaaagattcgcgagagccttaaagaggtgcccccagacgagaagcctatctga

SEQ ID NO: 10823 - RNA, 1176 nt, synthetic construct
  source 1..1176: mol_type = other RNA
atggactctaatctttatcgagacaatcctatcaatagcatccgcaatctccttgccgctttggatatttccgagtcggaatatgaaaagtttctgatcaccaaggaagaggatcgctaccatcggccacatgcagaggcctttaagaaggatggatctgttcgcaaggtgtactgcccatgtaagctcaccagaaaattccaaaggagactgaacaacaggattttcaagaagagtatagtgtggccaccgtacgtctttgggagcattcccatagatgtgaagacacatgagtcgaaagattatatcaagtgtgctgctatgcactgcaagtccaaaagtcttctcaaactggatatcagcgatttcttcgacaacattgatcagtaccacgtggtgaaaatctttactgaggctttttcataccaccaggaagtggcagacttcatttccaaaatctgctgtttcaaaggccatctcgtgcagggcgcattgacgtctagttatgtcgcaaatctcattttctacgacttggaacctgagctggtcaaaagtttgtcccggaaaaacctaacatatactaggttcatagacgacatcaccgtatcttctaaggtgagccactataacttttcctccacaaagagactgatcgaggacatgctgttaaaaaaaaacctccccctgaatgagcaaaaagtggaagtactctactcatcaaccaagcctctgatggtccacgggctgcgggttgacttcagcgagccgagactaccaagtaaggaggttgccaacattcgagcggagctgaataacctgaagcggaaggccaaagaaaaaaagtaccgtaagtctcggtcctaccgtaaatcatacgacaaatgtctgggaagggtgaataaactggcgagggtcaagcacagcgcccatgccaagtttaagcctcagctcaaagaaatacagccattaccctcagccgttgatatcaaactgtgccacgtaatacttaaaaagttggctagctttcccgatgacaagagagagtcttattggtataagaagcgcttcaaccagttagtctaccttaacggtattatcaagcgcctgtaccctaagagctattccatcattaaagagaaatccaaggaactagaacccaagagccgagtgtattga

SEQ ID NO: 10824 - RNA, 1185 nt, synthetic construct
  source 1..1185: mol_type = other RNA
atggaaattaagtattaccgcggcgacccaatcaagaagctcgagaattttatctcctttttagatctggaggatgattacgaggcattcatatcttccaattccagcagtcggtaccgtgagccggttaagtctgcctataaatctgatggctcaaaacgcagggtcctatgcccaaacaaactgacaaggaaattccagagaaggatcaacaatcggttctttaagccgaaaattatctggccagagttcgtgtacggctccattcccaagcttataaatgggatagaagactctagggaccatattaagtgtgctgaaaagcattgtggtgccaagtcactgctgaaaatggatatctcggacttcttcgacaatatacacaaggaacacattaaggacatactcgtgaatacgcttgacctgagcaacgaagtagccgactttatttgcgatgtttgttgcttcgagaataccttagtgcagggggcccttaccagcagctatgtcgcaaacctgatttttttcgacctcgaacatttgttggttaagaggcttgagagaaaaggactgacttatacacgctttatcgacgatatctcagtgagctctactgcttcaaactttaactttaacacagccaagaagcttatcgaggacatgctgctccaaaaagacctgcctattaatgagcaaaaggaggaagtaagttacagcagtataaaacctctgatggtgcacggactgcgagtcgagttcgatcagccccgcctgcccgctaaggagatcgctaagatccgggcagaagtgcacgcattgaccaaaaaagcccaggaaaacaattttagaaagtcacgaagttaccggagatcctttgatcggtgtctcggacgcatccacaaattggccagagtcaagcatcccaagcacgggtactttaaaaacgcgctgtctgatattcagcccttaccttccgcggtggacatcaaacattgcttcttcattatcaagaagctagagacttatcctgatagctatagggagaaatactggtataagaaacggttcaacctcgtcgtgtacatgaacggcattatcaagcgactgtataaagataagtacaccgagatctccgagagactcaaagaaattgaaccaaaggaccgtaaatacgacatcggctga

SEQ ID NO: 10825 - RNA, 1164 nt, synthetic construct
  source 1..1164: mol_type = other RNA
atggactactgtaaatatcccaaagcccctatcctctcaatcaaaaaactgtgcttgcatctcggcgtggccgagagcaatctcaagaaggcacttttgattccccataacttgcgatacaaagatccatcaagtccggcttataagaaggatgggtctagaaggctcatcaagagtccaaaagatcctattcgcacaattcagagaaagttaaacagtaggctattctctcacgttaagtgggcctcctacctgtacggcagcatacctaaggggaaaaatggagacatcaaggattacattggtgctgccaaggtgcactgccaggcgaagagcatctgcaaattggatatcagcgacttttttaacaacatagcagagccccacgtcatcgagatgttcaggctgttcttccggtttagcgagacagtgtcaaaggatttagctaatgtggtcacttataaaggcaatctggtacagggggcactgacgtcctcttacctggccatgctgctcttctgggacctggaacctcaacttgtgtcgagactgaaaagcaagggtgtaaaatataccaggctggttgacgacataacactgtcctctgaagtgcacaattttgactttaagctctctatccgtctggttgaagaaatgttagcaaaaaaggaccttcacctaaatgaagtgaaggtcaaaagctcctatatttcaaccgagcttcttctggtccatggcctcaacattaacaatgacaccccctgccttccaaagggagagctgcgcaaagtacgggccgcggtgcataacctctgttcagaggctgatgaggagattcggaaggaatactggtatcgcaaggaatttgagaagtgtttgggccgagtccataagctgaagtcttttgggaaaactcggagcttcaacaatctcatgaacaagttgaatcgagttaagccactggcctccaaacaagacctgaaatacgctatgaagagagtggcctcgctgaagcgcgattacaagaaccgtaggaaacggagttccttcacctacagaaaaaggtatttcatcgcacagtataaggtgggattcctgaaggacgattacagtctagaacacaacctcttacgctccgagctgaaaagagtgaaaccgaaatga

SEQ ID NO: 10826 - RNA, 1113 nt, synthetic construct
  source 1..1113: mol_type = other RNA
atgagtctgcacctgggtgttcagacgagtgacattaataaagcgctgcttattcccgctgattctaggtataaggatcctagcagcccggcatacaagaaggatgggaccaagcgcttgatcaaaagccctcgggatcccattaggaccctacagcgtaagatcaacacaacccttttctgtcatcttaaatgggccaactacctctatggcagtattcctaagggcaaagagggcgatgtgaaagactatataaacgccgctgcaattcattgtcagagaaagtccatatgtaaactggacatagctgactacttcaataacatcacagagcaccacgtgaacaatctgtttaacgacttctttcgcttttcagaagacgttagtaaagtcctgaccgatattgtctcgtataaatctaatcttgtgcaaggagccctgacttcctcctatcttgcaatgctgttgttctgggacctcgagccacaactcgtcactagattgaaatacaaaggcataaagtacacacgattggtggacgatatcactttatcttccaatgttcatgacttcgatttctccttagccatcaagctggtggaggatatgctcaaggagaaggatctgcacttgaatcaggtgaagattcagtcttcatctatctctacacagctgctactggtgcacggcctcaatatcaataataagctgccatgcctcccaaagggagagttaaagaggatccgggctgccgtccattccatctcctgcgtgaccgacgaaaagatgagacgggaaaactggtttaggaaggattatgaaaagtgcttggggagggtctacaagctcaaatcattcggtaagaacaagagcttcaacaacctcatcaacaaactaaataaggtacggcctctggcctcaagcaaggacctgaagtatgctaaaaaaagagtgcagagcctgaagtcagactataaacgcggaaaaaaaaaggagagctttgcctaccgcaaacgttactttttcgcacaatacaagatcgggttcctcaaggtagaatttccccaggcgtactttattctgcgaagtgagcttaaaaaagtgaaaccctga

SEQ ID NO: 10827 - RNA, 1182 nt, synthetic construct
  source 1..1182: mol_type = other RNA
atggacagatgttcctacattaattcaccaatcagctctttgtcctctctgtctaagaccctgggagaggatatctcgcaaatcgtggcagttgcagacgcccccgcgtcagagaagtacaataaacccaagacaccggtgttcaaaaaagataaaaccgagcgcattgtcaggtccccagttagggctcttcggagtttacagtatcgcattaacaagcaaatcatggtgaagggcgtgagctggccttcttatctatttggctccattcccaaaggacacaatggtgaagtctcacaggactatatcgccgccgctaaagtccactgtggggcaaagtctctctgctgccttgatattagcgacttctttgataacattcacgcttgtgatgtgtttgccgtctttaacgaactgtttcactttagcactgaagtcagtaccatcctcaccaagctggtaactttcgatgagcgacttgttcagggggcgctcactagttcatacctggccatgttggtactatggaagactgaacctggccttgtggaggctctcggacggaagaatatcaactactctagactggtggacgacattacactcagcaccaaaaagtacaattataacttctcgtacgaggtgtcactgatagaaaagacactgcatgaaaaggggctcttcttcaacgaggagaaagccaaggtttatagtgtctccagcgagctaatgttagttcatgggttgaacgtgatgggaaaaaatccagcaatgccaaggtatgaagctcgtagaatacgggccgccgtaagacagttggagaaactggcagaacaggagggcgccaggtgcgagatgtggtacaggcgagaatacaatcgctgccagggtagggtgtataagctggagcggtttggcaaaagcaactccttccgtaacctgctcaatcggctgcagaagatcacgcctttacccagtaaaaaggacataacgtacgccaaactgagagtcaaaaagcttgaaagcgacttcaacaatgtgaagaagcgcgagacatataactatatgcgacgcttttccatagcgtcccatagagtggcattcctgaaaggttactacgatgaagagtggaagaagctgaggacccgtttgaaggctatcttccctgactaccggaaatga

SEQ ID NO: 10828 - RNA, 1206 nt, synthetic construct
  source 1..1206: mol_type = other RNA
atgaccactcctgacatccccttgtttaaggctggtccaattaagtcaaaggcccatctggcaaaagttctcaacattgacattagcgacattgacgatgtcttgaatatgcctttagataagcggtatagacctcccaaaaacccaatcctgaaatcagacggaacgatcagaaaaatttttaaccctcaccgcaaggtgcgctttctacagcgacgtatcaataatcggataaacaagcagtgtatcagatggcccagctacatatatggatccatcccgaagtctattgaaaatgggaacagggactatgtagaatgcgcccacaaacattgcggcgctaaatcgattcttaaggtggacatcagcaatttcttcgataacatccaggagttccacgtcaagaatatgtttaagaatctcttccgctacagcgatgaggtgagtgagattatcacaaatatatgctgttacggggatcgtgtggtgcagggggcccttacctcttcatacattgcctctttgatcctgtgggacgttgagctctatctcgtaaggaagctaaagcggctgaacctgacatatactaggctggtggatgacatcaccgtcagcagtacatctcataactttgatttcaatggaacctcaaagctgattgaggagatgctgaatgagaagggtctgcctcagaacatagataagactcgggtgtatcgtctgagtagtgagcccctcaaggtgcacgggctcgtggtttccttcccgaatccaatttactccaaagacgaagtgaagaatatccgcgctgccgtacatcagttgaaacatagagctgaaaaacaggaagatcagaaaagcaaatcttatagaaacgactaccaaaggatccttggccgagttaacaagctgtccagagtcaagaacgacaaacacgcaaagcttatcaagattttacggtccgatggcctccgaccaaagccatcccagtctgacaaaataagcgcagagaaaaggttcgataaaatagtcatcgactatagtcggaagaagtcacaatacaacttctacaaaaggtaccactacttaaagcacctgctgttctttatcaaaggagaaggcggcagcgattacaaaaaatttgcgcaagacaagcttgacaaactgtcccgctatgaacccgagtttaaaattaaggattactga

SEQ ID NO: 10829 - RNA, 1026 nt, synthetic construct
  source 1..1026: mol_type = other RNA
atggacaacattaagccgatctttcaggcaggccccatcaagtctatttcccggctggtgacagctctcggaatcaccttaagcgaactggaacacgtgctgcatctttccccaaatgagcgatattccgacctaaagaatccaatctacaagaaagatggaagcgtcagggtaattaagaaccccaatagagatatcaggaaaattcagttcagattgaaccaacggattagtaaagcttgtgtgagatggcctgattatctgttcggatcaattcctaaaaccgatcagtctggcaaccgggactacgttgcctgcgcgcaggttcattgcggcgctaaatcgatcctaaagctagacgtcagtagttttttcgacagcatacacaaggatcacgtctacagcctgtttcacggtctgttcaggtactcagaagaggtgtctctgtgcctcgccaatatctgttgttacgaggaccatctcgtgcagggagcactcacgagttcctacatcgcgactctgattttgtgggacgtcgagcaggaattggtgcgcaagcttagacgagcaggcctgaaatacactcgacttgtggatgacataaccatatcatctacgtgccatggttatgatttctcaatggctgagaagctcgtttttgacatgctggccgccaagtcgctgagccttaacgtgaaaaagagtgtcgtatataggactgggaccgagtctttgaaggttcacgggcttgaggtgagcttctctaagcccaatctgccaaagtccgaggtgaagaaaatccgtgccgcagtccatcaaattagcctgctcgccaaaaacaaaagcgtgcgcaggacctacaagtatcgggctaattatcaccggacactcgggcgtgtgaataaactcgccaggttagaaaacgacaagcgcgaccgctttttaaaagtactgttgtccacatccgttagacccctgcctagtggccgcgatactgggagagattcaacactgtgtataatctga

SEQ ID NO: 10830 - RNA, 1176 nt, synthetic construct
  source 1..1176: mol_type = other RNA
atgaataccaaattcgaatttctgggaagccctatcaaagatatcgatcacttggctaaaattctggatgtggacattgaggacatactctatgcggtacagattgaggacgaggataaatattcttctcgaaccatcgctaaaaaagacggcagagaaaggaccgtgtacaatcccaaaccaattttcagaaagattcagagacgcattaagaatagaatattctcccagatcagttggcccgattttgtcttcggctcaattccagcggacgacaacagccacgatttcatcgaatgtgcacaacaacactgtctagcccagtctatactgaagcttgacatagaggactttttcgataatatctctcaggagctggtagaaagcatctttaaaaagttctttcggtaccctgatccagtctccgagatactggccactttatgctgcgtggacctcaaggtcccgcagggtggaattacatcaagttacctggcatcaattgcacttcatagcttagaagaaaaccttttccttcggatgaagtcaaaaaagttaacctatacacgctatgtcgacgatatcactatctcctccaagaacagagactttaacttcgaggctatcataaacattgttgagtccttgctcaacaatctgaatctgcccctgaacaagaagaaaatcgagattaataggttctcctcgatccccctgactgttcacaatatacgtgtggattttaagtcgccaaggtacgacaaaacagaagttaagaacattcgggctgccattcatcgcttgtctgaactagccaagaagcctaatcatcgaacacactactattatcggatcgactttaataggtgccagggcctcatcagcaaactgcaacgggtgaaccatcagagttatacgaagctccaaaacaagctgaataaaatctatcctttgcccaacgacagcgacatcaaatacatcgagaagagtattaaggagctgaaagtgttctttccgaagcagattggggaagggaactacatttacaacaagaagttcttcaagatccagcataggatcggttttctcaaatctcaccctaaaaagatctacgatagcaaagcctttgatctgaacgccgagctccagctttaccgtatccgcaataaggtgtga

SEQ ID NO: 10831 - RNA, 1173 nt, synthetic construct
  source 1..1173: mol_type = other RNA
atgaacactaagttcgaatttttgggttcacccattaaagatatcgaccatttggcagagatcctcgatctagacattaatgatatactattcgctgcccagctggatgatgcagatagatatacctctcgttcaatagcgaaacccgatgggcgggagcgcattgtctataatccaaagcccattttccggaaaattcagcgaaggattaaaaataggctgttcacacagatctcctggcctgactttgtttttggaagtatcccagcagatgaaaagtctcacgacttcatcgagtgtgcccagcagcactgcctcgcacaatccgtactcaagctggacatcgaagacttcttcgacaatattactatgaggctggtacaggacatctttgaaatattcttccattaccctgaggacgtgagcgaaatactggctcagctgtgctgtgtggatctgaaagtgccacaaggcggaatcacttccagctacctggcctcgattgctctgttttctctggaggaaaagcttttcctgagattgaagtccaagaagttaacatatacgaggtatgtcgatgacatcaccatctcttccaaaaaccgcgactttaactacgacagcatcattaatattgtggagaacctgttaaacagcatcaatttgccactcaacaagaagaagattgaggtgaaccggttcagcagcacacctttgaaggttcacaatatccgcatagactttaaagaaccgaaatacgacaagtccgaggtgaagaatattcgcgcggccatccaccgactttcagagctcgccaaaaagcccaaccatcgaacacactacttttataggattgacttcaatcgttgccaaggtttagtttctaaacttagacgggtgaaccatcccagttatctgaaactccaggataggctcaacaagattgctcctataccaaataacgccgatgtcaaatacatcaagaactcaatcatcgagctgataaagtactttccgcaacagaaaggagaaggcagttacgtctacaacaagagattctttaaaacccagagccggatcgggtttctgaagagtcaccctaagaaaatctacaataatcttgccgtgcagctcaacaccgagcttcagctatatagaatgcgcggcaaatga

SEQ ID NO: 10832 - RNA, 1200 nt, synthetic construct
  source 1..1200: mol_type = other RNA
atgaatgagctcaccaaaattatctacaaggggggtccaatttccaggtctgagctatctactgtgttaggagtggacgaaatcgagttggattttattctcatgctggaagacgaggccaagtacaaaagtagccagctagtgaaaaatgatgggaggttccgaaatattaataatccatcccccattgtcagaaagatccaacgcaagataaagaaccggatcttcagtttgatctcctggccagtctatctgtatggctcgatacccgctgagaatgaaaactcacatgatttcatcgcgtgcgcctcccgacattgtcgggccaagtctctcgtgaaacttgatgttgaggattttttcgacaacatatcacaggagcttgtacaaaagatcttcgagaatgttatgttctttgacaaggatgctgcagataccctagctaaaatttgttgcctggacggcagagtgcctcaagggggaatcacatcaagttacctggcaaccttggccctgtacagcattgaggagagactctattttcggctcaaaaacaagaaactcgtctatacacgctatgtcgacgacattacgatttcaagcaaggaccgtgatttctccttcgacatgattatcaagatcattgaaaaggaactgaactctttagaccttcccttaaacaaagacaaggtggaaatttgtcggtttggtctggaacctttgaaagtccacaacgttcgcgtggattctaaactgcccaggtatgatcaggccgacgtaaaaaggatcaaagctatggtgcaccgattggagctgctggtgaaaaaacctaattaccgcactcactatttttaccggcaggattataatagttgcatgggattcatcaacaaactgggccgcgttgagcatccgtcctactttaaactcaagaacaagctcaagaagatctttccactgccgaataacgcggatgtaacatacgtgaggaatagcatcgacaacttgaaggaacttaagcttaatagcaagaatgcatttgtgtaccagaagaagttctacaagatacagtaccgtatagccctgctcaagaaacaccctaaaggcatctataacgcaaaagccgtcgaactgaacagggagctgcagctgctgagactgaacgacgaacttgagagaaagaccgaaagcggcaactga

SEQ ID NO: 10833 - RNA, 1179 nt, synthetic construct
  source 1..1179: mol_type = other RNA
atgataaagtccaagtacatatacaaaggaagcaagattgactctctagataagctgtcagaagtcttgtctatcgatattgatgagcttactaacgttcttctgctggaagatgaggctaagtataaggccggattcatcaaaaaaagcaatggcaagctgcggaacatttataatcctaatacctctctccggaagatccaaagacgcatcaagaatcgaatatttacccagcaaatcgagtggcccgattatatttttggcagtattccagcagatgaaatttcttcaaacgattacgtggcatcggccgagaaacactgtggcgcacgtgctctgctaaaactcgacattgaggacttctttgacaacatcacacaagagctggttgagaagatcttcaagaacttcttcaagtacaatgacgagctctccaaaatactagctcagctgtgctgcgtcgatggcaaagttccccagggaggcattacctcctcctatatcgccagcctggcgttgttttctattgaagagcgcctctttttccggctcaaaaacaaaaagctgatctatacgagatacattgatgacattaccatcagcagtaaaaattccgagtacaatttcgactccatcattaaaattgtggaagggcagttgaatagcatcgacctgcccttaaacatcgacaaaatcaaagtggaaaggttcagcagtaaggcgctcaaagtacataacatacgtgtggatctgaagacacccaagttcgacaaaatagaagtgaaaaacatcagggccgccattcacagactcgaacagttagtcaaaaagccgaattatcgcactcactacttctacagaattgattttaaccgatgtcaaggtctggtgtctaaattgtccagggtcaatcacgtgtcagtagaaaagttgcagaggaagttaaacgcaatcaagccacttcctaacaaggccgacatcaagtttatcgaggacagtattaagtcacttaaaaagcacttcccactgcagaaggagaatgggagctttatatacaaccgcaagttctttaagatccagcataggatcgggtttctcaaatcacatcctaagggtatctatactgaaaaagctatcagccttaatacagagctgcagaaatacagactgatacggtga

SEQ ID NO: 10834 - RNA, 1185 nt, synthetic construct
  source 1..1185: mol_type = other RNA
atgaataacgtcaactttgtgtaccggagcaagaagttccaaaagttcttagatctggctaagagattggatttgagcgcagcggaaattctgaagataagcaagattccagattctgagaaatacgaaacagatgagatagaaaagtcagatgggcgcattaggaaaattcataagccttgcgctgacatccggaagatacagagacggatcaataagaggatttttaatgccgtgatctggcccaactacatttatggtagcatccctgcaaacaaactgaacaacgaaaacaaagactatgtggagtgcgcaagcatgcattgtcaagcaagaacgatcctgaagctcgatattgaagatttcttcgacaatgtgtctgaggatctcgtgtacaggatctttaataagctctttggtttttcagagaaggtcagtctcgttctagcccgaatctgcaccgtcgacggagcattacctcagggaggcctgaccagcagttatctcgcttcactcgccctttttgaaatcgagtccaatatatactcccggctgaagaacaagaaactgacatacacaagatatgtggatgatatcaccatttccagcaagaaagacaattttaacttccagtctaccatcaacatactagaagttgccttaaactccattgacttgcctctcaatcaggctaagattaacgtttcaaacttctcctccgagcttctgcgcgtccacaatattagggtggaccagtctaaacccagactggacaaagccgaagtggtaaagataaaggacaatgtaagtaggcttaaagagattgcctttgacaaaaaacagcccaatatccgcacttactacttctacagagaggattttaatcgctgtctgggccttattaataaattggggagggtgaatcacccctcgtatgagaagctcaacaaggccctgatgaaaatatacccaatcccaaacctgtctgacatccagtacgtccgtgacagtatcaacaaactgaaaaacttgtatccggcgtacatgaattcgtacatctatcgaaaacttttcttccggatccaacatcgcattggcttcatcaaaaagcacaagatctatgagaagactgctcgtaacctgaatctagaactgcagaagtatcgagccatgtatgagaaatga

SEQ ID NO: 10835 - RNA, 1197 nt, synthetic construct
  source 1..1197: mol_type = other RNA
atgacaatacctgacaagtacctgttcaagttaaataccacgaataagatctcgtctctcaataatctagcctccgcactgggagtgactttgagtgatctgaagtatgccgcaaacctccccgacaataaaaagtacgagcacttctttatcaagaagtccgatgggagggagaggttgatccacaaaccttgcaaggaaatcaggaatatacagcgcaggatcaaccaccgaatctttaaaccactggtgatttggcctgtgtatctgtttggctctgtccccagtgaaaaacatgagcccgcacatgactatattaactgcgccaagaggcattgtctcagtaagtctgtactgaaactggatattaaggacttcttcgataatatcgacgaaagcctagtcaaaaaaatcttccgcgagttcttcaaatacagtgaatctgtcgttaatatcctcacaaagatttgttgcgtgaacgggcatgttcctcagggtgcgcttacctcatcttatattgcttcactgtgcctcttttcgatcgagccactgttagcccagcggctgaacaataagaatctccggtacaccagatacgtggacgacataaccatttccactacgaaacacaaatttgatttcaacgctaccatcaatatcgtggagaacctcctgaattcagtggacctgccgcttaacatcgagaagattaagaccgaatacttttcaacagagccattaaaagtgcataaccttaggatcgactttaacaaaccaagatacgacaaaagcgaaacaaagaacctgcgggctgccattaaccgtctttccatacaaaagaagattcccaattaccgcagccactatttttatcgtagcgattataaccgatgtgtaggattgatcaacaaaatcagccgggttaataatccctgttccaaccgcttcttcaagaagatcaaaaaaattaagcccctgcctaacccaaacgatcttgagtacgtcagaaagagcattttcgaactgattcgggattccctgactcacaaaaatacataccggtacagaaaaaagttctttagaactcagcagcgactgatctttattagaagccacccgcaatatatatatgagggctctgccaatgctttgaacatactcctacagaagtatcgcttgaactacgaggaaaagtga

SEQ ID NO: 10836 - RNA, 1197 nt, synthetic construct
  source 1..1197: mol_type = other RNA
atgtctttaccagaaaactacctgtttcggttgaacacagctaataagatttcctccctgaacaatttggccaaggccctcggtgtgcaagtcagctacctacgcaagattgctgatttgcccgatgagaagaagtacgaggtattctccataaagaaaaatgacggcagagagcggctgatccataagccctgcaaagaaattcggaacattcaacgcaggattaaccacagaatatttaagcccctcattatctggccgacctttctgtatgggtctattcctgccgagaaggaggagccagtgaacgattacattaattgtgccaaaaaacactgcctgagtaagagtgttctgaagcttgacatcaaggacttttttgataacatcgatgaggcgctggtgaaaaacatcttccgagactttttcaagtacagcgaggccgtctctaatctgctcaccaaaatctgctgtgtcaatggacacgtcccacagggcgcattaacatcaagttatattgctagcctttgtctttattccatagaaccaattctagcacagagactgaacaacaagaagcttaaatacacgcgctatgttgatgacatcactatctctaccaagaaaaacaattacgacttcaatgccaccattaatatagttgaaggggctctcaatagcattgatttgcctctgaacatcgagaagatcaaagtggaatatttcagtactaagcccatcaaagtgcacaatctgaggattgacttcaaaacacctcgatacgataaagacgaagcacggaagataagatccgcgatcgataggctggtgaaacagaaggaaatccctaactatcggtcacattatttctatcgtgccgattataatcgctgcatcggattgataaacaaaatcaatcggctaaagcaccccagcagcaaaaactttctcaagaagatccttagaatcaaaccattaccgaatcctaatgacctggactatgtaaggcgctccatctttgagctctcgagagactacgctattatgaagaacagctatcagtaccgcaagaaattcttcaggatccagcaacgtctcattttcataaggtcacatcctcagatgatctacgaaaactctgcacaggtgctgaattcaattctccagaaataccgacccctgtacgaggagaaatga

SEQ ID NO: 10837 - RNA, 1176 nt, synthetic construct
  source 1..1176: mol_type = other RNA
atggatgagctcaaggtgcgccttaaggatggcgtcgacccaatccagtcagtggacaatctgtgtagtgccctggacattcctagatccgaattagacgaggtgttggctctctcagacgatgaaaggtatattgagatctccctgccaaagtctaacggttctcgccgcctcgtgtatgaccctcaccccagactgagacgtatacaacggaggatcaaaagccggcttctggtgagtcagattctgtacccccgatatttatatggcagtctttctgacagtgaatacccgcgggactacattagatgtgcatccattcactgcggggctaaagtcctgcttaaggcggatatcaaaaattttttcgacaacatcagccgtcgacttgtccttgagatatttgagagggtgttccattatccggaggaggtttccgacgtactaagcgatctatgcaccagggcaggcgtggttccccaaggagccagcacttccagctttttggccaacctgtgtctcttgaacgagtggtgcttcgtccgcgatatccagtacgaaaagttgcgctataccaggttagtggatgatatcacaatctcttcaaccacaaccggaaaggacctgtctagatgcatgcgaacactcactgcaatgatagagtcagctgggttcgagctgaatgagaataaaaccggaatcgagcatgtgacaacgaaggcctttagcgttcacggcctcagaattaacaaaccatcgccttgcctgcccagagaagaagtacggcgcatacgggccgacgttcacaacctgaaacggaaagctagtgtgccaaacgcaagagtatctttcgagtatcgtaaactatacgaaagcatctccgggcgtgtgaataagctgaaaaggctgaatcacggccgctacaatgaacttcggaggcagatgaacgccatcctccccttacctagcaccaaggacattaagcgatgtcagattatgctcgccactctggagagggactacgatctgcaccgggactcatacctgtacaagttgcgatattccagactgatccataggctcggtattttgaagcgcatttacctgcatgaagcggctgcaatccgggatgccctccaggatctgaagcctgaatttgtcaatgaagctgattga

SEQ ID NO: 10838 - RNA, 1173 nt, synthetic construct
  source 1..1173: mol_type = other RNA
atggaagagctgaaagccagaaccaaagatggaattgacccgatccaaaacctcgacaatctgtgtgatgccctgggcatcagccgggaggaattggacacagctttatctctgacggacgaagacaggtacgttgagatcaagcttaggaagaaaaacggatccacccgtatagtctacaaccctcacccaaaactgcgtcgcatccagaggagaataaagaacagaatcctatcgtcacagatcatttacccccactatctgtatgggagcctttccgataaggagaatcctcgagactacattcggtgcgccgcagtgcattgcggcgccaaaaccgtgctcaaggtggacatcagaaactttttcgacaatatatcgcgcgatctggtgtttgaagtcttcaagaccattttacattaccccccagaagtctctgacacactcgccaacttgtgcacacgctgtggagtagtgccacagggcgccagtactagcagttttattgctaacttgtgtctgcttgacgagcatgacctggtgaggaaactttcttacgacagtctgcgctatacccggctaattgatgatattactatcagctccaagactcccaacaaggacttagagaagtggatgagggtgctcaagcgaatgatcgaagactctgattttgaactcaatgaggaaaagtctggtatcgagcacgtggcgttgaaagcattcagtgtgcacggcctgcgcataaatcggagcactccagggctcacaagagaggaggtgaggaagatccgttctgatgtccataacctcaagaataaagcaagcgaacctaatgctagggtatcattcgagtatagacgactgtttgagtccgtttccggcaaagtgaataagttgaaacgcgttaaccaccccaggtacaatatcctgcgcaaacaaatgagagatattctgcctcttccctcaaagaaggatattaaacgatgccagatcatgctcgctacgctggtccgggatcatgccaatcacaacagctcatatttgtacaaggttagacatgcccggctgaggcaccggcttggtattctccggcgcatatatcaccacgaagcagcggctatgagacagaccctacgagggctggagccgaacttctccgacgatacatga

SEQ ID NO: 10839 - RNA, 1173 nt, synthetic construct
  source 1..1173: mol_type = other RNA
atggatgaattttctcctcatgccaagcctaatattgctcctattcagagtattgccaacctctgcaatgccctcagcttaaccagagaagaatttgattatgcaagctctctcgccactccaaacgggtacatcccgatcgagttaactaagaaggatggcagcaaaaggaccgtttttgatccacaccccgcccttaggcgagttcagcgaagaatcaagaaccgtattttggcgactaatgtggtgtaccctaagttcctatacggcagcctctcagaccctgatcacccgcgggactacgtgaggtgcgcagctatccactgtggagccaaaacaatcgcgaagatagacattagtaatttcttcgacaacatcgattacgaccttacatttcgaatctttgcagacatactgcattatccccgggaggtatctctggcactggcaaacatatgcacccgcgaaggcaccatcccacaaggagccgctacttcttcttttatcgccaatctgtgtctgttcgaggagggtggcttggtggaggggttcacgcgcgagaatctgagatatactaggctggtggatgacattacactatcctccacatcgacacagaaaaacctaacccgccacttttccaaactcgagaagatgctgcaagatgctggatttactctgaacgtcgataaatcagggatcgaacatatcagtaccaaagcattctcccttcatggacttcgcataagccaggcttccccccaactccctagagaagagataagaaagatcagagctgacgttcacaacctgaagcaggaggccgccaaagccaatgctagggtatccttcaattatcgacggcttttcgagtcagtgtcaggcaaggtcaacaaactgaaacgtctggagcacccccgctatcaaacgctgcgggcgcagctcaccgacattaggcccttgcccagcaaaagggatattcgccggtgtcaggtcatgttggcaacactgaaacgggacttcccagaccacagtgaaagctacttatacaagaagcggtatttccgcctcagacatcgagtgggtatcctgagacgtatttacgagagggaggctcagaagattacccaggaactgaaggatttgaagccacggcacgtcgacgaacattga

SEQ ID NO: 10840 - RNA, 1179 nt, synthetic construct
  source 1..1179: mol_type = other RNA
atggacgagtacgcccctcagaagacaacatctgagtctatctttagcattgataacctgttagccgccctcggactcagcgaagcagaatacaagagtatccaggacttggaggagaagaatcgctacacccctcttcaccttaagaaaaagaatggcgatgaccgcgtggtctttgatcctcaccccctagtgcggaagttccagagaagaatcaagaacagactgtttaaccagatcagatatccaacatatctttatggctcaatttccgatccagaacatccgcgggattacatctcctgtgcacagcgccattgtaaagccaagaccatcctgaagatcgacattacttccttcttcgattttatcgactatgacctcgtctacaaaatcttcaacgagctgttcttctacagcgacgagattagcgaagctctggctaatatatgcacaagggagggggttgtgccccaaggagcgcctacctcctcctttattgctaacctctgtttttttgataccgagggacgtatcgtgaaagggctggaacgacagcaacttagctatacgaggctcacagatgatataactgtgtctagtgccattcaggacaaagatctgaacaaagcgaagtcaacgatagtctcaatgattgagcatgctggcttcaaagttaatgaggctaaaacatctatcgaatctatctccaccaccgcattcaaagtgcacggtttgagggtgaacaaggaaactccgcaactgcccagggatgagatccgcgcaattagggccgccgtgaacaatctaaagattctgagccgagagcctaatgcccgcacatcgttcgactacagaaaaagatacgaatcaattagtggtagagtcaataagttggctaggacggggcatccccggtataagaaacacaggctagaactgaagtccatattgccactgccctcacagaaagacattcggcgatgcctcactatgctttctaccctgatgcgggactatgacgtattttgcagcactccactgtacatgaagcgttaccaccggctccgacaccgtttgatactcttacagcgcgtatataaacatgaggcaaaaaagatctggactgaattaaaggttctgaccccaaccaaaagtaaggccgaacacgagctgtga

SEQ ID NO: 10841 - RNA, 1179 nt, synthetic construct
  source 1..1179: mol_type = other RNA
atggacgaatacgtgccaaaaaagctgactgacgaatccattttcagtgtggacaacctcatatccgcactcgggatctgtgaggccgattttaaaatcatccaatcgctggaaacaaaagaccgctatactgccatcaacttaaagaagaagaatggggatgatagaattgtctacgatcctcatcctctgatcaggaaaatccaacggcggattaaaaaccgtattttcactcagatccgatatcccaagtacctctatggtagcataagcgatccggattgccccagggactacattagctgtgccagccgccattgtaaggccaagaccattctgaagatcgatatcacgtctttcttcgataatatagactacgacctcgtgtacaagatcttcagagagctctttttttacagcgacgaagtgtccgagactctcgctgggatttgcacaagagaaggcgtggttccacagggcgcgcctaccagttcatttatagcgaatctttgctttttcgacattgagggcggaatcgttaaaggcttggagagacagaacttaaattacacccgcctgactgatgatattacagtcagctcaacgacccaggacaaagacctgaataaagccaaggacaaaattatctctatgatacagaacgccggttttagaataaatgaggacaagacctgcattgaaagtatttcaacaaccgccttcaagatccacggactgcggatcaataaaaatacacctcagctgccacgggatgagatcaagcggatacgagctgcagtaaacaacctgaaaatcctatctaaggagccgaacgcccgtacatccttccactaccgcaagctttatgagtcagtgtctggccgcgtcaacaaattggcaaggaccggacatcccaggtatcacaaacacagacaggatctcagggatatcttgccactgcctagtcaaaaggacattaaaagatgcctagtaatgctttctactctgatgcgggaccacgaaaccttgtgttccagccccttatatatgaagaggtatcaccgtcttcgacatcgcctgatcttgctgcagaggacctacaagcatgaagctaacaagatctggaaaacaattaaggacctgacgcccaccaagtccgctgcagagcacgctctgtga

SEQ ID NO: 10842 - RNA, 1170 nt, synthetic construct
  source 1..1170: mol_type = other RNA
atggacgagttttcctttagcaaaactaccaatcagtctatctcgaacatagcaaatctggcttacgccttggacgtgtcagaagaactgattgatgaagccttagccctcccaagcgatcagcggtatactccccatcggccagggaacggaaatcggctggtgtacaggcctcatccactgatacggaagattcagcgcaagataaaaaacagaatcctggtcgacctggttaggtacccccgatacctctatgggtcattgcgagatgtgggattcccacgtgactacataagttgtgcgcaggtccactgtctctccaagagcgtcctgaagatcgatatcaccaagtttttcgacaatatttcggcgaacgtggtggaagacatttattccgacttcttcagctttccttttcctgtggccgatgttctggccaacctgtgcacgcacgaagggtgggttcctcagggagcccccacctctagtcatctggcaaatctatgctttttcagagaggagccctcattggtacgccagctgcatagacagggcttgaggtatactaggttaatcgacgacattaccattagttgcgattcctatggctacgacttcacaaaagacgaagagcgggtccgccgcctaattacagagaagggtttcagtgtcaacgaggctaaaacgggcctccactaccagggcaattctaacatcaagatccacgggctgagaattaatttcccgaaacctcaaatgactcaagaggaaagccgcaatatccgtgtggcagtgcaccaggtcgaacagtgggctgcagagccgaactgccgaacctccatcgcttatcgaaaacttttcgagtccacatctggacgggttaacaagctcaagagactctctcatagcaaatatgatcggtaccgaaagcgcctgcaaaagctcctaccactgcccagcaataaagattatgataggtgtattggcctttataatggcgtagtggcagacgctgccaagggtgtgcactcatttcggtactaccgtagatactgtcttctgcagaacaggcttaacttgatccaacgcaccagatcttatagggccgaggccgtgagaatgagggctgtattaaagggacttaaacccacatacaaaaacgatatctga

SEQ ID NO: 10843 - RNA, 1149 nt, synthetic construct
  source 1..1149: mol_type = other RNA
atggaccagttaaccttcacaaaaaagaccgatcaaagtattggcccctccgccgaaaacctcgctaacgccctgggcatctccccagaagagttggatgaagctttgcagatccccagcgcacagcgctacattccctttacagtctccggcggtactcgcgtcgtatataggacccattctcgtataaagtttatccagcagaagatcaagaaccggattcttgcagactgcattaattatccgaaatacgtgttcggcagcataaaggatcctgattttaaaagagactacgtgaactgtgctgcacaacactgcggggcccgatccctgctcaaggttgacatcgagaagttcttcgataatatttcaatcggaaacgtgaggagaatcttcagggatctgctgcattaccctgatcccgtttgtagcatgttatgcgacctgaccacgcataatgggtatctaccacagggggcaccaaccagctctcacttggctaccctatgttttttcaaggaagagccggacattgtggaacaggcgcaagctcagggattagtgtacacaagacttatggatgatatcacagtatcttcaaagagttatgactatgactttcaccggctcgaacgcctgatccggaatatgattgaaaccaaggacctgaccgtcaacgaaggaaaatccgagacttttcctacggtcagtagcactactctggtgcacggcctgaaaattaataccgagactctgcgcgtttctgataaaacactctccaacattcgagccgccataaaccagcttgagaaggacgcaaagcagcctaacaagagaacgttgagcaattataggaaacggtacgaaagaacaagcgggtcgctgtcagtgctacatagactcggtcaccctaagtacgaaaaataccgccgaaaactccggaggcttaggccacttccctctccctattttctcaataaaacatgggagctgatggagtcaatcgagaacatccaagacatgcgtgagagtgcgatataccgcaagaggttctacatgctgcatcacaagctgaatctggcccagagaactttcaaggccgaggccaaaactatgcgggagcgtttgaaggagatcaaaccaaaatga

SEQ ID NO: 10844 - RNA, 1083 nt, synthetic construct
  source 1..1083: mol_type = other RNA
atggcccacctgcaggatcttgcccttccttttgacgggcgttacttcgaactgagcaaacccaagcggaacgggggcacgaggatagtgtatgatccacaccctgatctgaaggcaattcagaagaagattaactctcggatcttccgcgctgtgttttaccccagatacctgtatggtgggattcgcgacacgctggatagccgggattatattaaatgcgcgaccgtgcattgcccatctggagtagtcgcacaactggacatcgacggtttcttcgataatatcttgtttcaccagatctatgaggtgttcactgggttcttccattatagcccggacgtcagcaacttgttagctaggatttgtgccaaagacgagtttaacctgccccaaggtgcccccacaagtgttgctctgtccaacctcgtgttctttaacgacgagcctaatctggttcgccatatcctcgactccggagcccgttacactagattcatcgatgatattaccatcagccacccagactcaaagtttcctatcgagaaatacgcgaaagccacaatacgcatcattgaaaggaatggctttaggatcaacgaatctaaatcaggcacactccgagacacaggcctgatagacgtgttcggaattagagttaatggagccattccgaggactccccagaattacagtaagaatctgcggagaaagatctaccagttggaggagctcgcaaaaatcccaaatgagcgaaagcaggaggggtatcgtacctcatggaactccacatccggcagactcgccaaacttaagcggaccagtagtggcaagtatcgaacttaccggaaaaggctgaacaagatcaagcctcttacccatgaaagagaagccaggcgggtgaaggcaaaaacccgacgcatgttggtcgattcacaaaagatacagaatcccgaggcttttaaaaaacgctaccagaagctaatgcacgagattggaagcttaaagtccacttacccagctctaaacacctcgctcaagtctttaatggctcaggtaagagaaaatatggcagaagaatga

SEQ ID NO: 10845 - RNA, 1083 nt, synthetic construct
  source 1..1083: mol_type = other RNA
atggaacatttggaagcgttggcccagccctttgagggccgttacttcgagatccagaaaccaaaaaagaacggtggaatacgagtggtgtatgatccccacccacacctcaaggctgtgcagaaaaaaattaacagcaggatctttcgaaccgtaacctaccctcgctacctgtatggaggaatcagagatactgccgactcaagagattacatcaagtgcgccacagtccactgtccttctagtgtggtcgtcaagctcgacatagacagctttttcgactccgttctgagccaccaggtgctggatatctttagcgacttcttcaattattctcccgcagtagccgagctcctaactaggctgtgcacaaaagacgattttaaccttccgcagggcgcaccaacctcagtcgccctttcaaatttagtttttttccgggaggaacccgggctcgcaagaggaatcgagggcagcggtgcacgatatacacgattcattgacgatatcaccatcagtcactcggattctaagttcccagttgagaagtacctgaaggctgcgaggcgggtcattaccgagaagggctttgacattaatgaagataagacgcaaactgtgcgggacactgggctgatcgatgtgttcgggattcgggtgaatggagctacacctaaaacccctaagaaatactccaaagagcttagacagaaaatataccgcctggaagaattggccaggatcccgaatgaacggaagcaggaaggttatagagcttcttggcattcaacatccggcagactggctaaactcaagaggaccaacagtgggaaatatcggacgtaccgtcgcaggttagacaagattaagcctctgacacacgagagagaggccagccgtattaaagccaagacccgccgcctgctcaacgactcccaacaaatacataacaaggatgctttccgcaaacggtaccaaaagattatgcatgagatcggccttctaaagtccacttatcccgccctgaatactagtctgaaatctttgatgaagcaggtgagggagaacatggacgcacagtga

SEQ ID NO: 10846 - RNA, 1149 nt, synthetic construct
  source 1..1149: mol_type = other RNA
atgccactgaacatctcgtactcagcaccgcatcggatagcatcaaagaggaatttggccaaagccctcaacatcggcgacgaagagctggagtatctgattgctcagaaaaaccaccattaccgccagaagagactccctaaaaagtccggtggaactcgaactgtttatgctcccgagagaaatctgaaggcactacagaggaaaatcgtcgcccgcattttccacttggttagattccccccatacctccagggctccatctctgatcccgagaaccaaagggactacattaagtgcgcaacacagcactgtggtgctgtggctgtgagccatatcgacataaagaactttttcgatgggatcgaattcgacagagtggttgacatctttgaaggagtatttctattccgttccgaagtcagcttactgttagcggaactttgcacgctcgatgggtatgtaccacaaggggcccctacaagctcatatatcgcaaacatgatctttttcaaggatgaacccaaaatcgtgaatctggccaataaatctggtattacatacactcgccttgtcgatgacataacaatcagtaccgacgtgaagaatacctgtctgagaaccttgacaaagaaggtgatccgcatgattgagagttacgacttggagattaacgctgataagactaaatccatgatccgggggtctgtgccattgaccgtgcatggaatacgggtagtcgagaaaaaacccaaaattagtcgcgacgaatataggaatattcgtgatgccgtgcacagagtcgttcttgcgtcgagcacccctaactaccggaccaaatttgagtatttcaaactctaccacagggtgtccggccggctgtctaagcttaagaggttagagcatcctggctacactcgacttcgtaataagctgaaaccactgctgccgctccccagcaagggatttaaggctaaggtcaccgaaaagattgagaaactcgagcggaattactctctgagctccagccacgagtggtataagaaagaatggaacgtgacaagttacaagctgggcatagtgggccgaacgtataaaaaggaatcctctgagctgcgcgccaggatcaaggccattagaccttcatga

SEQ ID NO: 10847 - RNA, 1149 nt, synthetic construct
  source 1..1149: mol_type = other RNA
atgaaaatctccacctacaaacccattaatgtgatagggaatccagctaacctagctgccgccctggatagcagcctggaagagcttggctccttgattgaaaacaaagccaagctgtaccaaaagaaaatcatacccaagaagaacggaaaatctcgtaccgtgtattctgtggaccgtgaactgaagaagatccagaataagatcaacaaccggatctttagcgaagttgagtttgcgtcttacctcttcgggagtataagtgaccctgacctgcccagggattatctcctgtgcgccgaatcacattgtcccagcgctatcattgcaactattgacatcaaggatttcttcgatcacattaccgacgagaaagtggaaaagatcttcagtggcttctttaattttcctgacgacgtcgcagaattgcttacagagctatgtacgtttcaggggagagttccccaaggcgccccgacatcgagctatctcgccaacctgatgtttggaactcaggagaaacgcatcgccaaagctgccaatgaatgcggtgccagatattccagattgttggatgacatcattatttcatcccctcagaagaatttcagtatagataccctgtatcagcgcgtggagcagatgattgtgaatagcggctttcaaataaacgagacaaaatccaaggtagacatccttgggcccaaacctctcgaggtacatggaattgttgtcacaggcaactcccctaaggtgtctaaacttaagtaccaggagatcaggaggctggtgcaccaggtgtcggatctttcaaagaccgataatagaagaacgactcaccgctactataagaagtaccatcgggcatacggcctgttatcaatcttgaaacgagtcaaccatccggcgcacaagaagttaaagagcaagctcacatctgcaccaccactcccttccaacaggttccgcaatagtattttccgccggctctccaaactggagtcaaaacaccaaatccatcagcagcggaaatggttcgcaaaggactggaatcggattagccacgagttaggtattctgcgaaggtcttatccagaggatgctaccaatgctaggaaccgactgaacctgatcactccatacgtctga

SEQ ID NO: 10848 - RNA, 1182 nt, synthetic construct
  source 1..1182: mol_type = other RNA
atggctaaggacttttcctttaaaaacacgtttacccccattcagaaaaaggaatcattgctggccctgttggggatcagcgacatcgataaatttgagaagctgataagcgatggggtggagaaagcctactatataaagccccctatcgaaaagaagaacggcggacataggatcgtatacgctcctaatcgaatgcttaagtccatactgcggaagattaataacaagatcttctctcagatcaacttcccggattacctgtatgggtccattcctgacaaagaaaacccaagggactatatcttatgtgcccagcaacactgtaaatctaagatcctggtcaaaatggacattgagaactttttcccaacaatgaaatcgaagttcgtgtatcaaatcttcaaggaactcttccgcttttctgatgaagtctcaaatattcttaccacactgactacctacgagggattcgtgccacagggtgcccctactagcacttacctcgcgaacttgtacttttacgattgcgaaccctccaaagttagctatttgcgcaagcttggctttcggtacaccaggctcattgatgacattacaatctctagactgaataaggaagaggactggaagttcgtagagagcgttatatccaacttcattaagcagaaagagctcaccgtcaacaatgagaaaaccaaactattatccgctaaatctccccagagtttcaaggtccacggcctgtgcatcgaggatgaggcacctcgttttagtaagaccgagcgtactaatataaaaacgcaggtccaccaggttgtgagaacagcctatggccgcgatcaaatcagaatgcagcctagtttccacaagaagtacttttcagtgaaaggaaagatcacaaaactcaaaagggtagactgtcccgactatccagtgcttaaaaatctcctgaagaaacattgcgatccgctgccagagcacaaggaaattaaaaggattaaccgggtgatttcaaatctaagcaaggaccatgtgagcatcggacatactgagcgatacaagagtcgctatttccaggtggtgtttagactggacatcctcaagaagttataccccgttgaagcaaatgaattccgggcaagactgcggcaaattggtccaacaaaaaacgagaattga

SEQ ID NO: 10849 - RNA, 987 nt, synthetic construct
  source 1..987: mol_type = other RNA
atgctcaagagcatactgcggaagattaacaacaagatcttctcccaggtgaatttccctgactacctgtatggctctatccccgataaagaatctcctagggactatattctgtgcgcacagcaacactgtaagtcgaagattttgataaagcttgacatcgagaacttcttccccaccatgaaggataggtttgtatacaaaatcttcaaggagctgttcagatttagcgacgaggtcagttccatattgacaaagctcactacatatgagggctttgtgccgcagggcgccccaacttccacataccttgcgaatctgtacttctacgactgcgagccttcaaaagtccggtacttgcgtgggctaggattcagatacacccgcctgatcgacgatatcactatatcaaggatcaaaaaggaaggggactggaaatttgtcgaaagcattatctccgagtttatcaacaaaaaggagctgaccgttaatgaagagaagacgaaacttcttagtgctgactcaccacaatcctttaaggtgcatggtctgtgtattgaggacaccacccccaggtttaccaagatcgaacgaagcaacatacggacgcaggtttaccaagttgtcaaaactggatatggacacgataaaattcgcatgcagttaagttaccacaagaagtatttctctgtgaaagggaagatcacaaaactcaaaagagtgaactgcccagattatccgttgctgaagaaactcctgaagaaacattgtgatccattacctgaacacaaggaaattaaacggattaatcgcgtgatttcaaatctcagcaaggatcacacaaattttggccataccgagagatataagagcaggtatttccaggtggtattcagactggatattctcaaaaagctgtaccccatcgaggcctctgagtttcgctcccgactacgtcagatcggtcccatcaaaaacgaaaattga

SEQ ID NO: 10850 - RNA, 1182 nt, synthetic construct
  source 1..1182: mol_type = other RNA
atgccgaagggcttcagctttaaggatactttcacacccatccagcgcaaagagtctctgattgggctactcgggattaaagacatcgaaaaatttgagtcgttgttgagggatggtgtagaaaatgcttactacatcaaaccgccaattaagaaaaaaaacggtggcgaaaggatcgtttatgcacctaatcgtatgctgaagagcatactgcgcaagatcaacaatcgcatcttcaaccagatcaatttccccgactatctttacggatcaattccagataaggagaatccacgagactatatcctgtgcgctcaccagcactgtaaggctaaaatcctgatcaagctggacattgagaatttctttccaaccatgaagacgaagtttgttttcaatatcttcaaggacctcttcaaattctccgacgaggtgtctaacattctcactaaactcactacctatgacggatttgtgcctcagggagcccctaccagcacataccttgcgaatttatacttctatgattgcgagcctaataaagtcaattatctgcgtagtcttggatttcgctatacccggctgattgatgacattactgtgagtcggctgaaaaaagagggggattggaaattcgttgaaaccattatatccgagtttattacccagaaggagttaagcgtgaacaaggataagacgcaactgctatccgcaaactctccccaatcctttaaggtgcatggcttatgcatcgaggaaacaacccccaggttcaccaagaacgagcgaataaatatcaaaacacaggtgaaacgggtggtcaaaacaggctacaacagagacaacataagaatgcagaagaactatcatgacgtctacttctcagtcaagggcaagatcacaaaactgaagagggtaaactgtccagattaccctttgctgaagaaactcttggcaaaacactgtgatccactccctgaacacaaagagataaagcggattaatagagtcatcagtaacttgagcaaagaccatgccacttttgggtcaactgaaagatacaggtccagatactttcaagtgattttccggctggaaatcctgaagaagctttaccccgtggaggccaacgaatttaaggcccgactcaagcttatttctcccataaagaacgaaaattga

SEQ ID NO: 10851 - RNA, 1182 nt, synthetic construct
  source 1..1182: mol_type = other RNA
atgcccaaggattttagtttcaaggacacttttacccctatccaaaaaaaagaatcactgattgcacttctggggatcaaagacgtggagaaatttaacaacttagtgcgggatggtgtagaacgtagctactatgtaaaaccccccattaagaagaagaatgggggcgagcgtattgtgtatgctcctaataggatgctgaaaaccatattgcggaagataaacaataagatcttcaaccagatcaactacccaaactacttatacggctctattcccgataaagagaacccgcgcgattatattctctgtgcccaacagcattgcaaagccaaaatactcatcaagattgacatcgaaaacttctttccaacaatgaaggcgaaattcgttttcaaactcttcaaagaggtgttcaagttctccgacgaggtgtcggatattcttactaagctcacgacctacgacggatttgtcccacagggagctcctactagtacatatctggccaatctgtattttcacgattgcgaaccaaataaggtgtcttacttacgcagcctgggctttagatacacgagactgatagacgacattacaatctctagattggaaaaggagggcgattggaaatttgtggaggggatcattagcgacttcatcaagcagaaggagctgaccatcaatgacaaaaaaaccaagttgctctccacacactctacacagtcattcaaggtacacggcttgtgtattgaagaaagcagtcccaggtttactaaaaacgagcggctagtcattaagacccaggtgaacagaattgtgaagactggttacgggaatgataaaatcaggatggacaagaactatcataactcctattttagcgtcaagggaaagaccacaaaactgaagagggttaattgccccgactaccctgtcctgaagaagctcctctcacgccactgtgatccgcttcctgaacataaggaaatcaaacgaattaatcgggttatatccaatctgtcaaaggattacgccgtttgcggaaataccgagcgctatctaaggcggtattttcaggtgatcttccgaatcgagatactgaaaaaactttaccctgtcgaggcaaacgaattcaagctgagacttaaactgatctccccaatcaagaacgagaattga

SEQ ID NO: 10852 - RNA, 1173 nt, synthetic construct
  source 1..1173: mol_type = other RNA
atggcctcctcctttagcttcaaggaaacctttacaccaattcagtccgtgcagagtctgataaatctacttggtgtgaaagacaccgagaagtttgaggatctcatcagaaacggcgccgagacatcgtattacatcaaaccccctataaagaaaaagaacgggggggagaggatcgtgtacgcgcctaataaaatgctcaagtcccttctccgtaaagtcaaccagaaaattttcacccagatcaattacccagattatctcttcggatctataccggataaggaaaatcctcgtgactatatactgtgcgcagagcagcattgcaaagctaaggtgctcattaagatcgacatcgagaatttcttccctaccatgcgggaagagtacgtctataagatcttcaacaagcttctgaagtgcagcgaagaggttgcccagattttgacaaaattaactacctttgacgggtacgttccccagggagctcctacatcaacctatctggccaacctgtatttcttcgatagtgagcccaagaaggtacaacacctaagaaataacggctttcggtacacccgcctgattgatgacattacggtatctagggcaactaaagaaggctcctggaaatacgtggaatctttcatcggggagtttattactcaaaaacacctcagtatcaacaaagataagacgatatcacgctcttccagcagtcctcaacagtttaaagtgcactctctgagtattgagggagaaaagccgaagtttccacggattgagagactgaaaatcaaagaccatgtgcacagggtcgtcaagacaggttacggaaaggacaacgaaaggatgaaaaagagcttccattacctgtattttagcgttagaggcaaaatcactaaattaaagcgcgtggactgttccgattatcccattttcaagaagatgctgaagcgacactgtgatcccctcccagaccataaagaaatcatccgccttaatcgggtgatcagcaacttgtcacgagactttaattctttgggcgagagcgagcggtataagaataggtacttcaaggtcatgttcagattatcgattctgaaaaaactgtacccaaaggaaactaacgaatttaagaagcgattgaagctgatctcacccaaaaagtga

SEQ ID NO: 10853 - RNA, 1191 nt, synthetic construct
  source 1..1191: mol_type = other RNA
atgcagtccaacaacttcgtcatcaataagaagaacctgccacccatcaaaaacgtcgattccctgattaaacttctgggcgttgacgccggatatctggatttcttgattgagcacggggtggagaagaactactaccggaaagatccgattcccaaaaagaatggaggagaaagaatcgtgtatgctcccaacaagaaactaaagagcctgctgaaaaggatcaacaacaagattttctcccagatctcttttcctcactatttatacggaagcattagtgactctgaacaccccagagactacattcgttgcgcaagtgtgcactgcaaagctaagatcctgataaagatcgacattcaggacttctttccatccatggacagcgttggtgtcaattcgatcttcagcaaattcttcaatttcagcgacgaaatctctcaaatcctgactaaactgacaacctatcatggcatcgtgccccaggggtcacctacatctacctttcttgcgaatctgtatttctacgacgtggagcctagcatcgtctcacacttggagagcgagggttttcgctatacccgactgattgacgacataaccatctccaagagtgagaggggggaatcatacaagtacataaagcctaggatcataaagatgattaccaacaagggcctggtgataaatgagaagaaatgtagcgagcagtcactgaaaagttcccagtcctttaaggtgcacggtttatgcattgaagaagagactccgaagttctctaaaccagagattctgaagattagaggccaagtatttaacatcctcagggttggctattgtaatgataaaatgaggatgtctcgggactttcataagttttacttctccgtaaaggggaaaacaacgaaactcaagcgtgtcaatagcccagaatacacagagttgaagaaactgctcaaaagaaattgtgatcccttgcctgatcatctcgagatcaaacggttgaaccgagttataagtaacctatcgaaggattatgtgcttctccataatagcaagcggtataagtctcgcttttttcatgtgtacttcagactcgtgattttatccaagctttacaaagaggaagccgatgaatttaaaactcggcttaagcgcatccgcccatcatcagatatgtctagtctctga

SEQ ID NO: 10854 - RNA, 1065 nt, synthetic construct
  source 1..1065: mol_type = other RNA
atgctgacccgcggggtggctagcttctatacagagaaggaaatcaataagaagagtggtggaaagaggttgctgcacgctcctaatcggaaaattaaattcatcctccgcaaggtgaacaacaagatctttaacaaggttctgttcccacactacttatttgggagtattagcgacaaagagaatcctagagattacatcagatgcgccgaggtacactgcaaagcgaagattctgatcaaggtggacatcagtaactttttccccagcattaatacatactccgtgcgagatatctacaaggtgttctttaacttctcggacgaggtcagcgatgttcttactgaattaaccacagtgaatggcacggtcccccaaggagcacctacttctacatttctctccaacctctatttctacaacatagagccacagttggtgaaatatcttgagtctctgggctttcgctacacccggctgatagatgatattaccatctccaagttggacaaaaataacttccggttcgcggacgatcgtgtcaaagccatgatcacgcagaaagggctaactatcaacgaaggaaaatcatccatccagtctaccgtggcagccaaagggtataaggtgcatggcgtctgcatagacgaagacaagccccgctttactaagtccgaatgtatgaagattactgacgaggtgtatcagattgcccgcgtaggttataatagaagcgatgttaggatgaggcagtcttaccacaaagcttattactcagtcaagggcaaaattaccaagctaaaacgtgtgggatatgtgaaatacaatgacctgaggaaggttctcaacaaacactgtgaaccactgccggaccatgatgaaatcaagcggctcaatagagtaatttcaaacattcagagagactataccggcaagcctgcaacagataactataagaggaggtactaccaagcccatttcagactgagcgttcttcggcgcatatacaaggaggaggccaaacagtttcgagctcgactgatctcagtccggcccaatcgttga

SEQ ID NO: 10855 - RNA, 1170 nt, synthetic construct
  source 1..1170: mol_type = other RNA
atgaataacaggccaacatatcatggcggggtaatttctaatccactgaccctggctagagtgctcgggattgagctggcagatcttctggctatgtcagtggatacagtatcacactacaaggccaaagagatcaacaagaagactgtgggagctggcaagcgcgtcatccatatgccagacgagtccatcaagcggctgctccgaagagtaaacagccgtatttttaacggagtgacctttccggggtatttgtatggttccatttccgatcaggagaatcctagggattatatcaagtgtgccgagttacattgcagagccagtgtgctgatcaaagtggacatcagtaatttcttcagccagataactacagaacacgtgtacaagatctttctcaaattcttcaacttcagtcacgaagtctccgaaatcttatctaaaattaccactgtgacaggctttgttccccagggcgcacccacatcaaccttcatcgctaatttgtgtttttttgaaaccgaagcgtccctggttacgtacctgcacggagctggtttccgctactctagacttattgatgatattacggtcagtaccctcaacaataaattaccttggcagtatgttgaggaccggattgtgaggtttctagacaaagaggggttctctatcaacgccgacaaaaccgaaagcatatctactcctagtgcgcaatcgtttaaggttcatggcctctgcataggcgacgagaaacctagattctccaagaaacatattgatgagatcaagaagagcgtcaattgcgtgcttaagaaagcactctttagcgacaagaatcgaaaagaaaagtcataccacaagctattctattccacacaaggaaagacgactaaactgaagagagtcaagcacaacagctacccaagcctcaaaaaggcccttgggaggtatgcattgcccctgcccgatgaacgtgagtcttaccgcctgaatatagccgtcaagaatttggagcgcgattacccgacattgtcgtcaaagctggcctatcgcaaccggtactacaaagcaaaattccgggtgggtatcctaagcaggatttatcgacgggacgccaccctgctgaacaacaggctgaaagacatccttcccacttacgaggactga

SEQ ID NO: 10856 - RNA, 1188 nt, synthetic construct
  source 1..1188: mol_type = other RNA
atggataaaccacactacccttgtcggcccatcggaagtgtggacgtcctggccaacactctcggagtccatattcgtagattgaggaatatagcttctaaggtcgattcatcgtacacatcttatgagctgaagccccacccagtgaccaataaagttagaactgtggttgaacccaaacacgagcttaaaaaaatccagaagaagatcaactccaggatttttctgcatgttaactttcccgagtatctgcagggaggcattagagccaccagtcagagcaagcgcgattatatcgagaacgcatcgcgacatggccgcagccagaccctcatcaatttagacgtgaagaacttctacccaaacatcaaagcggacgtggtcagggacatctttaagtacttcttcaagttctccgacgatgtcgtggatatcctgacaactttaacgacttacagggggagtatcccgcaaggagggtgtacctcaagttacctagctaatctggtatttttcaacgacgaataccggattgtgagctcattgagagggcggaaccttcggtatacgcgcttgttggacgatattacaatctcctcagtaaccaccatagacaacaagaccagcgaaaaaattattaaagacatcgccggcatgctgcggaagcggaatctgtctctgaagtcacccaagactaaagtaactgacagatctgaaatgcataaggactttgaggtgacaggtctgtgcgtgcgcgcaagcgaacctaaagtgagaaagaaagatcgacgcctaattcgtctcagcgtctttcaatgcgagtctcaggccaagaccgataggacaagcgatgattaccacaagaattggaataaaacctccgggctggttgctaagcttaagcgactcaatcacagtcaggccaaagattatcgtaagagactggcagagattctcccattgtatgacgagtatcgcgaaagcaaaattgtgaagagggcgtatgctgccctcaaagtgcctgtctcctctcacgagaaaatcggcacaataaggtcctacaacaacctgatataccagctcggtatattaagccgaacaaacaaaaaggtggcaaaaggcctttccaagtccctgaaggaccattactcatctgttcctacgatcgagaatttctgggaaaattga

SEQ ID NO: 10857 - RNA, 1188 nt, synthetic construct
  source 1..1188: mol_type = other RNA
atggataaaccccactacccatgtcagcctattgggagcattgacgtcctggctaacacacttggcgtgcataagcgtaagctaatctccatcgcttcaaaagtgaatacttcctactctagctatgaacttcctgcacaccctattaccaaaaaggtccgaaccgttgttgaagctaaacacgagctgaaaaagatccagaagcggattaattctcgcatatttctgcacgtgaagtttccagaatacctgcagggtggtattcgggccacagacaaggtaaaacgtgactatatagaaaacgccaccaaacacggcagatcacaaaccctgatcaacttagacgtgaaaaatttctaccccaatatcaaaagcgaagtggtaagggacatctttaagtatttcttcaagttctccgacgaggtcgtcgacatactcaccaccctgacaacctatcggggctgtgttccgcagggaggatgtacgagttcatacctcgccaatttggtgttctttaacgatgagtaccgcttggtcagtagcctccgcggacgccagctacgctatactagactgctggacgacatcactatctcgtctgtgaagaaaatagaccaaaagctgagcgagaagatcattaaggaggttgcgggtatgctgagaaaaaggagcctcagcctgaagtcacctaaaactaaagtttctgataggtccgagatgcacaaagatttcgaggtgacggggttgtgcgtgcgagactcggagcccaaggtgcgcaaaaaagatagaaggcacatcagacagctagtctttaactgcgagcttaaggccgtgaacgatcggacatccgatgagtatcatgctctctggaacaagaccagtggattggtggccaagctgaagcggcttaaacattctcaggcatccgactaccgaaaacgtctcgcggtgattctgccactttacgatcagtaccaggaagggaagattgtgaagagggccaatgcagccttaaaagtacccgttgatctgcattctaagttcggggtgatgcggaggtttaactccctcatctatcaactgggcatcttatcaagaacaaataagtccgtcgcaaagggcctgtcttgcttgctcaagaagcattacagtagcgtaccaagtattaatgatttctgggaaacttga

SEQ ID NO: 10858 - RNA, 1188 nt, synthetic construct
  source 1..1188: mol_type = other RNA
atggataagcctctgtatccttgcaaaagcataggttccattcaggtcctcgctcagactttgggcgtacatccgaagaaactcgtgagcttggctcggaaggccaatgcgtcttatacttcatacgaactgccaccccatccaaccactcaaaaaattagagtagtcgttgagcccaaacacgagctgaaaaagctgcagaaaaggataaacagccgtattttcatcaatgtcaagttcccaaactacctgcagggtggcttgaaggccacctctaccgtgaagcgagactacatcgcgaatgcctttctccacggcaagagcaaaactttaattaacctggacgtgaagaacttctacccgaacataaagcagaagaacattgtggacatattcaagtacttctttaagttctctgacgaggtggtagacatcctgaccgccctgacaacatataatgggagtcttcctcagggaggctgtacttcaagttaccttgccaaccttgtttttttcaacgaggaatataagcttgtctctagctttcgggggcagaagctgcgctacacaagactattggatgatataacgatctcatccgagaaaactatcatcgacaaagacaaagagaagattatcaaaagggttgccgccatgctgaaaaagcacgggctctcgctcaaaagttcgaaaaccaaagtgactgatcgcagcgagatgcacaaagattttgaagttaccggattatgtgtgagagcaacaacccccaaggcgtctaaaaaagatcggcgctatgtgcgacaactagtccacaattgcgaactgatggcagtgaaggagaagaccagcaatgagtaccacgcactctggaacaagacctccggattagtggcccggctcacacagttgaagcataatgaggctaaagggtttagagagcggctgtccgaaatcctacctgaatacgaccaataccagaaagataaagtcatcaagagggctagagctgcacttaaggtgcccagtacagctcactctgagtggggcacaatccgcaggtataaccgaattatctatcatctgggaattctggcccgcacggacaagaaacaagcacaccgtattaagctcacgctgaagaagcattactcctcaaggccaaccatcaatgaatattgggaatcctga

SEQ ID NO: 10859 - RNA, 1188 nt, synthetic construct
  source 1..1188: mol_type = other RNA
atggacaagcctttatacccctgtagctccatcggaactttagacgttctgagcaagaccctcggggttcatcctaagaagctgaagagcattgcaagcaaagtgaacgactcttactcaaagtatgaacttccagctcatcctacgacgggcaaagtgcgggaggtgtttgaacctaagcacgaactcaaaaaaatccagaagcgcattaacagccgaatctttgaacacatcatctttcccgaatatcttcaaggcgggatcaaggcaacccccgagattgcccgtgattatatcgccaatgccacaattcacggcaggagtaagactctgattaacctcgatgtccggaacttttatcccaatataaaggagaacgtggtgagcgatatattcaagtacttcttcaagttctcagatgaggtggtagaaattctgacgaagatcaccacttacaatgggtccctgccacagggaggatgcacatccagttaccttgctaacctcgttttttacaacgatgaataccgcttgttctctagtctcaagggaagaggtctaaggtacacccgattgctggacgacattacaatttcatcgccccagttgatcgacaaagagctgtctgtccaactgatcaaagatgtggccgcattactgaggaaaaggaacctgaaccttaagagcaataaaaccaagatcacaaacagaagtgagatacacaaggacttcgaggtcaccggtttgtgtgtcagagcggccaagccgcgcacacggaaaaaagaccgcatgtatgtgagacaactagttttcaattgcgagaagatggcggtcgagtctaaatctagtgaggagtttcataaactgtggaataagaccagcggcctgattgcaaagctggacaggctgaagaaatcacacgctaaagattaccggaaaagactatccgtgatcctgccgatttacgatcagtatcaggagaataagattatcaaacgttccaagcgagctctcaaggtaccaatcacttcccattcgcagtggggtactatacagcagtataataacctcatctaccagctcggcattcttgggcggaccaagaaaggccttgccaaaaatttgcgcaaatctctgaaactgcactattcctcagtgccaacaataaataaattctgggaacaatga

SEQ ID NO: 10860 - RNA, 1188 nt, synthetic construct
  source 1..1188: mol_type = other RNA
atggataagcctctttatccctgcaaacccattgggagtatcgaagtgctcgccaagactctcggcattcacacatcgaaactgcagtctattagtaagaagatagaggaaagctatacgcctcataccttgaagccaaatagctcaacaggtaaagtacgatcagtgttcgatccaaaatttgagctcaagaagttacagaagcgcataaattcccggatcttcgaaaacattaagttccctgagtacctgcagggcggactgaaggccacggcttcctgcaaaagagactatgtggagaatgccgaaattcacggtcggagtaaaaccctgatcaacctcgatgttaaagatttctaccccaatatcaaggttgacaccgtgcgtgatatcttcaagaacttttttcgcttctctgacgacgtcgtagacatactgactgtaatcaccacctatagaggatgccttccgcaggggggatgtacctcttcatatctggctaatctggtgttttacaacaacgaatacaggcttttcagctctctgaggggccgaggtttgcggtacacgagactgctagacgatattaccataagcagcaagactgctattgacaacaaagtccgcgaaaaggctatcaaagacgtcgcagccatgctgaagaagaagaatcttcgcttaaagtcctccaaaaccaagattacagatagaacagagatgcacaaagatttcgaggtgactggcctctgtgtgcgtagtaggctgccaaacatcccgaagaaggaaagaaagtatatccggcaattggtgtttaattgtgaaaaaatcggacgcaatgacaagacaagcaaagagtaccattctctgtggaacaaaactagtgggttagtgactcggctggggcggcttggaaatacacaagcctctgattataggtcaaggctctccgaggtcctacctgaatacgacgagtatgaagaggcaaagctggtgaagaggtcaaacgcggccctgaaagttccccagtccgagcacctcaaatggggcgtgattaagcgatacaacatcattatctaccacctgggcatcttgacaagaactaaaaccctgttggcacgtaatctacgcaacaaattgaaggagcattacagcctcgtcccatccgttaaagacttttgggagaaatga

SEQ ID NO: 10861 - RNA, 1188 nt, synthetic construct
  source 1..1188: mol_type = other RNA
atggacaaaccactctatccttgcaagcccatcggtagcattcatgtgttggccaatactctcggcgtacaccccttgaaactgaaatcaatcgccaataaagccgaatccagttacacctcctacaatcttaagcagcacccgaccaccggaaaggttaggacagtgtgtgatcctaaacatgagttgaagaagatccagaaaaggttaaactccaggattttcgctaaagtggaatttcccccatatgtgcagggggggatcaaggccactattgactctaaacgtgactatatcgaaaacgccaccattcatggacgatctcagacacttataaacctggacgtcaaaaatttctatcccaatgtgaaggccgatgccgtcaagaatatcttcaagtactttttccggttctctgatgacgtcgtggatttacttaccaaactcaccacataccgcggctctctgcctcagggaggttgtgcatcatcatacctcgcgaacctagtttttttcaatgatgagtaccggctcgttagcagcctgcgcgggaaacaaattcgctacactagacttctggatgacgtcactattagcagccagaagccactggacggcaacaccagcgaaaaaattatcaagcaggtcgcagcaatgctgaggaagcataacctatcactgaaatcaccaaaaaccaaggtgtccgaccgaaaagagctgcacaaagagtttgaagttacaggactgtgcgtaagggctagctttcctaaggttcgcaagcaagatcggcgctatgtcaggcaattagtgttcaattgcgagcagttggcagctcagactagaacttcggaggactatcactccctgtggaacaagacatccggcttggtggctaagctggtgagactccagcacagtgaaggcaagtcctatagaaagcgactcacgaagatactacctctgtacgatcagtatcaggagaataagatctgtaagagatactatgcggcccttaaggtaccccgggagcaacacgtgcagtggggtaccataaacaagtacaacaaactcatgtactctctggggatcctgagtcggacgaacaaaaagcgtgctcaacacttcagaaaaaagctggcaacacattacagttctgtgccggtcatagaagacttttgggagagttga

SEQ ID NO: 10862 - RNA, 1185 nt, synthetic construct
  source 1..1185: mol_type = other RNA
atggataaaccacgatatccatgtaagcccattgggtcgattgatgttctcgccacaacgttgggcgtgcacaaaaagaaactcatcgacattgccagcaaagtgaactctagttacacttctcacgagctgccgaaacaccctatcaccgggaagatccgcaaggtggtggatccaaagcatgagttaaagaagattcagaagcgcatcaatagtcgaatcttcgagcttgtcatcttccctccatacctgcatggaggcatcaaagccacgagctcaattaaaagggattatgtggaaaatgccagccagcacgggcacagccaaacactaataaacctggacgtgaagaacttctaccccaacatcaaaacaaacgcggtgtccggcatcttcaaatatttctttcggttttccgatgacgtcgtggagatactcaccactctcaccacttataatggaagcttgccccaggggggctgcacttcctcatatctggcgaatttagtcttttttaacaccgagtacaagctggttagttcgtttagaggtaaggcaattcgttataccaggctgttggacgacattacgatcagctcaaagaataaaattgactctaagagcaccactaaaattatccaaaaagtatccgctatgctgcggaaaaatgaactttctctcaagagcaataagacaaaaatcagcgatagaagcgagatacacaaagaattcgaagtgaccggtctgtgggtccagcctgtaaatccgcagatgcggaagaaggacgtcagacatgtgcgtcagcttgtgttcgaatgcgaaaagctggcctcaaagtctaagacatcagaggactttcatatcttgtggaataaaacctcaggactggtagcaaaactatccaggcttaaccactctcaagccatatcccaccgcgagcgcttatctaacatgctgcccgagtacgatcaggaagcacaggacaagttggttagaagtacaaatgctgctctgaaggtgcctgtctcctctcattccaagtggggcgtcctgaaaaagtacaacctgatcatctataacctcggtattctggctcggactaacaagattctctccaaaaagcttagggtttcactaaaaaagcattactccagtgttaccacaataagtgagtactggggatga

SEQ ID NO: 10863 - RNA, 1188 nt, synthetic construct
  source 1..1188: mol_type = other RNA
atggacaagcctctgtatccctgcaaaccaatcggatccatcgacgttctggctaagactctgggggtgcatcctaccaaactgatcgacattgccagtcaagtgaacaattcttatacctcctatcagctgcccgctcatcctgtgacaggtaaggagaggacggtcttggaacccaagtacgagcttaagaagattcagaagcggattaactcccgaatctttgaacaggtccagtttccgagctatttacaagggggattaaaagcctcacactcaattaagagggattatgttcagaacgccactatccactcgcatagtcaaactctcatcaacttggatgtcaagaacttctatcccaatattaagacagaagcggtaagcaacatcttcaagtacttcttcaatttctcagatgacgtagtgtcaatcctcattaaactgaccacctaccacgggtctataccgcagggcggctgcacaagctcatatctggcaaacctggtgctctttaacagtgaatacaagctggtgagtagcctacggggcaagaatgtccgctactctcgcctcctagacgatattacgatctctagcaagacaaaacttgatcctaaattcatcgagaagacaataaaagacgtggccgcacttctgaaaaagcagaaactgagcctgaggtcccagaagacgaagattacagacagggccgagattcataaggagtttgaagtaaccggcctgtgggttagaccatcccaacctcaggtgcggaaaaaagatagaaggtacatccgccaattggtcttcaattgtgaacaaaagtccaaaaccgataagacaagtgacgagtttcataaactgtggaatcagacttctggccaggtgaccatacttgagcgacttaaacactcccaggctagcgattaccgccagagattggcgaaaatttacccagaatatgaccagtatcaggagaacaagttgatccggaaaattaaagctgccctcaaagttcccataagcgagcaccaccagctgggtaccatcaaaagatacaacgggctcatataccagctaggaatcttatcgagaaccaaaaagactctgtccaagaatttccgtcgtaccctcaaggcacactactctactgtgccaactctcaataatttttggaacaagtga

SEQ ID NO: 10864 - RNA, 1194 nt, synthetic construct
  source 1..1194: mol_type = other RNA
atggataaaccacagtatccctgcaaatccattgcaagcgtggaagtcttggcaaaaactcttggggtgcaccttaagctgctcaataatatcgcttcgaaagtcgaggaatcctattcttcctatgtattgccagctcacaaggtgagtggaaagatacggaccgtctttgagcccaagcatgagttgaagaagatccagaaacggattaactctcgcatttttgagcgtgttatcttccctgaatatctcatcggcggcattaaggccactcctacaatccccagggactacgttcaaaatgccaggatacattccaaaagcaagacattgatcaacctggacgtaagaaacttctacccaacaatcaaagcacaggaggtgaagaagatctacaagtacttctttaagttcagtgacgaggttgttgaactacttaccctgctgaccacctataaaggcgccgtccctcagggtggctgtactagcagttacctcgccaacctcattttttttaatagcgagtatcagatcgtgagcagcctgcggggacaaaacattcgctattccagactactggatgacattacgatcagttcaacatccgagatctcaagcaaaaaaatcacggtaatcattaagtcagtctcagctatgctcaagaaacacaatctgtctctgaaggggaagaaaacaaagataagcgatcgagatgaatgccacaaggatttcgaggtgaccggtctgtgggtgaaggaggctgaaccaaaactgcggaaagaggaagtgaggcgaataagacagctggtctatcattgtcagcttgaatctatcaatggcatggactcagacgagtaccataaaatctggaataatgtgtctgggctggtgactaagttaacccgcctgaaacactctcagggaaaaaagtacagggatatcttgactctcattttaccgatatacaacgactacgagattaacaagctcaagaagaagattaacttcgcccttaagatccctaaagaagatcactataggataggggtgattaagaagtacaaccaactgaactacaagttaggcatcctaggacgcacccacaaaggtatggccaaagatgcgagaaaacgtctgaagtgccattacagtacaattcccaaaatggacaattattgggaaatggactcctga

SEQ ID NO: 10865 - RNA, 1188 nt, synthetic construct
  source 1..1188: mol_type = other RNA
atggataaaccctattacggttgcgcaagtatcggatccgtggacgttctggcgaagacgctgggcgtcaacgttaaaatcctggagagcatagtaagcaaagtggacgattcatatacttcttacgatctggcccctcaccctgtaacaggcaaagtccggaccgtggtggaacccaagcacgatctgaagaaacttcaaaagcgtattaactccaggattttttgcggagtgaaattcccatcatatctccagggcgggatcgcctcaactgaagatgtggaccgcagctacattaagaatgcggaaatccactgttcatcccggaccctcattaatctcgacatcaagaacttctacacgaacattaagtatgacgttgtattcgacatctacaagaattttttccgctttagcatcccggtttgcgacgtcttgaccaaactgactacctataagaagcaggtgccccagggtgcttgcaccagcagctatttagctaacctggtcttctataacaatgagtacctgctcgtgagctttctgcggggaaaggggttttcctactctcgcttgttggacgatataacaatttccgccaagagtgagtgttcagagatccttacatccgacatcattaagcgagtcgcatctatgctgaggaagaaggacctgaagatcaacaataagaagacaaagatcacagataagagagaagagcataaggaatacaaagtgactggactttgggtgaagcacgccacccccaaactcagaaaagacgagaggcggtatattagaatgctagtgtacgtctgtgagtgcaaagctcaggaaagcaggtccacagatgaatatcatgcattctggaacaagaccagtgggttggtggccaaactgaagcagctgtcacatagccaagcagatagttatcgcaaaagattatcgtctattctgccaatctgttctgaagagaaagtgtacagtataaatcggcgtgtcaaaaatgctctaaaaatccctgttgccgatcacgggtcggtgtccgtaattaggcgatataacaaacttatgtaccagttaggcatcctctctcgaactgagcctgagcttgccaaatccctcagaaagaaaatgttgcaccattacccatctataaagaccataaatgagtactggcatggctga

SEQ ID NO: 10866 - RNA, 1188 nt, synthetic construct
  source 1..1188: mol_type = other RNA
atggataagccgtactatccatgtgattccattggttccgttgaggtactggcaaagacactggggctgcaccccttgcatctccaaaatatcgcggacaaagccgaagagtcatatacaacttttctcctaagtcctaaccctaaaacaggcaaggaacgcgaggtgcgggaagccaagttcgagctgaagagaatccagaaaaggatcaacagcaggattttcgaacacgtcatttttcccgcatatttacagggcgggttaaaggctaccgaagaccaaggcagggattacgttgagaatgcgtcaatccatagccggtgccgaactttaattaacctggacgtgcgtaatttctatccaaacataaaggctcgctctgtcaaggacgtgtttaagcagttctttcgtttctccgatgaggtcgtggatctccttgtgaagctgaccaccttccaaggcgcaatcccccagggcgggtgtactagcagttaccttgccaacctagtctttttcaataacgaataccacctggtaagcaaactcaggggacagggtttcgcatacagcagattgcttgacgatattaccatatcctctgacaaagaactgagtcaggccaaggcctcagaagtgatacgcatggtggctgctatgcttactaagcagaagctgcggttgaacggggacaaaacctcaatatcttacagaaatgaactctccgctaagtttgaggttacagggctgtggattaaacacaaacagcctaaagtccgcaaacaggagcgccggtacatcagacagctcgtttataattgcgagctgaaatctaaacaggacaagaccacagattcttatcataccctttggaataagacctcgggactggtgacgaaactagagagactgaatcactctcaggcgggcagctatagaaaacggctggcagtaattcttcccgaatacagtccaatgcaaacggaccagttgctcaagaaagtttcggccgctatgaaggtccctgcctcagagcaccgaaagttgggagtgatcaagcgatacaaccagatcaagtaccagctgggaatcctgagtcggacacaaaaaggtgtggcaaggaaggctaggaaggccctcgtggcccattatagctccgcctccactaaactggaggtgtgggagagctga

SEQ ID NO: 10867 - RNA, 1188 nt, synthetic construct
  source 1..1188: mol_type = other RNA
atggacaaacctctgtatacctgcaaacccatcgcctcaatcggactgctggccaaaacgctgggcgtgcaccctgaccatctggtggatgtggcgaataagattgacacaagctatacttctttcgaactagcacctcacccaaagacaggcaaggtgcgaactgttcttgaggccaagaagaatctcaagcgtattcagaagcgtataaactcccgaatattctccaacgtcaaatttccggcttacctccaaggtggactcaaaagtgacgagagcacccaacgcgattatattgagaacgcgagactacacagtcattgtagaacactgatccagcttgatgtgcggaacttttatcccaacattaaaccaatctacgtcgagccagtctttaaacagctgtttaggttcaatgacgaggtgtctcagatcttgacgcagctgactacctacaagaattctgtccctcagggtgggtgcacttcatcatacatcgccaatctcctgttcttcaattccgagtaccatttagtctcaaaattgaggggacaaggtctgcagtacagcagattgctcgatgatatcacaatcagttcgcaggaggagcttagtaagcagaagtgtgaggaggtgataaaactcgtcgcaggcatgttgacaaagtatggccttaagttgaaagggtccaagacccagaccgagtaccggtctaaccgcaatgctaacttagaagtgactggggtgtgggttaaacatagggccccgaaggtgcgcaaagaagaaagacggtacgttagacaactggtgtacgtatgcgaacagaaagcaaaggtatccaagaccacccaggaataccacgaacactggaacaggacctcaggactcgttgccaagttagagaggctggaacatggccaagctaaaaaatatcgtgagagactgagggcaattcttcccatatattctgaatccactgccaaccaggtactaaagagtgtgaatacagctctcaaggttcccaagaccagccacaaggagctggggcgcgtcaaccggttgaataagatctactaccaactgagcattctgagccggacgaaacggtatgaagctaagaaagcccgacgccagctgaagcagtattatagctcttccccaacaaaacaggagatttgggaaatctga

SEQ ID NO: 10868 - RNA, 1167 nt, synthetic construct
  source 1..1167: mol_type = other RNA
atggataaaccatattacccctttaatgcaattgccagtatagaagccttggctcggacccttgggatccatccaaagttactttgtagcatcgctgacaaggtcgagtcttcctactccacatatgatctagcgaacaagaacaggacagtattcgaacctaagtacgagctaaagaagatccaaaagaggattaacagccgcatctttgagaaggtggaatatcctctgtatctgcagggaggcataaaaagcgaagttaaacgcgactacgtggagaacgccaaaattcattcacatgcagagacactgatttctctggacatcaagaagttctacactaacatcaaagccgataaagtgttttccgtgtttaagtacttctttaagttcccagacgacgtgtccacgattctgaccacactgactacctacagaggtagggtaccgcagggaggttgtacatcttcgtatctggcaaacctggtctttttcaattctgaatactcattggtgtctgccttccggggcaaggacgttaaatacagtagactattggacgacgttaccctcagctcagaaaaaaacttagatagcatcaagtgcacgaatcttattaagaacgtcgtggctatgtttcgatcctacgagctgcggctgaacactaagaagactaaaatcgagtacagaggcaaggctaataaaggattcgaggtcaccggcctttgggttgaacacaagaaacctaaagtaagacgaaaagaacaacggtacatccgccaactcgtctataactgcgagctgcagtataatgatcggaagacaaatagtgagtatcatgagctgtggaacaagactagtggcaaagtggcgaaactcgtccgtctggaccacagccaggccaaaaatttgcgagaaaggttgcgcctcgtgctgccccagtacgataataataccgcttataagcttaagaagctcaccaataaatcactccaggtgcccaaagaacaccaccagaaaatagggagaattcgtgattataaccgcttaatcttcaaacttgggattctcaagaggtcccaccctgccctggcaaaagtgctgataaagaagatgaagagccactatctcaacgtgcccaccaataaagagtactggctggagtga

SEQ ID NO: 10869 - RNA, 1167 nt, synthetic construct
  source 1..1167: mol_type = other RNA
atggacaaaccatactatccacatgacgccatcgcctccgtcgagaaacttgctctgaccctcgggattcaccctaaccgcctcctttccatagctgaccgcgccgacgagtcatacactgagtatgaactggtggataaagacaggaccgtttttgagcccaagtacgagttgaagaagatccagaagcggataaattccagaatattcgagttggtggagtttcctctgtatctacagggaggaatccgggctaatgttaagagagattacgtcgaaaatgccaaaatccacgctaacgcaacgaccctaatttctctggacatcaagaagttctacacaaatatcaaggcagacaaagtctcagctatttacaagtacttcttcaaattccccgatgaagtcgtagacattctgacgaagttaaccacctataaagggaaggttccacaaggaggctgcacctccagctacctggccaatctggtcttttttaacagtgagtataggcttgtcagtgcctttcgcggtaaaggcatttcctatagccgcctgctggacgatgtgactctctcatcagcgagcaacctcgatagctctggctgcactgaagctattaggaaggtggtgggcatgtttacagcacacgacctgaagttgaactctaagaagactaagatcgaatatcgaggcaaggccgccaaggggttcgaagtgacaggtctttgggtggagcacaaaaaaccaaagctccgtagaaaagaaaggaggtacgtgcggcagctggtatataactgtgagctcaagtacgaatctgataagacaacacccgaatatcacgagctctggaacaaaacaagcgggaaagttgcaaagttaacccgtcttgaacatagccaggcgaaggccctgagaaagaggttacggaatgtgctccccgaatacgatgattacaccgcaaataagctgaaacatctggcctatcgagctctgcaagtgcctaaagagcaccatcagaaaattggacgagttaacgatttcaatcggctaatcttcaaattgggtgtgctgagacgcagtcacccttcgctggcaaaggtattgatcaagaaactcaaagtccattacaaaaacgtgccgactaagaaagagtattggcttgagtga

SEQ ID NO: 10870 - RNA, 1188 nt, synthetic construct
  source 1..1188: mol_type = other RNA
atggacaagcctcactacccgtttgagcccattgggagcatcgataagttagccagaacactgggggtgtctccagccgttatggaggcaatctcaaaccggattgacgaatcttattcggagtatgagcttcccccacatccaaaaacaggtaaggtgcgaaccgtgttcgaagcgaagcacgaactcaaacggatacagaaacgcatcaacagtcgcatctttgagctgatagaataccccacctatctgcaggggggcattaaggctactcctaaaagggattatgtggagaacgctaatatgcacgtgggagccaactccttgatttcccttgatatcaagaacttctaccctaatatcaaggcttctcaggtcttcaacatcttcaaacagctgttcaatttccccgatgcgctcgcaaaaatcctgactaagctaactacctacaaaggtaccgtgccccaggggggctgtacgtctacctatctggcaaacctcgtgttcttcaattccgagtatcacttggtcagtgcatttcgagggcaaggaattgtttattcaaggcttttggacgacgtggtgctgtcctctccaaaagtattgtcgaacagcgaatgcactgatgccatccaaaaggttgctggcatgtttaagaaatacgaatttcgtctgaacagctcaaaaacaaaagtggagttccgcggcaacagcaatagtgagttcaatgtaacgggcctgtggatcgaacacagtaagcctaaaattaggaagaaggaaagacgatacattaggcaactggtctttaattgcgaactgaagtacatccagagcaagcatagcgatgactaccacattttttggaataagacaagcggtctggttgccaaactcgagcgcctgaaacatccgcaggctaagaagtatcgggacaggctgaaacaggtacttcctatatatgacgacgtcaacattcggaagatcataaagttaaccaacaaagcactaaaggtcccaaaagaggaacattccagatacggcagaatccagaattgtaatcgtatactctaccggctcggcatcttaggacgctcagaggccaagctcgccaaaaatctgagaaggaagcttaaatctcattactccaccattcccactaagaaggagtactggtttggaacagcctga

SEQ ID NO: 10871 - RNA, 1179 nt, synthetic construct
  source 1..1179: mol_type = other RNA
atggacaagccatactacccatatcaagccattggtagcatcgaattgctggcccgcacactaggcattagctctaagaggctgatcagcatagcctcacgcgtggacaatagttatgcagagtttgagttacatccccacccaaaaacaaataaaatcaggaccgtgtttgatcccaagtatgaactcaagaagttacagaagagaattaactcccggatcttcgaaaaagtgcaataccctaaataccttcaaggcggaattaaagcacccgactccagggactatgtcgagaatgcgaagattcatagtaaatccaatacgctgatctccctcgacattaaaaacttttaccccaacatcaaagagaaatacgtgtatgacatattcaagcagtttctgaacttcccggatgaagtgtcaaagatattgacaactcttactacgtacaaaggatttgttcctcagggggcagtgacatcaagctatatagccaaccttatattcttcaatagcgagtatagcatcgtttctgccctgcgaaccaaaggcgtaatttattccagactcttagacgatgtctctattagttctgagaagcgtcttaatgagactgaaatcaccaagaacattaagttcgttgtttcaatgttcactaagtatgacctcaagcttaacaccaagaagaccaagaaagagtataagaacaagaagaacccgtacgaagtgactggtttgtgggtcgggcacgctaagcctaaagcaagaaaactggaacggaggtatattagacagctcgtgtacaattgcgagctgaaatacccttctatgaaagattccagcgattatcatgagctgtggaataagtccagtggcctggtcgccaaactggaaagattgggccattctcaggctaaacgactgcgggctcgcatgtcaagcgtattgccttgttacgatgatattgaaatcatcaagaccaagaaactcattcggaaggcgctaaaagtgccacgggagtaccatcagaagcacggacacatcaagatctttaacaaactgatctaccgttgcgggatcctgagtcgcacccacaaaaagctctcgaagcacctgaggcaacagctgcaggctcactaccagaatgtccccacaatccgagagtactggcacggatga

SEQ ID NO: 10872 - RNA, 1191 nt, synthetic construct
  source 1..1191: mol_type = other RNA
atggacaagcccgaatacccccataaggccataggctccgtcgacgcgttagcccaatcactgggtacgaaccctagcgccctgaaaaacttggtgagtaaagtcgataattcttacactcccatcttgattagcactaacaatgggacaaaggagcgccaggtctatgagccgaaatactacttaaaaaagatccagaaacgcatcaatcgagagatatttgagaaagtgaaattcccaacctacctgcaaggctccatccgggatgttaaaaacacccgagactttgtgaagaacgctggagttcacagtggagccaatgacttgatcagtctagatataaccggattttatgaccacattaaggaggaatatgtgtctgatatcttcactaaactcttttccttccctcccgacgtgtccgaaattctgactaaactcgttacctacaaggggattgtaccacagggcgcttgtacctcttcatacgttgctaacctggtattcttcaatagcgaatatcgagtctattcaagactgaagaaccgccacaatgtcaagtatactcggctcctggatgatgtgacactgtcctcagagcggcgcctgacggacaaggagcttaccatttgcattgacgaggttaaaagcctctttcgtaagtacgatcttaagagtaatgactcgaaaaagaaggtacagacccgtaaattccacggtcatctggattttcaggtcaccgggttgtgggtaggccataaaactccaagactgcggaagaaggagaggagatatatcaggcaactggtgtattcctgcgagcgcgaatatgaacgggatagtacaaagacagaataccacgagttatggaacagaactagcggcaaggtggctaagatggccaggctaaatcattcacagtctagggcgcttagagaacgtctcaaaaaggtgctgcctacctacaatcaggaccaagccgagacgcttatctacaacatcaaaaggttcgtcgacaaagtgaaaaagaacaagataaagagcgaccctgcaaagacaaaaaacttcaacacattggtgtaccaggtgaatatcctgacccggacaaataaaagccttgcaaattccctcagactacagctcatgtctattaggaagagcgtgaacctgaagtctgcactctgggattga

SEQ ID NO: 10873 - RNA, 1167 nt, synthetic construct
  source 1..1167: mol_type = other RNA
atggataagccctactatccccataaacccattggatcagtggctatcttggccaatactctcgggatcacggagctgaaattaagggcgattgcatctgacagcgacaacagttacactgaatttctgatctctgatggtaagcgaaccgtttgtgaacctaaattcgagctgaaaaaactccagaagcggataaacaggcggattttcgagaaggtgcagtatccagagtatcttcagggagggatcaagagtacgagcaagagggactacgtgcaaaacgcacttatacactccaaggccactaccctgataagcttagacatccgccgctttttcgataatgtgaaagagtcgtacgtttacgatgtctataagtaccttttcaagtttccagacgaagtagcagagttgctagcgcgagttacaacctataggggaaccctccctcagggtgcctgcacctctacgtacctggccaacctcattttctttaactccgaatatcgggtcgtgtccattttgagagggcgaggcattagctatagtagactgctggatgatgtcacactctcaagtggcgagaacctgaaaaaggaagaagtaacaaactccataaaggaggtgattgatctcttcaaaaagtacgacctccggcagaacaataagaaactgaaagtcgagtacagagacactccaaatggcgatttctgcgtgacagggctctgggtcgagcactcaacccctaaactgaagaagaaggaaaggaagtatatccgtcagttagtgtacgagactgaaaaactgtataggacagaccgtaccagcgaaaagtaccacgaactgtggggcaaagcttctggtaaagtggccaagttgaatcggctgggccataaacagtccgatagcctgcggcaaagactttctaacatcctaccggagtttgacaagtatactaccaagaaaatcgtgactatccactaccgcttgctgtccatccccaagatcaaacataagagaattgacgttgctaaacagtacaataaacaacttcacaagctcggaattttgtcaagaaccaataagaccctagccaaaaagctgcgcatggctctgaagcagcactttaatcaagtaacaacaatcgagcgctattggcatgactga

SEQ ID NO: 10874 - RNA, 1179 nt, synthetic construct
  source 1..1179: mol_type = other RNA
atggacaagccgtattatcccttccgccctatttctagcattgccattctggcgaaaaccttaggtattcacgagaaaatgttgcttaacctcgcaaataaggtggatgatagttacacagaattcctgataaacgtgaaagggaaagatcggacagtttatgagcctaagcacgatctgaaaaaactgcaaaagcgcatcaaccacaggatattcgagaaggtgcagtacccagtgtatttgcaggggggcattaaagatccaagtaacaaaagagactacgttgaaaatgcaaagatacactgcgagagggatcccaatatcattatctccattgacatcaagagtttctacgacaatatcaaaagcgactacgtgtttaacgtgtataagaacttcttcatcttccctgacgaagtaagtgagattcttacaaagctgactacatttaagaacaaggtccctcagggagcctgcaccagctcatacctagctaacctgatttttttcaacaccgaatactccctcgtctccaaatttcggagcacgggaatttgctatactagattactggacgacgttactctgagttccaataagtttttgtcagaggaaaagatctccagctctatcaaagatgtggtagcaatgtttagaaagtacaagctcaagcacaataataagaagactaaggtcgagtgtcagaagaatgctaagaattcctttaagatcacaggcctgtgggtggggcatagcaaacccaaaaccacccggcacgatcgcaggtacataaggctgttagtcaagatctgcgaaaacaagtttaaagacgacaagtattcactcgagtatcataccttttggaataagacgtcgggactcgtagccaaactgtcgcgtctggaacagtctaatcatgtcagcctgcgtgaaagaatgagcatgatccttccattgtacgacgataaggagaaagataagataatccgggagtgtaaggccatcctcaaattcaacaataaagtggctttcaccatcggccaagtggagactattaacaaggttatcggcaaacttggtattctcgcccgaaacaacaaatcactatctaaaatatggcgctccaggatccgaaaacattgtcagtcactgccctctaaaagatctatgtggctttga

SEQ ID NO: 10875 - RNA, 1179 nt, synthetic construct
  source 1..1179: mol_type = other RNA
atggacaaaccctattacccctttcgtccgatctcctccacatcaatcctggccaaaaccctggggatccacgagaaaatgctgttaaacttggccaacaaggtggatgattcctacacggaattcctgattaatgtgaagggtaaggatagaactgtgtatgaaccaaaacatgatcttaaacggctgcagaagagaatcaaccataggatatttgagaaagtccaatacccttcatacttgcaggggggaataaaggacaatagcaacaagagggactatgttgagaatgccaagatccactgtgacaataatcctaacctcataatctctctggacatcaaatcgttctatgatagtatcaagtccgactacatcctaaatgtgtacaagaacttcttccactttccagatgaggtgagtctcatccttaccaaattaaccacttataggaacaaggtcccccagggagcgtgtacaagtagctacttagctaaccttgtgtttttcaatagcgagtattcgctcgttagcaaatttcgaagtaaaggcatttgctatactagactgctagatgacgtcaccctgagcacaaataaaaagatttccgaggagtacatttccgcatctatacgcgacgttgtcgccatgttccgcaaatacaatctgaagcacaacaacaagaaaaccaaagtggagttccagaaaagcgcaaaggactcttttaaaattacaggattgtgggtaggccacgctacccctaagactactcgccacgaccggcgatatatacggcttctcgtgaagatttgtgagaacaaattcaaggacagcaaatacgacttggaatatcacgcattttggaataaaacatcaggcatggtagccaagcttgcccgtctggatcagtccaatcatgtcaagctcagagaacggatgtctcaaatcctgccccattacgatgtgcgcgaaaaggaaaagatcattcgcgaatgcaaaatggttctgaagttcaacaacaagattagctttacgatcggtcagattgatgctattaacaagctcatcgggaagttgggcatcctctcaaggaataacaaggctctgtctagagtgtggaggaatcggattcataagcactgcaaaagtaagccatctaaacgatcaatgtggctgtga

SEQ ID NO: 10876 - RNA, 1179 nt, synthetic construct
  source 1..1179: mol_type = other RNA
atggataagccctattacccttttagacctatctctagcatcccaacattagcaaaaaccctgggtatccatgaggtcctgctggtgaatttgagtaacaagatagatgactcatacaccgaattcttgattaatgtgaaaggtaaagaccgaactgtgtatgaaccaaaacacgagttgaaacgcctgcaaaaaaggatcaaccaccgaatctttgagaaggttcagtatccgggatatctccaagggggcatcaaggataacaataacaagcgggactatgtggaaaatgctaatatccattgtgagcacaaacccaacattataatctcaattgacatccggtccttttacgataatataaagtccaacttcgtcttccttatctacaagaacttctttcatttccctgacgaggtggctaatatactgactaaactcacgacatttagaaataaggttccccagggcgcctgcacctctagctacttggccaaccttattttctttaactctgaatactccctggtatcctctttcaggaacaatagtatcacatatacacgcctcctagacgatgtgactctctcgtccagcaaggctctgtccgaatcccagatcactgcttctataaaggaggtcatcggcatgtttaataagtacaacctcaagcataacaacaagaaaacgaaagttgaaacccagaagaacagcaaagactcattcaaaattaccgggttatgggtgggacacagcaagcctaaggcgactagaaaagaacggcgttacatcagactgctggtaaagatttgcgaaaacaaagccaataccgatatttattctgaggagtaccacgcattttggaataagactagcggccttgtcgccaaattaacccgcctggaccagagcaaccacaaggatctgcgtgagaggctgaacgcaattctacccctttatgatgacaagagtaagaacaaggtgatacgggagtgtaagatcatcctcaggtacaataataaggtttcactcagtatcggacaggtcgacacagtgaataaactgattggcaaacttgggattctgtcaaggaataaccgcgccttgagtaagatttggagaaccaagattcggaaacatttcaaatgcatgccaacaaaaaaggagatttggcagtga

SEQ ID NO: 10877 - RNA, 1242 nt, synthetic construct
  source 1..1242: mol_type = other RNA
atggtcgattttgatgccaattacttgctaacaagctttactccccttaaacattggtgcgctatggacaaaccatactatcctcacaatcccatctccagtgtagctattctcgctaagaccctcgggattaggaaggaccttttggtgaacttagtgaacaaagttgattctagctacacagagtttctcattacggtcaagaacaaggaccgtacagtttatgagcctaagttcgagctgaagaaattacagaagcgcatcaattctagaatctttgagaaggtccaatatcccacgtacctgcagggtgggatcaaagatgattctaacaagcgtgattatgtcgaaaatgcggcacttcactgcaagaataagcctgagacaattatctccatagacatcaaaagcttctacgataacattcggagtagctatatcaacgacatctacaagaacttctttaatttccccgacgaagtggccgataccctgaccaaactgacgacctacaggaataaagtgccgcagggcgcgtgtacttctagttatctcgcaaacctcatattctacaacagtgaatatactctcgtgtcaaagttccgcaataagaacattacctataccaggctgctggatgacgtgaccttaactagcagggacaacataagcgaagagaaaatctctgaacacatcaaatcggtcgttggcatgtttcggaagtacaacctgaagcacaacaacaaaaagactaaagtggagactcaaaagaatgccaaaaactccttcaaaatcaccggtctttgggttggacatgccaagccaaagatcacacgacatgacagaagatacattcgcctgcttgtgaagatttgtgagaataagttcaaagacgacaaatactccgaggagtatcatgccttttggaatcggacctcaggaatggtagccaagctgactagactggatcagtcaaaccacattgaattgcgcaaacggatggcaacaatcctgcctttgtacgatgacaacgagaaagataagattattcgagagtgcagacgggtgctcaggttcaataataaaatcgacctatcaatcggccagttggacatcataaataagctaatcggaaagctcgggatactggctcgaaataacaatgcactgtccaaaatttggaggaacaagataaagaatcactttccactgctgccaacaaaacgcgaaatttgggaatga

SEQ ID NO: 10878 - RNA, 1188 nt, synthetic construct
  source 1..1188: mol_type = other RNA
atgctcatggataagccctattacccgcacaaggcgatcagtagtgtgaacgtacttgccaagacactcggaattagggagagcctgcttattgaactgagcatcaaatcagatacttcctaccatgagtttacagtttgcaccaaaaaagggaaggacagaacggtctatgaacctaagccattgctcaaaaggcttcagaagaaaataaactcgcggattttcgagaaagttaagtacccaatttacctgcaagggggaattaaagacgagatttccaagagagattatgtcgagaatgctcgcctgcatagtaaatctaagccttctcacctaattggcttggatatcaagagcttctacgacaatataaagacccccaaggtccatgacatctacaagtatttcttcaagtttccagacccagtttgcgacgtgctcacgaaactgaccacccacaagggcaaactcccgcaaggagcttgtacaagcagctatctcgctaacctggtttttttcaattcggaatacagtctagtctcatactttcgcaaaatgggcgtgacatacaccagactgttagacgatgtgactctgtcatcacctgtgcagctgtcagagcaccaggtcggagaagcaatcaaaaaagtcgtgggtctgttcaaaaagtataacctgaagcataacaacaagaaaacctccatcgagaacaataagaacattaagaatggcttccaggtgaccggtttgtgggtgggccacagcgaacccaaaactacaagggatgagcggcgttatatccgaatcctggtaaagacttgcgaacagaagcataagtctgacccctacagtcaagagtttcacgaattgtggaataagtcctccgggcttgtagccaaattaaaacggctaggtcagcctagccacgattctctccgcgcacgactttcagtggtgctgccattatatgaccagaaaatggcctctaaactgatcatggaatgtaagagccttctgactataaagaataagatccagtacagcgccggcgaggtgtccaacattaacaagacactgtataaactcgggatactctcccggaataatcctatatctagttccatctggagaaagcgtatcagggcaaactttaaaaatctgccctctaagaaagagttgtgggagtga

SEQ ID NO: 10879 - RNA, 1182 nt, synthetic construct
  source 1..1182: mol_type = other RNA
atggacaagccgtattacccttacaaggctatttcctccatcgagacactggcaaaaacattggggattcgggtgaatctgttaagcctgttagtggagaaatcagatagctcttatcacgagttcattgtttgtactaagaagggaaaggacagaaccgtttatgagccaaaacccctccttaaaagacttcagaagaagatcaacagcagaattttcgaaaaggtcaaatacccagtgtacctgcaaggtggcataaaggacgagataaataagcgcgattatgtagagaatgcgctgctgcacagtaagaacaagccgaaacagttgattggcttggacatcaaatctttctacgacaatatcaagtctgataaagtgttcgatatctacaagtacttcttcaagtttccagaccctgtgtccgatgccctcacaaaactcacaacttttaagggaaaacttccccagggggcctgtacatccagttaccttgctaacttggtctttttcaattccgagtataacctggtgagttactttaggaacatgaatatcacctatactcgactgctagatgacgtgacgctgtcaagccctgttaagctgtccgagaaacagatcggggaatcaattaagaaggttgttgctatgttcaggaagtacaatctcaagcacaataataagaagaccagtatagagtgcaataggaaccttaaaaatggatttcaggtaactggcttgtgggtcggccatgcaaccccaaaaactacgcgagacgaacggcgctatgtgcgtctactggtaaaaacctgcgagcagaaatataaaaacaacccctacactgaggaatatcatgaactctggaataaaacatcgggattagtggccaaactcaagaggctcaatcaaccctctcacgataccctgagaaaccggctgtcattagtcctgcctctctatgacgcagtgatggtgagcaagcttatgatggagtgcaaatctctattgcgggtcaagaacaagattgaatacagcgtctcggaagtgaaccatataaacaaaaccctgtacaagctgggtattctgagccgtaataaccccggcagggcctctatctggcgcaagaagatcatcgccaactttaaaaacctccctaccaaacgcgaactgtgggaatga

SEQ ID NO: 10880 - RNA, 1179 nt, synthetic construct
  source 1..1179: mol_type = other RNA
atggacaaaccaaactacccacacaaacctatttctgaggtttctgtgttagccaaaactctcggcatcagtgaagttatgctgaagtccatagctagcaaggtagataccagttataccgaatttgacattgagtcaaacgggaaggataggcatgtctacgagcccaaattcaatctcaagaagcttcagaagaggattaactcccgcatctttgagcacgtcaatttcccttcatatttacacggggggatccgggatgtgaacatccgccgagactacgtggagaatgctagactccactctaagactaaggtcaacagcttgatcaacctggacatcaggagcttttatgacaacattaagatcgacaaagtctacaagatctacaagtacttcttcaaattcaccgatccggtgtgcgagatcctcacaactctaacaacctataagaataaggtgccacaaggcgcctgtacgtcatcatacctggccaacctcgtcttctacaattccgagtatcaggtggtttccgcactgcgctgcaagggcatcacttacacccgtcttttagacgacgtaacactaagttccaagaagactctgagtgagacaacaatttctaatagcatcaaaagcgtcataggaatgtttaccaaacatggactgaaacagaacaagaagaagatgaaaatagagagcattcagaacaagaaagatggctttcaggtgactggtttgtgggtgggtcatgcggagcccaaaacccgccgggatgaacgtcggtatattagacttatggtgtatgtatgcgaaaaggaataccctaattcaatgagcaccgagtcttaccatgagctctggaataaaacgtccggactggtggcaaaactgaacaggctcaatcagtcgaattataaatccctgcgagaaagactgggcgccgtgctgcccttgtataacgattcagaaagagacaagatcattcgcgaatgtaaatctctgctaaagctggacagctctaaacctgttagttatgggcaattggattccatcaacaaaatatactcgaggttgggaattctggctcgaaacaatacaaatctcagcagatcctggcggaaaaagcttcggagtcactttaggaaactgcccacgaagaaggaaatttggctttga

SEQ ID NO: 10881 - RNA, 1179 nt, synthetic construct
  source 1..1179: mol_type = other RNA
atggacaaaccttattatccacacaagcctatctccagcgtggaagtccttgctaagaccttgggagtctctgaaccggccttaaggtcaatagccaataaggcggggaactcatataccgagtttctgattgagagtaaaggcaaggacagaactgtctacgaccccaagtttgagctcaagaagattcagaaaaggattaactctagactctttgagaacgtgatttttcccagttacctgcaaggcggaatacatgacaaggaaaatcgccgggattacgtcgaaaatgccaaaatccattctaccgagaaaatcaagtccctgatcaacctggatatcaagtcattctatgacaacatcaagaaagctaaggtgaacgacatttttaagtacttcttcaagttccccgatccagtgtgcgatatcctgacaagcctgacaacttataagaataaagtgccacagggagcatgcaccagcagttaccttgcaaacctagtttttttcaattcggagtaccttgaagtgtctaagttgcgcggcaagggtgttacttacacacgactcctggacgatgttacgttatcatcatccaagcagctgaatgacgaagagatcgagatttacattaaaagcattcatggcatgttcaagaaacacggcctcaaattcaacaacaagaaaaccaaaatcgagcatattaagagcaagaaagaagggtttcggataactgggctctgggtggggcaccagctgcctaaaaccactcggaacgagcgcaggtatatacgtttactggtcagaatttgtgagaacgagtatagcaaatctatgtattccgaaggctatcatgaactatggaacaaaacatctgggctcgtagccaagctgaaccgcctcaatcaaagtaatcacgagagccttcggacccgactgggtctgattctacctttgtacgatgatgctgaacgggataagatccttagggaatgtcgcaatctcttgaagataaaggccacaatcgagctgaagtacggccacgtggacagtatcaataaagcatacggaaaacttggtatcctctccaggaataataaactggtatcccgaatgtggagaaaaaagctgaagtcccacttcagaaaactgcccacgaaacgtgacatctggttgtga

SEQ ID NO: 10882 - RNA, 1173 nt, synthetic construct
  source 1..1173: mol_type = other RNA
atggataagccatactacccgcatcagccaatcagtacaatagagtccttggcgcgttgtctaggcgtcaccaccattaccctgaacagcatttcctcagccatcgattccagctacacagagtttgtgattagctcgaagaacaaggagcgaactgtatacgagcccaaatttgagctgaaaagaatccagaaaaggataaataaccggatttttgagaaggtggaattcccccgatatctgcacggaggcattaagtccctcgaacataaaagagactacgtcgaaaatgccaagatgcactccaatacttcagtagaaaccataattgggctcgacgtgaagaatttctatgacaacatcaagaaagagcgcgtgtatatcatttacagccagttctttaacttccctcatgaggtgtccgagctgttgactcaattgactacatacaagaacaaagtgccccagggggcctgcacctctagctatcttgctaacctcatcttcttcaattcagagtatggactggtttctaagcttagggggaagaaaatcacatatacgagactgctggatgatgtaaccatctccgccgccaaaaaaatttctgacgaggaaatcacaaaggtcattagagacgtgagcgcactctttaccaagcacggtctgaagttaaattcaggaaaaacgcgcgttcaccatgacaagtatgctgctgactcattcgaagtgacaggcctttgggtcggcaacattgcccctaaaacccggcggcaggaacgcagatacattcggagcctcgtgcacgcatgcgaaaatgagtacttggttgataagtacagttcggattatcatgccttatggaacaagactagtggcctagttgccaagctctatcgcctagagcaatctaatcacaaggctcttcgggaaaggctggggaaaatactgccactgtttgacgacgtggcaaaacgtaagatcatcatcgattgtaaaagcatgctgaaaatcgcaccctgctctctgaactatggtaaactgaagaggctgaatttgatctacagtaagcttggaatactctctcgaaactacaagtgtgaggcgaagttatggaggaaaaagctcaaagctcacttcgtgaagcaccctaaaaaaagtgaagtctggtga

SEQ ID NO: 10883 - RNA, 1173 nt, synthetic construct
  source 1..1173: mol_type = other RNA
atggacaagcctaattatcctcattgcccgatagcttctatagatgctctggccaggtgtctcggagtggcctcgacaaagctgttgagcattagccgtgatatcgataacagttacagtgagttcatcatcgaaagtaagggcaaggatcgcaccgtgtacgaacccaagttcgagctcaaacgtgtgcaaaagcgcatcaatcagcggattttcgaaaaagtgaagtatcctatctacctccacggcggaatccgggatccagacaataaaagggactacgttgaaaatgcaagaattcacagcgcgaacagttgcaaaaccattattgggctagacgttcgcaatttctacgataatattcgcgccgacaaagtgacaccgatcttcaagctcctcttcaaatttccaaacgacgtctccgaactactgacaaaactgactacataccgaggcaaggtacctcagggtgcctgcacctcttcatacatcgcaaacctggtgttttttaactctgaatacacggtcgtatcacgcctgagaagcctgggaatctcatatactcggctccttgatgacgtgacattgagcagccccaaggagctttccccagaaaggatcagcgagtgtatcagatcagtggtcgcactctttaaaaagcacggtttagagcacaacaaaaaaaagacccgaatagaaaacaagaacaataacgcccagtcctttattgtgaccgggctgtgggtcggccacaaaaccccaaaagttacgcgacatgagcggagatacattcgcaccatggtgcatgcctgtgagcgactctacttggatgacaactctactgatgcgtatcataatatctggaataagacttccgggctcgttgccaagttaaacagacttgagcaaagtaaccacaagggcctgagggagcgtttgaataaggtgctgcccgtctatgacgaggctgctcggaggaagataatactggactgcaaaagcttgctgaaactgaacgctacatcacttacctatgggcagcttactagactgaacctggtctattccaaacttggaattctgtccagatctttcttattcgagtccaggctatggcggaggcggctgaatgcacattttaagaataagcccaagaaatctgaggtatggtga

SEQ ID NO: 10884 - RNA, 1179 nt, synthetic construct
  source 1..1179: mol_type = other RNA
atggataagccctattatccacacaatccaatctcagacgtttcaaccctcgcgaaaactctggggattaatgaggtcatgctgaatgtcatagtgtccaacgtcgatacctcttacaccaaatttgacatacctagcaaaaacaagacacggacggtgtatgagcccaagcttaaccttaaaaagatacagaagcgcattaactcccgcatctttgaggccatccagttccctatctacctacaaggaggcatcaaggattctgttgacaaaagggactacgttgaaaacgccagaacccattctgtcaactcccctagcactctgattaatctcgacatcaagagcttctacgacaacattaagtacgacaaagtgttcgacatcttcaagtacttcttcaaatttcctgatgacgtatcaaaggtgctgactgatttgacgaccttcaaaaacaaggtgccccagggcgcttgtacatctagttatctggcaaaccttgtcttttttaataccgagtactcaattgtgtcatctctgaggggcaaagaaatttattatacaaggctcctggacgatgtcactatgagcgcttgctgcgtgttaccggaagaaatcatttcggaatccattaagaaggttgtggggatgtttaagcagtatgggttcaaatcgaacaataagaagaagaagatcgagtacaacaagaatatgaaaggtggctttcaagtgactggtttatggataggccatacgaatcccaagaccacaaaaaaggaacggcggtttataagactgctggtgcacacctgtttcaaaaagtacaacgagagtatgacaaacgagtcctatcacgagctgtggaataaagctagtggacttgtagcaaaacttaagaggctggatcagagcaatcacaaggccctgcgtgagaagctcgccagtattttgccgctgtacgatgacagcgagcgcaagaaaatcgtgcatgagtgcaataggttgttaaaaattccaagcagcaaaactctcacatatggagaaatcgatcgtatcaatcgcgtattttacaagctaggaatcctctcccggagtgaaaagaatttgtccagaatgtggagacgaaaactcaaacagcacttcaaaaacatcccaaaaaagcgagcatcttggctgtga

SEQ ID NO: 10885 - RNA, 1176 nt, synthetic construct
  source 1..1176: mol_type = other RNA
atggataaaccctattacccccattcaccaatttcagacctcccgacactcgctaaaacattaggagtgaacctggtcatgctgaacgtgatcgtaaacaaagttgatgactcctacaccgagttccaaattccaagtaagaacaggtttcgcaccgtgtatgaacctaaattgaatctgaagcgcatccaaaaaagaataaacagccggatttttgagttcattcagttccccttttatctgcagggaggcgtaaaagatagcatagacaaaagggactacgtggagaatgccaagatgcattcctctaacaaccctgaaacgctgatctccctcgatatcaagagcttttacgacaacattaagtctgataaggtcttcgacattttcaagtacttcttcaagtttcccgacgacgtctccaatactcttaccaagctgactacctttaaaaataaggtgccacagggggcctgtaccagtagctacctggccaatttggtgttcttcaactcagaatacacgatcgtgtcaaatctgaggggtaaaggcatatgttattcacgtctgctagatgacgttaccatgtctgcaaattatagtctttctgaggaggttgtctctgagtccatcaaaaaggtggtcgggatgtttaaacagtacggactcaaaagtaacaataagaagaagaggatcgaaaacaacaaaaatctcaagggagggttccaggtgacagggttgtgggtcggccacaaaaacccaaagactacaaagctggaacggagatttatcagactactggtacacacatgcttcaaaaaatataacgagagcatgacttcggattcctaccacgagttgtggaataagaccagcggtctggtggcgaaattaaaaagacttgatcagagcaaccataaggcattacgggagaaactcgctaggattctgccgctctatgatgagaacgagaagaagaaaatcatacaggagtgcaatcgcgtgctacggattgccccttccaagactttgacatatggcgaaattgaccgtatcaataagcttttctacaaactgggcgtgctgtctagaaatgaaaagcaacttagtcgaatgtggcgcaagaagctcaagtttcactttaagaatatccctcggaaacgagaagtttggtga

SEQ ID NO: 10886 - RNA, 1197 nt, synthetic construct
  source 1..1197: mol_type = other RNA
atgaccagacttcaggtgtttatggataagccatattacccgtattcccctatcgcatcaatcgatagcttgtccctcaccctaggagtggtgccgaaagtgctgctggacattgccaagaactccagcaattcttacactgaatttattgtcccaagcaagaacaaagaccgtctggtctacgaacccaagtacgagttgaaaaaaatccagaaacgcatcaacgcgaggctgttcgagaaggtgcagtacccactgtatcttcagggagggataaaggataaccttgtaaaacgcgattatgtcgagaatgcaaagctgcatgttaagtctaagcacctgattaatttagacatcaaggccttctacgataatattaaaccccatcacgtgttctcagtgtacaaatacctcttcaagtttcctgatgacgtctgcgacgtgctgactcagctgaccacatataaaaatcgagtcccccaaggcgcctgtacttcgtcctatattgcgaatctaattttcttcaacgacgagtatacactggttagttcttttaggcagcagggcatctcttacagtaggctgttagacgacgtaacactgagttctaacaaggaactgagctcagaagacgtcacaaacgctatcaaaaaagtggccgccctttttaagaagtacgacttgagactgaagaacagcaaaacgaagatagaggttaagagtaacaaggaggccgaatataaggtgacgggattgtggatcggtaatggggagcctaaggttcgcaaagacgaacggcgatacatacgccagctcgtgtatatatgtggcctcaagtatgcaaaatcttccagctgccaagagtaccacgaattttggaacaaaatcagcggcatggtagcaaaactcactcgcttaaatcatccagaggctgctaaactgcgtgtgaagctcagtaacattcttcccactttctcagtagaagtgaagagaaaagttatccacgatatcaaaaagctcatgagaaagcctgctacccaaggctcctacaccttgggggagattgctcgggtcaataattcaatgtacctgcttggtattctggggcggaccgatttcaacctcgcccggaatctaagaagggatctcaagaggaaatacaagaacttgcccacatataatcagatctggtcctga

SEQ ID NO: 10887 - RNA, 1176 nt, synthetic construct
  source 1..1176: mol_type = other RNA
atggataagccctattacccccactcgtcaattgcgagcattgatagtctgagttctaccttgggcgtggttccacaacgtctcctggatatagcaaaaaactcctgcaattcctataccgagtttgttgtgccatcaaaaaataaggacagactggtgtatgaaccgaaatacgagctgaagattattcagaaacgaatcaacgcacggatctttgaaaaggttgaatatcctgaatacctgcagggaggtatcaaggacctggctaaaaagcgggattatgtggagaattcaaaaatacacgtgaattccaagcatctgattaacctggatattaagtccttctacgacaatatcaaaccattacacgtacataacgtctacaagaacctcttcaagtttagcgacgaggtgtgcgacgtactgaccctgctaactgtgtacaaaaaccgggtaccccagggggcctgtacatcaagctacatcgctaacttaattttcttcaattccgagtacacacttgtgagctcctttcggcagcagtctataatctatagtcgtctgctggacgatgtgacgctttcctctaataaagaacttccccaagacaccgtcacgaaagccatcaaaagcgtggccgcggtgtttaagaagtatgatctgcgacttaagaattctaaaactaaagtcgaggtcaagtcagataagaagagcgaatacaaagtcacaggcctatggattggcaacggagaacctcgcgctcgcaaaagtgagaggagatatattaggcagctcgtttacatctgtgggctcaaacaccacactagcagttcttcgcaggagtaccatgatttctggaacaaggtcagcggaatggttgccaagctgactcgcctcaaccatcctgagagtgcatctctcagactgaagatgtctgacatcttgccaaccttctcaaaggagatgaaggccaagatcatcttagacatcaagaaactcctaaggaaaccgtccgctcagtgcagctatacacaaggtgagatagcaagagtgaacaaagccttttacttgttggggatcctgggcaggacagacaagattctcgccaagaatctgcgctgtgacttgaagcgaaaatataagaaccttcctacctacaatgaagtctggaggtga

SEQ ID NO: 10888 - RNA, 1176 nt, synthetic construct
  source 1..1176: mol_type = other RNA
atggataaaccttactacccttacagccctatagccagtatagacgccctatctttaaccctgggcgttattccagaagcactggttgatatcgcacggaaatccagctccagctatacagagtttgtggtgccttcaaaaaacaaggaccgccttgtgtatgaaccgaagcacgatctgaaacggatccagaagagaatcaatacaaggatattcgaaaaggttgagtatccacggtacctacaggggggtatcaaagatgcactgatcaaacgcgattacgtcgagaatgccagtctgcatacaacttccaagcatctcattaaccttgatatcaagtccttctacgacaacatcaaggcttgccatgtctttgccgtatacaaatactttttcaagttccccgacgatgtgtgtgaaattttaactctgcttacaacctacaagaataaggtgccccaaggggcttgcacctcaagctatattgccaacctgatttttttcaactccgagtactctctcgtctcgtctttccgccagcggggcgtcacatacactagattgttggacgacgtgactctgagtagcaataaagagctggccgaagaggaaatcaccaaggccattaaagacgttagtgccctctttaagaagtatgatctccgtctgaagaacaacaaaacaaagatcgaactgaaggcgaataaggacgctgactacaaagtgacgggactgtggataggcaatggcgcacccagagtaagaaagcatgagcgacgatatatcaggcagctggtgtatgtgtgctctctgaaatataaagagtccagttcatcaaaggagtatcacgatctctggaacaaagtatcaggaatggtcgctaagttgaccaggctcaagcacagcgacgcttctggattgagatctaaactgaccgaaatgttaccaacctttggtgacgatgtgaagaggaagatcattcacgacattaaaaagctgatgaggaaaccagatccccaatgttcctatacgcacggcgagattgcgcgcgtgaataaggccatctacctacttgggatcttgagccgtaccgatcgcaacctcgcaaataacctccgacgggaccttaaaaggaagtacaaaaacctgccgacttataatgacatttggagctga

SEQ ID NO: 10889 - RNA, 1176 nt, synthetic construct
  source 1..1176: mol_type = other RNA
atggataagccttattatcctcacaaacccataggatcacttgacgctctggccaaaactctgggggtgcaccccaaactgctgttagatttcgccgagaaggcaaatagcagctacacatctttcaatattgtctccaagtcggggaagattcgtactgtgtatgaaccaaagtacgagctcaaaaagattcagaagagaataaatgaccgtatattcgaagccgtcagatttccactgtacctgcagggaggcatcagtgatgatcagtcaaaaagggattacgttgaaaacgctaaaattcacgccaactctcagtgcctcatcgttctcgacatcaaaaatttttacgggaacatcaagagcgactatgtcttcgacgtcttcaaatacctgtttaagttccccgacgaggtgagcatgctgctcacgaaactggtatgcctgagaggtagggtaccgcagggggcatgtacctcttcttacgtggctaacctagtgttccacaatagtgagtatcatgttgtgtcctattttcgacaacggggggttgtttatagtcgcctgttggatgacgtgaccctaagtacgaatgatcgccccagcgctgagagcactcaggaatacattgagagagtgattgcgctctttaaaaagtacgatttaaagcccaggtcggataagatcaaagtctatattaagggttcacacgcctacacctacgacgtgaccggactttgggtcggtcacgcaaaacctaaattgcggaaaagtgagcggcggtacatcaggcaactggtgtttgaatgcgagaaaaagtatcaggcttcttcctgtgacccatcatatcataagttctggaattacgtaagcggccaggtggcaaagatgacacggctcggccaccatcaatccaaggagttgaggcgacgcctgggcttaatcctgccgacaatcgatgctcttgaggaacagaagatcgccgcagacgtgcaaaaaattgccaagctccgccgcaatcatacctacaaatccggcgacatctcacggataaacaagctctactataagttgggacttctgtccagaacaaacaagggcaggtccaaggccttgcgatctatgctaaaaagcgcgcatccaaacgtccctaacaagagagaatattggctttga

SEQ ID NO: 10890 - RNA, 1176 nt, synthetic construct
  source 1..1176: mol_type = other RNA
atggataagccatattatccccacctgcctatcagtactaatgaaaccctcgccaaaaccctcggcgtgcatccaaagcttctacaggacttttgcgctaggagtaactcatcctatacatcattttctgttactagcaaatcggggaagcagcggattgtctttgagcccaaatatgagctgaagaagttacagaagagaattaaccaccgtatctttgagaaggtgagatttcccatatacctgcaagggggcatcaaagactatgagaaaaagcgtgactatgtcgagaatgcaaagatccatgctaactccaagacactgatctctctcgacattaagaacttctatgataacattggtgaggcctacgtgtacagagtattcaagtacttctttaacttcccagacgaagtatcaaagacccttacagccttggttaccctcaatgggagagttcctcaaggtgcctgcacttcttcttacatcgccaatctgatctttttcaattccgagtataggatcgtcgcaaatctgcggggacagggagtgaaatacacccgcttactggatgatattaccttgagcattgagagtgagatctctgaagagcatactagccagctgataaaggatgtgatagccctattcaaaaaacatgacctcaaggtgcagaacaagaagacaaagatttccgtcaaacactcgcatgctcagccatatgacgtgacaggcctttggatcggacattctaagcctaaattgcgaaaatccgagcgcaggtacatccgccagctggtgttcgaatgtgaaaagaagcactcacagggtagtgcggagatagactaccacaaattctggaatcacgtgagcggccaggtcgcaaaaatgcaccggctgggacactcccaaagcgctgacttgaggtcaaggctggcaatgatcctgcctacgctcgatgatctgtccgaacgcaaacttgaaatcgacctaaacaagctcataaacagcaaaaagcaaaccagcttaaagtacggcgatattacgcggattaacaaagtgttctacactctggggatcctcagtcgaaccaagagaaataagagccgcaaattgcgacggaaactgaaaaatgcgtacccgaaaattcccacaaaggttgaatactggctttga

SEQ ID NO: 10891 - RNA, 1176 nt, synthetic construct
  source 1..1176: mol_type = other RNA
atggataagccttactacccgtttaagccaattgggagtttggatgcactggctacaacactcggtgtacatcctaaactgcttacggacttttccaacaaggcaaatgatagttacgtgaagttcgaaatcgtgtccaagtcaaacaagaggagaacagtctatgagcccaagttcgaactgaaacgactgcagaagaggatcaattctcgcattttcgaaaaagtggagtacccagtctatcttcacggcggaatctccgatgaaattaacaaaagagactatgtggagaacgctaagttgcatgcaaaatcaaacactttgatttgcctagacatcaaagacttctacgggtcgatcctcctggaccacgtattcgacgtcttcaagaatttcttccactttcccccagacgttagcagcctcttaacgaagcttgtgaccttaaatgggaatgtcccccagggagcctgcacctctagctacctagcaaatctcgttttcttcaactccgagtataatcttgtgtcgcgctttagaggacgcggcgttacctattctagactgctggacgacgtcactttatcttcaaatgataaactgtccgatacactggttcagaaatatattgaggaggtgtctaagctctttgccaaatactccctccacataaaaaacaagaagaccagggtccacatcaaatcagatcattccaaaccttacgatgttaccggactgtgggtgggccacagctctcctcgcctacgaaagtcagatcgtcgcaatatcaggcatgaagtctttctgtgtgaaaaggagtttgaatttgactccaccagcgagaagtatcataagcagtggaaccgggtgtctggcctcgtggccaaaatgcagaggctgcagcacagccaagccaagatcttgcggcaaaggctgagcaaagtgctgcccacttacagtgacgccgacgctgctgccgtgatccgtgatgccaataagatattgaacgctaaaaagaaggagaatatgaaaatcggcgagcttaatcggattaaccgggtgctgtatagtctgggtatactgggaagaactaacagtggcaaggcgaaaagcctcgggaagaacattcgagccaagtacaacaaccttccaggtaaacgggcgttttgggtatga

SEQ ID NO: 10892 - RNA, 1182 nt, synthetic construct
  source 1..1182: mol_type = other RNA
atggccaaagataagccttactacccccacggtccaattggaagcttagcgatcctggccaaaaccctgggcgtcccacccaaattgctgagcgatctggccaagaaagctagtagttcatatactccttttgtcatagagacaaaggggggaaaacagcgtgacgtatacgaaccaaaatacgagctgaagagactgcagaagaggattaacagccgcctctttgagaagatcgagtaccccacctacctacagggaggagtgaaggacgaagctcagccacgggattacattgaaaatagcaagattcatgccgggagcaaattcttgatctcgctcgatatccggaacttctatgacaatatccatatcgattccgtcctcagcatttttaagcacctatttaagttcccagaggacgtctcaactctgctcacgtctctggttaccagagaaggtaaagtgccccaaggcgcctgcacatcctcttacattgctaatctgattttccataactcagagtactcctatgtgaaaaagttgcgtgataacgggttttattattcgagactgctggacgatgtgaccatttctgctgatcgcctagtcccgcaggaagaggtaaccaagactattaaatatgtggctggactcttcagtgagcacgggctccggctgaggggtagtaagacaaagatagagagagccgacgacctgaaatctgcttatgcggtgacaggtgtttgggttggccacggcatccctaagatccgccgaacggagcgcgacatgatccgacattctgtgtacatatgtgaacaggaatatgcaaagaattgcttctccgacgaataccacgccctttggaacaaagtgagcgggcaagtggcaaagctcacacgacttaatcatgcacaggcacctaagctgagacaccgcatgaggtccatcttgccgctttatgacagcaaggccaccgcaagtatctggcgggagactgataaaatgcttaagcggcctaaaaaatcccacactaagattggggttataaacgcgtatcgccgtttaatctaccagctcggcatcttggctaggaccgacaagggcttatctagagccctgaggcggcaactgcagtccaggttttcaggcgtgccctcaaaagcccttatgtgggagtga

SEQ ID NO: 10893 - RNA, 1182 nt, synthetic construct
  source 1..1182: mol_type = other RNA
atggcaaaggacaaaccctattacccgcatcagccaattggcagccttgcgacgctggccaaaacactcggattgccgcctaagctgctatccgacctgtccagaaaggctgatgtcagttacaccccattcaatatcattaccaaaggcggaaagtctagggacgtattcgagcccaagtatgaactgaaaagactgcaaaaacggataaactcgcgactcttcgagtgtgtggaataccctttctatctacaggggggaatcaaggacgatgcgaaaccccgggactatattgagaactcacgaattcacagcgggagccagtttttgatttctctggacatccgggatttttatggcaacatacagcttgagagcgtaagatcagtcttcaagcacctcttcaaatttccagatgatgtgtctgagacgttagttaagcttgtaacccgagaaggccgtgtgccacaaggtgcctgcacaagctcttacgtcgccaacctgatctttcataatagcgagtactcctacgtcaagaaactgagggataagggcttttcctactcccgcttgcttgacgatgttaccatctcctgcaatagattaatccctcaggaagaggctactgagatcatcaagtatgtttcaggcctattcagggaacatggtctgcggctcaggactaataagaccaagctggaacggagtgacgatctgaaagcatcttacagtgtgacaggagtgtgggtgggacatggggtgcctaaaatacgaagagccgaacgcgacatgatccgtcatagtgtgtacatatgtgagcgggagtgcgtgaaagataggtatagcgacgcctaccacgacctctggaataaggtcagcggccaggttgcaaagcttactagattgaaccacgttcaggctccagccctgagagatcgcatgcgggacattctgcccttgtatgattcaaaagccgtggcttccgtgaggcgtgaagtcgacaagatgttaaaacgccctgtggctcaccactctaaagtacccgtgattgatgcataccgccagctggtgaataagctgggtatcctcgggaggacaaacaagaccctggcaaaagccctccgcagacaactcaaggcgaggtttgccggggtccccactaaggctatgatgtgggagtga

SEQ ID NO: 10894 - RNA, 1047 nt, synthetic construct
  source 1..1047: mol_type = other RNA
atggaaacaaaaggagggaaaattagaaacgtctacgaacccaagtacgagctgaagcgcctgcagaagagaatcaatagtcgcctgtttgaagcggtggaatacccaaagtatctccaaggcggcatcaaagatgaggagaatccgagagattacattgagaattcgaggatacacgccgggagccggttcctgatctccctcgatattcgggatttctatgacaacatcccctttgcgagcgtagtgtccgtcttcaagtatttcttcaagttccccgacgacgtctcagaagttctcgccaaactcgtgaccagagagggtagagtgccacagggagcatgtacaagttcttacatcgccaacctgatattccacaactctgaattttcgtacgtcaagcgcctacgcgacaagggcttcagctatagccgactgctagacgatgttactatttcatccgatcgtttggtggctcaggaagaggccacagcgtctataagatacatcgcagggctttttcgtgagcacggtctgcggctgcgacaaagcaaaactaaaatggaaagatcagacgacctgaaagctccttacgccgtaaccggcgtgtgggttggtcacggggttcccaaaatcaggcgagcagagcgcgacaccatcaggcacagtgtccatatctgcgagtgcgagtatgaaaaggataggtttagcgatgagtatcacgccctgtggaacaaggtgtctggacaggtggcaaaactgacgaggttggaacatgcacaggctcctaagcttcgcaagaggatgcggaaaatactccctttatatgattccaaagccattgcttccatcctgcgggagacagataaaatgcttcggcgccctaagtcccatcattctaagatcggagtgattgacgcttaccggaggttaattaataagctcggcattttgagtcgaactgacaggaccctttctcgtgccatgagaaagcagttgaaggccaagttttcagacgtgccaagcaaagctatgatgtgggagtga

SEQ ID NO: 10895 - RNA, 1179 nt, synthetic construct
  source 1..1179: mol_type = other RNA
atggccaaagataaaccttattaccctcacgcttccattgggtctttagctatgttggctaagactctgggcgtgcatccaaaagtgctcacagatttagccagcaaggcctccaactcctatacacacttcctggttagcacaaagggaaaggaccgtgacgtgtatgagccgaagtttgaacttaaaaaactgcagaaacgcattaactccaggctcttcgagaaggtgcagttccccaactatctgcagggcggcattaaggacgagagcaatccccgcgactacattgaaaatagtaggatccacgccggtagcaagtttctcatctcattggatatccgaaatttttacgactctataccacttgaaagtgttatttccgtgttcaaacactttttcaagtttccagatgacgtttcagatgtccttgcccggatcgttactagggacggacgggtcccccaaggtggatgcaccagtagctatgtggccaatctcatttttcacaactcggagtattcatacgtgaaaaagttacgtgacgagggattttcttatagtagactactagatgacgtcaccatctcctcgcctaggctgattagccaggacgaggcaacccagcgtatcagatacctcaccggcctgttcaaggagcatggattgcggctgagacaatctaagacaaagctcgaaagaagcgacgatcttaacgcagcttacaaggtgaccggcgtgtgggtagggcatgggatacccaagctgcggcggtccgagagagatatgatccggcattcagtatacatctgtgagaaggaatacgcaaaaaaccctttcagcgacgagtaccacgttatgtggaacagggtcagcggccaggtggctaaactaactcgcctggatcatagtcaggctccaaaactgcgagacaggatgggtgaaattctgcctctgtacgattcaaaagcggtggcatccatctggcgagaagccgatagaatgttgcgccgcccattgtcttctcacaagcgcatcgcagtcatacagagttatcgcaggcttgtgaataagctggggataatgacgagaacgaatagaccgctcgcgaaaaatctgcgacggcaactgaaagccaggttctcaggggtcccctctaaggtaatgatgtgggaatga

SEQ ID NO: 10896 - RNA, 1182 nt, synthetic construct
  source 1..1182: mol_type = other RNA
atggcaaaggacaagccatactatcctcacgcttccattggatccgtagcaatgctggctaagacactcggggtacaccccaagctgttaaatgatctggccggtagggctactgactcatatacgcatttcgttatccgaaccaaaggggataaggagcgcaacgtgtacgagcctaagtatgagctgaaaaagctccagaagcgcatcaatagtaggctcttcgagaaagtgcactaccccttttatctacagggcggagtgagagacgaagaccacccacgcgactatatagaaaattcacgcatccatgctggctccaagagcctgatatctctggacattcgcaatttttacgataacattccttacgagtcggtcgtctccatcttcaagtatttcttcaacttccccgatgaagtgtctgatctgcttagcaaaattgtcacaagagacgggaaagtgccacagggtgcctgtacatcttcatatgttgcgaatctgatcttccacaacagcgagtacaattttgtgtcccggctcagaaaccagggggtgacctacagccggttgctggacgatgtcaccttgagctccagtcggcttctgagtcaggacgaagtttctggctatataaaatacgtggcaggactcttttcggaacacaagttgagaatcaaaaagtctaagaccaaaatcgaacggtccgacgacctgagcgcagagtatacggtgaccggagtttgggtgggacatggcgtaccgaaaataaggcgggccgagcgtgatctcatcaggcactcagtatacatctgcgagagagaataccaaaaagataggtttagagacgaatatcacgagctgtggaacaaagtgagcggccaggtcgccaagcttactagactggaacattctcaggctttgaagcttagagcccgaatgcgcgatattctgccactatacgatggtaaagcaactgcggccatcattcgtgaggccgacttactcctgaaacgtcctaggactagccatgtcaaggttagtgtcgtgaacgcttaccggcgattgattaatcgactgggcattctcactaggacaaacaaaacattagcccgcgggcttcggaggcaactgaagaccaagttttcagatgtgcccagtaaggtgctaatgtgggagtga

SEQ ID NO: 10897 - RNA, 1182 nt, synthetic construct
  source 1..1182: mol_type = other RNA
atggcaaaggacaaaccatattaccctaatgcccctatcgcatccattgaggtgcttgcaaagtgcctgggagtctctccccgcgtgatgctggacctggctggaaaagtaggatcatcctatacagaattcttggtgtctagtaagtccaaagacagaaccgtgtacgagccgaaattcgagctgaagaagctgcagaagaggataaatagcaggatcttctctgcggtccagtttccgacttacttacaagggggaatcaaagatgccaagtcaccccgcgactacgttagaaacggggagtttcatgccggtagctgtatgctggtgtctctcgatatccgaaacttctatgataacatcaagagggaaagggtagaggatgtgttcaagaacttctttagattcccccctgatgtctgtcaggttctcaccgacctggtaacacttaagggcaaggtcccacaaggcgcttgtactagctcctacattgctaatctagtgtttcacaattctgaatactccatcgtgagctatctacgcagtaaaggcattacgtacacccggctcctggatgacgtgaccttgagttcgaaaaagcctctcagtgacgagagcctgtctgatgtgattggccgaattagtggcatgttcaagaagcatggactccggatccacccaggcaagaagaagatagagttggcctcggactccagatcagactataaggtcactggggtatgggtggggcatggggttcccaaacttcgtcggaaagaaagggattatattcggcatctcgtgtatatctgcgagtgcgaatacaagaaagatccaacacaggactcttatcacgagctgtggtcaaggacttctgcccacgtcgccacaatgacccggcttgagcacagtcagagcgtcgaactcagaaaaagaatgagcaagatacttcccttattttccgaagcccgcaaaaaacaagttatcgtggaagcaggtaagctgctgcggcgcgacttttccaaagctatgagattgggtgttataaagacgtacaacaaaacaatgcactccttaggtatcttgagccgaaccgatcgtgcgaagagcaaaaggctgcgcaaagagctgcgtctgaaattttcaggcattcagtcaatgcagcagtactgggagggctga

SEQ ID NO: 10898 - RNA, 1182 nt, synthetic construct
  source 1..1182: mol_type = other RNA
atggcaaaagataaaccctattacccaaacgcgagcatcgccagcattgatattctcgccaaatgtctgggggttagcccaaaggtgatgcttgacctcgcatccaagactgaaagctcctacactgagtttctggtatcatctaaatccaaggaccgcaccgtgtatgaaccgaagttcgagctgaaaaaactgcagaaacgcataaatgcccggatctttgccgctgtacagttccccggctatctgcagggcggcataaaggattccgattctcctagagattatgtgcgtaacgggaaatgtcatgccggttccaatatgctcgtcagcctggatatcagaaacttctacgacaatataaagcgagagagtgtggaagacatctttaggaacttctttcggttcagccccgaggtatgcagcgtgctgacagacatcgttacactgaagggaaaggtacctcagggtgcctgcacgtcttcgtacattgccaacttggtcttccacaatacagagtacagtgtcgtctcttatttgagatcccgggggatcacctacaccaggttactcgatgatgtgaccctgagttccaaatctgagcttagtgacgaggttctaagtgagatcatctttaaggtgtccggaatgtttaagaagcataaacttcgcattcaccctggaaaaaagaaaatcgaaatcgctaaagacagtcgctccgaatataaggtcactggtgtgtgggttgggcacggcgtcccaaagctccgacggaaggaacgcgactatattcgtcatctagtctacatctgcgagcaagaatacaaaaaggacccctctgtcgacagctatcacgagttatggaatcggacttcagctcatgttgcgacaatgactagaatggagcactcacaggctgtggacctccgggagcgaatgtctaagattttgcctgtttttggcgtggatcgtaagacacaagtgatagtggaagccaacaaacttctgaggcgcgatatttcaaataatgtgagaatcggcgtgataaagacgtacaacaagaccatgcactcgctgggaattttgagcaggaccgacagggcagcatcaaggtactacaagagagctctgagaaggaagttctcaggggtgaaaaccattcagcagttctgggaagagtga

SEQ ID NO: 10899 - RNA, 1179 nt, synthetic construct
  source 1..1179: mol_type = other RNA
atggcaaaggaccggccttattatccaaacgcaagtatctcttcgatcgatgtcttggcaaagtgcctaggagtgtctccaaaggtgatgttatctttggccaaaaatagctctaatagttatacccagttcacagttcccagcaagggcaaggacagggttgtgtacgaaccgaaactgaatctgaaaaaaatacagaagcgcattaacagccgaattttcgagcatgtgcaatttcccccttacctgcagggaggtatcaaagacaacctgagcccacgggactacgtagagaactcaaaatttcacgctgggagtagcgtcttggtgtccctcgacataaggaacttctacgataacatcaaatacgattccgtctacgacgtatttctgtatttcttcaagtttgagccatcagtgtgtaccgtcttaacagacttagtcactctaaacgggaaggtgcctcagggggcctgcacatcttcttacatcgccaatctggttttccataatcacgaatattccctcgtctcctactttcgaagcaagggaattacctatagcagactcctggacgacgtaactctctctagctcaaaagagatccccccccaggagattgaagaggctattagtaaggtggccgagatgtttaagcgacacaagctgcgcattcaccccaaaaaaaaaaaaatcgaagtgtccagtgacaccagatccgagtacaaagtgacgggtgtctgggtgggacatggcgtgcctaagctgcgtagaaaagagagagattatatacgccaactcgtatatatctgtgagttggagtataagaaggaccccacagcggaagattatcacgatctgtggaatagggcttctgcccaggtggccaagatgactcggttggatcactcacaggccagcgctctcaggtcccgtatgagtaagctgctgccgctctactcccctgcgaagcgcaaacaagttattatcaaggcaaaaacccttctttcaagaaataagtccgatgctaaggaacttggcttcattaagatgtacaacaaaacgtaccatagccttggcatactgtcgaggactgataagccaacctcacggtactataaggcagccctggaacggaagttctcagttgaacctatcaaacagttttgggagaattga

SEQ ID NO: 10900 - RNA, 1182 nt, synthetic construct
  source 1..1182: mol_type = other RNA
atggctaaggacaaaccgtactatccccactcaagcatatcaagtattgatacacttgctaagtgcctcggcgtggctcctaaagtcatgctggatctggccagagatacagaaaattcttacactgaattcgttgtgccatctaaggggaaggacaggaccgtttacgatcctaaacataatctcaagaagattcagaaacgtatcaactcacggatatttgaacatgtcttattccctgaatacttgcaagggggaatccgcgatgtcgatagtccccgggaccacgtaaacaatggacgagcccataccgggagctccgtgctggtgtcacttgacattcgaaacttttacgacaatatcaagtacccgtctgttttcgatgtgtttaagaacttcttcaagtttccagacgaggtgtcaaaagtcctggctgacttggtcacgttccgcggcaaggtcccccaaggtgcctgtaccagtagttatgtggccaatctggttttccataacacagaatatagcgtggtgagctacttaaaatcgagaggtattcagtatacacggctgctcgatgacgtggcactgtccagcaacagagtgatctcaaaggccgacctggagggcgccatagagaaagttgccggaatgtttaagcgtcataaactgcgtatccaccccagaaagaagaaaatcgagtactcctccgactccagatcggagtataaagtgactggcgtgtgggttgcgcacggggtacctaagttacggaggaaggaccgagactacatcaggcacctggtccacatctgcgagctagagtttctgaaggatccaaccgctgattcttatcacgagctgtggaatcgcagctctgctcaggtagcgcagatgactaggctcggacacagccaggcagcatccctccggagtcggatgagcgaaattttgcctttgtacggcccctccaggaaaacccagctaaacattgaggtgaaaaaactgctcggtcgcaagcaatctgagtctaatagtctgggcttcatcagaacttaccacaagcttataaacgcacttgggattttgtccaggaccgataggggactcgcccgcagctatagaggcctgcttacggcaaagtttccacatgtgcgctccaaagtaaaatattgggaacagtga

SEQ ID NO: 10901 - RNA, 1182 nt, synthetic construct
  source 1..1182: mol_type = other RNA
atggcaaaagacaaacccttttatccgcatgccccaatcagcacccttgacgtcctggctaaaagcttgggcgtgagcccccaggtaatgtcaaagctgagctctagtgcggatgatagttacacagctttttcagtgagttccaaaaacaaggaccggacggtttatgatccaaagtataacctgaagaaactgcagaaacgtatcaattcaaggatcttcgaacacgtggtgtttccacagtacctccacggggggattagagacgtgtcacattccagagattacataaataactctcgcatccacgcaggttcccgcgtcttggtcagcctggatatcaagaacttctacgacaacattaaacgggactccgtcttcgacatctttaagtctttctttcgattccctgacgaggtgtctacactgctgaccaatgtggtgaccatgcgaggcaaagttccacaagggggatgtaccagttcctatgtggccaatctcattttccataacacagagtactctgtcgtgtcatatctgagatcgtttggaatcgagtacagtcgtttactagacgatgttacactgtccagcagccatccaatacccccggagaagctggaacaagctatctctaaagttgcaggtatgttcaagcgacacgggttgagagtacaccctcacaagaagaaaatcgaaagctcctccgattcccgctctccctacgaggttactggcgtgtgggtcggacacggcgtccctaagatccgcaggaaagatagggattacgccagacagctcgtgtatatttgcactaaggagtatctcaaagactacacttcagatgcgtaccatgccctgtggaataagagttcagcccacgtggcaaggatgacccggttggatcacgcccaggcacgccaacttagagacagattaagcaaaattctccctcagtatagcgcggctcggattaaacagctgtcgttcgaatacaagaagctcataaataggcccgtggctgacgtagccacgcttggctttagtaagagctttcataagctcatacattccatcggtattttaagccggactgacgctcacctagcccggcactataggaagtccctgcgcgccaagttccctagggtactttctaaagccgatcattggggaatttga

SEQ ID NO: 10902 - RNA, 1182 nt, synthetic construct
  source 1..1182: mol_type = other RNA
atggccaaagacaaaccctactatccgctctcaccgatagcaagtatcaacgctctggctaaaaccctgggggtcgtgcctaagctcctggtcgatatagcagccaatgtatcaacaagctacacttctttcgatattgaatctaagaagggaaaactgaggacagtctatgaccccaagtacgagctaaagaggctccagaaacgcattaattcccgtatatttgagaaggtaatctttcccctttatctgcagggcgggattaaggatcaggagaatcccagagattatgttgagaattgcaaattgcatgcagggtcaagctttcttatctcgctggacatcaaaaatttctatgacaacatccggatgtcttccgtgttcgatattttcaagtacttcttcaagttccctgatccagtgtgcgaaatcctgaccagcctcgtgactttggatgggcacgtaccccaaggcgcctgtacctcttcttacattgccaacttagttttccacaattccgaatataagctcgtgtcatgttttagagatcagggactgaactacagtcgccttttagacgatgtcaccgtcagcagcaaaaacttgatttcacaggagaagacaactgacatcatcaggtccgtcgcggctgtgtttaagaagtacgacctacgactgaattccaagaaaaccaaggttgaaaggtctgatgatttgggtgctgactttaaagtcacgggcctgtgggttggccatggtcagccaaaattgaagaaggacgaacggcggtacattaggcaactagtgtatgtgtgcgaaaaagactaccagaataacccttgtagcgagaagtatcatgaactgtggaaccgcgtgagtggaaaagtggccatcctgacacggcttaagcacgtggaggcccagaacctccgagccagactgggttgtgtgctgcctctctatgatgaggacgctaaagccaagatttgctttgagagtaaaaaacttctccgcagacacccatccacccacagcaaagtgggcgttatgactgcgtaccacaagatcatccatagtttgggaatactgacacggacggacagagcacttgctaggtccctgagaaagcaactgcgagcacgctacagcgccctcccattaaagcgtgacatttgggagtga

SEQ ID NO: 10903 - RNA, 1182 nt, synthetic construct
  source 1..1182: mol_type = other RNA
atggctaaggacaaaccgtactatcccctatctccaattgcatccatcgagacactggccaaggcactgggggtggtacctgggctccttaaagacttgggcgaggatgcgtctaatagctacactaagtttgacatagtaacgaaaaacggcaaagaaaggacagtgtacgaccccaagtacgaattgaaacggctccaaaagaggattaatagtcgcctgttcgagaaggttatctaccctggctacctgcagggcggcattaaagatccaaacaacacccgggattacgttgaaaattgcaagttacacgctggaagcaagttcctcatttccctggacatcaaaaatttttacgacaacatccgtgagacatcagttctgtctatattcaagcactttttcaagtttcctgacgacgtaagcgtgttgctcactaagctggtgaccctgaatggtcgcgtgccacagggagcttgtacctcatcctatgtcgctaacttagtctttcataatagcgagtattcgctcgtgagtaaactgaaaagtcggggtcttgtctatacccgactgctagacgatgtgactatttcttccagtactctgctgacccaagatgtggccacggacctgatcaaagatgtggcggccgtgttcaggaaacacaatttgcgacttaacaactccaaaacaaaagtggagagaagcgatgatctcgctgccgagtataaagtcaccggattgtgggtcagccatgggcagcctaaactgaagaaggaggaacgcaggtatatcaggcagctggtctacatctgcgagcaggagcatcagaagagccccttcgaagagtcttatcatgatctttggaatcgcgtgtccggtaaggtggcaattgttacacgcttaaagcacgttgaagccgccgacctgcgtggacggttatcaaaaatacttcccctctatgacagcaccaagaggtcacagatccttttcgaagcccagaagttgctaagaaagcacccatcaacccatactagaatgggcgtgatcaactcttaccacaagataattcacgctatcgggattctgacaagaactgatagagttctcgcaagagccctccgacggcaactgaaggcaaaatttagtgatctcccgctgaagtcccaggtctgggaatga

SEQ ID NO: 10904 - RNA, 1182 nt, synthetic construct
  source 1..1182: mol_type = other RNA
atggctatggacaagccttattacccctacagacctatctctagtatcgatgcattggccaggactctcggcgtcgtgccaaagctgctgtgtgatcttgcagacgaccctgccacttcgtatgtgaaattcaccattttctccaagaatggcaaacagcgggacgtctatgaaccgaagtacgaattaaagcgtctgcagaagaggatcaactcccggatatttgagttggtgatctttccctcctacctgcagggtggaattaaggacgtcgaattccctagagattacattgagaactctaaaatccatgcgggatctggcgcgctcgttagcgtggacatcaaagatttctacaattccatccgagagccctccgttctctccatatttaagaacttcttctcatttccggacgacgttagctgtctgttaacacggctagtgatgttggaaggccgcgtgccacagggagcatgcaccagttcctatgtggccaatctcatttttcacaacagcgaatattcactggtgagtaagtttcgcgccaaaggcctggcttattctcgcctgctagatgatgtgaccgtgtcagctaccaaacccatttcacaggaggaaagtacacttgcgatcaaaagcattgctgccatggctcgcaagcatgacctgagactgaatagcaagaaaacgaaaattgaaaggtcagatgatatcaatgccgattatgcagtgaccggtgtctgggtagggcacggagtccctaaactgcggaaggatgagcgacgacatatccgccacttggtctatatttgcgagaaggagtacgccaaggactgcttctctgtggaataccatagcctgtggaatagggttagcgggcaggtttcaaagttgactcgtctgaagcacgcccaagcaaaatcgctcagagagaggatgggcaacatccttccaaagtacgacttccaagccaaagccaagataatatatgagtgtagcagactcctccggcgccccgtaagctctcacaagaaaatcggggtaataaacaactaccgaaggttaatctactctattgggattctttccagaacagaccggagtacagctaaagcccttcgtagacagctggtggagaggtttgcaggtgtcccatccaaagctgagatgtggagttga

SEQ ID NO: 10905 - RNA, 1182 nt, synthetic construct
  source 1..1182: mol_type = other RNA
atggccaaagataagccttactacccccatcatccgatcggaagtgtggaaagcctggcaaagtgtctcggcctgcctcctagactgttgaaagacctcagcgaagacacctcaaacagctacaccgagttttctattacctctaagtccgggaaagaaaggattgtgtatgacccaaagttcgaactaaagaggctgcagaaacggatcaacagccgcctgtttgagggcgtattctacccctcctatctgcagggagggatccgagatcagaaaaatccccgtgactatatcgtgaacggtacaattcacgctgggtcaaagaatctgataggcatcgatattaaggacttctacaacaacataaaggaggagtcagtcaagcccattttcacgaggttattcaattttccagatgccgttgcttcgattcttacaaagttagttacccgtgatgggcgggtgccacaaggtgcctgtacaagctcctatgtcgccaacctggtgttctttaactcagaatacagcctggtcagtagaatgagggcaagaggtttttcctacactagactcttggacgatgtaacattatccagcaaacggcctatcaccaaggaggaaagtactgaactgatcaaggaggtggcggcgatattcaagaaacacaatttgcgcctaaacaataaaaagaccaagcaggagtctgccggggacgtcaaagctgaatataaagtgacgggagtgtgggtgggccatggcatccccaagctacgaaaggcagagagacggcacatccgccatctggtgtatatctgcgagaaagagtatcttaaatgccgcttcagcgaggaataccacgccctgtggaataggatatctggtcaggttgctaaactcacacgactcgagcacagtcaggctgaagacctgcggcttcgcatgtctggaatcctccccgagtacgataatcaaatgaaagcctccattatctttgaagcagataagcttttgaagaagcctgtagcccaccacgtccgcccaggagttatatcatccctcaataagaccctgtatagtcttggcattctgactcggactgacaaaccactcgctagacattacaaaaaaatgttgaggctgcgttttattaacgcaccgactaagtctgagatgtggggctga

SEQ ID NO: 10906 - RNA, 1173 nt, synthetic construct
  source 1..1173: mol_type = other RNA
atggataagccatactatccgcataatggcatcagtagcatccagagccttgcaaaaaccttaggtattcacccttcacttctcgtggatatcgcttctaaaaccaccgactcttatactgagtttcagattacgagtaagaacggaaagattcgcaccgtatatgatccaaagtatgaactgaagcgaattcagaagaacatcaatcagaagatcctggagaaagtggagtaccccacctacctgcagggcggaataagggatctcgaaaatcgtagatcctatgtggacaatgcggggatacacgctggcagcaaccacatactgtcattggacattaagaacttttacgacaacatccgccctgagaaagtgaaagaaatcttcctgtacttctttaagttctctgatgagacatctgaattgctaactaaattggtcacactggggaataaagtgccccaaggtgcctgcacttctagctatattgccaaccttgtcttctttaattcggaatacaggatctttagcgaactcaagtccaagggaatctcgtacagtcgcctcctggacgacgttaccttatcctctagaaaacacctgagccgggacgaggcctcagagcacatacgccttgtttgctctatctttaagaagaatggcctgaggctgaacaacaagaaaactaagaatgagctaaaggggtccaaccccaatttcaaagtcacaggtttatgggttgagcacaaaaatccaaagattccaaagaaggagaggcatcatacacggcacttggtgtacatctgcgaaaaagagtatgctaaaagccctagctcagaacactatcatcagctgtggaataagacatccggccaggtggccaagctcaaacaactggggcattcacagcacaaacagttgaggactagactgaagaaaatcctgcccatccttgatgagagtagtaagaagaagttgattctcgactgtaaaaaactccttcacctggaacggaacgcaaaagagcgtttcggagtactgaaacggatcaacaagtgtatttacatgttaggcatactgtccagatccgacaagggactgtccagcaacctacgaagacaactgctcaaacatttcggggatctccctacgcataaggattactggatttga

SEQ ID NO: 10907 - RNA, 1191 nt, synthetic construct
  source 1..1191: mol_type = other RNA
atgaaattaaagccacactacccgcataatccaatcgcgtctattgaagcccttgccataactctgggaatccatcccaaactcctgcaagacctggccaataaggccaacgatagctatattaactttacagtgagcagtacaaacaggaagggcgaggacaaagatcgtcacgtttgtgaacccaagcacgaactgaaaaagctccagaagagaatcaatagtcgtattttcgagaaagtggagtatcccaattatctacaaggtggcattaaagatgaggagaaccccagggactacgtcgctaacgccacacggcatgctaacgcaaatcagattatatgcatagacgtcaagcagttctacccttcaattaaatctcagtacgtggtcaaggtgttccaatattttctcaactttcctcctgacgtgagcgagattctgacgaaactcgtgacctatcatggtcgggttccgcagggaggatgcaccagctcctacatcgcaaacctcatattttacgataccgaatacttgctagtgtcagaactgcagaagcacgggatccagtattcccgattgctcgatgacatcacgcttagcacacaaaaaaatttcactaaggagcaggagaatttctacattaagaagattgccgacatcttcaaaaaatacgagctgaagatcaacaataagaagaccagaaatgaacactcatcaaacccagccgtatcctttgaggtcactggcctgtggataggccacaagaagccaaaggctagaaaagaggaacgaaggttcatccgccagctggtgtttatgtgtgagagagagtacacccagtctccctattctgagaaataccatgaaaggtggaacgaagcgagtggcaaagtagcaaagcttcagagattagaacaccttcaggcaacaaagttgcgcgaacggctcggaatcatcctgccattgtatgatgaaaacatgcaatcccagataaatcaggagactaagaaactggtcaagctgtccgctcctcaaaaccagcggctggggaacatcaaacgcgtgaacattctgattcacaaattggggattcttgcacgcaataataagagcctggctaatagtttaaggtcgcagatcaatgaggtttatgccaacaagcctaccatcaaagagatctgggaatga

SEQ ID NO: 10908 - RNA, 1191 nt, synthetic construct
  source 1..1191: mol_type = other RNA
atgaagctcaagccccactacccatataatccgattgcgtcaatcgaggccctggccaccactctgggcattcacccaaagttgctgcaggatttagctaacaaggtggacgattcttacacgaactttatcgtgaaaagcaaaaacaagaagggcgaacagaaagatagggacgtatgtgaaccaaaatatgagctgaagaaactgcaaaagcgaataaactctcggatttttgaaaaagtcgagtatcccttgtatctccaggggggtattcgggacgaagaatcgccacgtgattacttcgccaacgctacctgccatgctaacgcaacccagatcatttgtatcgacatcaagaagttctatcccaacatcaagtctaaatatgtcaccaaagtcttccagtacttttttaagttcccccccgatgtgagtgagctccttactaaactagttacataccatgacagggtaccccaaggcgggtgttcaagcagctacattgcaaacctaattttttacgacacagaatacctgctggtgagtgagctgcagagacattccatccagtactctcggctattagatgacatcaccctgtcatcccagcagaatttcaccaaggaccaggaaacacagtacatccagaagattgcaaagattttcaagaagtacgagcttaagatcaactccaagaaaacgaaaatagagcacagagccaatcctgaggtgggattcgaggtgacaggactctggattggacataagaaacctaaagcacgaaaagaagaaaggcgttttattcgccagttagttttcatgtgcgagagagagtataagcttaacccttgcagcgaaaaataccacgagagatggaacgaggtgtccgggaaggtggctaaattgcagcgcctcgagcacctgcaagccaggaaactgcgggaacgactcagactcatccttccgctgtatgatgagaatgttcaaaatcagatcactcaggaagcgaagaagctgattaaactgcctagccctcaaaatcaacgcttgaataatataaagcgggtcaaccagctgatatataagctgggtatccttgcccgcaataataagactctcgctaacagtctgaggttgcagatcaataaagcctatgccaataaaccaacaataaaagagatctgggagtga

SEQ ID NO: 10909 - RNA, 1179 nt, synthetic construct
  source 1..1179: mol_type = other RNA
atgaagctagctccacactatcccaacaatcccattgcttctgtggaggccctagcaataaccctggggatacaccctaaactgctgctcgacctgtccaataagattgacaacagttacactagtttcttaacccctcaaaaaaacggaaaggaacgcctggttcacgaaccgaagtatgagctgaagaagctgcaaaagagaatcaattcacgaatctttgagaaggtggaatatccggagtaccttcagggtgggatcaaggatgaaaacaatcccagagattacgttgcaaacgcactgcggcattcccacgctaaccagattatatgcattgacattaagcagttctaccctaacattaagtccgaatatgtctccaaaattttccagcacttctttaagttcccagcgcatattgctgaactcctgaccaaaattgttacccttcataacagggtgcctcagggagcatgcacatcaagctacatcgctaacctcctattttatgataccgagtatctccttgtctctgagctgcagaaacacaatatccagtatagtcgattactggatgacatcactttgtcaacccagacaacgttgactaaagaacaggaaacgttttacatcaagaagatcgccgcccttttcaaaaagtacgagctcaagattaatggcagaaaaactcgtatagaacaccgggccaacccagaggcctctttcgaggttacaggactgtggatcgggcacaaaaaaccaaagagccgcaaagaggagagacgatttatcaggcagttggtgtttatgtgtgagcgggagtataaggtaaatcgctgtagcgaaaaataccatgaaaggtggaatgaagtctcgggtaaggtggccaagctgcaacgtctccagcatgtgcaggccaaaaagcttcgggagcggctcagcctcgtgttgcctgtatatgacgagcccatgcagaaacaactgatccaggagacaaaaaaattggtcaaggtgacagcgccccaaaatcagaggatcggcaatatcaagagagtgaactccctgtactaccgcctgggcatactgggccgcaacaataaatctttagccaatagccttaggctccagttgaacaaggtctacggcaacaaacaaactaaaaaggaaatctgggagtga

SEQ ID NO: 10910 - RNA, 1191 nt, synthetic construct
  source 1..1191: mol_type = other RNA
atgaagttaaaaccccactatccacacaatcctattgccagcattgaggctctggcaaccacacttggtatacatccaaagctcctccaggacctggcaaataaagccgacgatagttacaccgactttctaataacctcaaaaaacaggaaaggcgaggtgaaagataggaccgtctgtgaaccaaaatttgagctcaaaaagctccagaagagaattaacagcagaatctttgaaaaggtggagtaccctctgtatttacagggcggaattagggatgaagagagccccagagactatgtggcaaacgcgcagattcatgcgcatgcaaatcagatcatttgtatcgacattaagcagttttacccatctatcaagatcccccacgtcaagaacatcttcaagtacttcttcaaattccctgaagaagtcagtgagatgttggccaagttggttacttacagaggagctgtgccccaaggcggatgcacatcgtcttacattgccaacctgatattctacgatacggaatatttactggtgtcagagctgcgtaagcactccgtcaaatatagccggctgctcgatgacatcaccctgtccgccgagaaggatttcaccaaagagcaggaagaatttttcatccggaaaatctcagccatgtttacgaagtatgggctatccatgcacagcggaaaaaagaggatagagcaccgctccaattccgatgtaagctttgaggtgacagggctctggattggtcataagaaacctaaggctaggaaggaagagcgccgcttcgtacgccaactggtgttcatgtgcgagcgggagtacaaagtgagcccatacactaaagagtatcatgaacggtggaacgaagtctctgggaaagtggctaaactgcagcgtctggagcaccagcaagccaagaaccttcgcaaacggctggggctgatccttccgttgtacgacgagaatatggagaagcaattgactcacgaaacaaagaagctgatcactctttctctgccccagagtaagaggcctggcaacataaagagagttaattcgttgatcaacaagctcggcattctgtcacgaaataacaaagccctggcacgatccctacgactccagctttctacagtttatgctgacaagccgagtaataaggagatctgggaatga

SEQ ID NO: 10911 - RNA, 909 nt, synthetic construct
  source 1..909: mol_type = other RNA
atggacaaaccattctacccatttcccggtatcggctcagtagaagcccttgctaaggctttggatgtgcatcacgatctgcttctggacatagcgaaaaaagtggaccagtcttatacgagctttgacataccgaaaaagaacaactccggctaccggactgtctgcgagcctaagcacgaactgaagcgcctgcaaaagaaaataaactctcggatcctcgagctggtgaaataccctagctacctccagggcgggattaaagataaaagtctctctcgcgactatgttaaaaacgcagccattcatgtgaagcccaccgttctgatctcgctcgacatcaagaatttctaccctaatatccatcgatctcacgtgttaaatgtcttcaagaatttcttgggctttcatcccgatgtggcagaggtgctgacatgcttgaccacactcaatgatagggtacctcaagggggatgttgttccagctatctggctaacctgattttctttggagacgaattcaaactcgttcagaagttgaggaagctgggatggagatactcccgcctgttagatgatattagtatctcatcaacagacgacattaaggacaatatcagccccattaaggagatctcaagcctatgcaagcgttacggtctgaaactgaacaacagtaagaccgatgtctcccacaggagcaatggagtagcttcccttgccgtcactggcgtgtggattgggcactctgaagccaaactacggaaggatgagagaagatatatcagacagcttgtttatgtgtgcgagaagaaatatgccgatgacccatgtgatagtaaataccacgacttttggaacagggtgagcgggaaggtcgcaaagctctcccgaatggaacatgtgtga

SEQ ID NO: 10912 - RNA, 1197 nt, synthetic construct
  source 1..1197: mol_type = other RNA
atgccccagaagtccgccaaaaagcctcactatccgtacaaacccatcggctcagttgaaacccttgcaagaatgcttggcgtgcatccaaaaatcttgacagatattgcaaaccgtaccgacgactcctacactgacttcactatcacgacgcctagtggaaaagagcgcaatgtttctgagcccaagttcaccctcaagaagatccaaaaaaggatcaataggaccatcctcgaaaaggtggagtatcccctttatctgatgggagggatccgcgaccttgaagaaccgcgggattacgtgagcaatgccagtgcgcacgctggcgctagcaccattattaagctggacatcaagaacttctaccctaacatccggagacaaaacgtgtacgatatctttcggtacctcttgcgatttccagagcctgtatctgacctgctaacaacattatgcgtaagacaccatcgtctcccacagggcgcctgcacttcatcttacctggccaacctgatattttttaatgccgagtatcagttggctgctagcttcgaacgccaggccatcgcgtacacacggctgctggatgacataaccatcagcagcccaaagcaattaactcccgccaagacgaccgagatcataaggtcagtcgcagcaatgtgtaagaaacatgggctgaagctgaataataagaagaccagagttgatcgagtgcaccagagggactccgactacattgtgacagggctctgggctaaacacagtgtcccgaaagtcccaagacacgagagacgcgccatccgcaagatggtccacgattgtgagaacaggttcaccacagatcccgcatcgcctgagtatcatagtatgtggaaccaagctagcggaaaaatagccaaactcaaacggctgggtcattcccaggcccagcctttgcgggcacgaatgagaaagattcttccccagattggggatcaggagaaggataatctaattctcgaatgcaaaaagctggcaaacaaatcacggcgaaacacagataggattggtcacattctgagagtgaatcgggccatacataaagtgggcctgttgtctaggactgacaagaggctggctcgctccttacgccgtcaggtggtcgcggcttatcctaacaaaccaactattaaggactattgggaaattaagtga

SEQ ID NO: 10913 - RNA, 1032 nt, synthetic construct
  source 1..1032: mol_type = other RNA
atgtcatataagcaattcaaagtggaaacaggaaagaataagaaggaacgccagattttcgaaccgaaacgaagcctgaagggtatccaaaagaagatcaacaaggaaatctttgagaagattgattacccacattatcttcacggggcactgtcgggcagggattatatttctaatgcagccgtgcacactagaaagagaaccgtgatctgtcttgacataaccaacttctacccctctataagcaagaaagatgtctgcagcatatttaagaacctgatgcgattttctcccgaggtgtcattgtgcctgaccgagcttgtcacccttaatgacaaggtgccacagggcggatgctgtagctcctatattgcgaacttgctgttttttaattcggagtacaacctgtacaacaggttgaaatctatgggactatcatattcccgcctgttggacgatatcacaatcagtagtgacaaagacctctcctccgaagagaaaactaaggtaatcaagctcgtccacggaatggttaatcagtacagactgagtatcaatgagagcaaaacgactattgagcattcaaaggatagctctagcaagctgtccgttacaggcctgtgggtaaagcacggggtgccaaaactgactaaggagaaccggcgttacattcggtacctggtttatatttgcaaaaaacagggcgcttatgagagacataccaaggaatatcatgacttgtggaacaggtgtagtgggaaagtggcccagatgtctcgcttaggtcacgtgcaggctgttgaactccgcgcaatactctccgagatcatgcctgtgtatgacgactacaaaatttccaagctaaagttaatggccaaacactacctcaataaattcacgcctcctctgacagacgaccagattcggaaaatcgatcgtatgttatacgatttcgatatcgtcggcagaaccaataaaaacctcgccaaactgtaccggaggaagcttgtcgctctcctgcccgataggtga

SEQ ID NO: 10914 - RNA, 1140 nt, synthetic construct
  source 1..1140: mol_type = other RNA
atgaataaaccgcgcttcaatgggacacctattgcctcactggacagtctggcagctatgctgggaattgatagaaagagattggattggatggtactgtccgtgtcaaggtcttataaacagtttacggtcgagacagggaagaataaaaaagagaggaagatctttgagcccaagcgctcacttaaaggcattcagaagaaaatcaacaaggagattttcgagaacattgactaccctcactacctgcacggggccattaccggccgcgattacatcagcaatgcttcagtccacactaaaaagaagaccataatctgtctggacattaccaacttttaccccagcattagcaaacgcgatgtgacactcatctttaaaaatcttatgcgtttctccccagacgtgagcattgctttgacagaattggttaccctgaacaaccaggtaccccagggaggatgctgttcttcttatatcgccaacctgctgttcttcaactccgagtataacctatataatcgactccagtctatcggttactcgtatactcgacttttagatgacatcaccatatctagtgatgaggatatctcccttgaggaaaaaactaaggtgatccagctagtgtacaggatggtcagtcagcacagattgtctataaatgaagacaagaccactatcgagcatacaaaggactccagcagtaagctctccgtcacgggcctgtgggtgaaacacggcgtgccaaagttaaccaaagaaaataggcggtatattagatatctcgtgtacatttgccagaagcaagcagcatatgagcggcacactaaggaataccatgacctgtggaacaggtgcagcggcaaagtcgcgcaaatgagccggctgggacatgttcaggccaacgaattacggtgtgtgctctcagatatactgcccatctacgacgattacaagatagggaagctgaagtacgttgctaaacattatcttagcaagtttacacatccattgagtgaagagcaaatcagaaaagttgacaggatgatctacgacttcgatatcgtgggtcggaccaatgagaaactggccaaggactatcgatccaagctacgcgccctcctccctgaacgttga

SEQ ID NO: 10915 - RNA, 996 nt, synthetic construct
  source 1..996: mol_type = other RNA
aaaaagcgaactatcttcgaaccaaaaaaagccctcaaagccctgcaaaagaagattaaccgggagatctttgagaatgtgacatatcctagctatcttcacggaggactgaaggaaaaagactacataagtaattccgcaagtcacacaaagaagaaaacgatcatatgtatggacattcaggatttctatccgagcattagtaagagagatgtccaccaaatttttcaatacctgatgcgtttttcacctgatgttagctccgcgctgactgagcttgtcacactgaacgggaaggtgccacagggtgcatgttgcagcagctatatagctaacctggtgttcttcaataaggagttcaacatcgtgaacaagctctctaggaaaggactgtcatacaccaggctgttggacgatatcaccgtcagttcagataacgacctctctgatgccgaaaaaactgagattattcagctggtaaccggtatggcccgttcctatcggcttaacatcaataaagacaagacttctatcgagcactctaaggattccaatgctaagctccaggtcacagggttgtgggttaaacatggcatccccaagttgacaaaagcagaccgccgctacattaggtaccttgtgtacatttgcaaaaaggactatgatgccaagaaagacagcgtggagtaccatgatctctggaacaaatgctctggcaaagttgctcagatggaacgactcggccattcgcaggccaaggacttaaggcagaccctatcagaaatattgcccatttacgacgagtttcggatcaagaagtgtactatgtttgccaagagatacatcaagacgttttcccccccactgtccgaagagcagatcagcaaggtgaataaactgatttacaaattcgggatcgtagctagaacccagaagaatttagcgaaaacctatagacgcgagctacgggcattactgcctatcgaaaagcaatga

SEQ ID NO: 10916 - RNA, 1143 nt, synthetic construct
  source 1..1143: mol_type = other RNA
atgatgaagcccctattcaatggcacccaactcgcatcccaggactctttagctgcaatgctcggagttacaacagagaggttgaataaaattgtcctgtccatccctaaaagctataagagcttcaacattgaaacggggaagaacaagaaggtccgaacattatttgaaccaaaaaaggggctgaagcatatccagaagaagatcaacaaggagatattcgagaacgttaattaccccaattacctgcacggcggactgaaagagcgggattatgttagtaatgccgggactcacgccgggaaaaagaccataatttccctggacatcgagaacttttacccctcaatatccaaaagggacatcttgaacatcttcaagaacatgatgagattttctccttcaatctccgagactctgaccgagctggtcactctcgatggtaagcttccacaaggcgcctgctgttcaagctacatcgcaaatctcatcttctttaacgatgagcacaacattgtaaggaagatcaataatatgggcatgaactatactcgtcttctggatgacgtgacgatttcgtcagacaagaaactgagcaaggaagaagaaacaaaggccatcaccaccgttgtagggatgattaatcgtcatcgcctgtctttgaatgatgcgaagacagtaattgagaaatcagatcatccaaactctaagcttcatgtcaccggcctgtgggtgaaacacaaaacacccaagataaacaaagagaacagaaggtacattcgatatcttgtctttatatgcgagaaagaatctgccgtggacagaactagcaccgagtatcacaccttgtggaacaaggctagtggtaaagtggctcagatgagcagagtgggccacgagcagagtgtggaactccgggaaaagttaggaaagattttgccgctgtatgacgagttcaaaatccggaaaatcgtgttcctggctaacaattacatcaaaaacttttccctgcctctctctgaagaacaggtgagcaaagtgaataagattatttacgatgtgggtatcgtgggacgctccaataaaaagctaagtaatgaactgcggaagaaactccgcagtattcttcctaaagacgcctga

SEQ ID NO: 10917 - RNA, 1140 nt, synthetic construct
  source 1..1140: mol_type = other RNA
atgaaacctctttttaacggcacccagttaagtagccactcaagtctcgccgccatgttgggcgttactccggaaatcttggataagatcgtgctgtctattccaaagtcctacaaggacttctgcattaaaacgggtaaaaacaaaaaggaacgagctatctttgagcctaaaaagggcctgaagtacattcagaaaaagatcaacgaggaaatcttctgcaaagtgaagtacccagtatatctgcacgggggcctaaagaatagagattatgtgagcaatgctggttttcattcaggtaagaagaccatcatatctttagacatcaccaatttctacccatcaattagcaagaaggatatcctgaacatcttcaagaatatgatgcggtttagcccatcgatcagcgagacactaactaagcttgtgacccttaacgacaaactgccccagggagcctgtacaagctcctatatagcgaacctgatttttttcaatgacgagcacaacattgtctccaaactgaatcgcatgggcatgacatatactcggcttctggacgacatcacgattagttccgacaagaagctctctaaagaagaagagacaaaggctattaccaccgttatcggcatgattaatcgtcatagactctctatcaataacgacaagactgtgattgaaaagtccgatcaccataattccaaactgcatgttactggactctgggtcaaacacaagaaacccaaagtctcaaaagagaatcgcagatacattaggtatctggtgttcatatgtcaaaaggaaagtgtggtggataggacatcgtccgagtatcacaaattgtggaacaaagcatctggaaaagtagcacaaatgcataggctgggacaccctcagtccatagaactgcgggagaaactctcagagatactccccctctatgatgagtacaaaatccgaaagatcgtcttccttagcaacaattacatcaagaactttagtctgcccttgagcgatgagcagattaagaaggtcaacaagatcatctacgaaattgggatagttgggcgcaccaacaagaaattggccaatgagttaagggggaaaatgaagtctatgctgcctaaggtgaaatga

SEQ ID NO: 10918 - RNA, 1155 nt, synthetic construct
  source 1..1155: mol_type = other RNA
atgaataaaccctactataaaaaatcgcccatagcatcagttgagaaattgagcctcacactcaatgtgaccccagaacgtttggccgtgatcgtcgataacatccacaactcttacaaaacgttcactaaggtcactggtcggaacaagaaagagaggtcactgagtgaacctaaaaagggactgaagaagctgcagaagaggattaatcaggagatctttgagaacgtaagttttcctgattacctgcatggaggcttaaaaggaaaggattatttatccaacgctaaggtacacaccaataaaaagcatcttatttccctggacatcgaaaacttctatccctctattagcaagaagaatgtgcttgagatcttcaagtatatgatgcgtttccctgaggacgtgagtaaggtgctgacagaactggtcactctggatgggcacgttccacaggggtcctgttgctctagctatatcgcaaacctcgtgttctttaataccgagtataactacgtcaaccagcttaagaataaaggctaccattacacacggctactggatgacataactatttccagtgataaggagctcgacaaaaaggaaaaaaccttcatcatcaaccagatgcgcgcaatggttgaaaagcatcgcttgaaaataaacgacgagaagaccaaggtggagtcacacacggatcttcgctcttcttttgaggtaactggcctgtggaccaaacataagaatccaaaactcagaaaaccccaaagaagacacattagatacctggtgttcatctgtagcaagcaggccgagtatgaaaggacaagcaatgaataccatgccctgtggaataaggtgagcgggaaggtggcgcagatgcaacggataggtcacactcaggctaaccagctgcgagaacaactgaccaagatccttccgatttacgacgacttcaagatcaagaaggtgatttacctagctgacattctcagcaagacaaagaaagaggaaatcacctttgccaaagttgagcggtatcgcaagataattcacaaactcgacattgtctcgaggtccaataaaaaattagccgacaagcaccgatcagtgttgcacacaatctttaaagattgcaaagtcgaatccgagtga

SEQ ID NO: 10919 - RNA, 1155 nt, synthetic construct
  source 1..1155: mol_type = other RNA
atgaaaaagcctatctacaaaaagagccccattggatctctggaaagtctgagcgccatgttgggcatcaatcaatctcagttggaccacataattaattccattcccaactcctacaaatccttcaagattgagacaggtaagaaactcaagttgagacagctgcacgaacctaaaaaaggcctgaagtctcttcagaagaaattaaacaaggagatcttcgagaacattgaatatccgtattatcttcatggagggatcaaaaaccgggactacctgtccaacgccaggatccattccggatcaaagtccctgatatctctggatattaaggacttttaccccaatattcgtaaaactgacgtcataaacatcttcaagaatcttatgcgctttccagcggatatctcagaggccctcacaaaactcgtgactctgaacggtgaggtgcctcaggggagttgttgcagcagctacatcgccaatttgatctttttcaacaacgagtacaacatcgtcaccaagatcgagaataaagggtttagatacactagacttctggatgatattacaatttcaagcgatcgtgaactgacgaacaacgaaaaaaccttcatcatcaatagcgtaaggtctatgataaagtcacaccggctgaacataaatgaggacaagactaaaatcgagtcttcctcgaatctgaatgacggctttgaagtgacaggcctctgggcaaagcacaaagctccaaaggttagaaaaaatcaccgcgaccacatcaggcatctcgtcttcatttgtaagaagcaagccgaatatgataaagaatcgcccgaataccatgcactatggaataaagcttcaggcaaagtggctcagctgacccgcctaaatcatgccgagagtaatccactacgaataattcttaactccattctgcctgagtacaacgagcacaagatcaaaaagattaccaagatcgctgacaatttaatcaaggagaaaaacaaggtgacgagcaatgatctcatcaacaagatcaacaagctcttgtatgaactgagtattgtttcaaggacccgaaaaagtttagcatatcggtatcggaagaagataaacagctgctttagctctgtactcaaggtgagtatttga

SEQ ID NO: 10920 - RNA, 1104 nt, synthetic construct
  source 1..1104: mol_type = other RNA
atgctgggaatatccaaatctcagctagacaacattatcaatcacgtctccgacagttacaaatcctttattaaagaaacggggaagaataagaagtcaagagagctgtttgaacccaagaaaacactcaagcaaatccagaagaaactgaacaaagagatatttgagggcatcacttatcctaactacttacatggcggtatcaagaacaaagattacatcacaaatgccaaagtgcattcgggagccaaaagcatcatttcactggacatcgagaacttctacccaagtattcggaagaacgatgtgctgaacatcttcaagaacctcatgaagttccctcaggatgtaagcgagtccttgactaagcttgtgacgttaaatggggttgtgccacaaggatcctgttgctcttcatatatcgctaatctcgtctttttcaacagtgagtaccaccttgtgacaaaagtcaagaataagaggtttgagtactcccggttgctcgacgacataaccatctcctccaaaactgagttcaccaacgaggagaagacatttgtcattaataatgtcagagcaatggcaaatcggtaccgactaagcctgaacgaaaacaagaccaagatcgaaaatagtagcgatctcaagtctgatttcgaagttaccgggctgtgggccaaacattctgtgccgaagctgaagaagtgtcaccgccgctatattagatatatcgtgttcatatgcgagaaacaggccctttttgatcgaacctcaatggattaccatgctctgtggaacaaggctagtggtaaagttgcgcagctgaaaagacttaaccacagcgaaagcaatatgctgcgtgacaggctgtctttggtgttgcccgaatatgacgacgataagattcagaagataattaagatcgccgacaacctcctggttaacggccacaagctgaatgctattgacctcaaggacaagatcaatcaccttttctacgaattcggcattgtaagcaggactaaaaaatcattagcatatcggtatcgcaaaaaaattagggccaatttttcttcgatcaccgataaagtgacaattagctga

SEQ ID NO: 10921 - RNA, 1185 nt, synthetic construct
  source 1..1185: mol_type = other RNA
atggctaacgacaagccttactactccaagaaacccattgccagcgtagaggcgttggcacagtgccttggcgtcaccccagaacgactcttgctgattgccaagaattcggaaaagagttacatagagtttacggtttacacaggaaaggacaagactaacctcaaaaagcgggtcctgcatgaaccaaaacccttcttaaagagcatccagaagaagattaaccgggagatcttcgagcatgtcatctatccggagtaccttcacggtggactgaaggagagggattatataacaaacgtgtcactacacgcaggggccaaaaccattatcgcgatggatatccaggacttttacccaagtatccagaggactcatgtccaagacatatttactctgctgtgcaaattcccgcctgccatatcatccctgattactgacttgattaccatcaatggtagagtggctcagggggcctgttgttccagctacatagctaacctgattttcttcaattcagagtacggcagaattagcaaattccgctctcaaggcctcacctatactcggttactggatgatatcacaatcagctctcgcgtggtgcttgaggagaaaaaaatctccaatgctatcgaatctgtggcaagtctgttcaccaaatttggcctcaagttgcatcccagaaagaccaaagtcgaacaatcctcagacacaaaagccaaatttgaagtgacaggcctgtgggccaagcacgggaatcctaagattaggaagaaagatcgccattacgtgaggcacctcgtattcatttgccagaaggaatttgaaaaagacagtaactgtagcaagtatcacgagttatggaacatgacatccggtaaagtggctgttctcaccaggttgaagcacgcacagagcaaagatctgagaaagaagctagggagtgttctgccaacctatgactctgaggcctccgctaagcttcagcgtatcgcgtataaactctgccgcatccccgaaaccgaaacgtcttctcctggaaaactgaagatttaccacaagctgaagtatcactttggaatcgtggctcggacggaccgtcagctggcaaagaaatggaaagaggttcttgatacaaaattcaaggccagcgccatcgcagcccgatcaactaatgagtga

SEQ ID NO: 10922 - RNA, 1158 nt, synthetic construct
  source 1..1158: mol_type = other RNA
atgaagaagcctatatataacggcaagcccatcagtactttggatgccctgtctaaagctctgggcaccaatctctctagactgcgcatttttattgacaccgccgaaaatagctatactacttttaccttggagaagaaagttaatggaattgtggtaaaggaacgcacgctgaatgagcccaagaagaatctgaaagaccttcagaaacgaatcaaccaggcaatatttaacaacgtgagctacccggagtacttgcaggggggaattaaaggcaaagactttatcaccaattccaagaatcacctctctgctaaaagcctgattaatctcgatatcaaggatttctaccctagcatttcaatacatcacgtctatgccatctacaacaaactgttcaaattcccacacacagtgtcagacgccttggtgaagctgacaactaagaatggggtggtcacgcagggagggtgttgcagttcctacattgcgaacctgatctttttcaatagcgagcatgatcttgttcagaagctagaatccaggtccctgacatatacaaggctcattgatgacatcactatctccagcgcaaagccaatgtctaaggacgagattacaaacaccataaatctgacgaacaatcacctaacaaagttcaacttaaacctgaaccgcgacaaaaccaacattgaccatcatcacaacaagtcagataatttcgaagtgaccggtttatgggtcagacacggtaaaccaaaagtcaaatccgcagttagacgacagatacgtcagctggtgtttaagtgcaagatccaatatgagctgtgtcctacagacaagtcttatcatgacttgtggaataagacttctggcaaagtagccattctaaccaggctcggccacgccaacagcaaaatctacagaaaaaagttatccgagatcctccccctgtacgatatcaagaaggaagaaaagatcgagcggatcattaactaccttatcgataccgaatcgaaggagatcaatagtcccaggcggatcaaactctatcacaagatgatttaccattgcggaatacttgggcggagtaacaagtcaaaagcgaaacttctcaaaaacaaactgaaagctaagttcatcgctgtccaagtgtga

SEQ ID NO: 10923 - RNA, 1185 nt, synthetic construct
  source 1..1185: mol_type = other RNA
atggcggataaaccttactacccagggtccagtgtagctcacatcagtacactcgctgccatgttggagattaacagagacttaatcgagaagcatagcaagaatacgtcgagctcatataccacttttctaatctctcctccctctaaaaagagccgagaagtgtctgaacccaaggagtccttgaagaagattcagaagcgcattaatagtcgaatcatgtctgaagtggattaccccaagtatcttatggggggaatcagggataccgcatccaggagagactatgtaaacaactccaaactgcacctgaagccagagactctcattaatctggacatcgagaacttctttcccaatatacacaaagagcacgttaagaacgtctttaagtacctgtttcggttctcagaagatgtgtccgagactctcagctgcctcacaaccctcgaaggtgtcgtgccacagggtggttgcacatcaacataccttgggaatctagtgttctttaattacgagtacggcgttgtgagtaagttgcgcagcaaaggcatcagttattcgcgactgctggacgatattacgctgtcctctaagaagagactgaccgaagaggagaaaacctgggccatctctctcgtggctggaatgatcaaccactacggaatgaatatgcatgacgggaagactcggattgaacatcgtgaatcaagggacgccaaatatgaagtcactggagcatgggtacggcatggcgagcctaaaatcagaaaagacgacaggaagaagattcgctcagcagtgaggaagtgtgagataatgtatgaggaatccccgtacagcagcgagtaccacaaacagtggaataaaacaagcggaagagtggctcaactgggcaggttcaatcataaagccgaggaaaaaaagctgcgggagcggttaaagaccatcttaccactgtatgatgacgtgtattcaaaaacacttagtgttaaggtgaaccaggtcgttcgccgtcggagaaagaaccaaataaacattgatagcgtcggcaccaggaactacatattgaaactgtatcacgagctggggataatggcccgcactaagaaaacccaggccagacgcctcaaacagtctcttcgtgaaaacttcggcaatattatctccaaccctcactactga

SEQ ID NO: 10924 - RNA, 1182 nt, synthetic construct
  source 1..1182: mol_type = other RNA
atggcagacaaaccttactacccactgccccccatcggctcagtctcagtgcttgccgcgatgctcaaaatcaatgagaagcagctgatccatatcgcgaataatgcatctaattcgtacactagctttgaaattactcctgagggaaagaaaccacgcgatgtagtggaacccaaagagcagctcaagtatgtccagaagaagatcaacgctatgatattttccgaggtcaaatacccgatatatctcatgggcgggatttcagacaaggtgcaatctcgggattatatcaataacggaaaacttcacctgaataaaaacaccctaatcaacctggacatcgaaaactttttccctaatattaagcacgtgtacgtgaaaaagatcttcacgcacttgttcaagtttcctgaaagcgtgtccgagatcctgacaaagttaacaaccctcaatgggcgactcccccagggaggttgttctagtacctatatcgccaatttgctgttcttcaactatgaataccacatagttagtcagcttaggaacaaagggattacatactctcgtctgctagatgatatcaccctctccagcaataagaaactgaacaaggaggataaaacgcatgctatttccgccgttgacggtctgattaagcggttcgagctgtcgatcaatacaagtaagacaagaatcgagcacaaggacgatcttagcgctcagtacgaagtgaccggctcctgggtcaggtttggagaattgaaatttccaggcaaagccaggaagaagattagatctgccgtaaaaaagtgcgaattaatgtaccaagagaactgctattcagcagagtaccatagtcagtggaatcgtactagcggtcgcgttgcacagcttaaaagattcgggcatcataagcaggagcgggagtttcggactcgacttggaaaaatattaccgctgtatgacgaacagcaagccattaccttgcgcactaaggtgtaccaactggtcaagaagaggaagctcaataaactgaggttggacaacccaggcctacgcaagcagatactcacactctaccaccagttgggcattctggctagaaacaacacctccagcaaaattctgaagaacgaactgagagagaacttcagcttcctgattaacaatccctattattga

SEQ ID NO: 10925 - RNA, 1182 nt, synthetic construct
  source 1..1182: mol_type = other RNA
atgggagataaaccacactacccatttgagcctattgcatcgtcaaagacactcgcaaaaacgctgggtgttaatctgccactcctgctgaaaacagccagcaacacctctaacagctacacatctttcatcgtgccaactaaatcaaaagaccgaacggtctatgagccgaagacaaccttgaagtatatccagaagaagatcaacaaagagatattatcacgcgtggaattccctagctatctgatgggcggcataaaggacactcagagtcctcgggattacctcgctaattccaggatgcacctaagaaaagagagcctcataaatctggatatcgagaatttctaccactccatcaagaaaccttacgccacccagattttcaagcaactgttcaaattcaacgacgaggtgtccaatcttctgacagaacttgttacccttgacgggcaggtaccccaaggggcctgcacttcctcttacattgccaacctcgtattctttaactcggagtataccgtggtcaataacctgagagccaagaagatagcatacacccggttgctagatgatattacactgtctgctgaccgtaagctgactaatatagagaaggaatggttaatcagccaggttactggaatgattgtctcccatgaacttaagatcaaagatgccaagacacggatcgagaatagggatcacccaagatcccgctacgaagtgaccggggcttgggtgaaatatggggagcccaaactgagaaagaaggaaaggaataaaatccggcatgatgtgtatatttgtgagctctttcacgaaaaggaccccaccaccgaagaatatcaccgtctgtggaaccgcacatcaggcttggtgagtaaattgggaaggttcaaccataaaaatgaggcggacaagctcagaaagaggttgagttttattctgcccaagtactctgacatccaggctaaaactctgcaaaccaaaatttaccagatcgtcaaccgcaagaagaagaacaatatcgacatcaacaatcctggcctcagcaagcagatcctgcgattttatcacaacctaggcattctgtctcggacgcatccgcatcttagcaaacccttaaagaatcagcttcgcagtgaatttggtactatgattaggaacgagtactattga

SEQ ID NO: 10926 - RNA, 1176 nt, synthetic construct
  source 1..1176: mol_type = other RNA
atggcagacaaaccatactacccccatgcccctatcagcaacatcgacacattagcgaaaatgctgggcgtcaggtcctccctgctgattttgatcgccaacaaggccaattcgtcgtacgtgagtttcgaagtagagacaaagaacaagcagcgcatggtgaacgagcctaagacgattctcaaatacatccagaagaagataaactcccaaatcttcaatagcgttgagtttccggcttatctcatgggaggtatccgtgaccccaaaacaccaagggattacattagcaatgcagccatacacgcgaaagcaaaaaccctgatatctctggatgtgaaagacttttttcccaccacccaggaagttcatatcaagtccgtgtttaagaacttattcaatttccccgaagacgtaagcaacactttgacaaagcttgtctctctgaatggcagactgcctcagggagggtgcacctcttcatatgtggccaaccttatattccacaactcagagtataaggtggtgagtcagttgcgccagaagggaattaggtacactcgtctcctcgatgacattacacttagcgccaacagaccactgtctaagaacgagtgtgagaagtatattcgcctcgtggctggcatgatcaccaagcatgacttaaccattaattcaggcaagaccaaagtcgagtattcaaaaaacatcgctagcccatatgaggttaccggggcatgggtccgacatggtaaacctaaattgcggaaaaaggaaagaaatgagatcagacacatagtacacattgtcgaaaagaagtacgctgaaaacccctacgataaagagtaccacgacctatggaataaagcctctggcctggtggctaagctgaaacggtttgaacacatcaatgagagtaagggactgcgcaagaagctgaaagccacacttcctctttacgatgaccaaaaagccgagactctgcgggttcaagcaaataagctcctgaggcgacaggctagaaacactttgaattataatagtgggaccaaaaagtctatcgataaactagtgtatgacctgggcattctctccaggactcggccagaaatcagcaagccgctaaaaaagaaaattaaggattccttcacggggatcgattttgatggtatttga

SEQ ID NO: 10927 - RNA, 1188 nt, synthetic construct
  source 1..1188: mol_type = other RNA
atgaattctgtccgccgcgacaagccctattacccaagctcgcctattagttcggtgtcccgcctgtccgatgttctggaggtaagagaaaacgtgctccgggatctgatccaaaacaaaagcacacattaccactcttttagcatcgaaaccacatcctcagatggcaagaagaaaaatcggagcatacatgagccaaaatttttgctcaagaaactgcaaaagaggatcaatagtaggatattgtccaaggtggagtatccccactaccttcagggtggtatttatgacgaggataacccccgagactactactctaacgctgccattcacagtaaagctaactgcgtaatgtctgtcgatatcaaaaacttctacccttccatcaaaaccgagcaggtgaccagaatctttaagttcttcttcaaattcccacaagacgtgtcagagttgctcgctgaactggtcacttatgagggatttgtcccgcagggggccgtgacctcatcatatatagccaatctgctgttctttgaagacgagtacaaggtcgtggcgcacttagcaggcaaaaagctactctattctcggctcttagacgatatcaccatctccggcaagtctataagcaaccaggactttggaaagattaaaacccaaatcgttgggatgtttaagaagagaggggtgaggattaataggaagaaaacagcccttgtgtatagcggcatccgatcagtgacgggcctgagggttgagcactccactcctcggtgtgatagaaaggaaaaacggaggatacgagcagcggtgaagcactgcgagatccagtaccagattgaccgtacatccgacgaatatcatagtttgtggaatagtacctcagggaaagttgccaaactggagcgcgtcggacacagccaggcaaagaagctgagaacgagactccagcagatttacccgactctttctacaggtcaggtacacgctctgaagattgccatcaaaaagctggagaaggttccaagttccaaacgtatgaaaattggatacctgaagcaggtgaataagctaattcatcgcactagcctggtgttccggacagacaaacccctcgcacattctttaactgaacgtcttatcaccatcaagcctgtcaagacttacagcgatttctgggaaaaatga

SEQ ID NO: 10928 - RNA, 1233 nt, synthetic construct
  source 1..1233: mol_type = other RNA
atgaacaagtttaatttcgataaaccctactacacccaaagaccgatttctagcattaaggcccttgccaatgcactaggggcagaccagcaggcgctcattcaactcgccaacaataaaacgaactaccactattataccaagcatgtcaagtcaggaagtaaaactaagcagcgttccatttttgatgccaaacacagcttgaagaagattcagaaacgcataatatcccgaattttctgtcacatagaattccctcaatatctccatggcggcataaaggatctgaaccagccccgagactacttttccaatgcaaccgtccactgcaattcgaaaaatatcatcagtcttgacatcaagaacttttacgactcagtgcgggacgacaaggtcctcatcatcttcctcaatttcttcaagtttccaaaagatgtagcccagatattgactcagctggttactgtgcagtggtccgattacgacaaggatatctctcaatccgccagacacctgcctcaaggggcacctactagttcctacttagcaaacctgatctttttcgataatgagtacaaactgttcaaccacttcaaaaggcagaaaatctcttatacaaggctgctggatgacattacgatctcttctttgagcgaatttacaaaggcccagaagactaaaatcatcacacgggtggctggaatggtaagagagagcgacctgaagctcaacaacaagaaaaccatttgcacaagctttcgcgaaccaggcaagaagatgattgtgaccgggttgtgggttaatcattcaattcccaaactgcagaaacatagccttaaaaagatcctagagggagtgaaatcgtgcgagtatatccattccagatgtccattttcctttgaataccacaaggaatggaatacttactctggtaaggttgctaatatggctcggagttatccaaatcttgccaagagactaagggtgaggttaagcacgatcctgcccattttcagtcctaaacagaccctggtgcttgagcggcagatcgataccttactcaatagcaaaaccacacagaccaacaagctgactaacataaagcgcttcaacaaggcttactatgcgatcggtatcatttcacggacagacaagcgcctggctaggaaactgcgatcacgcctgttgacccgtatgccgaacattacatataaagactattgggagaactga

SEQ ID NO: 10929 - RNA, 1170 nt, synthetic construct
  source 1..1170: mol_type = other RNA
atgcgcccacagtacctcaaaaagcccatcgggactgtcgcaactcttagtgccgccctcagagtttcagaaccggtcctgcggcacgcggagagtaaccttgacgcccactatacgccttacgaaatcccaaagcgggacggtagagtccgttctattgtgatcccgtcactgcatctcaaaaccatccagaagcggatcaacagagaaatttttgcacatgtcgaatacccttcctatttatacggaggggtgaatggccaggactacgtcagaaatgccagcgctcaccgcggagcacaagtactcattgctctggatgtgaaagacttttacccatccatatcacgcaaacgggtcgccaacatctttcagcatttcttgcacttcggagctgaggtgagcgacttgctcgccgggctgacaacctatcaaaataaggttcctcaaggggcttgcacctctagccacctggctaacctggtacttcacgatgttgaatattctattgcccagtattgtcacaatgcaggcctggtgtacacaaggcttctggatgacattacaatatccagtcgaaagcacgtgtctggagagaagataaccaagattattgcgatggtgtcgagaatgctgaaatccaagggcctgaaaatcaagagacagaagacgaagatcacctcaaaaagcaaccctgaggaccttatggaggtaactggcttatggctgaataggggcgccccccgcgcaaactcattcgctaggcgagcaattagggtggaggtgtataagtgttcccagagcgccaaaaaagacaaggccagttccaactaccataaagatcacgccagcgccagcggaaaggtggccatgttaaattacctgggccatggtgaggcaggtcggctgagaaaaatgttggcggacatcctccccatatacgatgagcgagaattgactaagacagaaaaaatggttcggatgttgcggaggagtagcgagaaggacagggaaaagtacgcttataacgtgcgtttccataaagtgatgcagcgcctgaatatcgtggcaaggaccgataaagttctagccgatcgtctacgacaggagctgtgcgcttctcgcccagtcaagtcctctaatgcggctctctatgatgagcccatctga

SEQ ID NO: 10930 - RNA, 1011 nt, synthetic construct
  source 1..1011: mol_type = other RNA
atgataccatccttgcacctgaaaaccatccagaagagaatcaatcgcgagattttcagccatgtaacgtatcccgaatacctgtacgggggcgtgccaggaaaagattatgtgcggaatgccaaacggcacgaactggcacacgttgtcatcgcactggacgttaagaacttttatccatccatcagcaaactgagggtttctaatatctaccagcacctcttcaagttcggggcggacgtgtccgactttctcgctgccttgaccacttacgagaataaagttcctcaaggtgcctgtacttctagccacctagctaacctagtgctccatgatgtggagagttccgtcgtcaaatattgcaacgattcgggactggtgtacacacgattactggacgatataactatttcttccactagacgcctccctgagaagaaggtagagaaaatcgtcggcatggtggctacgatgctgaaaggcaaagggcttaaactgaagcacaacaaaaccagggtttcaacaaaggctaaccccgaggaacttatggaagttacaggattatggctgaatagaggagcaccccgagtccattcagtgagcagacggctggtgcgtgtggaggtgtataagtgcaaagaagcagcgaaagtggaacgagtgtcagaatcctatcataaggcttttgccagggcttctggccgcgtggcaatgctctgctacctcggccacgccgaaagtgggaggttaagaaagagcttgagtgagatgcttcctctttatgacgtaagggaggtcaccaagaccaagaagatcgtcaagatgctgggtcggacatctgagaaggatcggagtaagtacagctacaatgtaagctacttcaagaccatgcagcgcattaacattgtgtcacgcacagaccccctgttggcccgtactctcaggcatcagttgctgatgtgtaagcctaagaacaaatcggacgccgccctttacgatgagccgatttga

SEQ ID NO: 10931 - RNA, 1170 nt, synthetic construct
  source 1..1170: mol_type = other RNA
atgaggccatattatacaaaaaaccggattggatctgtggcggccttatccgctgcgcttcgggtttccgagccaattctgaaacacaccgcagataatctcgagaggcactacacgccctacgagataccgaaatcaaacggaaaacccagactgattgtgatcccctcgctccacctcaaaaccattcaaaagcggatcaaccgcgagatcttttcgcatgtggcctatccacactatctgtatggtggtgtgagcgggaaagattatgtgcggaatgccgaagcccaccagaatgcacatgttgtcattgccctggatgtgaaggacttctacccctccatcagctttgcacgagtagtaggcatttaccagcacttcctgaagtttaatcctgaggtagccgaactgctggccagtctgaccacatttaagaacaaagtgccccagggggcctgtacatcctcccacttggctaatctggtcttgcatgatgtcgagtatagtatcgctcaatactgtgagaacttcggcctgatttatactagactccttgacgacattacagtgtctagcacgaaggctttaagcccacagaaaataaagaagatcatcgacatgatcagcaaaatgctccgagacaaaggcctgagggttaagcatcagaaaacccgcgtgtctagcaaagcaaaccctgagaacctgatggaagttactgggctgtggttgaacagaggagctcctcgtgccaatagttttgacagacgcttagtcagggtagaagtgtacaagtgcaaacaggcggccgcagtcgatcgcacaagacctgagtaccataaggcgcatgcaagtgtctcagggaaggttgcaatgcttaattacctaggccacgctgaagccggacgtttcaggactacactagctgaaatactgcctttgtactctgtgggcgagatcaccaaaaccgaaaagatcgtggccatgctctgcaagtcatccctcaaggatagaggtaagtatacctacaacctgaattactacaagactatgcagcgacttaacatcgtggcacggagcgacttcgctttggctaaaaggcttcgcgtcaagctgctcggctacaagccgactaagctgtcatctgacgccctatatgatgaaccaatatga

SEQ ID NO: 10932 - RNA, 1191 nt, synthetic construct
  source 1..1191: mol_type = other RNA
atgtccacgtttttctccgtcatgcgtccatactatacaaaaaaaccgatcgggactacagctgcgctggcctctgctttgcgggtgagcgaacctgtgctgaaacacgccgccaacaatcttgaccggcactataccccatatctcatccctaagggtgacgggaagcaacgtgcgattgttatacccagtttgcacctgaaaactatccagaagcggatcaatcgcgaaattttctcgcacattgaatacccacactacctgtacggcggaatcgacggcaaggactatgtaaggaatgcaggcgcgcataaggacagacatactataatagctcttgatgtcaaagacttctatcctagtattacattcgagcgggtgttaggagtgtaccagcacttcctgaagtttagccccgaggttgccgagcttttggccaagctcaccacatttaacaagagggtgcctcaaggtgcatgtacttcttcccacctggccaatctagtgctgcatgatgtcgagtatcatgtggtgcagtactgtgagaatgcaggactaacctatacacggctgctggatgatattaccgtcagcagccccaagcccctgcctgtacagagagtgtctaagatcatcgagatgattagtaaaatgctcaaggggaaagggctcaggctgaaaaaaccaaagacccgcgttagttcaaagtcaaacccagagtctttgatggaagtgacaggtctgtggctgaaccggggagctccccgagtcaatagcgcgacgagacgagcaatcagggtcgaagtgtaccagtgcaaacaggctgccgctacctccagaacttccttagactaccataaaaagcatgcatcggcctcaggcaaggtcgccatgctgaactatcttatgcacgcagaagcaggcaggctcagaaaagcacttgccgacatactgccgctctacgatgtttctgagatgacgaagacccgtaagattgtggagatgctctctagagcttccgttgccgataggggcaagtacagttttagcctctcctattttaagaccatgcagcgcctaaacatcgtggcccgaagcgatgccgctttggcccactcactgcgccgcaaacttctggtatgcaaaccaacaaaacctagctcagctactttatacgacgaacccatctga

SEQ ID NO: 10933 - RNA, 1089 nt, synthetic construct
  source 1..1089: mol_type = other RNA
atgcatactgctcgaaatatcgaaaagcactacacgccatacgaaataccaaaggcggacggaaaagttcgcgctattgtgatccctagcctgcatctgaagacattgcagaaaaggatcaaccgagaaatctttagcaacatcgtgtatccaccctatctttacggaggtattgagggtaaagactacgttcggaacgcttccgcgcatcgttccgctcatgtcgtgattgcccttgacgtcaaagatttttaccctagtatcagctttcacagagtcctcaacatattccagtacttcttcaaattctccccggaagtgtccgagctcctagcaaagcttaccacttttcagaataagctgccgcaaggcgctgctacctcctcacacttggccaacctggtgctgcatgataccgagtatcacttagcacagtattgtgaaaatgccggattgatttacactcgtttacttgacgacatcaccattagttcaaccaagcccctctcggaacagaggatttctaagctcatcgacatggtcgcgagaatgcttagggagaaggggttgaaactgaagaacaagaagacaaggatctcgtctcgcagcaatcctaagatcttgatggaagtgactggcctgtggctgaacagaggctcacctcgtgtctctacagacaacagacgcaaaattagaaccgaggtgcaccaatgcgctgtggcagccatgacttctcggacatctcaaagttatcacaaggcccacgcctccgtttctgggaaggtggcaatgctcaatcacgtagggcatgcagaggcagaacgctttcggaaaacactggccgatatcctccccctgtatgatgccaatgagctgacgaagaccataaatatcgtgaacgttttaagccggtccagtgagtcagatcgggaggagtacgccttcaatctgaactacttcaaaacaatgcagcggattaacattgtagcacgcagcgatcccaggctcgcccgaagactgagggaaaaactagccacctgcaaaccaataaatcagagcgacgaggctctgtatgatgagcccatatga

SEQ ID NO: 10934 - RNA, 1188 nt, synthetic construct
  source 1..1188: mol_type = other RNA
atgctaaccctgctccccatgaggccattctataaaaagaagaagatcggatctgtggcctccttgggcgccgcactgagagtttccgatgtcgtgctgaaacatactgccgccacccttgaacaacactacacaccttacgaaattcccaagaaaagtgggaaacctaggtccattttgataccgagtcttcaccttaagacactgcaaaagcgcattaatcgtgaaatctttgcccacgttcaataccctgattatctgtttggcggtgtcgagggaaaagactatgtacgcaacgcaagggtgcacgccggtagtcacgtgctcatctcactggatgtcaaggacttttacccttccatcacgttcgacagagttaagagaatctaccagcatttcttgcagttcgatccagccgtgtccgaattactcgccaaactcactacgtataataattcagtgccgcagggggcttgcactagctctcatctcgctaacctgattctgcacgacgtggaataccacttggcacagtactgtgctaccgcaaaattgacctacactcggcttttagacgacatatgcatttcaagcaagacagccctgtctaaggagaagattgctaagctgatcgataaggtcagctcaatgctgcgcgataaaggcatgaagcttaagcatcaaaaaacaagagtgtgttccaaaagcaaccccaaagaactgatggaggtcactggcctgtggattaacaggggcgcgcctcgggtcaaacccacagagagacgcaagatacgagtggatgttcacaggtgtcaggtcctggctaatcagagtctgaccaatcgggagtacgatcgtgcacatgctagtgtttctggacgggtagctatgttatcttatctggggcactcggaggctgagcgcctcagaaagtcagtggcggccatacttccacagtttgatattcatgagatcagcaaaacgaagaaaatcgtagcgctgctcagccgagcgtctgccaaagaccggaacaagtattcctttatcctcaacttcaacaagaccatgcagcgtttgaatatcgtggcacgaaccgacccaaagctagccgtgcagctccgcaaaagcatggccacctgccggcccacaaagagggctgacgcaactctatatgacgagccaatctga

SEQ ID NO: 10935 - RNA, 1074 nt, synthetic construct
  source 1..1074: mol_type = other RNA
atgctgcggaagactctgcactttctttccaattctcaggaacgaagagaggcatcctttgactcctacagcagcctccacctgaaaacgctacagaagaggattaatcgggaaatctttgcgcacgtcgagtaccctaattatttaagtggagacattgagggcaaggattatgtccggaacgcaaaggcccatgctgggtcgtacgtgctcatcagtctggacgtgaaagatttctacccaagcataaacttcaatcaggtgaaacggatcttccaatattttctgaagttcgagccgggaactagtgagctcctagctaagctcacaacatttaacaactcactgccccagggggcttgtacctcctctcacctggccaacctcgtgctgcataacgtggaataccacctcgcgcagtattgcaagaccgcccgcctcacatacacaaggttactggacgacatctgtatttcttcaaattctccaatctccaaagagaagatttcacgccttatcgaaaaggtcagtaagatgcttagggatgagggtctaaaactgaagcatcggaagacacgagttagctctagatccaatcccaaagaactgatggaagtaactggtctgtggataaacaggggcgcccccagagtcaaatcagctgaacgccgagctattagagtagaagtgtattgctgcaaagacgccgcccagacatcacttaccgatcgcgagtatcataaggcctacgcacgcgttagcagaaaggtcgcaatgctgaatcacttaaaccacagagaagccagccgcttgcggagaggcctgagtgagatcctgctccgttttgacatacacgagattactaaaacggagaaagtggttgctatgttgatgcgtgcaagcatcaaagatagggagaaacattctttcatcctgaacttcaacaagaccatgaatcgacttaatatcgtggcaaggaccgatccaaagttggcgatacgtttgaggaaggagatggccaagtgtaggcctactaaacggacctccgccaccttgtacgaccaacctatttga

SEQ ID NO: 10936 - RNA, 1071 nt, synthetic construct
  source 1..1071: mol_type = other RNA
atggacaaacactacaccccataccagattccgaagaaaaatggaaaacctcgcacaatcatgataccatctttgcatctgaaaaccctccaaaagcgcattaatcgagagatcttttcccacgttaagtatcccgactacttgtacgggggcgtcgagggtaaggattatgtgaggaacgcagagatgcacgcgaaagctcatgtgttggtgagcctggatgtgaaggacttttatcccagcatcagtgctgacagggtgacaggcatttaccagtatctcctcaaattcaacccaggagtggcagaactgctggcgaggttgactacctataaaggcgccgtgccccagggtgcttgtacttcttctcatctggccaatctcatcctgcacgacgtcgaataccatgtagcccagtattgtaagaatgcaggactggtgtatacaagactgctggatgatatctgcgtgagttcggaggccgctcttagtgagaagaagatatcacgcatcatagaaatgatctctcggatgcttcgtgataagggtcttaagctaaagcaccagaaaacccgaatttctagtaagagcaaccctaaggaacttatggaagttacggggttatgggtcaatcgtgggatgcccagggtcaattccactgagaggaggagcatcagagttgaggtgcaccggtgccggcaattagccgcaggcagacggaccgatcttgcgtaccacaaagcccacggctccgtgtcaggcaaggtcgctatgctgaactatctccggcattcagaggctggaaggctacggagaagcttgggggccattctgcccgagtacgaccaggccgaaatgaccaagactgttaagattgttgaaatgctgtcgagaacaagccctaaagacagagaaaagtactcctttaacgtatccttcttcaaaacgctccagcgactgaacgtcgtggcacgcacagatccgaagctggccgtacgcttacgcaaaaaactcgccagctgcagaccaaccaaacattcatccgcaactctgtacgacgagcctatttga

SEQ ID NO: 10937 - RNA, 1134 nt, synthetic construct
  source 1..1134: mol_type = other RNA
atgaacgcactgtgcgcagctctgaggattagcgagtccgctctgaagcatctggcagccaacctggatcgacactatactcccttcgagatacctaaagataacggtaagagacgcgccttgctcataccgagcctgcatctgaagaccctgcagaaacgcatcaatagggagattttttcgcacgttgcgtaccctgcttatctgtacggcggggtagaaaatcgggattacgtaaaaaatgcaagtgttcaccaacgcgccgaggtgctgatagcactcgacgtgaaggacttttacccatctatcgaaatgaaacaggtcgtctccatcttccaacacctatttaagttccctaaggaagtcgccgacattttagcccggctcacgacttacgagggcaaggtccctcagggggcttgcactagcagtcacatcgctaacctagtgcttcacgatgtggagtaccatatcgcccaagacttccataaccggaattatgtgtacacacgtctcttggatgacatctgcgtgtcatcacttaagcccctgagtcctgagaaggtggaagacgtgattaagaaggtgtcttccatggtcaaaaagaagggcctgaagctgagggctgccaaaaccagaattactagcaggtccaaccccgaatctctcatggaggtcacgggactttggctgaatcgcggcacaccacgtgtaaatccgaaacagaggcggagcatacggtcagcagtttatcagtgtcagaagacagctatgagtgacaattcgagcttgacatatcatgtggagcacgccagcgcctcagggaaggttgccatgttgaagtatcttaaatacggagacgcaactcgaatgagaaccatcttacagggtatcgtgcccgtgtacgataaagctgagctcaccaaaacaaagaagatcgttgatatgctttgtagaacctctcaccgggatagggagaagtacgcgtactctttgggatatcacaaagccaaacatcgcattaacattgtctccagaaccgaacccatgctggcccatgcgttacgagcgaaactcaaaaaatgtccaccaacaaagaccagatccgaaatgatttatgacgaatctatctga

SEQ ID NO: 10938 - RNA, 1215 nt, synthetic construct
  source 1..1215: mol_type = other RNA
atgactaccctcagcagccacgcctgctttatgctgagtggcttcatgcggcctcagtacaataaaaacccaatccgatccattgattccctgtgcgacgctttgagggtcagtgaggtggtgttgcggcatacagcggagaatattcaacatcactacacgccttatagtattcccaaggcaaatgggaagacaagggtggttcatatccctagcctgcatctcaagaccatacaaaaacgcatcaacaaggagatcttttcacacattacttaccccgattacctgtacggcgggatagaaggtaaagattacgtgaaaaatgccaacgcgcacgctggagcaaacgtgctaatcgccttggacgtcaaggatttttatcctagcatcaagagagaacacgtaactgatgtgtaccagcatctatgcaacttctcaaaggacgttgcggaactgctcacagacctgacaacgcttcgcgagcgcgttccccagggtgcttgtacctcctctcatcttgcaaacctcgtgttacacaaggtggaatatcccgtcgttcagaatttaagaaaccaagactttcgctatactcggcttctcgacgatatttgtatatctgcatctaagttcctgtcaccagctaagatcgagacaatcatttccgacgtcgctaggatgttgaagagcaaagagctgagactgcacccaaaaaagaagtcgattacctccaaaaacaatcccgagagccttatggaagtaactggcctatggctgaatagggggcacgctagggctaaacgggaagagaggcgcgccatccgtaccgaggtctaccgctgcgagaaggaggccgctagaagtaggtactcacccgaataccacaagatgcatggaagcgtgtctggccgtgtggcaaaactgaactatttgcaccacccggaggccaaaaacttccgactgcggctgcaggagatcctgccactctatgacgagcatgaaattatcaagaccagcaaaattgccagtgtgctttctaaagtagcaaaggcagatagagccaaacactggttcgccatacagcaccataaggcccagtatagagtgaatatcgttggacggaccaatgtcaaaatggcctccaaactctcacgacagctgtctctctgtagaccacctaagacactgtccgaattaatttatgacgaaccgatctga

SEQ ID NO: 10939 - RNA, 1170 nt, synthetic construct
  source 1..1170: mol_type = other RNA
atgcggccgatatttaacaaaaagtctatcggcagcatcgaagccctttcagacgctcttcaggtgaataagcacattctccaaaacaccgccgataacatttttcagcattaccatccatacgaaatcaagaaaaaagatgggggcactaggcttatccacatacctaccctgcatctgaagattatccagaagagaatcaacaagaacatattcgataacgtgacatatcccgactacttgcatggagggatagaggataaggattatgtaaagaatgccctgagccacgcaaacgctgaggctatcatctgcctggacataaagaatttttacccctccattacacagaccagggtttctaagatcttccagtacttcttcaagttccccgaggacgtgtcaaacttactcgcgaaactgtgttgtcacgaagaaagggttcctcaaggtgcgtgcacttcctcccatctggcaaatctggccttctttgattccgagtatcactttgcatccttttgcaaatccaagaagtacacatataccaggctattggacgacattacgatctcgaaaagctcagctttcagcgacacagaaattagtaaagcgatcgcttctgtaaagagcatcatctctccacatggcattaagctgaacaataagaagcagaagatcgtgtcaaggagtaacccaaaggacctcatggaggtgactgggttatggctgaatcggggacgccctagagcccaccgctcctatcgcaaagtcgtcagattggagatgcatatttgcgagaaaatggccaaaacagaccgatttagtgaggaataccacaaactgcataatcgtgtgtctggaaaggttagcaaattaagttacctgggtcaccacgaagctaccaactatcgcgatactctacagaaaattttgcctctctatgatattcacaaggcaacgaatcttcacaagaatgcactgatcctcagcaaagtcaacgccaatatccggaagaaattcgcctatttcaaacggtactcaaagattaactacgagctgaatatcctcgccagaaataataaaccattgagcaagaccattcgaaatattctgtctaactgtaaacccagtggcctccgtgacgatcttctgtacaacgagccgatatga

SEQ ID NO: 10940 - RNA, 1170 nt, synthetic construct
  source 1..1170: mol_type = other RNA
atgcgtccattttatgatgcccgacctatagggagcctggctgcactgtcaaaaacattgcaggtggaattgtcaattttgcaacggacagcgtccaacattgaagagcattaccatgcccacgaaattgttaaaaagtccggcggtacacgggagatcaatatcccctccaatcatctgaaaattatacagaagaggatcaacaaacacatctttgaaaatgtggtctatccttcttacctccatggcggcctgccagagaaggattatgtaaagaatgccaactgccatagctccgccgaggttgtgatcgctttggatattaagaacttttaccccagtatcagcatcgataaggtggaagaaattttccagttcttctgtcacttccctaaggacgtctcaaaattactcgcagagttatgctgcctaaacaattcggtacctcagggagggtgctcctcctctcacatagccaacttaattcttaacaacactgagtacagtctcgtctcttggctgtcttcaaagaagtatacttacactaggctgctggacgacataaatatctcgtctaaacacctgattagtaaagaggagatcactaagattatcaagaaaaccaaggaaaccataagtaagagcgatctgaagcttaacaataagaagcagaagatcacgagccggtccaatcccgaaattctgatggaggtgaccggtctgtggcttaatcgcggaacccccaaagctcatacgtatgatcgcaaactgattcgagcggaaatgcacaaatgtcagaccatggccaaaaaagaccgctttagcgctgagtatcatgagattcacaattccatcagcggcaaagtggccaagctcagctacctgaagcacaaagaatcagaaagatacaggtacatcctcagaggaattctgccgctctttgacaaaagcaaagaggtgagtatcagaaagcaggcaaactatctcctgaagtctaaaccgaactacaggaagaaatacgtttacttcaagaagtatcacaagctattgtataagctcaacatccttacaagaaacaacaaatctctggcaaatcaaatcaaagggaatcttaagtcatgtaaaccactgggcatgaaggacgagctactttacaatgagccaatatga

SEQ ID NO: 10941 - RNA, 1155 nt, synthetic construct
  source 1..1155: mol_type = other RNA
atgcgtgcacaatatacaaagaaacccatcggctctttggaagtcctgtcaagagctttagagattgacctgggtgtactcatcaacaccgccaacgccattgaccagcattatcatgcccaccaaatccctaaaaaaaaaggcggtttccgtactattaacataccaaccttgcacctgaagtccatccagaagaagatcaactcgcgaattttcagcaatgtcgtgtatccggaatacctctttgggggaatcaaagagagggactacgttaaaaatgccgcacagcatgccggatgcaaagcgctgattgcactggatgttaaggatttctacccaagtatatctctgaatgcagtgaaagacatctttcagtactttttcaggttcccccgggacgtcgccgaattgctgggtaagctctgttgcctcaacgaacgggttcctcaaggcgcttgcacaagcagtcatctggctaatctgtctctccaggagaacgagtaccattttgcccagtattgcaagaataaggggtggacatatacgcggctgctcgacgatatttcagtgtctagcaaagaggtctttcagcagaaggatgtcgacgccatcatttccaaggcaaaggcagtgctagcaggcgcccgcctcaaattaaacaataaaaagacccgcatcttgtcgaaggctaaccccgtggatctaatggaggtaaccggactttggttaaacagagggaggccaagagctcacaggtccgatcgcaacgccatccgatccgaggtgtaccaatgtgaaatccttgctaaggaaggcagagagcgtaaaaagtatcatgacttccactcacacgttagcggacgcgtgagcaagctcgcgtacctggagcacgcgaatagcaaactgtacagagaacggctgcggaagattctgcctatatacgatgtgaaccaggctactaatcttcttcgccaggccgagtatataagtaaaacgaccctgagcaatcgaaagtctgtggcctactacaagaaatatcacatactaaagcaccggttgaatatccttatgagaacagatagggggttggctaggcgcattcagtcaatgctcagtctttgtaagcccactctgcagtcctccgacatgctgtga

SEQ ID NO: 10942 - RNA, 1098 nt, synthetic construct
  source 1..1098: mol_type = other RNA
atggatttggggatcctcagaaataccatccggacaatagataagcattatcatccgcactcaatacccaaaaagaatggaggttccaggatcatccatattcccacgacacacctgaaaaccattcagaagaggattaaccgccagatctttgataatgttatctatccttcgtacctatttggaggcgtgcgggaaaaagattatgtgcgaaatactagtgagcatggagggtgtaacgcacttgtggctttagacgtgaaggacttctatcctagtattaccgttgctgctgtgaagaagattttccaatatttctgcaagttccccgctgaagtagctgaaaccctagccggtctgtgttgcctgaacgggagggtgccacaaggcgcctgtacgtccagtcacctcgccaacttagttctccatgacgaagagtatcacctggctcagtactgcaagaataaaggctggacttacacccggctcttggatgacatatctgtgtcatccaaggcagagtttgacgtgaaggagatcgacgccatcattaggaaagtaaaatacatgctgggaaaatctgctttgaaactcaacaacaggaagacccgggtcctgacaaaagcaaatcccgtgaatctgatggaggtgacaggcctgtggcttaaccgcggcgttccacgtgcccacagagcagatagaaatactatacgaggagaagtccatcagtgcgaggtagccgctcgtgacagcaggacagaaaagcagtaccacgagttacacaatagagtcagcggtcgggtcgcgaaactgtcttacctgaagcatgccaactcccgcgagtaccgtgagagactgagatcagtccttcctctgtacgacgagcaccaagcgaccaacctgctcaagcaggcgcggtacatggcaaaaactaaaacgaacatccgaaagactcctgcgtactgcaagaagtattttattcttcagcaccgcctcaacatcttgatgaggactgatcgcggggccgcaggcaaaattcgcgccatcctgacaacctgtagaccagccatcgccagcgccagcgcatatattgaatga

SEQ ID NO: 10943 - RNA, 1170 nt, synthetic construct
  source 1..1170: mol_type = other RNA
atgcgcccacaatatctggcaaagccaatcgccagtctgaacgtgctgtcagtcgctctcggcgtcgacatcgacgtactcagaaacgccgcttcaaacatcgaacgccactaccatcctcatagtgtccccaaaaaagatgggtctttgcggtctatatatatcccctcgatccatctaaagaagatacagaagcggatcaataggaatatcttcgagaacatctcttatcctggatatctttttggtggaatcaaagagcgtgactacgtgaagaatgcgaatgcccatgcatccgcagaactgttgatcgccctggacgtcaggggattttacccttccatcacaagggacaagaccttgaacattttcaagttcttcttcaagttctctcacgatgtggcctcgcttctggcggatttgacatgccttaggggacaagtaccccagggcgcctgcaccagctctcacttagcaaacttagttcttcacgacactgagtatcatttggtccagcacttgaacaataaaggcctaacatacacgaggcttcttgacgatattagcatctcctctaaaacccaactcgaagaaaagcaggtgcagactctgattggcaaggtgcgcaccatgctgaacgagcagggcctaaagctgcagaacaagaaaactaagattaccagcagaaagaatcccgaaaacctcatggaggttactggattatggctgaatcgtgggcgggccagagtgcaccgcaatgagagaaggattattcgagcagagctgcacaaatgtgaaagcatgtcccgcctctccaagagcagccctgagtaccacgatttttataaccggctgtccggtagagttgccaagctcacgtacctcgaacacaaggaggctctgagttatcgatcaagattgcgtgaaatactgccgatttacgagaagaatgagatacatcgcacaattcagttagtgaccagtctgcaaaaatcctcaatcaaagatcgaggcaaatacgcttactacgctaaatttcaccaggtgaggtaccggctgaatattctgggtagaactgacggggggctcgctaaaaaactggccaccaccctccagacatgtaagccaacaagcgataaagagcggctgttttatcatgacattatatga

SEQ ID NO: 10944 - RNA, 1170 nt, synthetic construct
  source 1..1170: mol_type = other RNA
atgaggcctctgtaccttgctaagcctatcgcctcactgcaggctttgtcctctgcccttagaattgacgtgcatgtgctcaaatcaacagcggccaacatagaccggcactatcatccacactccgttcctaagaaagatgggagtagccgatcgatctacattcccagcatacatctgaagaaaatccagaaacggatcaaccggaacatttttgacaaaattaagtaccccgattacctgtttggaggtattaaagagcgtgactatgtaaagaacgccaacgcccatgcaagcgccgagacgctgatcgcactcgacattcgggggttctatccctccatcacgtatgaaaaaaccctgaagatcttcaagttcttcttcaaattccccgaggacgtggccgcattgctcaccgatttagtgtgcctccgcggaagggtcccacaaggtgcttgtacaagctcccacatcgcaaacctgtccctgcacgaagctgagtaccatctcgttcagcacatacgtaataaggaatttacatacactcgcctgttagacgatatctcaatctcttctaagaagcagataaacgaaattcagatacagactctcattgggaaagtccgcaagatgctcaatgaacaagggtttaaactacaaaacaagaagacccggatcacatcaagaaagaatccagaaaaactgatggaggttaccggattgtggttgaatagaggccaggcgcgcttacaccgccaggaacgaaggctgattagagctgagctccacaattgcgagaaactcagcaagctatctagaacctcgatcgactaccacgagctgcataatagtctgtccggcagagtggccaagttgacttaccttggccacaaggaggctgcctgctaccgcagccggctaagggaaattcttccggtgtatgatgataatgaaatccataggacaatcaaactggtatcttttctggagaaaagtagtgtcaacgataggaagaagtatgcatattacgccaaattccatcaggtgggctaccgtcttaacattctgagacgaacccaaagcggccttgctaataaactggcggaaatactgaggacttgtaagccccctctgaataaggaggagttgttttatcacgagatcatttga

SEQ ID NO: 10945 - RNA, 1164 nt, synthetic construct
  source 1..1164: mol_type = other RNA
atgaggcccatttactccgcgcagcccattgggagtaccgctgccttggcgttggcacttggaatgtccgagagcgcgcttcttgcactggccgcttcagcttccatcagatattctgccttcgagataccaaaaaagaattcggataaggtgcgcaccgtgtgcgagccacatcacgagcttaaggtggcccagaaaagaataaatagggccgtctttgaacacgtcgtatacccagaatacctgcagggaggcattgccgatcgcgactacgtccggaacgctagaatccatgcccacagtaaaagtttgatagccttggacgtgcagaatttttatgacaatatacaagccccagacgtgctcaagatcttcaaattcttctgcaaattcccggaagatgtggcacgggtcctcacccagctgaccacaaggggtggtcgagtgcctcagggcgcatgcacttcgtcccatatcgcaaacctggtgtttttcgctactgaacaccgcgtagttagagagttttttcaacagggcctccgctattctaggctcctggacgacatcacagtttcttccgctaagcaactgagccaggagagaactagcaagattatccacaaagtgaaacttctgctcgccgagaagcatctgcgcttgaagacgtctaagactcgggtttcttccaacagtaaccctgaggtcctaatggaagtcacagggctgtggttaaaccggggcgcacctcgagcttttagggctgagcgacatgatattagagcccgcatgttcaaactggagcggatgcatgagttgagctcacacgatctggactaccacgccgagcacaatcgcatcagcggacgggtagctaaaattacttacctgggacatttcgaagcagagaactatagatcacgtctccagaagattctccctacctatgacggcaccgaagtggcccgtacacttaagctagttcgattactgtgtgcaacacccgcccatcagcgggataatctggcgtacatcgataagtaccaccacgtgctctatcgtctggggatcctctctcggacccacaggagactggcttcaaagcaaagggcactggtgatgaaatgtgcccccagcacgagcagggaagaactattatatgggtga

SEQ ID NO: 10946 - RNA, 1161 nt, synthetic construct
  source 1..1161: mol_type = other RNA
atgcggccgatctttcatggaaaacctatcgcctctattgccagcttagcagcagctctcgggctcaatgccacgactctgcaggacttttcagcgcgggcccagagccagtatacccgtttcgagatccccaagaaaaatgggggaactagaaccatctgctctcctacccatgatcttaaggtcattcagaagcgtatcaacagagcaattttcagtaacgttgagtttccacccttcctcttcggcggcattgagggaaaagattacgttaaaaatgctcaagctcacgctggcgccaaaactattattacactcgacgtgacggatttttacccatccatctctaagaaaagagtcgccgagatcttcaagtatttctgtcacttccccgacccggtgagccatttgctcgcagaacttgtgacactggatgaggtcgtgccacagggagcttgtacaagtagttatattgccaaccttgtgctctttgagactgaacatcgcttggtagaagaatttcgccagaggaagctgacatactcccgactgttggacgatatctgcatctcctcccagcgaaacatcgcacctaaagaggtccaggaaataattagccggactgcttcgctgttaaaaagcaagggtttcaggatcaagaatcgcaagaccagggtgagctcagcttccaatcctgaaaccctgatggaggtgactggcttatggctaaaccgaggtcacccaagagtttttcgggctgaaagagagaagatccgtacccaactgcacaggtgcgaggagaatttcaagatatcaagaacagcacccgaatatcatcaagaacacgatagattgagtggcctcgtggccaagccaacataccttaatcattttgaggccactaacttccgcaaccggctgtcagcgaagctgcctcactacaacagggcggacacctataagacggagaaaatagtggaatctctggaacgcgtcaatatgggtgaccgcgggaagatctcttacattgagaagtttaaccaggtaacccaccggataaatatactagcaaggtccaacgccaaactggccacaaacctgcgggacaggctgcgaaaacacgcccccaccaaaaccaaggaggacctgatttacgggtga

SEQ ID NO: 10947 - RNA, 1206 nt, synthetic construct
  source 1..1206: mol_type = other RNA
atggatcacaggagcgtccagcttagcaggtgtttatttcttagcatgaggccaattttcaacggaacaccaatcgcctcagtcgatgccctggctcgttcccttagtctgagcgcacagcagttacggacattggcgggagcagttagtggccactaccgcgattttgacatccctaagcgcgacggctcctttaggactgtgtcagggcctactgaggaactgaaaattatccaacggcggatcaatagacacatctttgagagagtgcagtatccctcgtacctcttcggttccatcaaggagcggaactacgtgcagaacgcacggagccattcccgcgcccatgtaatcgtggccatggacgttgagaatttcttcccaagtatcaaaagggaggctgtgctgaacatatttaagaacctcttccgctttccgcaagaagtggcctctctgctagccgacctttgtactaaagacggccacgtcccacaaggggcttgtacctctagctatatcgccaacttagccctgcacgatatcgagcacagactggtgagcaatctgcggcacgaaggcctgatatactctagactgaccgacgatatttctatctcctcccctcatcccctggcgaaaaagcgcatcgagtccttggtggtacaagttgccgaaatgttgaagtgcaagggattcaaacccaagagaaggaagacaaaggtcacctctaagaataactctgcagaactcatggaagtcaccggactctggttgaatctcggcgaacccagagtcaaaagagatgaacgggcatcaattcgcacagaggtgaggcgatgcattcgcgagtccaaagtcgaacgaacgagtcctgagttccacaagctccatgaccgtacgtctgggcgggtggccatgctcagtcagttgaagcatcgtgaagcgaatcgtttccgcgtggctctgagactgtgcgcacccctatactcaccaatagagattaaacgaacccagaagattgtagctgctgtttgcaagacccccctaaggagccgggaaactgctgtgtatatacagcgattttatcaggctagatacagggtaaatattgtgtcaaggacagaccctaaacttgccaaagagctgcatgcacgactgagctcgcacgttccgaaaatgaaaaaggaggaggccatttatggttga

SEQ ID NO: 10948 - RNA, 1185 nt, synthetic construct
  source 1..1185: mol_type = other RNA
atgtccgtgatttttaacagttgcatgaaggcaaagttccttggcactccaatcgctcgagttgagtcccttgcgagaacattgggtgtgagtatccacgatttacgcaccattgctggggccgcttcctccaggtacaatgacttccagattgataagaaagatgggggcaaaagggacgtgagctcgcctcgcatagagctgaagctaattcagaaacggatcaaccgcgaaatttttgaaaaggtctacttcccatcttacctgaacggcgggatcaaagggcgtgattatgtgaagaacgcatatgaacatggaaactcggagactatcatctctttggacatagagaacttttaccctaaggtatctcggatcagcatactgaacatctttaagaacttcctgaaacagcccgaagagatagccgagattctgaccaatctctgcacaaaagacaataaattgcctcaaggtggttgtgccagttcttacctggccaatcttgtgttcttcgacattgagcccagactcgttagcaggcttcaggaagagggctttacttacacacgtttaatcgacgacattaccatttactcaaagaaccttatctccaagaaaaaaatctcagacctcatcgaaagcatcacaaagatgctgaagtctagaggattcaaattgaagcagaaaaagactcgatgtacctcagctagcaatcccgagaagctgatggaggtcacaggactgtggctgaatcggggggcaccacgggttagacggaacgagagggccgaaattcggaaggaggtgagagaatgcctgatctccgcagagctgaataagaccgataaggagtatcacgatctccatcagaaagtatctggaagggtcgctaagctgagtcaactgaatcactgtcaagccgaacgctttaggaaagaattgcgggaaatcctccccatctatagcgacgcggatattcgaaagactcgccgactcgtcgccaaaatcataaaaacccctcgtacaacgagaagtagcctcggctatattaaaaagtaccaccagatcgtgtataggataaacattctagccaggagcaataagtccatcgctagatcattacgcgagaaaatgaaaatatgcgcaccgaccattacgaaggagaattcaattcatggctga

SEQ ID NO: 10949 - RNA, 1179 nt, synthetic construct
  source 1..1179: mol_type = other RNA
atgaatatttcatatagtcatcctcccatcggctctataagcaagttagccaaaatgctcgacgtctcagaagcctatttgtaccaggttgccaaaaaccccgagaatttttacgcattttccgagattcctaaaaagaatggagattttaggactatctcggatccggtgaaggagctcaagattgttcagcgccgcattatccggagaattttctgcaattgcatatttccaacctaccttttcggttccattaaggacattgaaaatccaagggattttgttcgcaacgcgcagtttcactcgaacgcgaatgaagtgatggctttcgacatagatagctttttccctagcatccaggctaagtacgtaaaacttgtgttcaagtacctgctcaacttccccaatgatgtatccgacctcctggtgaagctgacaactttgaatggctccatcccccaaggggcaccaacatctccttacatcgcaaacctggtgttctacgatcaagagccgaaacttgtcaagctgtttacagacaaaaagctgcggtattctcggctggtagatgatatcactatcagttccgaaaagcctattacatccgggaacaaaaccttcatctacgagcaggtgaaaaaactattggacagtaagagcctcaagatcaacaagaaaaagtatcaggtcacgaacacatccaacagtggaaaaaaaaccatcgtgaccggcctcataatcgagaacaatattgtcaagcttcccaaggagacaatcaaaagcatctccaggcaggtttatactctgaacagaatggccgacgtggccactactgatgtgaagtatcacaaagctcacggaagcaccagcgggctggtcgctctgtatagccgtttgtctaaggagaagagtgacgtgcatagactgtctctcaggggaataaaaccaacgtattcaccatctcggttaaaaaaaatagctagtctgtgtcgacgcttcattaaatacggtgagtcacacaccaaaaagcatggcgatgaagactatgccaagaaatactacaagtacaagcacaagatttctatcattcgtcgaaccgacaaaaagaccgcctacagattagacctagcattgaagcctatcaagccccttcatctgctgtcaagctatcacgaatga

SEQ ID NO: 10950 - RNA, 1179 nt, synthetic construct
  source 1..1179: mol_type = other RNA
atgaaaatagcctactcaaactcgtctattgggtccgtcgcagcccttgccaaaatgctagacgtgactgagaatttcctgacccttgtggccagtaaacctgatgatttctactccatcagcaagatccccaagaaaaccgacggcttcagaacaatttcagatccagtcaaagagctgaagattgtgcagcgtcggatcgttcgcaggatcttcagcaaatgtagttttccgtcctacttattcggatctattagggacgaaatcaacccaagagattttgtgcgcaatgcgcaatatcattcacaggctagggaggtaatggcttttgatgttgagtcgttttttccctcagtaagaccccaatttgttaagaaggtcttgaagttcctcttcaaccttcccaatgaagtggcagagatgcttgtctctctgatgacactccaggacgggctacctcagggagctccaacaagcagttatgtggctaatctcattttttatgactgcgaacacaagatagtgaagacgctgaatgctatgggattcacttacagtcgcctggtggacgacatcacggtcagttccaagactataatcaagaacgaggaaaggaggtttatttatgagcaaatctctaagatgctgggcgagaagaagctcaaaatctctcagcgaaagtatggtgtcactaacactacagtgatcgggaaaaaaacggtggttaccggattagtggtcgaagataagatgattaaactccctaaggagaaggtaaaactgattgggcagatggtgtacgagctgaagtcaaaggccgaggttagcaccaccgatcacgagtatcataaatccttcaacaaagccagcggcttggtggcactctactctcgtctgaatactaagaaagccgaaatacaccggcagcaccttcggcagatactgcccacatacgacaataaaaaggccaaaaaaatcggttggttgtgtcggaagtttattggctacagcaaattgcatccaagcaaatttagcgaggaaggctataccagaaagtactacaaattcaagcacaagatttccatcttgtcccgcacaaaccgaaccctggcaatctctctcgaaaaggacctgaagcctctgaaaccgacctgcctgttagcgtccttccatgaatga

SEQ ID NO: 10951 - RNA, 1179 nt, synthetic construct
  source 1..1179: mol_type = other RNA
atgcgtatcgagtatcagggaaagccgattagaagtatcaaagccctctcaacctgtctaggcgtgagcgaggactctctgagtcagattagcctggatattgagaatcagtacagtatctccgaaatcccaaagaagaaagggggctttcgcaccattagcgaccccctccctcccctgaaaatcatccagaggcgcatcgttagacgaattttctccaacatcaaattccctgactatctcttcggctcaattaaagatgacaataatcccagggatttttataagaacgccctctaccatcagaaggctaaggaagtgctgtcgttcgatattgagagttttttcccatcatgccgacctaagttcatctacaagatctacaagtacctgttcaacttttctgacgaggtcagccacttgctggtgaacctgacaacattaaataatggccttccacaaggagcaccgacaagttcttatttggctaacctgtttttctacgacaacgaacacaagattttcaagactcttaagagcaaaggatttctgtactccagactgattgacgatattgtagtgagcaagcagtctaagatcaactcaaacgagaaacagttcatttataggaacatcctgagcctccttagagagaaagaagtcaaccttaacaaggacaaatactcctactctaatactaaaacacacgggaaaaaaacgattataactggtctacaagtgcgaaatggtaacactatcctccccaaagaaaaaaccaccgaaatacacaagaagattcacgagattgaacatttgggggaggtcgatcgcacctccaataaatttcacgaggcctacggcacagcttcaggattgttagcgctttataagagggtggatataaccaaagcagagaaattacacaagaagataatcaccatcaagcccatttaccatcctaatcggataaagaagatcaagtggatttgcaacaaatttgttcggatctccaagtccaatcctcggagaatcggggagtataatcacgctaaaaagtatcatcggctgatgcataagatctctataatacgtaggacccatactgcattggccaaacagctgaaagcccggatgcaaagcatcaagcccacgcgcctcctgtcggaatatgaaccatga

SEQ ID NO: 10952 - RNA, 1182 nt, synthetic construct
  source 1..1182: mol_type = other RNA
atgcctctgcaagtcacatatcgcggctcacccatccgttccctggaagccctgtctagcgcattgtcgtgcgatgaacctattctgaagcacatcagcaatcacgtcgcagattactacactttctttgagatagagaagaaaagtggtggcgcacgacaaatcaagcctcctaagccaatcctgaaagccatccagaagcggattaactctaggatcttcagtctttgcgagtttcccgagtatctccagggcagtattaaggacgccacgaacccacgcgatttcgtgtctaacgctcgggcacatagcaacgggaagactgtcgttgcggccgatatcaagaatttttacccgtcagtaaccgaaagcaatgtgaaggagattttcaaatacttgttcagattctccgacgacgtgacagccgtgctcgtagctttaacaacactggacaattcattgcctcaaggagctcccaccagctcttatctcgctaatctggtgttctacaataacgaacataagctcgtgaccgaactgagaagaaaagggctcatatacactcggctgatcgacgatattaccgtgtcctctccggtggttctcgacaagaatgaacaggaatggatcatacggaagataaaaggctttactgctagtaagggtttagagttgcacaggggtaaactcaaggtctgtaccacctccaccccaggggccaacgtcatcgttaccgggctatggattgacagaggccatccccggatatcgagggaagccaggaacaaaattcgcgcggcggtgcacaggtgtaaaaaagagcatgaagccggacacaagactctgggggagtttcatgacagacacaacagcgtttcaggctctgtggccctaatttccagactgggacatacgcagggtaaacagtatcgccttatcctgaatgagaatctgccagaatactcaaaagagtatgctggcaagcttacaaagatttgttatcgctttagcgccaaaaaaggattacgaaaggagactctcagttacacaaagcgatactaccagcttatgtatcacctgtccatccttggacgttccgataaaaaaaaagcaaacttcctgcggtccctactgaagcagaacccacccaagcactgcctgagggagttgagcgaggagtga

SEQ ID NO: 10953 - RNA, 1260 nt, synthetic construct
  source 1..1260: mol_type = other RNA
atgtgctttacacttaggtattttcctgagtggctgccacaagtgtttctggagcttatcgacagcttaccttttctgtcactgggatatatgaataggataaccttcgcgtctaggcctatagcctctcgagcagctctcgctaaggcgttaagcattgacgagcgtgttctggccgagtttgagcagaacgcaaacgcatactactatttcttcgagcggcccaagaaacacggcgaaggcatcaggtccattacggctcctaaacctctcctcatgcagctgcagcgtagagtcaacaaccggatcttttccggatgcaactttccacgctatttgcatggatctattaaagatagtgagattccaagggatttcctgaccaatgcccgcgagcatatcaccgccgaccatgtcattaccctggacatcagaaatttttaccccagtatcggcagagaggaagttttcaaaatcttcaagtaccttctccgctttacagatgaagtcgcaagttccctgacaagcttggtcacccttaacggcacggttccacaaggggcccccacaagcagtttcattgctaacatggtgttctacgacagagaacccagattggtggaagaactgatcaggtccggtgtgcgctacactcgcctcttagacgacatcaccctgtccttctctaaccggatttcgtcagaaaagctcaagggggagataatcggtaaagtacggactatgtgtagcgctaagggcttcaaacttcatgatggcaagcagaagattcacagcctcatcagctctccaaatccggccatcgtgacgggacttagcatcaggaataataagttgggtctacccgtggcctaccgtaacaaaacacgcgccaaagtccacaattgcgtgcaacagtatagagctgggcaccagactgccgcagagtaccactctctgcacaacagtactttgggggatataacactgctaaagcgactgaagtataagtgcgctgacacctacgaggaaaagctgcggtcatgtctcccaacctatcaccctaaaaaagctcagcagctccgaagggcttgtgaggatctggccataaagattcggccctcctcagtagcgtccttaactagacggttccacgtgctcatgcattgtctaaccgtgctgcagcgaactaaaccggatctggcagcagccctgagaacattgctgcgcacttcatacgccaaggccatttcgaatgaatga

SEQ ID NO: 10954 - RNA, 1170 nt, synthetic construct
  source 1..1170: mol_type = other RNA
atgaaccgaattactttcgctagccggcctattgctagtagggcggctctggcgaaaacattgagtctagacgagcgcgtgctccgccagttggagcagaacgtgaacgcactttacctatcctttgagcgcccaaaaaagcatggggaaggcatgagatccatcaccgccccgaaacccgccttaatgcaggtccagagacgcattaatacacggatattctctggctgcaagtttccgagatatttgcacggcagcatcaaagacctggaagcacctagggattttctcaccaatgcatccgaacacaaagccgccgagcacgttataactctggacatcaaaaacttctatcccagtatcgagcgcgaagtggttttcaaaatcttcaagtacctcctgaggtttcctgacgaggtggcgacctctctaaccagtcttgtgaccctggacggcgtagtgccacaaggggcacctacgtcgtcgttcatagcgaacatggtcttctacgatcgcgagcccaagctcgtggaagaattcatccggtcaggggtgcggtataccagacttctggatgatatcacactgtcattcagcaacaggatttcttccgagaagctgaagggtgaggtgattggaaaggttagagctatgtgcagcgaaaagggatttaagttgcacgatgggaaacaacgaatacatgccctgatctcttctccaaacccagcaattgtgactggtgtcagcattcgaaatggacgggtggggcttccccccgtatacagggacaagactcgcgccaaggttcacacatgtgtcaaacagtttgacgccggacatcagacggccgctgagtatcataggctccacaattcagctctcggcgacgtcactcttctgaagagactgaattatagctgcgccgaggcttacgccgaaaagctccggtcctgtctgcctacatacagccccaaaaaagctcggcaacttaggagaatgtgcgaggatctggcaatgaaaatgcgtcctacatccgtggccgctttaacgagacgttttcacgtactgatgcattgtttaaccgtcctgggcaggacaaagccaaatcaggcacggactctgcgaaccttgctccgtacctcacacgccaaggccatctctaatggttga

SEQ ID NO: 10955 - RNA, 1020 nt, synthetic construct
  source 1..1020: mol_type = other RNA
atgaggagtctgtcagagcccattctgctccttaagattctgcagaaacggatccttaacaggatcttctgccatatcaagtttcctcactacctgcacggcggtatcaaagcaaccaaccccagagacttccactccaatgctagcgcacacttaggggcggaggtggccatcacactagatatcaaaagcttttttccaaacgtcacatccatggtcgttgaaaactccttcctgaggctgttccagtttcctgacgaggtcgcgaccgtgttggccaagttgacgatgctaaataatcagttaccacagggtgcccccaccagcagctgcattagcaacatcattctgttcgatagggaatacaagatagctgccaacctggaggcccaaggattccagtatactcggctgattgatgacattactatttcgagcaagaagaagatttcctccgaaagagtttcaaaggtcatagatatcatcgcaaaaatgctgggacactacgggcttaagatccatccagacaaaacacacgtacggtctaagggcaatcctctggacctgatgactattaccgggctgtggataaaccggggcagccctaagctcgaccgaaaaaaatgctttgagatatcttgtgaggttatccagctgaagcgcgaggctcttaaaaacggggtgaatgaggtgaaataccatacacgttacagttctgttgccggaaaggtggctctcctcgaacgtttgaaccattctcgcgccacacgcctcaagctaatcttggataccattctgccaacctataataattatgacgtggcaaaagtcgctaacttagtgtcaaagttctgtaagaatcaacgagattccaacagtatcggctatctcaaaaagttttatcagctccagcatgctgtgtctatagtgaagagaacgcacgtacccaccgcaaaaagtttgcaagccctccttaatatcagacgcccgaaaaggactatgtcagaattctacggctga

SEQ ID NO: 10956 - RNA, 1179 nt, synthetic construct
  source 1..1179: mol_type = other RNA
atggcctctaagcataaaatttactacgatggactcccaattgggtctatcaaaacccttgcgaagactctgtcatgcacagaagctcgcttaatcaagatatcaacagacccaagcttcttttatactacttttctcaagaccgtcaaaaataagaatagggagcttagcgaacctaaccccgagttgaagctgatccagaagcgaatcgtgagtagaatctttaaccacatcaaattccctcactatttacatggcggtatcaaagccttggaccccagggatttccactccaacgccaaggctcactcaggagccgagactgccattacactggacatcaagaacttcttcccgtccattaaagctgaccaggtcgagaacctctttctgcatctgttcaagttccctcctaatgtgagcagtgtgatgtctaaactgacaactctaaataactgtatcccccaaggggctcccacttcaagttacataagcaatctgatccttactgaaaaagaatatcggattgcggccaagctcgagtcccagggctttatatacaccaggctgatcgacgatatcacaattagtagcaagaaagaactgcccgagaaaaagatcacccagataatcaccaatatcgcaggaatgcttacacattataacttcgagctccatcctgagaaagtacacatatattctcggtcaaatccagaaaagttaatggttatcaccggtctgtggctgaaccgcggcatgccaagaattgagaagtctcgcagactgcagatatccaatgatgtgattgctattgccaagctcgcaacaagctccaccgggacgtccgatgcaagttaccacgagaagtttaatgccgcttctggcaaagttgccttgctacaacgatttaagcacaccgaagcacggaggctcagggccatcctgaacgaaatccagccgacgtataatgattacgacaagtgcaagattaacaagctggctttccgttttttgaataaaaagacctccaaagagacgattggctatctgaagaaattttaccaattccagtaccgtgccagcattattaaaagaacagaccccgcactagcgaagcggattcaggaaaaacttaacttgaaccgcccaacttcgaccaaaaaggcattctacgagtga

SEQ ID NO: 10957 - RNA, 1176 nt, synthetic construct
  source 1..1176: mol_type = other RNA
atgactacccataagatcttttattctgctaagcctattgggagcatcgccaagctggccacagccttagggttcacagagagcttcctccgaagtgtgagcaacaggacgacagactactacaccgagtttgttaagagcgtgaaaggtaaagatagggaactgagcgagccaaagccccacctcaaaacactgcagaaaagaattaacacacgcatattctctcatgtgaaatttccttcatacctccacggcggtataaagaccatagatccacgagattttgtgaccaatgccagtcaacactgtaaatcagaaacggccatcaccctcgacatcaaaggctttttcccgtctatcaccacagcacaggtcgaaaacatcttccgtaatctgcttaatttcccgaacgaagtctcagcattgctggcgagcatagtcactcttaacggtttactgcctcagggcgctcccacatcctcctacatttctaacctcgtgatgtgggagaaagagtgcagacttgtgtcgaggtttgagggcagggggctgatttacacgcgcctcatagacgacatgactatttcgtccaaaacaagaatcccagaaaagctagtgactaagattatcgaagatgtagcgggaatgctccagcactacaattataccttgcatcccaagaagaagaacattttcagtaaacgtgatcccgagcacctgatgttgataaccggattatggctaaatcggggggcccccaagctactgaaggaaaaacgggcagaaatctctcatggagtgattgctgctacccacatggcttctgagcctgacatgatcttcaatcctaaatatcacgccatccatgccacctgttccgggaaggtagccctgcttcagcgccttggccacactcgagcgatcagactgcggaatatcttgaattccattgagccacaattctccccacagtattgccaccgcatttcagttgttgtccggaaattttacgcaaagggcagggtcaagaacgatctgggaagtctgaaaatcttctatgagtttcagcataaggtgagcattgttaaacggactgaccctatcctggctaagaagctccagatctatctgaacgcaattcgcccccaagccactatgagagagttgaacggatga

SEQ ID NO: 10958 - RNA, 1185 nt, synthetic construct
  source 1..1185: mol_type = other RNA
atggccacctacgacaagatttactatgagtcaaacccaataggctctgtcgctgccctggcgaaatcactcgacgtcgcagagtcccgtctgctgcaggtggctgccgacatccaatcgttttatcacatcttcgagaaaacggtgggcaagaagaccagacagttatgcaatcctaacgacgaactgaaacgccttcaaaagaaggtggtcagtaggatctttgcacatctggtttttccaccgtacctgcatggcggaatcaaagccgaggatcctagggattttttgagcaacgctggggtacacgtgggagcccatgtggccatcgccattgacgtgaaggactttttcccttcaatctccgagcagtctattgcccaagcgttcaaactgctgttcagattccccaaggaggtagctgagatcctggctaaacttaccaccttaaatgggtttgttccacagggcgcccctactagcacctaccttagtaacgtggtgatgttcgacaaagagtataggctggtggctcgcctaagggcaaaaggcctccgttacagcagactgatcgacgatattacaatcagttcagagaagagcatgatgccctccgagattgatagggtcacaactgatgtaattaaaatgctgcgagcctataacttttatcatcacgaagccaaataccggatcctaacaagaagcaaccccaaggacttgatgatggtgacaggactgtggctcaatagaggggcaccccgcgtggctcggaagaagagagaagatattgccgcccacgtggtccagttgtctaagcgcgcacttgagaatcacgcgcgagaagatgagtcctaccatcaggaattccacgcgttatctggtaaggttgcactcctacagcgggtcggacaccgagaagcttcccggctgagatctatactccgcgaaattaagccgatatatggtgagcaggaactgaggaggcttcggaaaattatccccgcattttgtgaaaaggtgatagaccgaagcaagttggggtacataaaaaagttctatcgtttccagtactgcgttggtatcgtccggaattcccacccaaagctcgctgcaactctccaagccagtctcaatagcgttcgccctactaaaacgctgcgggaattggatgagcatgaatga

SEQ ID NO: 10959 - RNA, 1173 nt, synthetic construct
  source 1..1173: mol_type = other RNA
atgagacagaatcacaagatagtgtatgatgcttcttccatcggctctctgcaggttctggccaagacccttgacatcagcgtgcaccgcatccagaagattgcaagcgtccagacggacttttacacaattttcgagaagcaggtgaaaaataagatccgagagttagcagaaccaaaagccgaactcaagattattcacaagcggattatcagccgaatcttctcccatttcagatttccacactatctgcacggggggatcaaagctgacacccccagagatttcatctccaacgctagcgctcacgccgcttgcaaaacagcgatcgctatggacataaaatctttttaccccagcattacatacgaacatgtgtatcaaatgttcctgcggttgtgcaagtttccccctcaggtcagtgaggcacttgcaggcctgactaccttgaacggatcagtgccacaaggcgccccaacatcaagttacattgcgaacctcgtgatttgggaccgcgagtataagctagcgtcccttttcgagcagaagggtttcgtatatactcggctcatagatgacatcaccgtatctaccgaaaaaagcatgtcgaaagaggccatcgagaacgtgattaagctggtaagcagtatgctagtgaattacggattcaaaattcaccctgataaaactcagatttactccaagtcaaatcccgaaaaacttatgctgatcacgggcctctggctgaacagaggcatgcctcgtttggatgctgataagcgggtgaaaatatccgcctcggttacacgcctcaccaaaaacggggtcaaagattgtgtgtcagacgaatatcaccaacaacatagtaagctggccggtcaggtcgccctcctgaaaaggctgaagcatgttgaagccggacagttacgcaaactgctggacgcaactccgccgatattcgagcattcaaagatcgccaagatccagaaggtggtgaagatgtttgtcagaaaagagattgactcctctaagctcggatacctgcagcgtttttttcatcttcagcatcaagttagcatagtcaagaggaccaatcctaggatcgcacggcagttacagatcatgttgaataaaaggaggcccacatctactaaggagagtcactacgcctga

SEQ ID NO: 10960 - RNA, 1026 nt, synthetic construct
  source 1..1026: mol_type = other RNA
atgatcaagccacagcttttctactaccccctggccgggatccaatctattgagtcacttgccaagcatctggatattgacttagacaaactcacctatttgttggaaaacatcaactctcagtatattggcccaatctttatcaaaaagagcaatggtggtagcagacccatttacaggtgccgtccccaactgaagtacttcctgaagcggctgaacagtaaagtgtttaagttggtgcactatcctaacttcctgtatggagccttgcctaataaaagcatttataccaatgcgagccaacacctcaatgctaaggtcatgtgtaatttcgacatcaaatcgtactttaccactattacgtttgatcacgtgttcgatatcttcaagaattttttccacttctccaccgaggtgtctaacattcttgccacattaacaacgataaacaatcaagtgccgcagggctccccttgctccacttacatagccaatcttgttttttaccgctccgaggtcaatgtggcaaacaaactgaaagacaagaactacgtttataccagattcatagatgacatcactgtttcatctcagtacaaaaaaaccaagaaggacatcgaagaggtacatacaatcgtgatcgggatgattcgcgcttataagtttagcctgcagactgagaagcggagcattgctccctcacataaatgccagattctaacagtcaatcagatcaatatcgtcaaatccaacctcagtatttcaaaagaaaaccggaagaagataagagctgcagtccacgaactcaaatgtaatctgaacgataacaacatagagtttgtagtgaagaacttcgaaagtgtttatgggcgagtgcagtacctgaaaaatatccatattaaggaagcacagggcatgctgaaacagctagagcaaataaggagtaaaatcctcaagccactccagatttacaagtatcgaaagttaaaggaggccatcaggaagaaacagggatacaagctgtga

SEQ ID NO: 10961 - RNA, 1056 nt, synthetic construct
  source 1..1056: mol_type = other RNA
atgctgaatctgcaattcaaatacccactggctgctgtacagtccatcgagagcctggcgaagcatttgaatatcgactgcaacacaataatctacttattggagaacatcgactttctctacgaaggcccaataccaatactaaagtccaatggaaaaactaggcccatctatctgtgtaaacccagactcaaatacttcattaagcgcttgaacagcaagatttttaaagtggtgagctaccccgattttttgtatggggccctaccaaacagagatacatacaccaacgtctcacagcatctgaacgccaaggtgatctgcaactttgacatcgaatctttcttcactgcgattacatatgagcatgttttcgatatcttcaagaacttctttcacttctcggctgaagtcagccaagtactggcaaagctgacaacggtcaataaccaagtacctcagggttccccttgtagttcttacattgccaatctcgtgttctacagaagcgaggtcaatgttgtgcagaagctccggaataagaattttgtgtacacccggtttatcgacgatatttctgtgtccagcctttcaaaaaaaaaaaagaaggacatcgaggaagtccaccgaatcgtgataggaatgattagagcctatcagttcagtcttcagactgagaagatctctattgccccttcccataaaacccagagcctcaccgtgaataagatcaacatagtcaaaagtaggctttccatccctaaaaaaaagcgcgcaaatattcgagctgccctgtaccagctggaacagcacttccaggaaaaagacatgaaatttgtggtgaagaactttgagtcagttcagggcaaggttcagtatctctctaagtttcacccgaagattgcagataagatgatgaaaaggctggagaagatccacattaaaattgcacaacccctgaatcactataagaggaaccgtcttaaaagtgatattcgcaagtatcggaacattaacttcatacggaataaatcagccttaaccgagaagatctga

SEQ ID NO: 10962 - RNA, 1020 nt, synthetic construct
  source 1..1020: mol_type = other RNA
atgtcccccagcgcaaccagtgcgccatcttacagccagcgtagaattggaacactgcaggccctgcacgttcctttggggttaccagccagcgatttgctggccctggccgaaagggctgacggactatatcgagtagctaaacgcataacaaagccagacgggagtattagaatcgcatacgacacactggatccactgaagggagtacatcggagagtgaaaagtcagattctagaccacgtgtcctatcccgcctacctcactggttcaatcaagggctgtgacgcaaaagtgaacgcttcccttcacgctcgcgctcggattgttatcaacgaggatattagcggctttttcccttcaacatctgctgacagggttttcagtatatggcacaatttcttcggcttttccgaggaagtcgctagatgcctgacgcgtctcaccactcgacacggggaactcccccaaggagccatcactagctcattcctggccaatttagtattttggcgcgacgaacctgccctgcatgacaagttcgcggcacaggggcttgtgtactctaggtacgtcgatgatatcgccgtgtctagtaaaacatttttgaccaacaaggagaaaaccgacgtcatccgtcaggtctatggaatgctccttaagcacggctaccgcgctaaaagagcaaaacatgagatcgccacttctgcccgccggatggcagtgaccaaactggcggttaacagcaagcctggtctggatggcgcaaccagagacaagacgagggcagtggtgcaagctgtcgagcagaggtccgcccaaggcgaagtgttgtcgtttgatcggggtccttatgctcaggccatgggcaaggtgctccatttagagcggtttcatccgggtgatgcggctcccctgaagcgaaggcttctcgcactgaaggaggccgccgcctcaataaccagctcccacccctctacttggcggccgaatgagaagaaactcgggtcccactcatga

SEQ ID NO: 10963 - RNA, 972 nt, synthetic construct
  source 1..972: mol_type = other RNA
atgtcacaatcagctaccaacgccccctcttattcccagaggcgaatcggcactctccaggctctgcatgtggccctgggaatgccagtgggggatctgcccacccttgcagaacgcgccaatgacctgtacagggtagccaagagcatcaccaagccggacggaagtattagaaatacctacgacgctagagagcccctgaaagaggtgcaccgaaggatcaaaagtcagattctggatcacgtcaactaccctgcatatctcacaggatcaattaagggctgtgattacaaggtgaatgcgtcactccacgcacgggctcgcatagtcattaacgaggacataagcgggttttttccaagcacgtccgccgatcgggtatttagcatctggcgggggtttttcggattctctgaagacgtggcaaggtgcctcacccagctaaccactcgacacggtgagcttccccagggcgcaattacatctagcttcttggcaaacctggttttctggtgggacgagcctgaactgtttggcaaattcgccgcacaggggttagtttattcgcgttatgtagatgacatcgcggtgtcttccaaaacttttttgacaaatgaggctaagacaaacgttgttagacaggtctacggtatgctattgaagcatggctataaagctaagcgcgctaagcatgagatagccacaagtggctccagaatggctgtcactaaactggccgtgaacaataagccaggtctggacaaggccacgcggaataagatccgtgcagtggtccatgccgtggaaagacggatcgcacaaggcgaagcgctcagcttcgaacgcgggccttacgcccaggctatggggcaagtgcttcacttggagaggttccacccaggtgatgctgcccctctgaaacgcaggcttctggccctcaaagaggccggagcggccttaccgcattcctga

SEQ ID NO: 10964 - RNA, 996 nt, synthetic construct
  source 1..996: mol_type = other RNA
atgtccccgtccgctacctctgccccgttctactctcagcggcgaatcgggactttgcacgcactccaggtaccactgggcaggtcagtcagcgaactgctggtgcttgcgaccagggcagattccctgtatcgtgtcgctaagagtatgacgaaggcggatggcactattcgtaacacctatgatgccctggagcctctcaaagaagttcacaggagaatcaagggccaaatactggaccacgtgaactacccagcctacctgactggaagcatcaagggaactgactataaagttaatgcaagccttcatgtgcgcgccaaaatcgtgattaatgaggatatttccgggtttttcccatccacttcggctgatcgcgtcttttcaatctggaggggcttctttgggttctctgaagacgtggcgcagtgcctaacccaactaacaacaaaacacggagagctcccccagggtgctattacctctagctttctcgccaacttagtcttttggcgagacgagcctgccttgagagctcggtttgcagcccagggactggtatattcacgatacgtggacgatatcgctgtaagtagcaaggctttcttaacagacgaggagaagagtgacgtggtgcgccacgtgtacgggatgctgcgcgaacacgggtatcagcccaagcgcgctaaacacgagattgctaccgcgggaacacggatggctgttaccaaacttgccgttaacgccaagcccggcttggacaagtctgctagatcaaggataagggccgtcgtccatgcagtggagcagagagtggccagtggcgaagccctgagcctggaaagaggtccctacgcccaagccatgggccaggtgagacatttggaacggttccatcctggtgaggccgcccctctcaaacaacggcttctggcactcaagaaagcaacgaagccccagagcccaaattccgatgaccatgcagagacagcatga

SEQ ID NO: 10965 - RNA, 984 nt, synthetic construct
  source 1..984: mol_type = other RNA
atgaatcctagtgccacaaatgcaccatcctatcgacaacggcgaataggatcactcgaagcgctacacaacagcttgggccttcctgcctccaacctcctggcccttgctgaaagggccaatattctctatcgggtggcaaagtctatcaccaaagccgatggctccatcagaaacacttatgacgcgctggaaccgttaaaggagacacaccgtcgtattaagagccagatcttggatcacgtgtcgtttcccgcttacctgaccggcagcattaagggatgcgattacaagaccaatgctaccttacacgttggagctaggattctcataaacgaggacataagtggtttctttccttccacctccgcagaccgcgtgttcaacgtgtggcattgctttttcggcttcagtaaagctgtagctcaatgtctcactctgctgacgacacgacatggtgagctgccacagggagccatcacatcctcattcctggccaatctggtgttttggcaggatgagccaactctgcacgctaaactggcgagtcagggccttatttactcccgctacgttgacgacatcgcagtatctagtaaatcatttttgactgacgaggagaagtctaaggccgtcagacatgtctatgggatgctcctgaaacatgggtaccagccaaaacgggctaagcacgaaatcagcacatctgcaacccggatggcagtgaccaagcttgccattaactcaaagcctggccttgatagagccacgaggtctaggatccgcgccatcgtccacgcagttgagaggaggttcgagttgggtgaagtgctaagcttcgatcaggggccctacgcgaaagccatgggacaggtgagacacctggagcgctttcatcccggggaagcagcccccctgaagaatcggctcctggctttaaaaagcattagcagaacacgctctcggcatagaaaagtcgaatga

SEQ ID NO: 10966 - RNA, 960 nt, synthetic construct
  source 1..960: mol_type = other RNA
atgtcacccccagccacgagcgcaccgagctactctcagcgccggatcgggaccttaaacgccctgagactacccctggggctctccgtggacgagctgttatcactcgctcagcgtgcggacggcttgtatagagtcgcgaagagtataaccaagccagatgggtctatccggaacacatacgacgcccttgcccctctcaaggctgtgcaccggcgaatcaaatcccagatcctggaccacgtggtgtatcccgcctacctcactgggagcatcaaaggttctgattataaagtcaatgctagtctgcatacatccgcacgcatagtcattaatgaggacatttctggttttttccccagtacaagcgcagaacacgttttcaacatttggcacggacttttcggattctcccaggaagtatcacaatgcctgactcagttgactacccgtcaaggcgagcttccacaaggcgccattacgagttcgtttctggcaaaccttgttttttggcaggatgagccgacattgcatgctagattcgccgccgaaggcctggtctactcaaggtatgttgatgacattgccgtgtcttcgaaaacctttctatctaatcaggagaaatccgaggtgatgagaaagatttacggtatgcttctcaaacacgggtaccagcccaagcgcgcaaaacatgagatctccacaagcgggactaggatggaagtcaccaaactgagcgtgaatgctaagccaggcctgggaaaggcagtatacagcaagacccgagctgctgttcgggatatcgaagagagaatagccttgggtgaggtgctgtcctttgaacggggcccttatgcacaggcgatgggaagggtgctccacctcgagaggttccatcctggcaaggcggcccctctgaaacgcaggctgttagctctgaaggaaggagccaagacttga

SEQ ID NO: 10967 - RNA, 960 nt, synthetic construct
  source 1..960: mol_type = other RNA
atgaatctgcaggcaacgagtgcaccctcttactcccagcatcgtattggtaccctgaacagccttcggttgccgttaggactcagtgtcgacaaattgttatctctggcccagagagccgactctctctatcgcgtggcaaaaagcatcactaagcctgatggtagtatcaggaacacctatgacgctgtggcctccctaaaagccgttcaccggcgcattaagagccagatcctggatcacgtaatctatccagcttacctgactggcagtataaagggaagcgactacaaagtcaacgcagctctgcacactaatgccagaatcgtgatcaatgaggacatttctggcttcttccccgcaacctccacggagcatgtgttcaacatctggtatggacttttcggattttctcaggaggtgtcacagtgccttacacagctcaccactcgacaaggcgagctgcctcaaggcgcgattacatcaagctttctggctaacctggtgttttggcaggatgaacctaccctccatgccgagtttgctgcccagggcctggtctacagccgctatgttgacgatattgccgtgtcgtccaagacatttctgtccaacaaggagaaatcagaggtagtaaggcagatttacggtatgttgttgaagcacggctaccagcccaaacgaacaaaacacgaaataagcacctccgggacaaggatggaggtgactaagctctcagtcaatgcgaagcccgggctcggtaaggccgtgtattctaaaaccagggctgcagttcacgatatagaaagacggatcgccaatggggaagtcctgtcgttcgaaagaggaccttacgcgcaagtgatgggccgcgttctgcatctagaacgtttccatccagggaaggccgctccactgaaaaagcggttactcgctcttcaagaggggacaaagacctga

SEQ ID NO: 10968 - RNA, 960 nt, synthetic construct
  source 1..960: mol_type = other RNA
atgtctctgtccgccatctccgcccctttatacagacagagacggattggcactctacacgccttgcacgtgccgctagggctctctgtggacgagttgctttcgcttgcaaagagggcagatggtctgtaccgcgtggccaaatccattgcgaaacccgacggaagtatacgcaatacatatgacgctctggcgcctttgaaagaagtacaccgacggataaagtcccaaattttggatcatgtggattatcccgcatatctgaccggtagtatcaagggatcagattacaaggtcaatgccgctctgcatagcaacgcacgcatagtcatcaatgaggatatcagcggctttttccccagcacgagtgccgaactggtcttcaaggtttggaacggacttttcggtttctcacaggatgtttcccagtgcctaacacaactcacaaccagacaaggcgaactgccccagggcgccattacttcttcgtttctggcaaacttggtgttctggcaggacgaaccaatacttcataccaagctggccagccagggtctgatctacagcagatatgtggacgacattgctgtgtctagtaaagcctttctgaccaatcaggagaagagcgaggtaatgaggcagatctacgggatgctgcttaaattaggctaccagccaaagcgagccaaacacgagatctccacatctggggctagaatggaagtcacgaagctgtcagtgaacgcgaagccagggttaggaaaggccgtctactctcgtactcgtgccgcagtgagggacattgagctccgcatttccaacggcgaaatcctctcatttgagcgggggccttatgctcaagctatgggacgggttctgcatctcgagaggtttcaccctggcaaagcggctccactcaagaagaggctcatcgctctgaaagagagcgcaaaaacctga

SEQ ID NO: 10969 - RNA, 972 nt, synthetic construct
  source 1..972: mol_type = other RNA
atgattcacaccccgagcgattcccccttctattccaagaggagaatttcaagcatgaccgctctgtccaaggcccttaacatcagtcccattgaactgttaaatcttgcgaaccgcgccgaccatatgtataggctcgcatccacaattacgaaacctgatgggagtacaaggcagacttgggacgcttacgcgccactgaaaaaggtgcagcggaacataagaaggaatatactggactacgttgtgtatccggcatatctcaccggaagcctaaaggggtgcgattacaaggttaatgcctccttgcacgtcggcgccactattgtcatcaatgaagatatcacccggttctttccatcaactagcacggcaatcgtgcagtcaatctggcgatatttttttggtttttcacacgaggtggcagagtgcctcaccaagctaacaacccggcagggagagctgccacaaggcgctattacaagtagcttcttggctaacctggccttctggaaggacgagcccgccttgcaggcatctttccgcgctcgcgggataatctactctagatacgtcgacgatatcgctgttagctctgtgaattttctggataaaccagccaagaccaatgtaatagcctctatctacggtatgctctccaggcatggctatcagcccaagagagcaaagcatgagatcagaacttctggtcaacgcatggaagtgactaaattaagtgtaaactcgaagcctgggatctctagtgcaaaacagagccagattcgttcagctgtgcatcacctggaacaagccatcctccggggcgagattattgaattcgacaaaggaccttacgcccaaacactgggactggtccacctgcttgctcgatttcaccctggcaaagcgaagaaacttaagcagcgtctcttggccctgaaatccagcggctgtacaaacatgtacacctga

SEQ ID NO: 10970 - RNA, 972 nt, synthetic construct
  source 1..972: mol_type = other RNA
atgatccatacaccgtccgacagccctttttacagcaaacgccgcatttccagcatgaccgcactttcaaaggctctcaatatctctccaattgaattgctgaacctggcgaatagggccgatcacatgtatcgcctcgccaattctattaccaaacccgatggaagcactaggcagacctgggacgcctacgctccactgaaaaaggttcagagaaacataagacacaacatactggattacgtcgtttaccctgcctatcttacaggctcccttaaagggtgtgactacaaaacaaacgcaacactgcatgccggctcatccatcgtaattaacgaagacattaccctgttcttcccatcaacgtccgatacgattgtccacaatatctggcagcacttttttggtttcggaaacgaggtcgctgagtgcttgaccaagctgactacaaggcagggcgagcttccccaaggggccattacctctagtttcctcgcgaacttggtgttttggaaggacgagcctatcctccaagccagttttagagccagagggattatttacagccgatatgtggacgatatcgcggttagcagtgtgaactttctagataagcctaccaagactaatgtgatagcaagtatctatgggatgctctctcggcacggctaccagccaaagcgggctaagcatgaaatcaggacttctgggcagcgtatggaggtgacaaaattaagcgtaaattctaagcccggcttgagttcagctaaaaaatcccagatacgttcagcagtgtatcatcttgaacaggccatcctccgaggagaaatcatcgagttcgacaagggcccgtacgcacagactctgggtttagtgcacctgctggcacggttccattccggaaaggccaagaagctgaaacaacggctgctagctctgaaatcggctggtcacgccaatatgtatccctga

SEQ ID NO: 10971 - RNA, 972 nt, synthetic construct
  source 1..972: mol_type = other RNA
atgaatcacataccttctgattccccgttttattgtaggcggagaatttccaatatggcagccttgagcaaagcattaaatacttctctggacgagctgaactcactggcacgtagagccgatcagatgtatcggctcgcctccagcctgacaaagcctgatggtagtgtgagacagacctgggatgcatatgaaccactcaagaaggtgcagcgcagtatcaggtgtaacattttggataatgtggtgtaccccgcgtacctgaccggaagcctcaaaggatgcgattacaaggttaacgcttctcttcatattggcgcgaaaatcgtcatcaatgaggacattacatgcttcttcccctcgacaagcgccaccattgtccagaatatctggcgaaactttttcgggttcggaaaggaggtggccgagtgcctgacaaggctaaccactcggcaggaggaacttcctcagggcgctataacctcatcttttttggcaaatctagctttttggaaggacgaacccgttttacaggctagcttacgagcccgagggctgatctattctcgctacgtcgacgacatagccgtgagcagtgttaacttcctcgacaactccgccaagtcagcggtgatcgcttgtgtatacgggatgctgttcagacacggttatcgcccaaaacgcacgaagcatgaaatcaaaacgtcgggcgagaggatggaagtaactcggctgtccgtgaattcaaaaccaggtctttctgcttcccgtcaaagccagatccggagtgccgtcaaccacctcgaacaagcttttctgcggggcgagattattgaatttggcaaggggccatacgcccaaactctgggccaggtccatcttctggcaagattccaccccggaaaagccgagaagttgaagcaaaggctgagggctctcaagaaaatggagcgcatgaacaaatgcccttga

SEQ ID NO: 10972 - RNA, 972 nt, synthetic construct
  source 1..972: mol_type = other RNA
atgaagcataccctccctgacggcccattctacagtagaaggagaattcactccatggcaagcctcgccaaagccttaaacattcctgcttctgagctgatttcactggcttgccgcgcagatcgcatgtacagactggcaaacaacatccctaaggctgatggatccgtgaggcaaacttgggacgctcatgagcccttgaagaagatacacaggtctatacggcggaatatccttgaccacgtgacttatccctactatttgacggggtcactgaaaggatgcgactataaggtcaatgcctctctgcacgccggtgcaacaatcgttatcaacgaagacattacaggatttttcccaggtacctccgccgccgtagtccattgtatctggcggaatttcttctgctttggccaggatgtcgccgactgtctgacccgattaacaacaagacacggcgagctgcctcagggggccattaccagcagtttcctggcaaatcttgcgttctgggatgccgaatccgctctccatagcagttttaaggctcgcgggttaatctatagccgttacgtggatgacatcgccgtgtcctcagaaacatttctggataacagcaccaaaaccgaggtgatagctagcctctatggcatgctcttccgccatggataccgtccgaagcgcactaaacacgagattaggacgtctggggagagaatggatgttaccaagctttcagtgaattcgaaacccgggctatccacttcgcggcagagccagatccgatccgcggtaaatcacattgaacaagcgttcttgaggggagagatcacagtgtttgactctggcccatacgcacagactctaggccaggttcatctgctggctcgatttcaccccggtaaagcagaaaaattgaaacaacggctgctggccctcaagaagcttgcccagagtaacaagtgttcttga

SEQ ID NO: 10973 - RNA, 963 nt, synthetic construct
  source 1..963: mol_type = other RNA
atgaaccccgtacttagtgacgcaccgttctaccgcagacgccgaattggctctgtggcctccctcgccaaagcgctgtccgttaaggaggatgaattattctcactggccgctcgggccgatcagatgtacagactcgcctcttctgtgcttaagcctgacgggtctgtccgccagacttgggatgctcgggagcctctgaagtctctccatcgaagtattagacggaatattcttgacctcgtcgcatggccctcgtatttgaccggcagccttaaaggttgcgactataaagttaatgcaagcctgcatgccggcgctaggatagtcatcagcgaggatatcagcggattctttccagctaccacagaggcaattgtgcggcacatatggcgcgggttctttggattcagtcaggatgtggcggattgcctcacaaggctaacgactagacatggagccttacctcagggggccatcacatccagctttctggctaacctggcgttctgggacgtcgagccagaactgcaggctggcttccgcgctagggggctaatctactcccgctatgttgacgacattgatgtgtcttcctatacatttttggacaatcacgcaaaagccgccatcatcgcagatatttacggcatgctgtttcgtaggggttatcagcccaaaagagccaagcacgaaatcactacctccggccagagaatggaagtgaccaaactctcagtgaacagccggccagggttgaccgctagtaagcaatcgcagatacgttcagccgtgtaccacgccgagcaggcattcttaaggggagagatcacttgttttgactcaggcatttacgccatcacgctgggacaagtaaacctgctggcacggtttcaccccggtaaggctgagaagctgctgcaacgaatgcgtgcgttgaggaataagagcgaagaatcctga

SEQ ID NO: 10974 - RNA, 969 nt, synthetic construct
  source 1..969: mol_type = other RNA
atgaatccttctaccattctgcccagatacaaacgacagcggatagcatccttagacgcactgcaggcagctctcggcgttagcatcgagcagctccagtcactggcggaacacgctgacaacagctacagggtcgcgaagtctgttattaaaccagatggatccactcgccatacatacgatgccttcaaacccctcaaggatattcaccgtaaaatcaagaaccacattctcgatcatgtggcctatccttcctatctgactggcagtataaagggttgcgactataaagtgaacgctgagattcacacccaggctaagattgtcatctcggaggacataacggcgttctttccctcaactaccgccaaaaaagtatttaaaatctggcgtgacttctttggttttaactccgatgtggcaagatgtcttactcggctgaccacaaggaaaaatgaactgccacaaggcgcaatcacgtcttctttcttggccaatcttgtgttctggcagagtgagcctttcttatacgaacaattctctatgcggcatctcaagtactcccggtatgtggacgacatcgtcgttagcagcaagtccttcttggacgatgtagagaagacagaggtgatccgccaaatatacggcatgctgctgaccaatgggtaccacccaaagagagctaagcacgaaatttcaacaagtgcctcgcgaatggaagtcactaagcttgccgtgaatattaaaccgggactgaagaaggccaaaaaaagcatgatccgcgcagccgtccacagactggagacattgatcagcgaggggaaggaaatcagttttgagagcggcgattttgtggaggttatggggcaggtgcagcatatgaagaggtttcatcccggaaaggctgaagccttgattaagaggctaaacaccctaaagctgtcatatatcgtgcttcacaacaaatga

SEQ ID NO: 10975 - RNA, 987 nt, synthetic construct
  source 1..987: mol_type = other RNA
atgcatttgtctaccatcaacgcgccttcctacaagaggaagaggatcgggactctagaagcattggcatacccactgggccttaacgctgccgctctggaagatctcgctcggagggcagacgcaatgtaccgactggccaaggagatagtaaaaccggatggttcagtacgccacacctatgatgctttcaaaccacttaaagttgtccatggtcggatcaagagggagattttagatcaggtggcatttccgctgtacttaactggcagcatcaagggacgggattacaaggtgaacgcgacactgcactcgcgggcgaaaattgtcataaatgaggacataagtgggtttttcccagcaacaacgagtcagcacgtcttcgacatttggcaccgcttttttggtttctccgaggccgtggcaagatgcctgacagacctcaccacttatcacggcgaactcccccaaggcgctatcacaagcccagctctcgctaatctggttttctggaggcgcgagccccagttacaggccgaatttgctgccaaaggatggacttatagcaggtacgtggacgatattgccgtgtcatccactattggcatggccccccatcaaaagacagaggccatcagaaaagtctacggactgctgagcgggtatggatataagcccaaacgaaataaacatgagattaccactgccgcccagcgcatggtggttaccaagctgtccatcaatgccaagcctggactggcccaatctgaacgtgaccgaattagagccgcggtgcacgaggtggagagactagtctcatctggcaacagcatctccacagacagtggggtgtatgccaaggcaatggggagagttaccacgctcgcccgtttccatcctggcgaagccgcaccactccggcagagactgcttcgggctaaacagacccttcagcctttgttgtctccttcaacccgcgctccctga

SEQ ID NO: 10976 - RNA, 999 nt, synthetic construct
  source 1..999: mol_type = other RNA
atgtccctaagcacctcaagcaattcacccttctacaagggtactcctatacgacaacgtacctcacttgccgcagccctcgggtccactttgcaccgaatagagtacgtggcgccacgcgccaataaactgtatcgcctggcccacgcagaactgaaatccgatggcacgatcagacagacatttgacgccaaacctctattgaaggacctgcataggaggatcaagactgaaatcctggatcgcgtgacttttcctgattatctgactggaagtctgaaaggacgcgactacaagtctaacgcagaactgcacgaaggggccgcaatcgtaattgctgaggacatagagaacttctttccgaatacaacctcggataaggtgttcgacatctggaggcatttcttccggtttagtgagccagtcgctcagttactgacctctctgactaccaaggacggggccttaccccaaggggccatcacaagcccacagcttgctaacctcgttttttggcgggatgagccccttttgcaggctaagctggccgccgacgatattacctatagccggtttgtcgacgacgtgacagtctctagtgtggtgccaatccccgccgagaataagacggagctggtcggagctatttacggcctcttgagacgtaacggtcttcagcccaagagagtaaagcacgagctgaaaacaaggagagaacgcatggctgttaccaaactcacagtcaacgataaggcaggcctgtccgcaaaagagagatcacgaattagagccgcggtgcatcggttagagctcaagggcgcgcaacagcttctcgaggctggtgaactggccagcgtgctaggcaaggttcaccatatggctaggttccacccaggcgaggcaaggcccctcaaagctcggctgttgaaaattagcgcccatggatgtgcagctaccccgtctgaacagtccccactccctccttgcagtgaaccttga

SEQ ID NO: 10977 - RNA, 951 nt, synthetic construct
  source 1..951: mol_type = other RNA
atgaacccctctccgtcggacagccctagttacaacggtaggcccatcagaagtattcagagcctagccaaggccgtgtactgtaagcctcagcggctggcttttgtgtccgagagagcatctgacttataccgggttgccaaggaagtgcccaaagcagatggaaccgttaggcgcacctacgatgccaaaaagttgctgaaggacattcacaggcttataaaaacagagatcctcgatcgagttgattttccaccttatctgacgggatccctgaaggggcaggactataaaagcaacgccgagatccacgtcggagctgctattgtcattgccgaagatattgggaatttcttcccatctactaccgcggagcgcgtgctagacatctggagaaacttcttcaggtttagtgcagaagtggcacaatgcttgactaatctgactacacggaataacgaactcccacagggcgcaattacctcaccccaactcgccaatctggtgttctggagaaatgagccacagctgcatgcacgctttaaagcggacggtgtcgactactcacgttttgtggatgacgtggttgcaagctctaagacacccatcacgccgaaaaagaagaccgagatcatagccgccatctatggcctgatgaagcgctccggctaccagccaaaaagacgaaagcatgaattgaaaacagctcgtgagcggatgacagtaactacccttaacgtcaacgacacagtggggatacctaaagaggaacgatcacggatccgcgccgctgtccacaggcttgaagggcttgtaacctccggtcggggcgaggtggatctgaagcatgagtatgcggtcgtagctggcaaggtgaataatctgggaaggttccaccctggcgaggctcgtactctcagagaaaggttagctgccctggatctctgctga

SEQ ID NO: 10978 - RNA, 948 nt, synthetic construct
  source 1..948: mol_type = other RNA
atgaatcgcctgccaacgtcaagtcccttatactccggccaagcaatccgacgaatcgagagcctgggcaaggccttgcggttctccccacagcggttgggatatctcgggaacaacgccgataggttgtatcggatcgcccatgagatcgaaaagtctgatgggagtaaacgggtaactttcgatgccaagccggctttgaaggaagtgcaccgtcggatcaagagcgagattctggatagggtcaccttcccactgtacctgaccggcagcattaaaggcagagattacaaaacaaacgccgagcttcacgtaggagccgccctggttattacagaggacatcggaagcttctttcctagcaccaccactgcacacgtctttgacgtctggagaaactttttcagattctctgacgaagtcgcgaggttactgacagctctgactacaaggaatggtgagctgcctcagggagcaattacttcgccacatctggcaaatcttgttttttggagggatgaacccgcactccacgacagattcgccgctgacggtattgtgtactctagattcgtggacgatattgccgcttcttccaagaccccgatacctcccgaacacaaaaacgagatagtgcgtctcatatttggactcatgcttagaaggggctataagcctaagcgcgagaaacacgacctgaaaaccgcggggcaacagatgactgtgacgaagctaaccgtgaatcagcttcccggcttacccaaggctgagcgcggtcgaatccgcgctgctgtggaccatctcgagcgcctcgcatcaaggggccctctcagtgccgaacagtggcgtgaacatgcgtcagtttccgggagagtgacacatctggcccgctttcacccaggggaagctgcaggtctaaaagcccggcttaaaatgctgcacccctga

SEQ ID NO: 10979 - RNA, 963 nt, synthetic construct
  source 1..963: mol_type = other RNA
atgaaccagtccaccactaactgtccttcatacgacgcaaagcccatccggctcatcactagcctggcgaaggccctggaaaccgacgaaaatcagctcctccttcttgcagacgaggctaatgagctctaccgtatagcaaaaaaaataagaaagcctgatgggtctttgcgcagaacctatgacgcattgccaaggctgaaagacattcagcggagaattaagtttcgtatcttggatagagtgacatttccatcgtatttaaccggttcccttaagggcagggattacaaagttaacgccgccctgcattctggtgctaaaatccttatcgccgaggatattggatcatttttccccagcacatcagcttccagggtgtttgacatctggaagaacttcttcgggttcggccacgaggtggcttgctgcctgactaagctgacgaccttacggaatgaactaccccaaggagcaataacaagtgcgcaccttgccaatctcgttttctggcgagaggagccgcagttgcggactcgtctggatcagtctggcattgtctatagtcgcttcgtcgatgatgtagctgtaagcagcagatctgtgatagaaccagctcaaaaaacagaggtggtgacatccatctacggaatgatgatccggcatggatatcgccccaaacgaaccaaacacgaactgcacacagccagaaaccgaatggtcgttacgaagttgaccgtcaacgctaagcctgggctggaaaagactgaaaggagtaagatcagggccatggtgcatgagttagagcgcctctccgaaagcctggacaatactcaagcgattctggaccgcctcaactcagtggccggcaagatcaatatgctgggccggtttcaccctgggaaggcccagagcctgaaaaagaggctgctagaggtcaaacagattattgcagcccgctga

SEQ ID NO: 10980 - RNA, 912 nt, synthetic construct
  source 1..912: mol_type = other RNA
atgctctccctggctcataaagccaacacaatgtacaggattgctaaggaggtggagaaaggcgacggtaccgttaggcgcacctttgacgcccaccgcccactcaaagatatccaccgtaggatcaagctggaaattctggataaggtggtgtttccagactatctgacgggctctatcaaggggagagactataaggttaatgccgcattacacgccggtgctaaaatagtgatttcagaagacatcggggctttcttccctagtactacagatgcaatagtctttgacatctggcatgggttttttggcttcagtcacgatgtggccacctgtttgacacggctcactacttataatggcgagctgccacaaggagcgattacctcccctcagctagccaaccttgtcttctggcgttctgaaccagtcatgtaccagcgcatggcggatatggggctgaaatacagccgatttgtagacgacattgcagtttcgtcccggctggtgatcgcccccgaagcaaagaccgtgatcattagtctgatctacggaatgatgttcagacagggctataggcctaagaggagcaagcatgacataagcacatctaaggatcggatgacggtgacaaaactcactgtgaatcacaaacctggccttgcctccagccagcgatctcaaataagagccgctgtccacgctctggagtgcaacttggctgttaaacagaccgccgatgtagcagcgaagttgccctcagtgattggaaaggtcatcatgcttcgccggttccatcccggagaggggctgagactaaaacaacggttagcagcaatccaggcttcccagtcaccgcagagagaatgcaaggccgagctccagttcggtcccttagccggaagcctgtga

SEQ ID NO: 10981 - RNA, 1041 nt, synthetic construct
  source 1..1041: mol_type = other RNA
atgattcacgtcaaccggctcgaagttccacgctatactgccaccccaattgaaagcatggcagccctatccagggccttgggcgttaccaaccagcacctggcggccgtagctgctaaggcaagctcgctgtatcgggtggcggataagattgaaaaggcagacggaacattacgcgaaacatttgacgctaaacccgtcctgaaagatatccaccgcagaattaaactcgccatcctggaccgagtgtcctttccaaattacttgaccgggagtgtgaaaggacaagactacaggactaacgctcttctgcatagaaattccaaaatcctgataagcgaggatatccaggggttcttcccctccacaacccagcatctcgtccaggagatttggtcccagttcttcggcttctcagccgatgtggcgcagtgtctaacggctctctgcacgaaagacggtgcccttcctcagggcgctataacatctcctcacattgccaacctggtgttctggagggttgagccggccattagagcagagatggcttttagaggcttgcggtattcacgatatgtggatgacgtttgcgtgtcttctagcaccggcattgcccatgcagataagcagtctgtaatctccgtgatctacgctatgctggctcggcatggctactccgctaagcgttcgaagcacaagatccagacagccagtgggaggatcactgccactaagctcggtgtcaatggtgatccctctttaagcggacagcaacgcgggcagatacgagcggcggtgcacaagctggagctgacctttgctgccggggcattttctgacgcacgtgccttgctgcctagcgtgaccggaagggtcagtatgctcgcacgctttcacagcactgagggacaagcccttaagcagagaatcgcctcagtaagggaacaactgttacttgtccccatggttaccagagccgatgacgcaacacataaagcaatccgggattcagtggacgacataagtactgtgccttggtga

SEQ ID NO: 10982 - RNA, 1035 nt, synthetic construct
  source 1..1035: mol_type = other RNA
atgatcctgatgaaccagatagaagtaccccggtataccgccgcacccattgaatctatggctgccctctcccgagccttaggggtcacatctgcacatctactcgccgtagcagcacgggccagcagtctttatagagtggcagagaaagtggagaaagccgacgggacttttcgcgagactttcgacgccaaacctgtcctaaaggacattcatcggcggatcaaaagtagcatcctggaccgggtggcattcccgagatacctgactggttccattaagggccaggattaccgcacgaacgcgctgctgcaccggaatagcaagattctgattagcgaggatatacaaggattcttcccctctacaggccagtgcctggtttacgaggtgtggtcacaattctttggcttttcggatgacgtttcaagatgtctgacctccctttgcgtgaaggatggcgtgttgccccaggggggaatcacaagcgcccatctggccaaccttgtgttttggcgcgtcgaaccagcagtgagggctgaactggcacgtttcggaattcgctatagcaggtatgtggatgatatctgtctctcatcccctgatgctatcggacacgaggacaagaagaaagtgatagcgctcgtctacgctatgctggctcgtcatgggtactccgccaagaggagtaaacacaatgttcaaacctcccgaggcaggattgtcgcgaccaaactcggtgttaatcgcgaaccaagcctctctagacagcagaggggacagatccgagccgcggttcacaagttagagagtttgtttgccgacggagatcttgacggcgtcagggaacgtttgccatccgcaggcggtagagtgagtatgttagggaggtttcacgctgccgagggggctgctctggctaagagactggcctctatcagacgcgcccttgacctcctgcctgtcatcagcaagacctcggctgtgatgtcacaggtgtcacactctgatttggacggcacagtaccttggtga

SEQ ID NO: 10983 - RNA, 1026 nt, synthetic construct
  source 1..1026: mol_type = other RNA
atggatctgtttttaatcaagccaagataccgggcttccccgatcaggagtatcgcagcactggcacgatctctccgctgggatgctctcgctctagtggatatggcggagcgcgctaatgggatgtggcggacagtgaaacctaaacccgggtctatccggcagaccttcgacgcgatgggaccactgaaggagattcaccagagcctgaagctaaatatctttagtaaggtggactttcctgagtatctccagggctctcttaaaggccgcgactacgtttccaacgcctcactccacaaagacaagcaaattttgatatgtgaagacgtcaagggcttttttccgagcgttggggcagcctatgtggaggacgtatggtgcggctttttcggcttcgccccagacgtagcgaagcttcttacgaaactgacgactaaggacgggtgcctgccccagggatgtattgccagctctttcctggctaacttggtgctgtggcgacatgaacctctgctgcacgctaaactagcccagcgtggtataacctactccaggtacgttgatgatatggttatgagtgccgccacacatctggataaggcaacccagacatgggtcatagcgcaagtctatgggatgctcgcccggcacaatctcaaggctagccgtaagaaacatgaagtcttcagcgccacacaacccatgattgcaactaaactgatcgtgaaccgcaaacccagtttgagccttaagaagcggtcacaggtcagagctcaagtgagacaactggaaattgcagtgggaaccggtctggatgccgaagagcttagagacttagccaataaagccgcccagcaggtgggccagttaggtaggttccataaaacccaggccgagcacctcaggaacagaatcgctatcgtgaggggaaccttgcctattgagcacccatcaatcattactgctccctccaacgcacctctctcgcaggagttgtccactggatccctgtcttcaaagtga

SEQ ID NO: 10984 - RNA, 1029 nt, synthetic construct
  source 1..1029: mol_type = other RNA
atggacttatttctgatcaaacctcggtatagggctagcccaatcaggagcatcgccgccttagccaggggacttaggtgggatgctaaggctctggtcgaactggcggagcgggctaacggtatgtggcggactgtcaaaccaaagccggggtctacccgccagacatttgatgccatggggcctttgaaagagattcataaaagactgaagctcaacatcttccccaaggtggattttccagaataccttcaagggagtctaaagggacgtgactacgtaaccaacgccagcttgcacaaagacaagcagattctcatttgtgaggatgttaaaggcttctttcccagtgtgtccgcggcctatgtggaggacgtgtggtgctcatttttcggattcgcaccggaggtggccaaactgctgactcagttgacgaccaaagacggctcctttcctcagggctctattgcaagctctttcctggcaaacctagtcatgtggcggtatgaaccgctcctccacgcaaagctcgcacagcgaggcataacctattcaagatacgttgacgatatggttatgtccgctgcaactcacctggataaggaaacacaaacatgggtcatagcccaggtgtacgggatgctggctcagcacggtctgagagctagccgtaagaagcatgaggtgttctcggcttcaaagcccatgatagccacgaagctgattgtaaatagaaaaccttccctctcccctaaaaagcgcagtcaagtgcggacacaggttaggcaattggagatcgcggccgcagacggagtgaatgctgaggagctttgggacctggccaataaggccgcacagcgagtcggacaattaggcagattccataaaacccccgcagcctctctcaagaaccgcattgccatcgtgcgcggtagtctgccccccgaaaatcagcccgcgatcaccgggcagactatcgctccactttaccaggaacaccctccaacaggcactgccccatgggaatga

SEQ ID NO: 10985 - RNA, 1029 nt, synthetic construct
  source 1..1029: mol_type = other RNA
atggatctgtatcccatcaagcctaggtacagatccaaccctgtgaaaagcatcgctgccttagcgagaggcctgaggtgggatgctcaatctctcgtagagctcgcagaccgagcaaatgggatgtggcgtaccgttaaacccaaacccgggtcaacccgccagacttttgatgcgatgggacagttgaaagaaatacatcagcggcttaagctgaacgtcttctccaaggtggactttcccgagtatctgcaaggtagcttgaagggtagagattacgtcactaatgcgtccatccataagggtaagcagattctgatttgtgaggacgtgaaaggcttttttccatctgtcagtgcagccttcgtagaagatgtgtggtgcggattctttcgtttcagtccggatgtggctaaactgctcacaaggctcaccaccaaggacggatatctacctcagggcgctattaccagcagcttcttagctaacttggtcatgtggcgctacgaaccctggctccacgccaagtttgcccaacgcggcataacttattcccgctacgttgacgacatggcaatgagctcggccacacatcttgacaaggagacacaaacatggatcatcgctcaggtctacgggatgcttgctcagcacggcctgaaggcgtctagaaagaagcacgaggtgttctcagcttcacagccgatgatcgcaactaagctgactgtaaatcgaaaaccatctctgagtccaaaaaagcagtctaaggtgaggactcgagtgcggcaactggagattgccgccacatccggagcaagcaccgatgaacttagggagctggccaacaaagcagcccagcaggtcggccagctagggagattccacaaaacgcccgcagccaaactgaagtcccgcattgccgttgtgcgggacaatctgtcaccagaggccttgagtgttaccacggctccagccaaagtgcggctagacaccgtgcctctcgtgacagatgcccggccttgggaatga

SEQ ID NO: 10986 - RNA, 1023 nt, synthetic construct
  source 1..1023: mol_type = other RNA
atgtcgctgtgcctcagtaaaccatcttatcaagctaaacctattcggagtattgccgccttagctcgggctcttaggtggggagaacaggcgctggtgcagcttgccgaccggtcagagtctatgtggagaacagttaagccacagcctgggtctacccgccagacattcgacgcaatgggtcagcttaaagagctgcacactaggctgaagttgcacatcttctcaaaggtggtctttccagactacctgcaaggaagtctggcaggacgcgattacgtgacgaatgcctccctgcacgcaaagaagaaaatccttatatgtgaggacgtcaagagattctttccttccgtcggcgccatttacatcgaacaggtgtggcgggattgcttaggcttcgcccccgatgtggctcgcttgctgaccaagctcactacaaagggcgggtatctgcctcaaggagccatcacgtcttcattcctagccaacttggtgctttggcgtcacgaacccctgctccacgctaaattaaaacagcgggggataagctactccaggtacgtggacgacatggcactcagcagcgcaagccacctggacaaggacacacagacatgggcaattgcgcaggtttatgggatgctagccaggcatgacctgaaagcctccagagacaagcacgatgtttttgcagctagcagacccatgatcgccaccaaactgatcgtgaaccatagtccctccctcggcgcgaaaaaacgctcacaggttcgagctcaggtcctccagttggaaatggccgccgcgagcgtggtggatgctgatcagattaggggcttggccaacaaggccgctcaacgtgtcggtcaactgggccgatttcataagaccgcagcagctcacctaaagtcccgcatcgccaccgtaagagatactctgactgcggattctagggtagcaataaccggggagcgagccgctcattgggagcatctcgagggtgaaaatccgtggagctattga

SEQ ID NO: 10987 - RNA, 1011 nt, synthetic construct
  source 1..1011: mol_type = other RNA
atgagcctctcactgagcaagcccatttacaaggccaaaccaattcgcagtttggcgtctctagccaaagctctcggtctggacgaaaaacgattgaaagaactggctctgaaagccgacacactctggagggcagtgaagcctgagcccggctccaccagacagacattcgacgcctatgaacccctgaaaagagtccacgaacggatcaagcgtagtatctttagcaaggtgtctttcccagcttatctacacgggtctttgaaggggtgtgattacgtgacaaacgcagcacttcataagggccaacaaatactgatttgcgaggatgtgaaatctttttttcctagcgttcagtccgtctacgtacgcgacgtgtgggcaggactcttcggtttctcgtccgaggtcgccgacatcctgacagccctgaccactaaagatggagctcttccacagggcgggatcacaagctcctatttggccaatttggtgctgtggcgcaaggagcctttactgcaagctaaacttgcagcccgtggcattacctactctcgctacgttgacgatatgagcatgtcttctaagactctgctggataaagaaacccagtcgtgggtcatcgcccaggtttatggcatgctggcatttcatgggctgaaggcatccagaaagaagcacgatgttttcagcgcgagcaaaccaatgatagccaccaaattgatcgtgaatcagaagcccgccctaccgaaggcaaaaagatcaaacatccgggcccaggtaaaacaactggagttagcgtcacagagttcaattcctctcgaggaactcaagatattagctaataaggctagtcagagggtcggactcctcggtaggttccacgaaacggaggccaacgccctgcgacttcggattaaggcggtgagggcttcctttacgtcaactgaggaagtgcgggtgaccggcgctaagcttgaggacggacatgagtccagtactatctcctga

SEQ ID NO: 10988 - RNA, 990 nt, synthetic construct
  source 1..990: mol_type = other RNA
atgtctcttgctgctctggcacgggctttgcggctgtccgttggcgagctccatgcattggctgagagagcagatcagtcctaccggaccgtcaagcccgagccagggtcaacgagacagacctttgatgctctaggccagctgaaaacagtccatcgacgtattaaggaagtggtattcgtgaatgtgtattttccggagtatctgcaaggaagtctgaaaggcagggattacgtgaccaatgctctcctgcatactaataaacagctcttggtttgtgaggacgtaaaaaaatttttcccctctgtaaccgccgctttagttgaggatgtatggcacgggttcttcagatttgccccagaagtcgccaagctgctgactcgcctgacaactaagagcgggcacctccctcagggagccatcaccagttcttatatagcaaaccttgttatgtggcgccacgagcctctgctccaggcaaagtttgctgcccgaggaatcacatattctcggtacgtggacgatatggccatgtcctggtcttgccatgtggataaggagacgcaaacttgggtcatagctcaggtgtacgggatgttagcccaacacggcttgaaggccggtcgtgccaaacatgaggtcttctccgccagtgaaccaatgatcgcaacaaagctcattgtgaaccgcaaaccgagcctttcagcgaagaagcggtcacaagtgaggtcccaggtctaccagttagaacgagcggaagaagacggcaccgagactatgtcggtcgacgccctggctattaaagccagccagagggtgggtcagctgggaagattccacgttacccaggccgcacacctgagggagagggtgaaggcggtgcgcagcagacttagtgtggaagcaaacgccgccatcagcatgcccactgaaacccccacaacaccaagccccgaagacctatcagacgcacctgcgccttgggagtga

SEQ ID NO: 10989 - RNA, 1029 nt, synthetic construct
  source 1..1029: mol_type = other RNA
atggccctgtacctgagtaagccttcttatcggtgcaaacccgttcggagcatcgcagcattagcacgcgccctcaatttcgaagagcaggctctgagggtggtcgcggaaaatgctgatcagcgttacagaactgtggcgccaccacctggttcctctagacagactttcgacgctctgggccaattgaaggagattcatcgccggatcaaaacaaccttctttgacagggtgaaattccctgactatctgcacggatcactcaagggctgcgactatgtgacaaatgcacagctacacactaagaagcagctgctgatctgtgaggatgtcaagaaatttttcccaagtgtgacctcagagaaagtggaagatgtctggtgtgctttcttcggattcgcaccagaagtcgcccaccttcttgctagcctcacaactaagcagggcgccttaccccaaggagcagtcactagcagctacttggcgaacttggtcctgtggcgggatgaaccccttctgcatgctaagctggccgcacgcgggataacctattctagatacgttgatgacattgccatgtcatttagcatcaggccctccaaagagacacaaacgtgggtgatcgcccaggtgtacggcatgctgcgcaagaacggtctgacggccggtcgatctaagcatgagatttttagtgcctccgagcctatgatcgctaccaagctgattgtgaacagtaagccctcactgtcacagaaaaaacgaagccaggttcgagctcaggtgagacaactcgagatggcccagtcctccggcctagactctgagatggtaagggtactcgcggaacaggccgcccagaaagtaggccagctcgggaggtttcaccctacacaagccgctagacttaaaggaagggtgaaggcagtgcggcttgggttaccaatagagtccttttcgtcccgcgttaccaacagcaccggggttagtaatccgagcccctctgaagatctccgtttgccgtgggaatga

SEQ ID NO: 10990 - RNA, 1038 nt, synthetic construct
  source 1..1038: mol_type = other RNA
atgagcttgactccccacaaggctacttacagcaaggaaccgctgcggaccgttaagagtctgtgtgcgatgctacgacttgaggagcaagccttgcgagatctggcggctcatgctccagccctctatcggagggttaaacctaagcctgggtctaaaagagaaacttttgatgctctcccccgcctcaaagtcatccataaacgcatcaagactcaggtgctagaaagggttcgatttcccagctaccttaccggatccgtgaaggggagagactacaaggagaacgccgcaaaacacgccggccagcgtgtggtgatttgcgaagacgtgaaaggcttttttccctctgtgacagccgagatggtatgcgacatctggcagggaattttcggatgtagttctgacgtggcgcagctgctgacacagctgacaaccaaggacggtgctctgcctcaaggggctattccctccagttatcttgccaacctggtcctgtggcggacggagcctttggtccacgccaagttggacgcacagggcattacgtattcccggtatgtagacgatatcacaatgagctcaccgcggaggctgtccgtcgctcagaagcaggcagccatagggatggtgtacggcatgctgtcagaggccggactgcgtgcaggacgcgaaaagcacgatgtattcaatggctcgaaaccaatgatcgtgaccaagttagtggtgaatgagaaaccatctctcaccaagaaaaaaaggtcagccgtgagagccgccgtttttcagttccagcaaaccttggccctgggcgaacctactgcagataccgttataacactcaacaagttagctcagagagtcggtcaacttgggaggttccatccgcgcgaggcagcagtcctcaaattaaggctccaggccacgcgcgcgttcatcgataaggcccagccccaaaccctcactaccggcctgcttcccgacgcaagactgacaacaccaccagagggtgctccagctccttgggatgacctatga

SEQ ID NO: 10991 - RNA, 1020 nt, synthetic construct
  source 1..1020: mol_type = other RNA
atgagccttttcttgaggaagcctagctatccttgcaagccgattaatagcctccgctcactggctgcagctttgcgcgttaccgaggatgagctgctgtctgtggcgaacattgcggacacactgtaccgcaaggtcaagctaaagcccggcagcgatcggcagacattcgatgcgacgcccaggttgaaaagactgcacgcaaggattaagtcagtgatcctcgccaaggtcatcttcccagactatcttacaggctccctgaaagggagagactacaagaccaacgccagtctgcatatcaataaatccgttctgatcacagaagacgtcaagggctttttcggctctgtctctgacgtgcgagtgaatgatgtgtggagacactttttccgcttcgacgcttccgtcgctgaaaccctgactctccttacaaccaggcgaggcgctctaccacagggggcaatatcttcaagctatttggccaacctagcaatgtggtcagatgagccgcttctgcacgccaaactggctgcccggggaattatttattccagatacgtggacgatatgtgtatgtctagcaatactccactcagtatagcagaaaaaacccggactatcgaggacgtatacggaatgctgatgaaaaacggtttgtcggcccgtcgtgataaacatgatatcactcccgccacgggaagaatgctcgttactaagctcgtggtgaaccgaaaaccggcactcccaccagagcaaaggtcccgtatcagagccatggtatttcaagccgaacagatggcacgcaatgaggctgaccccaagctgagtatagccgccctgaataaggccgccaacaaggttggccagctcggacggtttcattgcaacttatccaaacctcttaaagctcggctggctctggccagggctcccttaccacaccctttagcggaaccccggtttaccgggcctgacaccggtagtacaggggatgcacctggagtgccctgggagtga

SEQ ID NO: 10992 - RNA, 1008 nt, synthetic construct
  source 1..1008: mol_type = other RNA
atgagtctgaacctgcggaagcccacgtacccttttcgccccattggctcactggcagccctcgctaacacactgaaagtgagcgagtccgagctagtgcacatcgccaagaatgccggctcactttatagggccgtccagctgaaacccggcagcaccaggcaggtgttcgatgctaagcccccgctcaagccaatccatagccggatcaaagaatttatcctttccgaggtccactttccctcctacctcaccggctctctgaagggacgagattacaaggctaatgctgaaatccatgcaggtcaagcagtggtgatatgcgaggacgtaaaggggttctttaattccgtgagtgagacatgtgtgttcgacatctggagacatttcttcctctttggtacagccgtgtcacaagtccttacgtcactgaccactaaagacggagctctggtacagggagccattcccagtagctatttagccaatctggcactgtggcgagatgaagccctgttgcacgcgaagcttgaggcccagggtatccggtatagtcgatatgttgacgatattgtgatgtcgagctccactcccctagagccatctcgcaagaccgagctgattgcgtctgtctacggaatgctgaggcggaacgggttgtccgccaggagagacaagcacgaaattgctccggccaccaaacagatggttactaccaaactcgtagtcaacagaagagcagccttacctcctgctcgtcgcgcaaacgctcgcactgcagtgttccaggccgaaatgctcgtcgctaatcacggggtggaggcagcccaggcggttatagcaaaagccgctgggagggttggccagctggcaagatttcatcctaacttggctgcccctctccaagaacgcttagcccggttgaggaaacaggcggcgactcgtaaatctcttccaacaatggagcctagcgaaacaccgaccccaccaccagaaaaggattcttga

SEQ ID NO: 10993 - RNA, 1059 nt, synthetic construct
  source 1..1059: mol_type = other RNA
atgtccctcattctgaataaaccgtcttatccctttaatcctatttggacaaacgagaaacttgctaaggctcttcgcactgaactggccgagctagaagcgatcgccatcgtcgctgacaggagctataggcctgtgcggatggatccaggcagcacaagagaggtcttttccgccaagccccggctgaaggccattcagcgccgaattaaggaggctatcctgcaacgggtgaggttcccagagtacttgaccgggagtgtgaaggggagggattacgtgaccaacgcaaaactccacactggtgccagaatattaatttgtgaagacgtgagcaagtttttcccttccgtttcagcagaacgcgtttgggacatctggaggcacttctttggatttggcgatgatgtcgctcaccttctgaccaagctgacaacgaaagctggcacactgcctcagggggcaggtacgtcatcttatttagctaacttggtgttgtggagagacgagccctacctgcaggcaaaactcgccaaacacggactcacatatagtagatacgtggacgacatggccatgtcaagcaaactcgatatcaccccggtggaacaggagagaatcatcgccgacgtgtacggcatgctgcgacggaatggcctttccgctaagcggaagaagcatgagatattcagcagttcccagcgtatgattgttaccaaggtaattgtaaacactaagccatcttggtctaaagctcgccgatctgccgtgcgaacccaggtgcatgaactggagaaaagagtggttgccgaggacgtcggtgcggaattgcataagttcgcagatcgcaccagcaacctggttgggcaactcggccgtttccacgtacgggaggcaggattactgagggcccgggtaaggaaggcacgcgaggtcatgaatcgcgccaccaggatacattttactatctccccaactacaggagcccaccagagttcgagactagtggatgtccccccctgggaaatgaaatgcagacgtgcggtcaaaagctcatga

SEQ ID NO: 10994 - RNA, 1026 nt, synthetic construct
  source 1..1026: mol_type = other RNA
atgtccctgatcttgagcaagccgatttacccatgcgacccagtttggaccctggaaaagttaggcgaagcactgcgtatagaccttgctgagctacaggcagttgccgccgtcgctaaccgctcttacactaaaaagttggtgaaaaaagaccgggaggtgttttctgcccggcctcgcctgaagctgattcaaaacagaatcaagatggcgtttctccacagggtgatatttcccgagtaccttaccggatctcttaggggttgcgactatgtaactaatgccaagattcacaccaatgctaggattttgatctgtgaggatgtccagcagtttttccccagcgtaggtagcgagaaagtgaaggatatctggttgaactttttcgggttttctgagggcgtggcggaactgctcacaaaactgacaactaaagctggggccgtgccccaaggggcatcaactagctcatatctggccaatcttgtgttatggcgaacggagccactcctgcaagccaagctcgctgaccatggcattacgtattccaggtatgtggatgacatgagtataagtagcgaattccagctcgagcccgccgagctagaacggatcatcgcggacgtatacggcatgctgaggaagaatggactcagtgccaaaagaaaaaagcatgagattttccgtgagtcacagcgaatggtcgtgacaaaggtcatcgttaacaagaaagcatccctgtccaaggacagacgatccgcaattagaacccaggttcacgtcctggagagccggatagctgctggtgaaaactcaatcgaattgtcgaaattcctggaccagaccagtcacaaggtgggccagcttggcaggttccacaaaaatgattaccgcgatttactgcctcgcgtgcgcgctgccagagaagcactgagaatcaaccctccgcccttcattacaggagataatgatcggtggccagaagccgcccctcctcatgcaccatgggagctcggagggatctga

SEQ ID NO: 10995 - RNA, 1047 nt, synthetic construct
  source 1..1047: mol_type = other RNA
atgtctcagctgcaacctcccccgcgatataggcacaatccaatccactcagtggctgcccttagcagggtgctggggtattctgtggagactttgaagcatgtggcaggaacttcaagctcccggtaccgccttgccaaacctatcctcaaagaagacggtagcttccgcagaccctttgatgccctgtaccctctgaaggacatacagatcaggatcaaacaacgaattctcacagcggtaatcttcccagcatatctgaccggaagcctgaaggggcaagaccaggtccggaatgctaagttgcatcagggcgcctcaataactgtttgcgaagatattaagtccttttttccctctaccacctcggaggtgattttcgacatttggcgaggtttctttggtttttccgaggatgttagtaacctgctcactctgctgacgaccaaggacgatctgttaccgcagggggctgtgacatcttcccaccttgcgaatctcgtgttttggcgccgtgagcatgcactctatctcgggctggcttcgcagggggttcggtacagccggtacgtggacgatattaccctaagcagccgactccccgtcacccatgacgacctcgcacggcacatttcccttgtctacgggatgatcagatctactggtcacagggcccacaggggaaaacaggagatccagagagcccacaggggaatgcgtgccacgaaactgttggtgaataggcgcgcggctttgggcacagctgaaagacaagccacccgcgccgcagtcttcgcactggaaaggagtttcgcagtcacaggcggagtattgtgtccagccctgatcaaggagttaaacagtgtgagtggccgtgtgtcccgcttagcccggcttcatgctaacgagggccaggcgctacgggctagactgacaaaattaagaaacgaagtcggcaagtctcacagagtaagaaacgatttctcacaggttgaggtgataggcgttgaaccagcccctcccgaaacaggcgagggaatgcagtga

SEQ ID NO: 10996 - RNA, 966 nt, synthetic construct
  source 1..966: mol_type = other RNA
atgtctcagctgcaaccaccgccacagtacagccacaaaccaattcattctattgcagcgctgagccgggtcctgggttattcaatcgacacactgagtcacgtagcagaggtttcaagcagtagatatcggctggctaagcccgtggtgaaggcggatgggtcaacccggcagcccttcgatgctttgttccctctgaagaatatacagatccgcatcaagcagaggatcctaacagctgtttcctttcctgcttacttgactggcagcttgaaaggccaagatcaggttcggaatgcctctttgcatcagggtgcatctataaccgtgtgtgaagacatcaagagttttttccccaacacgacttccgagatcattttcgacatttggcgaggctttttcggtttttccgagaacgtatcgaacatcctcaccctcctgaccaccaaagacggggtcctgcctcagggcgctgttacaagctcgcaccttgccaatctggtgttttggcgccaggagcacagtctctacgtgcgtctcgcctccgagggggtcagctacagtaggtacgtcgatgacatcacgcttagctcactgcttcccttgaattcaaacgaactcgcccggcatatttcactggtgtatggaatgattcgctctactggacatcacgcccacagaggcaagcaagagatccagcgtgcacacagggggatgcgcgcaactaaactgttagtgaatagaaggcctgccctttctaccgctgaacgccacgcaattagggctgcagtctattccctggaacggtccttagccgccgccgaaggagtgctttgctcctctctagcgaaagagcttaacagcgcttccggacgtgtggccagattaacacgcctccataggagcgaaggcctggccctgcgagagagactcctccgaataagaaaccaactggataatagttga

SEQ ID NO: 10997 - RNA, 984 nt, synthetic construct
  source 1..984: mol_type = other RNA
atgacacaaccaccccccaggtatccactgcgcgcaatagtgcgtttagataaactcgcactggttctgggcgtttcgcttgacctgctgctcgcggtgagtaaggacgcttcaagtcgttataggctggcgaaacttatcgtgaaacctgatgggtctaccaggcagccactggatgcgaaggtacctctgaaaggaatacagaggcgcattaaggaacggattttggagaaagtagtttttccggactacctcactggtagcctcaagggcagggatgctagagcaaatgcacgcctccacgtcggagctagcattgtcctcagcgaagatattgccaattttttcccttctaccaaggacacacttgtgttcaagatttggaggcaatttttcggtttcgccccagatgtggctgagatcctgacatcccttactacgaaggatggggagctaccccagggtgcttgcacctcaagctacttagccaatctggccttttggagagaggaacatcgcctgtatgaggtgtttcgggctcaagggatagcttatagtcggtacgtggacgacgtctccgtgtcctccaaacggcgcttgagcaacgaagagctttcagcttgcatcaaaaacgtttacggcatgatgggaagatctggattcagaccccggcgtaaaaaacaagagatccagagggccaactcccctatgctggtcaccaagttgttggccaaccgaagaccggccatctctgtgaaggaacgacaggcaattagagccagcctgtaccagctcgagcagagtgtggccgccaaggcaggtgacgacttgagctctaagctggagtcaatcgccggcagagtcaatcgcctatgtcagatgcaccctgtggaaggcgagcgactgaaggtgcgggtacgggtcttacgagggcagatcggcatgggcgcatccgaagtttgtggacccgtcactgggcagtga

SEQ ID NO: 10998 - RNA, 957 nt, synthetic construct
  source 1..957: mol_type = other RNA
atgtccagggttcctccgcctagttatccccacggctcaatccagtcactggccgcactgtccaggacactaggggtccccgcggataagcttctgcagatcgccaaggacgccgacaatagctatcggcttgccaagccaattgtcaaggcggatggatctgtaagacgccctgttgacgcaagggtcaagttaaagggcgtccaagtgcggattaaagaacggatattagaccaggtgaggttccccgattacctcaccggttctctgaagggaaaagatgctgtggcaaacgctagactacacgtaggcgctagcgtcgtggtgtgcgaggacgtagccggctttttcccagctacctcctcaccggctgtgcttggcatctggcgcggtttttttgggttcagcacggaggtaagcgagctgctcacgcagctgacaaccctgaatggcgcactcccagagggagccgtgacatctagtcatcttgccaacctggctttctggcgggaagagcacgcactctacgaggagctgcaccgcgaagggatcagatattcccgctacgtggacgatgtttctgtttctagtgttaaccaactgtccagacaggaattagctgcatgtatcagccgggtgtataccatgatggggcgcaatggttaccgtcctaaacgggctaaacaacagatacagtgggcgaatgggccagtgttggtgactaaattgcagaccaacactagggtggccctgactaaaaaggaaagacacgccattcgaggggccgtgcatggtttggaaagaatggcgcttgccggcccctcagatgagctcctgcgacgactgtccagcgtgagtggacaagtcgctaggctgcgtagactccatcccaacgagggacagatgctcaagtcgcgtctagacgccttgaggcgcctgttgacagcagccgtctga

SEQ ID NO: 10999 - RNA, 1020 nt, synthetic construct
  source 1..1020: mol_type = other RNA
atgaaccacaccgccgctcagcctaagtatacctcgtcccctgtcagatcgctcgccgccttatctcgttccctaggcctgagcgtggccgagctccagagaattggcgacgccgcttctagcctttaccgggacgccaagccaatcatcaaagtggatggatcaatccggagaacattcgacgcctttccagtgttaaagaacatccatcgaagactccaaacgcagttcttccagcgcgtggtcttccccgattacctgaccggatccttgaagggtcgcgatgcccggcgaaatgcagccctccacacaggcgcagccatcgtggttactgaggacataaagaatttctttcccagtaccgatgctaaagtagtgtatagtatttgggccaatttttttcggttcgctcctgaggtagcacggcttctgaccgctctgacagtcaaagacggggcattgccgcaaggggcaatcacttctagttacctggcaaaccttgcgttttgggatcgagaatggaggctgtacgaaaacctgcgcgataagggaatttcttactctaggtatgtggacgatgtcaccttctccagcaaagaaaaactgtcaaatgagcggattggctgctgcatagctggagtgtacggcttaatggctgccaagggactaaaggcgaagcgctccaaacatgagattcgcagggggaacggtagaatgctcacgactaagcttatggtaaacacacgtccagcgctgatgacaagggaacggcaaaatatacgtgctgccgtgcatcaactggaggttctgagccgctggaattcaaccgactccgtgagctttaaaagtgagttcagcagagtttctggcagggtcgggaggctctcacagcttcaccccatggaaggcgccgctttgagggcacgattggctactctcagggccggtctgtatgcgaaccagcagttgggtagacagctgagccagtttgcaggggtgactctggactgtgttatctga

SEQ ID NO: 11000 - RNA, 963 nt, synthetic construct
  source 1..963: mol_type = other RNA
atgaacccaaaggcggcacaacccaaatataccttcagtcccgtccgatcactcgctagcctttcacgctccttaggagtgagtgttgtggacttgcagcgtatcggagatacagcggggggcctgtatcgggatggtaagccaattattaaggcagatgggtctattcgaagaacattcgacgcattacctttgctgaagtctgtccaccggcgcatccaggctaggttctttcagagagtggtgttccctgattatattacaggctctctgaagggtagggatgctcgcagaaatgccgtcctgcacgctggggctgccatcgttgtgaccgaggacatcaagaacttctttccctccacggatgccaaggtagtctacagcatctgggtgtcattctttcggtttgccccagaggtggcccagcttctcactatgctaactattaaagatggagcattaccgcagggcgcgataaccagctcctacctggccaatctagcattctgggaccgcgaatggcgcttgtacgaaaacctgagagacagaggcatatcttactcaagatatgtggacgacgtgacctgcagtagtaaggagcaactgaacaacgagaaaatcggaagctgtatcgccgaagtatacggcctgatggcctcgaaaggctttcaggccaagcgatccaaacacgaaatacgtcgtgggaatggccctatgctgaccacgaagctgatgattaacgctaggcccgctctcttgactagagagcggcagaacatccggacagccgtgcatcagcttgaggttctctccaaaaattccaccgacccagtcaggctcaaaagcgagatcaatcgagtatctggacgcgttggtaggctgagccagtttcatcctattgaaggggccgcactgcgggctaggcttacaactctcagggtgggtctggacctcaatcaatga

SEQ ID NO: 11001 - RNA, 984 nt, synthetic construct
  source 1..984: mol_type = other RNA
atggtccagctggcctctcgcccaaactataaatacagccctgtgcaatcctgcgcgagtctgtcaaaggtgctggccgtctccccgtctgccctgaaagccctagcagccaattctaataacttgtacaggctagccaatccaatactgaagccggacggctctgtacgccagccttacgatgctctttatcccttgaaacttgtgcacgagagactgaaactgcgggtctttgctcacgtgagcttcccagactatctcaccggcagcctcaaaggaaaggatgcaatcaagaacgccagttttcacgcaggcgccaagatcgttgtctgtgaggatattaaggactttttccccagtgtcactgcagatgttgtgtactctatttggcagggattctttaacttcgcgcctgaagtgtccaggctcctgacatccttatgcactaaggacggaagcctgccccagggggcaatcacatcaagctacttggctaacctcgtgttctggaagcaagagtggaggttgtatgaggatctcaagagcagaggtatcgtttactcccgttacgtggacgatgtgaccgtgtcatcacgagagggccttgacaaggaacaattgagcgaatgtataggtaaagtttatgggctaatggccgctaacgggctcaggcccaaacggaagaagcaggaaatccaacgggctcatgcccctatgagagccacgaaactgatggtcaataagcgggcagctctgtccctgggcgaacgtaaagctattagggctgcggtacatcagttagagttagaagtagcccaggtcaatatgccaaaagagctgatggcgaagctcaatagtgtgtcgggaagagttgcacgcttggcccagctgcacgtagtgcaggggaacgagcttaaaaatcgcatcagagctcttcgagtgcggattaagctcctgaccacactggcactgcatgacaaatga

SEQ ID NO: 11002 - RNA, 981 nt, synthetic construct
  source 1..981: mol_type = other RNA
atgacgcctgatgcctccaagccgtcttaccgctgctctcccataagaagtctggacagcttgagcagagcactcggtgtgagcctagagacactcaatcgattagcaagccgcgcggacgattcttatcggctggcaaaggctatcgttaaaccagatggtaccatccgtcaaccttttgatgcccagccacctcttaaagctatccatcgccgccttcagaaaaggatattcgacaacgtcaggtttccagactacttgacaggctccctgaaggggaaagatgccagatggaacgccgcccttcacaccggcgctaaaattgttgtgacggaggacatcaagaatttttttccaagcgtgactgctaatattgtctattccatttgggcaggcttctttaggttcgagggcaacgtcgcccagctcctcaccctgctgtgtactaaggatggaatgctgccccagggggctatcccctcttcctatctcgctaacttagcgttctgggagcaagagtggaaattggtggcaaatttccgggccgctggtatcacatactctagatacgtggacgacgtcaccctgtcaagtcgggaatcactggataagccccagctgaccaggtgtatttcaaacgtgtattcgtttatggccgctcaaggattccgccccaagcggactaaacaggaaattcggcgagcgcatgcccctatgatcgcaacaaagttgatggtgaatcgacgcccggccctgttagtacaggaacggcaggggatcagatcagcggtgtaccaactcgaacgtgaagagatgcgtggatgcgacccaaaagagatcaaggcaaaaattgacagcgttgccggcagggtaggaagactaacccagctgcaccctactgatgggcacgctctgaagctgagaatagccgcccttaggaggaagctcgccagtatttccgctgtccccagtgcaaactga

SEQ ID NO: 11003 - RNA, 981 nt, synthetic construct
  source 1..981: mol_type = other RNA
atgaagaatccaccgaaaagacccgagtatccacaccgccccattggctctctggacgccttgtctgccgccctccagatctccaggattgagctggaacatgttgcgagcgtcacagacagtcagtaccgcctcgctaagcctattgttaaggcagacggttccatacgccagccatacgatgccctgcctctcttaaagaacgtgcagaggcggatccaagcccggcttctagcccctgttcagtttcctacctaccttacgggtagtatcaaggggagagatgccaggcggaacgccgctattcacgcaggtgctaaagtcgtagtctgtgaagatgtagcaagttttttcccatccacatcgcgactgctggtggagagcatctggactggcttctttgggttctccccagaggtggcacagatgctagccgtcttgaccacgaagaatggctcactgcctcagggagctgtgacaagcagttacctggcaaatctcgcattttggaaaaaagaaccgattctgcagcagcaactggagctcaacggaattgcgtattctcgttatgtggacgatatcaccatctcttccagacgggccctgttaaaccccgagctgtcatggtgcatcgctcagatctatggcatgatgagaggggcagggatgcaagcgaaacgcggaaagcaggaaatctggcgtggcgacggtagaatgttagccactaagcttgtggtgaacaggaggcctgctctcccacccaatgatcgcaaggccattaggactgcagtgttccaactggaggcgcgattcgctgctggcgacgtggaggatacctttgctaccgaactgaatcgggtagccggacgggttgtgaggttggcccagttccatcccgtcataggagccgctttgaaagggagaatagcaagcctccgacaacagctttcagacggccagacaagcgctatagccccctga

SEQ ID NO: 11004 - RNA, 996 nt, synthetic construct
  source 1..996: mol_type = other RNA
atgaaccctcctcagctcaaaccgaagtacgacctgaagtcaattcgggatatcagtgccttgagcctgagtctatccatgccagaagaactgctgatcaatgtagccgcacaggcagatagcttatatcggaaggccaaacccataattaagccagatggctctctaagacagcctttcgatgccttaccccctcttaaatccattcagcgccgaattaaggaccgcatcctcaaacgagtggaatttcctgagtatttgacaggctcactgagtggcagagactatcggaccaatgctgcaatgcacgtgggtgccgccatcgttatatgcgaggacattgagaagttttttcccgccacgagccgtgagcgcgtgcttgatatctggaggaatttcttttgtttctcggaagacatggctaatttgctcacaagcctaaccaccaacgacgggagcttgcccgagggagctatcacatccagttacctggcgaacctggcgttctggaaccaagagccacggctgcaggcgaagttagcccaaaagaatatcgtgtatagcaggtacgtcgacgatatatcagtttcatccaagcagtttatgcctaaagaggaacaaaccgcacttattgcccaggtttacgggatgctgaaacgtcatggatacaaggccaagagaaggaagcatgaaattttcacgtctggcaggagaatgctcacaactaagctcatggtcaataggaaaccagcactgcagcccaaagacagacagaacatcagagctgccgtgcatgctctggagcagcggatagcttccggcgagtctggagctgaaatcaaaactgagctcaaccgcgtcacttctcgcgtagggcgacttggaaccctgcacgctactgaggccatcccattgaaactcaggctgcggaacgtgcgtcaatctcttcaggcagcaatcctgcagcacaccccgctgattggtgaacccgagtga

SEQ ID NO: 11005 - RNA, 963 nt, synthetic construct
  source 1..963: mol_type = other RNA
atgacgccgccgctcctgaagccaaagtatgatttgaagcccatccgcgatatatccgccctggccctgagtctaggcatgccagaaaaactgcttatagacgtcgcagctcaagcggacacactgtaccggaaagctaaacccatcgttaagcccgatggcagcatccggcgaccttttgacgctctcccccctttgaaacctattcagcgccgtattaaggaccggattctcaagcgggtggaatttcctgagtacctcactggtagtctggcaggtagagactatagaactaacgccgctatgcatgccggcgccaagatcgtgatttgcgaagacgtggaaggattcttccccagcaccaagagagagagggtgatggatatctggctgaattttttcaggttctctgaagacgttgctaacctcctcaccagcttaacaactaaagagggggaactgccacagggcgccattacctcctcatatctagctaaccttgctttctggaatcaggagccaaggttacaggcaaagctggcgaaacgcgaggtggtatactctcgctacgttgatgatatcgcagtatcatccaagcaaaccttgaccaaggaggagcagacagctctgattgcccaaatttacgggatgcttaaaagacagggctataaggccaaacgaaggaaacacgaaacctttacatcggggcggcggatgttgactactaagctgatggtcaataggaagcctgcccttcagacaaaggagaggcagaatataagagcagcagtgcatgcgctggagcagagaatcgccagcggagaaagggggcttggaatcaaaaccgagttgaatcgagccacgtctcgcgtgggaagactgggtactctgcacccaacagaggcaaaacccctaaaattacgtctgtcccacgtccgccatctcaccaacaaccgtatgtga

SEQ ID NO: 11006 - RNA, 1014 nt, synthetic construct
  source 1..1014: mol_type = other RNA
atgtcagatccccagagacgtccaaggtacccccaccagaggatacaaagcgtggcctccttgtcagctgccctaaatgtccccgaaggtgaactggcagcgattgccaagatcgctagctcacagtacaggaaagcgaaacccattaccaaggctgatggcagtgtgcgccagccctgggacgcattgccaccacttaagcgggtgcaaaaacagattcaggcaaaattgcttcgcagggttgagtatccttactatctaaccggatctctgccgggaaaaagtcccagagagaacgcctcccttcacactaaacctgcaatcatcatcacagaggacatcgcccggttcttccctacgactcgagctgaacttgtgcatggagtgtgggccggactgtttggctttagcgaagaggtggcaggcatcctcacggcactgacaactaaagatgggttcttacctgaaggtgcccccacatcttcgtacctggccaatctggtgttctgggactgtgagccacggatagtcgaccagctggcccagttggacgcgacctatagccggtatgttgacgatgtcaccgtatctagctctaaggctctcaccccggttgagattgcgcggtgcatggccatagtttacggcatgtttggctcccggggttacaaggcaaagaggagaaagcacgagattgtcagggctaacgcaccgatgcgcgtaacaaagctcgtagtgaataaaagacctgctctgccaaaggccgacagaaaagccgtgagagctgctgtctataagctcgaggggattgtgaactccggccagcccctgcctgacgatattcagactctgctgaactctgcctcagggcgcgtttcccgactcggacaatttcatccaactcaagccgctccactgaaggcacgaatcgccaccatccgtgaacgcctggctcatttaaatgatagtctcgccttaaccgggcacgggcagaagacacctagtaagagctga

SEQ ID NO: 11007 - RNA, 1020 nt, synthetic construct
  source 1..1020: mol_type = other RNA
atgagcttccgctacaatgccaaccctatcagaagtctggcggttctggctattgccctcgatgtcaccgaatacgagctactgcgcctgtccaatcgggctgacgatctgtacagaaaggcgaagcccattcggaagcctgacggttcgttcaggcagccatatgatgcactcccccagctgaagcatgttcataggaggattaaggagcgattgcttgtgaacgtgcactttcctgcttacctcacaggatccctgccaggcaaaagcccaaaagccaacgcctctttccatgtcggggcaaaaattgttatatgcgaggatgtgcagaagtttttccccagcactcgcgcgacactggtacacgacatctggatgggtttttttgggttcagccaggacgtggccactatcctcaccaagttgaccactagattcggagctctcccggaaggggcaattactagttcatatctggccaacttagtgttctggcgccttgagcccggcctccatgagcagttatctatccgaggaatcgcctatagcaggtacgtggacgacatctgtgtttcctcaaaggagtttctccccgatattgataagtcagctgccatctccgaaatatatacaatgctgggccggttagcttacaccgcaaaaaggaaaaagcacgagatccagacctccgggcaccaaatgtttgcgacgaaacttatggtgaatagaagagtcgcaatcccacacagtgaaaggcataatcttaagtcagcagtgtttcagcttgagggaaagttcaaacacggtgcccgcgacgtggccttctttgaagaattgagccggacaactaaccgagtcggccgtctaggccaattccacatgcaagaggctacaaaactgaaagaacggttgaaaaagctgcgtatgagactggatagtgaaccggtggtaattaccccttctgtccagacggctgccaccataatgtctgccgccaaggcagaggctccttgggactga

SEQ ID NO: 11008 - RNA, 1050 nt, synthetic construct
  source 1..1050: mol_type = other RNA
atgaagaagccacctaactccgacaaaagcataccgtattacccctgcgaacccattcattccattgccgccctcgaaatggctctgggaataccagagcgctggcttaagagaatcgctgccgcggccaaccagagctatcgccttgccgcagaggagattaaaaaagatgggtcgaaaaggcagaccttcgatgcctaccctagattaaagtatgcacagagacgcataaaggaccgtatcctgtctcgggtcgaatacccagactatctgaatggctcattgaaaggcaggtcccctcggaaaaatgcggaagcacacgtcggggccaaaattacgattggagaggatatcgctaatttctttccaacaatctccagcactctggtgaaagctatgtggtgtgggctgtttggctttagtgaagaggttgccaacctattgaccctcctaaccgttaaggatgatggtgtaccccaaggggcggtgactagcagctacctcgcaaacttggtattctgggccagggagccccaactgtataagcagtttcagaggaggggttaccagtatacgcgctacgtggacgacatttcagtgtcctgcaagagaagaattacagatagcgaaaagtcagagatcatctcttctgtctacgccatgcttaggtcagccggcgtgcaacctaagagacagaagcacgaggtgcacactgctggagctcgaatcgtgaccaccaagctggtgcataacgtccgcgttgctctcccaaaagagatgcgccgtggcatccggacaagtgtgttccaactggaggctcgggcagccttcggcgagcatgacgaagcactccacaaggagttgctgactgtaagctctcgggtgggattacttaatagttttcacccttccgaaggtgcacccctcaaagcgcgtctgaaaaagctgcggaagatgatagaagatgccgcacaggggctgcagcgaacacaggacgttggtcgacaggctgtcggaatctctaatagtgagcccgccccgtgggactga

SEQ ID NO: 11009 - RNA, 975 nt, synthetic construct
  source 1..975: mol_type = other RNA
atgaagaagagcctgaagattgacggtctggccccctcctatcctcacgaaccaatctacggaatcgccgctctgagcagagctcttggagtgcgggagatgaggctgcagcgtgtggcccagatggctaacgatttgtaccgactggcctctgaggagacgaagctggatggctctaaacgccagacgtacgatgcccagccactcttgaaagcaatccaaaagcggattaaggaccgtatcctagtccgcgttatttgcccgccctatctcaacggctccttaaaaagacgctccacacggaccaacgcggaaccacatgtgggcgctcggatagtgttcgacgaagacatagccaattttttcccttccattagaccagaaatcgttaagaggatgtggctgggcctctttggctttagcaatgacgtcagcaccctgctgacacttctgacagtaaaagaccagggtgtgcctcaaggggccgtgactagttcgtatctcgctaacttcgtgttctgggcacatgaaccttcacttgtgcggcggtttgcggcccaaagattagcatatactcgatttgtcgatgacataagtgtgtctagtaaggctgtcgttgccccccaggctaaatcactggtaatttcagagatttacgggatgttgtcccggcacgggttagagcccaaacgagctaagcataagatctcaactcgacgcgataggatgaccaccaccaagttggtgatcaatgagcgtgttagcctaccgaaagaacgcagaaggaaccttagagccgcggtacacaaactggagcagagagcagcattcgaccagtacgatgagagtctcctgaaggaaattaataaagtcgccgtcaaagtgggacagctcaagggataccacgttgcagaggggacacaactcaaggagaggcttaggtctatcaggagccgcgtgctgctgtctttgtga

SEQ ID NO: 11010 - RNA, 1035 nt, synthetic construct
  source 1..1035: mol_type = other RNA
atgatgagtgagtttccaaattatccacatcagagaattgggaccctggacgcccttgctcgagtacttgcggttccgaaggaccacttgttaactgtcgcctctagagcggaagtgttgtataggatagccgctcaagagcagaaagcagacggaagtatcagacaaacgttcgacgccaaacctaaactgaaggaaatacagcggaacattaaggaacgcctcctacagaaggtaaagttccccccgtacctccaggggtctttaaaaggcagaagccctcgcctgaatgctgagtcacacaaaggcgctcacctgagcatctctgaagatatccagaacttttttcccagtgtgggtagagatcatgttatgtccatctggagggattttttccgtttttcggatgaggttagcgagttgctgacagctctcacggtgaaggacgacggaatacctcaaggcgctatcaccagctcctacatggcgaatcttgtcttctgggattatgaaccacggctggtggagcaactagccgcaatgggcctcacctacactcggtacgtagacgatgtgattgtgagctcccgacaccaccttactaaggaggtgcagtcactggtcgtggccaagatttacgggatgctgggccggtattcgctccgtcccaaaagggccaaacatgaagtgtccactaggtcaaaacggatgacagccaccaagctcgtcatcaacaagcgcgttgctctcccaaaggagacaagacagaacatccgagctcaggtttttgcaattgagcgcagagtgctggatggagatcgcggggcagacttggtgaaggcactggcctctgctagcagtcgggtgggaaggctggcctcaatgcatcccacaatgggccagggtttaaaggccaggctgaaagtcgtaaggaccacactggcctccgaatcccctcccgaggccttccaggttgcagtcgcatctcgcgtgcctcagagcgtggaggaagacttcgtgcccccatgggtctga

SEQ ID NO: 11011 - RNA, 993 nt, synthetic construct
  source 1..993: mol_type = other RNA
atgaaaaaaaccaccattgaacccgggcttgcccccttgtatctccactcagcaattcgcggactcgctgcactcagcaaggcactgggggtgaggcagaacgtgctcgagaagcttgccctgtctgcggagacactctatcgagtggcgcgcagtgaagtcaaatctgatggctcaatccgtcagacttacgatgcactgccaaggctgaaagccgtgcaaatcagaataaaggaacgactcctgcagcgggttatttttccctcctacctgcacggatccctgagagagcgttcaccccgaacgaatgccgccacacacataagggccaagatcacattcgctgaagacatttccaactttttcccatccgcttctcgcgccctcgttcaccgtgtctggaaagatctctttggcttctcagaggacgttgccgccttgttgactacactgacaactaaggatggaggtctgcctcagggcgcagtgacttctagctacctggctaacttaattttttgggactatgagcctgatctagtcaagaccctggctctacggggcttgcgctatagcagatacgtcgacgacatcaccgtgagttctaggctgggaatcaaggcctctgataagacctatgtgatcagccagatatacggcatgctgttgcatcacgggttcacccctaaacggaagaaacatgagattacttcggctgcaaagagtatgagaacaaccaagcttgtgcatcataccagagtatcccttccgatcacggaacggaaaaagactcgggctgcggtgtacgccctggaactgagagtaagcgctggcgagtccgggcctggagtaatgaaggagcttgccagcgtgagcacaagggtgggtaggttaggttcctttcacaaaacccaagctatggcactaaagaaacggttagacgttgtccgcgcgactctgaataccttcgaggcctcgccaacggtcagttga

SEQ ID NO: 11012 - RNA, 1011 nt, synthetic construct
  source 1..1011: mol_type = other RNA
atggaccggcccatttataagcaccgcccagtgcagacaattagcgccttggcacgcgcactcaggatctccgagtcgctgctactgggaattgcaggacgagccaccgatctgtacattggcccgaagcctaaaccaaagaagaacggaggcatccgctatgtatttgacaccaaaccaccgctaaaatcactgctccggcggattaacggaactttcttcaaacacacccaatttcctaagtacctgactggttcccttagcggccgggatttcgtggctaacgtggagattcacagggatgcacgtaatgccgtcaccgaagacatcgctcagtttttcgactgcattagtgctgaatgcgtgtataggatctggaaagacttctttcacttcggcgacgaagtggccgagttactgactaagttgactacgaaagatggtagggtctttcagggcacacccacaagctcctacctggctaatctcgcattttgggaccgggaatgtgccctcgtggaaaagcttaaggccagagggatcagatattcacgctacgtcgacgatatcaccatcagtaccgttagccccctcgctaagggcgacaagaggtgggcgattagccagatatacgccatgatcgggactgccgggttcaaaccccagagaagtaagcatggatcttttagtgcctcatctcccataagaataatggggctgaatgcgaaccgagcgcccacattgccaaaacaggagaggtcagcaatacgagcgcaagtttaccagcttgagcaaagagtggcccaggccgatcaatccgatgatttacgcgctgctctcagcgcagctatcgggaaagtcggtagattgaagaggctgcatccttctgagggcacagccctgcggcttagactggatgccatccgtcgcaccctggacgctcagccagtggtaacccatgctacgattcctatccaggtttccgacgaggccgcatctacacctttctga

SEQ ID NO: 11013 - RNA, 1011 nt, synthetic construct
  source 1..1011: mol_type = other RNA
atggataggcctgtatataaacatcggcctgttcagacaattagctctctcgctagggccctgcgcgtttccgagtcactgctcctagcaatcggggaacggtccgccgatctgtatattggtcccaaaccaaaacccaaaaaaaacggaggcatccgatacgtgtttgacaccaagcctccactcaaatctctgctgagacggatcaacgcaacatttttcaaacacacccactttccaaaatatcttaccggcagccttagcggccgtgattttgtggccaatgtcgagattcacaaggacgcccgtaatgcggtgactgaggacatcgctcagtttttcgattgcattagcgcagactcggtgtacagaatatggaaggactttttccatttctcagacgaggtggctgcactcctgaccaagttgactaccaaggatggcagagtcttccaaggaacccccacttccagttacctagctaacttggctttctgggaccgggagtttgcacttgtcgaaaagctcaaggcccgcggtatacgctatagtagatacgttgatgacataacgattagcacaacttctgcgctgactgaagaaaacaagaggtgggctatttcacaaatctacgctatgataggagctgccgggttcaagccgcagaggtctaagcacgggtccttcagtgcctcacatgcaattcgaatcatgggcctgaacgccaatcgctcgcccacacttccaaagcaggaacggtccgccatccgagcccaagtgtaccagctggagcagcagatcgttcaggccaacagcggtcctgagctgagggcagccgtgtcttccgccattagcaaggtggggagactgaaaaggttccacccgcgggaggctgaggctttacgcatccgtttgaatgcgatccgccagatcttagatgcaagacccgtcgtaacaaatgcgagtgtcccagtagaagtgacggaagacgtgggagccgcccctttttga

SEQ ID NO: 11014 - RNA, 1011 nt, synthetic construct
  source 1..1011: mol_type = other RNA
atggaccaccccatctacaagcataggcctgtacagacaatcagctctctcgctcgggccctcagaatatcagagtcccttctcctcgggattgcgggtagagcaacggatctatatatcggcccgaagccaaagccgaaaaaaaatggagggatccggtacgtatttgataccaagcccccattgaagtccctgctgcgcagaattaacgccaccttcttcaaacacacccagtttcctaaatacctgacagggtctttaagtgggagggacttcgtcgccaacgtggaaatacaccgcgacgcaaggaacgccgtcacagaagacatcgctcagttcttcgactgcatcagcgccgactgtgtgtatagaatctggaaagacttctttcacttcggagatgaagtggcagcacttctaaccaagcttactaccaaggatggccgagtgtttcaagggactcctaccagctcttacctggcaaacttggcgttttgggatcgggagttcgccctggttgagaagctgaaggcacgtggcatacgatattcccgttacgtggatgacattacaatatcgacagtgagtaccctggcagagggcgataaaaggtgggccattagccagatctatgcgatgattggagccgccggcttcaagccccaaagatccaaacacggtagctttagcgctaatagtccaattcggatcatgggtctgaatgctaatcgcgctccaactctccctaaacaagagcggtccgccatccgggcacaagtgtaccagctggaacagagggtggctcaggccgaccagtctgtcgatctgagtgcagctctctcagccgccattggaaaggtcggccgattgaaaagactgcatccctcagaaggagccgctctgcgtttgcgccttgacgccatccgcaggacgttagatgcgcagcctgttgttactcatgctaccacacccattcaggcctcaaacgaggtcgacactgctccattttga

SEQ ID NO: 11015 - RNA, 1014 nt, synthetic construct
  source 1..1014: mol_type = other RNA
atggatcggcctacctatccacatgaacggatccaatctatacagtccctgtgctgtgctttgggtctgtctgagcctaccttacgggccatagcttcgcgagcacccaatctgtatatcggtccaaaacctaagcccaagaagaatggcggaataaggtacgtttttgatacaaagagccctctcaagcctctcctgaaaaagattaattccgtgttctttcggagagtggtattcccacagtatctcaccggctccctctctgggcgcgacttcgttgccaacgtcgacgtgcacagaaattcccgccaggccatcactgaagacatcgcacagttttttgactgcatcaccgccgaccatgtgtaccgaatttggcgcgacttcttcgcttttggggaagatgtagcggatcttctgactaggctaaccactaaaaacgggagggtctaccaagggacaccgactagcagttacctggcaaacttagctttctgggaccgagaaccaatcctggttgagaaacttgctacgcgcaatattagatacagtcgttacgtggacgacattaccatgtcaagcgtgggagtccttgaggccgacgataagagctgggcaatcgctcaggcatatgcaatgattggggccaatggttttaagccccagcgcacgaagcatgccgcattcgaaggcggatctcccattaggattatgggcctgaacgccaaccggcaccccacacttccaaaacaagagcgtgcgcagatcagggctttggtgttccaactggagcagagtctggctagaggagataccggcgccgtgttcagaagcaggctaaacacagcctcaggcaaagtggggcgactgaagaggttgcactcaagagagggagaggccctccggctcaggctgaacaaaatccgccgggtcctggatgttttgcccttagtcacatgtcccactacacctccgggcgaaagagtgcagggtgaggatgcggccccattttga

SEQ ID NO: 11016 - RNA, 945 nt, synthetic construct
  source 1..945: mol_type = other RNA
atgctgcgatctattatacagcgcgcccataacctatacattggtcctaagccacaggtgaaaaagaatggcggggtgcggtatgtcttcgatacaaagccccctctgaaacccctgctgaaaaaaatcaactccatcttcttccgtcggacccattttccaccctatctcaccggaagcattgcaggccgcgacttcattgccaacgtagaggttcataagggagcgagggttgtcatcacagaggatatcgcgcagttttttgactgcatcacggagcaacacgtctaccgcatctggagagaattttttaggttcagtgacgagatcgctgatctgctgacgcaccttatgaccaaggacggaagggtctttcagggtacaccaacctcgtcatatctcgccaacctggcattctgggacttcgagccccagctggtgaatcgcttggccgcgagagggataaggtacagtcgctacgtagatgacatcagcatttctaccacaaatgatctctccgactcagaaaagcgttgggtggtggctcagatctacgccatgattggccgcggggggtttaaacctcaaagatctaagcaccagtatctgtcatccgcacggccgatcacaataatgggccttaatgcaaacagtagcagggccccaaccatcactagacgagagaggtcccggattagggcccttatttttcaactggagcaaagattcgcaagcggtgaaactgggccagaatttcggcagtcattgtcccatgctatcggcaaagtgggccgactcaaaagattacacaaggtggaaggagccgctctacggactagactcgacactatacaggccgccttggatgctttacctgttaaaactaaggctagcgcaaagttcgagtctcctccggctgacgccattgatgatcaccccttctga

SEQ ID NO: 11017 - RNA, 1011 nt, synthetic construct
  source 1..1011: mol_type = other RNA
atgaccaaaggacctgcctacagatacgctcccattctttccatccaggcgctttgcagggccctgggatgtaatgagcctttcctcagatcgctcgctgaacgcgcgtctgggatgtacatcggccccaaacctatgcaaaaaaagtccggcgggatccgattcgtctacgacactaagcaccctctaaaggacgtgctgaaaaaggtgaacagggtcttctttaagaagacccattatccgacctacctaactggttcactggatggacgcgactactcaaccaatgcaggcattcatgcaggggccacaggcgctataacggaggacataagtcagttttttcccagcattaccgccgacatggtttatgagatctggaccaagctgttccgcttcggtcacgagccagccatgttactgactgccttaacaacgaaagatggcgtggtttttcaaggaacacccaccgggtcttatatcgcaaaccttgtattctggtctactgaacacatcgttgtcgagaaactgcagagcttgaatattcgatattcccggtacgtggatgatgtgacactctccaaagcatccacattgtcactcgacgagaagacttgggccattagccagatttatagcatgataggcgcgcagggtttcaagcccaagcgggaaaagcatgggatactgagtggaaagggcgctattaaaatcatggggctgaacgctaacgctaaagtgtcactgccacgtaaggagagaagtctgatcagagccaaagttcatgcactcgaaaaacggttcgagagtggcgaaatcgatttttcctttaggacagaactgaacaaggtcagcggggtagtgggtaaaatgagcaggtttcacaagcacgaggccagccaacttcgcggccggatcaatgtgattaggcgttctatcgaattgatcccaattatcactattggatctcagtatccgagaaccgtcttgccacaggatgtgcagaattga

SEQ ID NO: 11018 - RNA, 1146 nt, synthetic construct
  source 1..1146: mol_type = other RNA
gccctgggacaccggcccttctacgagcttatagaacagctcctgaggaacagacgattcaataacctccggtgtggccttgcctttgcgtggcacacggacagttcttccagctggtacgcctctaacaccaaggtgctgactgggagccacgacccaatccaatcggtggggagtctgtgtagggcgctggccatcgccgaacccttattgtgctccattgccgaacgggtgccaaacctgtacattggtcctacacgcaagccaaagaaaagcgggaatggcttcagagacgtctatgacacccgactaccgctgaaacctttgctcaagcgcataaataaggttttttttgagcgggtagtttttcctgactacctgcacggctcaatccgtagttgcgacttcatatctaatgccagaatgcatgagggatccgtcaccgtgatcacagaagatatcaagggctttttcgaccatatcactgaggagcacgcttatgccatctggagaagatttttcgggtttggggaggttccctcagaactgctgactaagctcgtcacaaatggaggcagggtctatcagggcagtccgaccagctcctaccttgcaaatctggtcttctgggacatagaacctcggatggtcgagacgctgggagtaagggggttaaggtatagccgtttcgttgatgatgtgaccatgtctcacccaaccagcattgggacagaggagaaaacttgggcgattgcccaggtgtacgctatgctcggttcgcacggcttcaaacccgcaaggcagaaacatgctatctttaatggcagtgcatctcgcactattatgcgggtaaacgtgaacgagcatttgaccattacccccgcagaaaggcgtcaggttagagctatggtgcatcagctcgagcaacgagtgcggtcaggcgagaacacttcagaggtgagacaactactcagctcagctattggaaagatcggtcgaatccagcgccttcacccttcttatgccgaaaaattgcgcgtgcaggctcgcggtatccagttaacactggatgaaatgcccttctccacagagtcccaagcatccttcattgcaagccaggctgatgaaggagattccccattttga

SEQ ID NO: 11019 - RNA, 942 nt, synthetic construct
  source 1..942: mol_type = other RNA
atgcaatatctgagctataccaaagagaacagaatccagaatataagcagtctgtgtctcgcgttgaaaattaaacaggacgatctcctggagatcgctaacaatgttcagaactactacaagccaccctactttattgaaaaaaaaaacgggggtcagcggtgcattattgatacagtcgaccctctcaaaccgctcttaaagagcattaataaggtgttcttcaagaacgtctacttcccagattatcttactggttctatctcaggccgcgattatatcagcaacgtaaagatccaccgcaactctaagaatattatcaccgaagatatcaccagcttcttcgataacattaccgaatcacacgtgtatgacatctggcggcgctttttcagattttctgatagtgtcgcccagatcttgacacaactgactaccaaggacggcaagatccatcagggggtccctacatcctcctacctggccaacctgagcctatggcgacacgagcagcacttcgtgaacgacttaaagaaaaagggatttgtatacagtcgttacgttgacgatatgactataagttcctccaacgtgatatctagggaagacaagacttgggtgatctcgcacctgattggcatgctgtctgcaaatacactacggataaaaagatccaaacatgcagtgcttacgtctaataaaccaatgaatatcatgggactgaacatcaatggatcaaagcccacaactcctaaaaaggatagggacattatacgagccacccttcatcggtttgacaagcaccccgcttccttttcagttgaggacctgaggtcgttgcaggggaagattattaatatcaggagaatgcatgtgagcaagggcgagaagttcctgaaacaatttaaagagacgctccataagaatcacatcaccatttga

SEQ ID NO: 11020 - RNA, 942 nt, synthetic construct
  source 1..942: mol_type = other RNA
atgtattttgtggcaaagactgttttgaaagatgatgggacagagcggaccctgtacgacacacgccagcccctgaaaacagtcctgcaccgtatcaacgcccacttcctcagacaggtcgtttaccccgaatacttaaccggaggggtgcccggcaaggattacacggactcagtgaaaattcacgtcggagcccggaccgtggtgaaggaggacatctccaagttctatccatccgtgtcctttgatgtagtacgtgacatatggggaagattctttgggtttgcggatgaggtagccgaactgctggcaatgctcactactagggatggccatctggaacagggcgcacctacctcaggctatctcgccaatctggcactttgggatgttgaatctaaactaatcacgaagcttgacagcatcggcgtgactagatacagccgccatgtcgacgacattaccctgagttccgccgagcatctgtcgtcccagcgaattgactgggttgtgagggccgtaagcgccgctctcgctacaaaaggactactggtgcacaccggcaaacacgaggtcatgcaggccgatggtcaaatcaagattctcaagttggtggggaacgcgaagcctagtctgcctccgaaggaacggagtagggttagggctctggtgcacaatttctgccaaagagtggatgcaggaggtagccaggaggagctggagcagctgcttccacgagtgagaggtcaggcttataaagtcaaacgcttccatctccgctcaggcggccagttggtcgaaagggtggcccaagctgcttctttattggaagaccggaggagcaagtctcctccccggatctctcacatagggtcacaccttgacgacagcgattggctcagtgagcatccaccggttgggggagcgccatgggagttatga

SEQ ID NO: 11021 - RNA, 1047 nt, synthetic construct
  source 1..1047: mol_type = other RNA
atgaacgcacctaggtaccgccaccacagggtccagtcaattgagtctctgcgccatcctcttgggatgggaccctccgagttactcgccctagcaaaacgcgccagccacctgtaccgtatagccaaaaccgttcctaaggacgatggaacgctacgcgtgctgtatgacacgcgtgagccgctcaaagctgtgttgggcaggattaacgaacacttcttacgacgagttatttatcccgattacctgacaggtggtgtgcctaggaaggactataccgacagcgtgaagatccacgttggcgccaagagcgtcataaaggaggatatctcaaaattttacccatccgtgagcttcgacgttgtacgcgagatctggagcggatttttcgggttcgccgacgaggtgagcgatctgcttacaatgctcacaactagagacgggtacctcgaacagggcgctcccaccagtggatacctcgccaatttggccctgtgggatattgagtcccagcttatcgcccagattgcatctgcaggagccactaggtattcaagacatgttgatgacataaccatctcctcgccggaacacctgtctactagtagagtcgattggatcgtacgtatggtggctggcgcactggcaagtaaaggtttgagggtgaacgcgtcaaagcacgaagtaatgcaggccggcggtcagatcaagattcttaaactggtcggcaatgctaaaccatctctgcccccaaaggagcgaagtcgggtgagagctctggtgcatactttttgcttgcgggtggagtctggggaatccccagaagagctggccttactcttgccgcgggtgagagggcaggctcataaggtgaagcggttccatcggagagctggcgagcggctcgtcgagcaagtcaatcaagcggctcaactgcttaagaaccagaccgcggaagctcagcccgtaaaacagcccacacccaatctggtctttgatgaagccatcgcagggcagcaacctcctgaatccgacccaccatggtga

SEQ ID NO: 11022 - RNA, 972 nt, synthetic construct
  source 1..972: mol_type = other RNA
atgaacgaggccaaataccttcgtcgcagggtgcggtccatagaggcgcttcgccatcctttgggcatgggtccacgggacctgcagcgtttggcactccgggcttcctctctatactttgtcgcaactacaatgcccaaagcagacggcacactgagagtcctatacgacaccaggaagcctttgaaatccgtactgcaacggataaacgaacatttcttaaggaaggtcgtgtacccgccctatctgacaggaggcgtgccaggcaaggactatactgattcagtgaaaatccacgcgggagctaagacggttattactgaggatattagcaaattctaccccagcgtggggctggaggttgtgcgaaacatttggagtgggctcttcggtttttcagacgaggtagccgacttactcgccgctcttacgactcgggatggacatttggagcaaggggcccccacctcgggctatcttgccaatctggccctgtgggatgtggaacccgccctcatcaaccgactgaccgctatgggagtaagcagatacagccgtcacgttgatgacatcaccctaagctctcttgaaccactcggaacttctcgcgtggactgggtggtccgaaccgtcacccgcaccttggctagtaaggggttacagatccaccctggcaagcaccaggtgatggatgcaggcgagcagatcaaagtgctgaaactggtggggaatattaaggcgtctctcacaccggaggaaagatcaagggtaagggccctggtgcacaattattgcaagcgcgttgagagtggtgatgggctggaagagctcagagctctgctcccatccattagaggccaagcacacaaggttaaacggtttcatcctagggtgggagcccgcctggttgctgaagtcgaacaggcagcccagcagctgcagcatagaatggtcacatggatcaagtcctga

SEQ ID NO: 11023 - RNA, 1059 nt, synthetic construct
  source 1..1059: mol_type = other RNA
atgactgcgccgcgctatcctcatgaccgaatccagagtatcggctcactcagacatccgttgggaatggacgcacgggagttgactgcccttgccaaacgtgcctccaggttgtattttgtggccaaaaccattcccaaaaacgacggcacacaaagagtgctatacgataccgccaagcctctgaagccagtcctgcaacgtatcaatgacaacttcctgagacgagtgatctacccacactacttgacgggtggggtccccgggaaggactatactgattccgtcaagatacacatcggggctaagagcgtgattaaggaggacatttcaaaattctacccctccgtcacctttgatgtggtgtgcgacatatggagtggcttctttggtttctcccatgaagttgccgacctgcttgcactgctcacaacaagagatgggcatctggagcagggcgcccctacatcagggtaccttgccaatctggccctgtgggatgtggagagctcgctgattgcgaaactggcttcaatcggggtgacccggtatagtcggcacgtcgatgacatcaccctctctagccaggaacacctcagcgctgcgagggtggattgggtggtgaggactgtagccgcagcactcgctagaaaaggcctgttagttcatgcgggaaaacacgaggtcatgcacgctggcggacagatcgaagtgctgaagctcataggaaatacgaaaccatctttaccacccaaggagcgctctcgggttagggcattggtaaataacttttgtcggcgggtcgaatctggagactccgttgaagagcttcaaagcctcttacctagaataaggggtcaggcctataaggtgaagcgctttcaccgaaggaaaggagagcaactaattgagcagattgatcgcgtggctaagattctgcgcgcaagggctggcgaagctcagccaaacatcgataagctgcagagagacatggtagattcttactccgccaacgaaagcttcggccgccagagtgcagttgtagaccctccctggtga

SEQ ID NO: 11024 - RNA, 909 nt, synthetic construct
  source 1..909: mol_type = other RNA
atggaaccgaacgagctgctaaggttggcaaagagagcaagtcggatgtatttcgtggccaaaacagtccctaaggatgacggcacccagcgcattctttacgacactcgcaaaccactgaagacagttctgcatcggataaatgagcactttctgcgccgtgtcatctatcctgactaccttacgggtggggtgccgggtaaggactatactgactcggtgaagatccacgttcacgccgagtcagtgatcaaagaggacatttcaaagttctatcccagtgtctcctttgatgtggtatacgatatctggtcttctttctttagtttctcaaacgaagtggctgaattactcactatgctgaccaccagagacggccatctggaacagggggcacccacatccggctaccttgccaacctggccctctgggacattgaggctccattggtggctaagctcgcctctattggagtgaccagatactctagacatgttgatgatatcacactgtccagtcccgatcaccttagcgccagccgggttgactgggtggtacgcactgtagcaaccgccctcgcaagcaaaagcttactcgttcatcccggcaaacacgaagtcatgcacgccggccgtagggctatcgaggtcctgaagttggtgggaaatacgaaaccaagcctgccatctaaggagcgatccagggtacgggcgctcgtgcataccttctgtcggagggtcgaagctggggatagcggggaggaactggagagattactccctcgagtgcgaggtcaggcctacaaagtgaagaggtttcaccagaggataggagagcagttggtcctgcaagtggaccaagcggctaaactactgcgcgattccccttcagatgttggatccagatga

SEQ ID NO: 11025 - RNA, 933 nt, synthetic construct
  source 1..933: mol_type = other RNA
atgtactttgtggcaaaacgtatacctaaggaagacgggaccatccgcgtgctgtttgacacccggcagccgttaaaggccgtcctacagcgcattaattcccaatttctccgtaaagtgcattatcccccatatctgactggaggcgtgcctggaaaagactacgtgtcttcaaccagacttcacgcgcacgcgactctggttattaaagaggatataaggacgttcttcccatctgtccacgctgatgtcgtgctggatatttgggagagattcttcggtttttcgaccgacgtggcccaactcctcacattgctgacgacccgggacggacacctcgaacagggagcacccacaagcggctatctggccaatcttgccctctgggatgttgaggcccgcgtggtatcccagttagctcgcgagtgcgagttgactggctactcaagacacgtagatgatatttgcgtcagcagccctacccctatctctgcctcccaaaaagctcgcgcggtcagtttaattttcggcatgcttgcaagcaagaacctggccccgaaaagagccaagcacattacaatgcatggcggtcagcaaatccggatccttaagctggttgctaaccggaagccatctctgtcagccatagaacagtccaggatccgggcagcagtgcaccagttctgtcgaagggctgcaaacttgggggacccaacctcactcagagctgaactgcccaagatcagggggctggcccatcatctgaagcgatttcatcccaggaagggtgccgtgatgttggctgccatcgatacagttgcccgagctctaaactccacagacgtcgcacagagtgacgtggcacctactgtgagcacttttagcgggccagtagctacaaatgcccccgacagtcaggcgccctgggattga

SEQ ID NO: 11026 - RNA, 957 nt, synthetic construct
  source 1..957: mol_type = other RNA
atgtcctctgccagctatccgcacgcccgcattcagtcagtcgagtcactaagacacccgttaggcatggggccagtggggctgagacggcttgccaaacgcgcaagtgacatgtattttgtagctcatcgtatccctaaggacgacggatctgagcggattgtctacgacaccagggagcctctcaaatccgttctaagaagaattaatcaacacatcctccgcagggtggtgtatcccgattacctgactggtggtgtcccagggaaggactacaaaagcaacgtggagatacatgtgggcgctgcaacagttgttaaagaagacattagctcgttctttccctccgtgtccgaggtgttggtattcgacatctggcaccgatttttcggatttagtacagatgtggctgaggttctgacagcgctcaccactcgagatggccacctcgaacagggtgctccaacatccggctacctggccaacttagcgttatgggacgtggagcctaatctcgtgcacaggctggccgaagagggcttcaccgcatactcaaggcacgttgatgatatcgttttgagttcaaatgaggaacttgagggaggggagatcgcatgggctgtgtctcagatctatggtactctgcggaagaaggggctgcaggccaaaagggccaagcatgaagtgatgcgactgaataggccaattgtgatcttgaagcttattggaaacgaaaaggcttctttgcccgcaagagagagaagtcgtgtacgggcagtcgtacatcggttttgcaccaacatagaaagcggcgtcgatatagcgctgctggaagccgatcttcccagcgtgcgcggccttgtccacaaggtcaagcgcttccatcctacggagggaaacaaactggtggcccaggtggaacaggccgtccaactcatgcgggctagcaatgggtga

SEQ ID NO: 11027 - RNA, 1023 nt, synthetic construct
  source 1..1023: mol_type = other RNA
atggtgggtaacgatccgctggtcccaagatacccacacaggcccatagggagcattgacgccctggccagacatttgggggtttcccgccgcgaacttgaacggctcactcgcgcggctccaaggctttaccgggcaaaccccctgcctaagaagggcggaggctttcgctggacctacgacgctagaccccctctcaaacgtctccacgcagccatcaaagagaaacttctccagcccgtggagtatccaagctatctccaaggatcaattcgcgatccagacacacctagggagcccctcaccaatgcggacttgcatgcgggcaactacctgttcattcaggaagacgtagctggttttttcgggtccatcgggccttcagtcgtaaatgatatgtggaggcgttttttcgccttccctgctgatgtcagcgagatcctgacgaacttgactacactgaaagggctggttcctgaaggagctcgcccgagctcctacatcgcaaatctggcattgtgggacgtggaacctcagctagttagggagctgcagggcagagggttcgtgtattccaggtatgtcgatgacgtcgtgatcagtgccccgcggaacttatctcacgaggaaaagacagaggtggtgggacgactgtatggcatgtttgctgccaaggggctgcgggccaagaggcaaaagcatagcatagcaaagaagggccaggccgccggaaaaggtagaggggtgaccgtgaccggatacagcgttgcaggtggacgagcggctgtgtctaaggctgagcgaaatcgcgtacggtctgcagtgcgacagatcgaagttgaggcacgaacacggggcacttcacccgagctgcaagccagattccagtcggccagttctcgggtggacagaattgcccgtgccggatcagctcagggcgtcagattaagacagaggctagccgaacttaaaccctccgtctttccaaaaagtaatcggagggatatttacggtggcggctga

SEQ ID NO: 11028 - RNA, 948 nt, synthetic construct
  source 1..948: mol_type = other RNA
atgcgtgcgcattatcccaaacagccgatcggctcgatcagcgctctgagcagagcccttgatgttgaggaggacctgctcacccatataggggctaatgtgagtaccttctataggccaggtccccctcagcccaagaaggatggtacattgcggattacccacaatgccgccccagagttgaaaggcatccacagaaaaatcaacaaaagactcctccaggaggtgcagtaccctgactacctgcatggatcaattcgcgtgatcaatgaccccagatcaattaagacaaacgccgctctgcataccaatcagaaaactatactgtgtgaagatgtcgctggcttctttgatgccactactccggctctggttcggaaagtctggcagcacctgttttgtttcccacctacggtggcagaactgctgacaaaactctgcacccacgacgggttcttgcctcaagggtggcgatgctcttcttatctcgctaacctggttctctgggaggacgaagaccggcttgtacgtaatctgaggtgtcgcggctttacatactcccgctacgtcgatgatatgactatatctgcacctcgctttctgtccagagccgacaagagttgggtcgtgcagtcattaatttcaacactagctaggaatggctaccgcttaaagagaggaaagcatgagattcttaaggccgcgggaacgatgaaggtgaacggacagatcgtgaacggtaagcggccaaccctttctactaaatataggaacaatgtccggtggaacgtatacgcactacaaaagatgcacgccctggacgcctcctccgaggagtatcgaagccgatgggaaagctgcagtggcaaggcaatcagggtggcaagctaccacgaaaggaccgggcaaaaattgctcgatcagttatccgccattgcgccccaatga

SEQ ID NO: 11029 - RNA, 1008 nt, synthetic construct
  source 1..1008: mol_type = other RNA
atgaaatccctccagaacaaaccctgctacaagaacgctcccataaaaaatgttggtgccctggcccgcactctacggctgactgaacctcagctgatccagctggccagaaacgcatcccatatgtatcgtcgtgtgccagtccccaagaaagatggcacgaccaggcatacttgggacgcccagaagcagttaaaagaagtgcatggcatcattaatagtcgaattttccatcgcactacatttcctctgttcctgcagggaggaattcacgacccactctacccgcgcgactatgttcgaaacgcggacattcacgtggaccccagcatactggtgacactggatatcgctgatttcttccccagcaccagtgatagtgctgtgatggggatttggtccgactttttcaggtttccaccagccgtggccaagctgttaactatgctgaccaccaaagacggatttctccctcaaggcgcacgcacgtcatcctaccttgcaaacctcgcgttctttagatcagagcacgacctcgtcgcctgtcttgagcgtcaagggtggagatattctcgcttggtcgacgacattacaatctccaagcaacggagagcctctgatgatgaattgacccaggtgaatacaaccctgttcgcttttgttaatcggcacgggtactcagtaaagaggagtaagcacgatgtacaacggcgcaatgctcggatgagcgtgaacggtctagtagtgaataagaaggtgtcgcttcctaaatctcagaggagaagcatagcgtctgtgctgcacaggacaaacgctgcaatcgatgttggggaaggccataccatgcccgtcaaccgagttagaggccaggtcgcaatggtcaaaaggatgcaccctgagttgggagagaagatgttagctcggcttaagcagagcatctcagcagccgagagcaggccggccatcgaactcaatgactgcgagacagtgccattggatgagagatga

SEQ ID NO: 11030 - RNA, 960 nt, synthetic construct
  source 1..960: mol_type = other RNA
atgaccgaaccccagttgcttcagctcgctaggaacgcctccaggatgtatcgtaaggttccggtcccgaaaaaagacgggagtacaagatacacctgggacgcccagaaacagctaaaggaggtgcatggacatatcaatagccggatattccatcggactatgttccccctgtttttacagggcggaattagagatcgcctacaccctcgagactatgttcgtaacgccgaaatccacgtagatcctacaatcctggtgacgcttgatattgccgatttttttcccagcacatctgactccgcagtaatggacatctggtctaagttctttaggttcagccctgctgtagccaagctgctgaccatgctgaccactaaggacggatttttacctcaaggcgcgcggacttcttcatatctcgcgaatctggtgttcttctccgacgagcacgacctggttgcacgccttgaacgccagggatggaggtactctcggctcgtcgatgatattactatcagcaagcagcagcgagtcaattcggacgaggtgaccgagacaaaccgaatgctgttcgcttttgtgaatagacacggctactcagttaagcggccaaagcacgatgtgcaaaggagcaatgcccgtacgtccgtgaacggcctcgtcgtcaacaaaaaagtgtcactgcccaagcctcagaggcgctctatttcaagcttgctgcaccgaaccaacctggctatttcgataggggaagagtccactatgcccgtgagcagagtgagaggtcaagcagctatggtgaaaagaatgcatccagagctcggggaaaagatgttggagcgcttgaagcagagtcttagtgtgggtgcacggcggccagccgttatgcctgatgaccaggaggtcagtccacccatccgcagacaaacaaaaaggaaaaattccccaggcacctga

SEQ ID NO: 11031 - RNA, 1017 nt, synthetic construct
  source 1..1017: mol_type = other RNA
atgaagtcaccactgaataagcctttttataagaacgccccaatcaagagcgttggcgccctcgctcagactttgcagttaaccgagaggcaactccttcagctggcacggaatgcctcccggatgtatagaaaagtgcccatcccaaaaaaagacggaaccacaaggtatacctgggatgctcagaaacagctgaaggaagtccatggtctgatcaatagtaggatatttcaccgcacaacgtttccgctgttcctgcaggggggcattcgggatcagctctacccacgcgattacgtcagaaatgcggatatacacgtcgacgccacaactctcgtcacactggacattgcagacttcttccctagcactagcgattcagctgtaatggatatctggagtactttttttcggtttccccctgtagtggccgcactgttaacaatgctaaccaccaaagatgggttcctgccccaaggtgcaaagaccagctcctatttggcgaatctagctttctttcgggacgaacatgacttagtgacgaggcttcagaaacagggatggcgatactcccggctggtggacgacataactatttctaaccagcgtagagtatcaaacgacgaggtggctgccgtgaaccgtacactgttcgctttcgttaatcgtcatggctactcggtgaagaggccgaagcacgacatccagcgctgcgatgccagaatgagcgttaacaaccttgtggtcaacaaaaaggtgagtctccctaagtctcagagacgatcaatcgcatccttgttgcaccgaacctccgaagccattttcgtcggagaagaatgtgctattcctattaacaaggtgcgcgggcaaattgccatggtgaaaagaatgcaccccgagctgggcgagaagatgctcgccaggctgaaacaaagtatctctgcggttgagaatcgccccactatcgtgctcgatgaccaggaggcagttagctctacctctgatgcccaactttga

SEQ ID NO: 11032 - RNA, 972 nt, synthetic construct
  source 1..972: mol_type = other RNA
atgtctagtcgtccaaacaagccttcctacaattttgcacccattaaagatgtaaggaccctagctctggcacttgggctcgcggaacgccagctaaatcgcctggctgtaaatgccgggaatatgtaccggagaaagcctatcgcgaaaaaagatggaacggaaagagtgacctgggacgcccacaaacagttaaaagaggtgcaagggagaattaaccagctcttctttcacaaagtcttatttcccctttacctgcaaggttccatccgcgacaaggcctaccctcgagattacgtgcgaaacgcagaaatacatgctggagcctgtgtggccgtcactctggacatcgccgacttcttcccctctaccagggcggagttagtgcaggacatatggagagactttttcaggttcgctcccccggtagctgaagtgctcacacggcttaccactaaggatggcttcctgcctcagggtgccaggacgtcatcctatcttgcaaatctggtcttttggcaacgtgagcattgcctcgttgagacactggagaagcggggctggcgatattcaagactggttgatgacatcaccattagtaaagcaaccgatacatcgcaggccgagctgactgacatcaaccgtattgccattggttgctttcaaggatatggctatagcgttaaaaggtctaagcacaaagtgttgaggcggaaccaccgcattactgtcaacagcctcgtggtgaatgtccatccagctctgcccaaggacgaacgccggaggataggagcccaggttcatcaggtgaaggaggcactgacaagtgggacacaggctgatgtgcctagcgtggcaagcactcgcggcaagatcgctaaggtcgttagattgcacccagagctcggctctagattgtcagataagctgcggcaggccatcccattggacaccgaaggctccccggagtga

SEQ ID NO: 11033 - RNA, 978 nt, synthetic construct
  source 1..978: mol_type = other RNA
atgtccagacccaatcggccgctgtataaaggggatgagatcgcgtcctctgacgccctggcagaagtgcttggtttaacatcaccacagctccatcagctggcggcaaacgctagtaagatgtatagggaaaatccccagcgaaaaaaggacgggtctttacgcatgacctgggacgctcatcctcaactcaagaaggcacagaagcagattaatcttcggatctttggccgcatattatttcccttgtacctgcagggatctattcgggatagggcataccccagggactacgcgagaaacgccaatattcacagcggcgcagccgttacaatcgccattgacatccaagactttttcccatccataaccccagaccaggtcctgtcagcctggctcggagtgtgtcacttcccatggcaggtagcagagctactcacacgcctgacgaccaaagattctttcctcccgcagggcgctccaacgagtagctacctggctaacctggtcctctgggagaacgagcacgaactggtgagaactttgcagactaggggatggcactattcgcgcctgaccgatgacatcaccctgtcaaagaaagctcctgttgaaaaggatgagattacacggaccacctgcacagctattggtttcatccaaagaaacggttttactgtcaagcgttccaaattgaaggtgatgaaacgaaacgtccctatgactgtgaacaatctggttatcaatgaacatcctgccctacctaaggctgaacgcagacaaatacgagcccagcttcatcaggcgaaacttgctctggccagcggagcacttgtggacgcccaagccatcaatagcgcccgtgggaaggtgggcaaagtagtgcggttccacccccagttgggggccaagatgaaaggcgagttggatcaggagctggatagttggactgtcaggcagctcaacgatgagggctga

SEQ ID NO: 11034 - RNA, 1065 nt, synthetic construct
  source 1..1065: mol_type = other RNA
atgcatccgaatttactgaagcctttctactcgcacgggcccattcagaacctggatacgctggccgaagttcttgagatctcctgtaagcagctatgcagactggctagaaaagcaaaccagatgtaccgcctggtcccacagcagaagaaggatggctctgtccgtaagacatatgacgcggatcacgctctcaaacgagttcaacacctgatcaagacacggattctttccaaggtccgctacccgctctaccttcagggcggcatccgcgatcccgagaatccacgagactacgctcgcaatgcggcaatccatgcaggacaggcatgcgtaataaatgaagacatagccgatttctaccccagtaccacaagccaccaggtgcgcgacatttggaaacatttctttaggttccccgctggagtggccgactgcttaactcgcctcaccactagaagggggttcctgcctcagggggcgaaaaccagcagctatctcgctaacctagtgttttggaggaccgagtatgagttggtgagacacttggctgcaaagggcctgcggtatagtaggctggccgacgatatcactgggtcatccagcaaaccactgacaaggggtcagaagtccgaagtcatatcagccgtgtattctttcatcaaacgcgatggattttcaccaaagtatcggaagcacgctatctttgagcggaacgaggctatgctggtaaacaacctcgtggtgaatgcccaccctgccctgcctgttagagaaagacaagccgtgcggtgtttagtacacagggcctctaatacgttgaacgccggcaacggtactgtgtctaatgtgcccctggctcatattaagggtaaaattggaaaggtcaaacgttttcatgccagagccggacggagactcgcagctacccttcaagcggccctcaccagcgttcaaaaattggacggctccggcgcacaccatcgaggtagggtggaccgagatcatcgtaatgcccggaggtacgacggacatctgcacgcccctgcaccagcagggagttga

SEQ ID NO: 11035 - RNA, 960 nt, synthetic construct
  source 1..960: mol_type = other RNA
atgaaccgtctgtgctttagaggccgtcccatcgcatccatcgaggcgctggcatctaccttacacgttagcccaaggtatctgtggtgggtgatagaacgaactgatagactttacaggccaatgaaacctatcataaagccagacggctcagttaggcaaacctacaaccccgcagcccctctcaaagatgtgcagcgaagaatcaatcgcaacattttctcacgggtcgaatttcctatctacttgcagggtgggattcgagatcgcaagacaccgagacattgtgtcgcaaacgcccagctgcatacgaatgcggcgattgtgattaacgaggacatagccggattctttccctccatctctcggcagcaggtgcaggatgtttggcagcattttttcagatttccccttgcaattgctgaaaccttgactgccctcactacatacaatggtgccttgccccaaggtgcccctaccagctcttacctggccaacctggtgctctggaggcaagagccggagctggtcaccaatctggccgccagaggaatccgttattcgaggtacgtcgacgacattacgttaagtagcaagcgcttcctcaacaaccacctcaaggcagatgccgtgaggcaagtacggcgcctatgcaatggcaatgggttccgcatgaaggggcggaaggagcggatcgaaacctccggaaagccaatgagagttaacaatcttcagattaaccacggggtaacactccctaaaaaagagcgagctcggataagagctgctgtccgggtgtgtgaagtgtatcccgctgagtcacgcgacagtagcgagtatcagaaactgctgaattccactctgggcagggtgagcaggttgcgccagcttcacccaaaagaaggcgctgacctgatgcgacggctaacaatcatgaggggagcttctagaagtaagtga

SEQ ID NO: 11036 - RNA, 960 nt, synthetic construct
  source 1..960: mol_type = other RNA
atgaaccgccctcgattcaagggcaggcccatcggctcgatagaggcactggcgcgcgcactttatgtttccctgcgccagttgcactgggctataggcagggccgatgccctttacaggcccatgaaacctataacaaaaccagacggatctgtgaggcaaacatacaatccagccgctcccttgaaggagattcagcgtagcatcaatagaaacattttcagtagggtgaagtttcctatttatctacagggaggaattcgcgacagaaataacccccgacactgcatcgccaatgctaagctgcactgtggcgccactatcgtgtttaacgaggatatcttttccttctttccatctatcactagaagacaagtccaggacgtttggcagaacctcttccgctttccgccagaaattgccgaagccctgaccatccttaccacctaccaaggaattttgccccagggcgctccaacttcctcctatctggcaaatctagtgctgtggcggcaagaacctgagctggtcacgaacctggctgcccggggtatccgctacagcagatacgtggatgacatcacattatcaagtagaaggttcatctgcaatcatcagaaggcagaagttattcagcaggtgcggcggctgtgcaatggtaacgggttcagaatgaaggggtgtaaggagaggatcgagactagcgggaagcctatgtgtgtcaacaacctccagataaatcacggggtaaccctccccaagaaagaacgggcacgtattcgggccgcggtacgagcttgcgaagtgtaccatagtgagtcacgcgattcaagcgagtatcagaaactgctgaactctacgctcggccgtgtctctcgattacggcagcttcatccgaaagagggtaccgacttgatgaggcggctcacaattatgaccgaagtatccagaagcaaatga

SEQ ID NO: 11037 - RNA, 948 nt, synthetic construct
  source 1..948: mol_type = other RNA
atgaaccagccctgctttaaggataagcctatcgcatccactgctgccctggccagagccctgcatatcccacacaggcatctgacttgggcgacaaaccgagctgaccggctttaccgcgcattgcaacctatggtcaagcccgacggttcaattaggcaggtattcaacccggctcgacctttgaaggatattcagaggcgtattaacaggcacatatttggcagggtggacttccccttctatctgcagggcggcatacgtgatagaaagaatccacgccactgtctcgcaaacgcgaaactccactctgatgccaaaatagtcattaacgaggacatcagcggatttttcccgtctatcactaaaagacaggtccaaaatatttggcagcattttttccggttccctcccgatattgcgatcattctcaccaagttaaccatccacgacggacaacttccccagggcgctcctacaagctcctaccttgccaacctagcactgtgggaacacgagccacccacagtggaggcactgttcatcaaagggatccggtatagccgctatatagacgacatcaccctgtcaagtacatattttcagaacgaccacagtaaaacggctatgattagaaaggtgcggagcatgtgcaatcgcaataaatacgaggttaaaaggtccaaacatcgtattgaatcgtcaggacagccaatgcgaatcaataatctccagatcaataacgggatttctctgccaaagagggagagagcctgtatccgggctgccgtgcattcctgtgaaaagcacatcgaggaagagcgcaccgccaacgaataccacgtgttgtttaatagtaccgttggtcgcgtgaatcatctccggcaattccatagacacgaggggaagcgactactgaagagactggatgcctgcgcccctttatga

SEQ ID NO: 11038 - RNA, 909 nt, synthetic construct
  source 1..909: mol_type = other RNA
atggaaaatgcggccgatagcctgtaccgtcccgtcatggtgaagaaaaaagacggcacacggcgcgagtgctttgacgcaaagccccctctgaaggccatgcaagcacggatccaaaacatgatcatgaagaaagtcatatacccaggctacctcaccggtggattggccgacccaaaaacgccccgagattatgtgcgcaatgccgaagcccacaccggggcaagactcatggtgaacgaggacgtggccaagttctttccttccactacccatgaggtggtctacgatatctggagattcgtattcagattcccaaaggaggttgcgaggacactgactaggttaacaactaggtgtggggaactgccgcagggtgctaaaacttcctcctatctcgcaaacttagtcttttgggctcacgaacctagactagtgcagtggctgcacaatgccgggtttagatacacacggtacatagacgatatcaccctcagctccactgccgataagaccagggaggagcttggacaggccattgggcgggtggctagtatgcttaggcgacatggtctgcgcttcaaacgctctaaacatcacattgcctatgccggagaacgaatggaggtgacgggcctcaccgttggcgagaggagcgttggcctgtcacgtaagcgtaagtctatgattagggcgagtgtgcgccagtgcgaatgggcagcaaaaaaaggaatctttgacgatgcgatgcagaagtctgctgcttcactggtcgggcagtatacacggcttcacagaaacaagggaaaagctctaaagcgccgattggcagccttggaagtaagcagaaagctgccagctattgagcccgtggtatcggctgttggcatcgagcctacaacccggtga

SEQ ID NO: 11039 - RNA, 1122 nt, synthetic construct
  source 1..1122: mol_type = other RNA
atggacgccccaatatacccctttaagcccatacatagcattcgcgccctcgccttggccttaggggagtcagaacaattgctagaacggctcgccacccgcgctgatcaaatgtataggcatgtcccccaggaaaaaaaagtgaaaccgggtaagccaccggagatgagagatacatatgacgcacacgaaccactcaagagggttcagcggaaattggttgatcggattctgtccaaggcaacgttccctccttatctccacggcggcatcaaggaccgcaagagtcccagatcaatccacagcaacgcagcagtccatgccggagctaggttcgtgattcttcaggacatcaggaatttttacccttctatccttaagcggcacgtcgatgctctgttccgcggtctgtttgggttcggggcttccgtagctgccctcctgtccagtatttgtacccgagagggatcaactcctcagggagcctctacctcgggctatatcgcaaacctggtgttctgggacgtagagccaaaaattgtgaaaggcctactgggacgtgggtttcagtacactcgatttgcggatgacatcacaatttcctgcgggcgaaagccatcctctgacgaacttacgaacatcgtgtccactatcaccggcatgcttgcggctaaaggatgccaccagaagcggactaagctccacttacgcgtgagaggccagggcataaaagccgatggcgctatctttcagcctgtcacagtgaccggactgagcgtgttcaattctagtcccggactgaccaagctggagcggcgtagaataagatctgcagtgagggaattcgaggttatgagtgagtcaaccaacaattggagcgacctggaaagcacttatcatagagctatgggccgcgtcgggaggttattggcctgtgggcatcccgacggtgccatgctgaaagagaggctgaacctcgttatgagatcataccaggcccctctgctggagcgttaccaacaagcgattgtggccaattctaatacagagacaagctccctggctgcaccgccaatccttgagtacagcagtgaacaggatggtcccttgccttggcagtga

SEQ ID NO: 11040 - RNA, 1071 nt, synthetic construct
  source 1..1071: mol_type = other RNA
atggatgctcccacttatcctttcaaacctatccattctctaagggttttagctctggccctcggagagagcgagcaacttctggagcgcttggcagcaagagccgatcgcatgtatcgtcacgttccacaggagaagaaggtgaaaccggggaaacctcctgagactcgtgacacgtatgacgcccatgaacccctgaagagagtgcagcggaagattgtagataggatcctgtgcaacgctaccttcccccagtaccttcacgggggcatacgggatagaaagagtcccagatctattcacagcaacgcagccatacacgcaggcgccaggtttgtcatcctgcaggacattaagaacttctacccatcaatctccattaaacatgttgatgccctctttcgaggtttattcgggtttggcgcaggagtgtccgtcctactgtcaagcatatgcaccagagagggatgtacaccacagggcgcaagcacctccgggtacatcgctaatttggtgttctgggacgttgagcctaaagtggtgaatgacctgctgggccgggggtttcggtacagcaggttcgctgatgacgtaacaattagtagcggtcacgaaccatccagcgatgacctcactaacatcatttctaccatcaccgggatgttggcggcaaagggatgtcaccagaagcgaaccaagctgcacattcgcgtaagaggacaaggcatcgaagccgatgacgccacatttcagcccatcacggtcacaggactctctgtgtttaatagtagtccaggtctgactaagctcgaacggaaacggatacgatcggcggtcagggagcttgaagtgatgtccgagtctacatcggactggactgtgttggaacccaaataccatcgcgctatgggcagagtgggcaggcttctcgcgtgtggccatcctgacggtgaagctctgaaagccaggttaaatgtggctaagcgctcctgccagattccgctgctcgagcgctatcagcaagccatctcagagtcactggccaaagccgttgaagtcgatgtcgagtga

SEQ ID NO: 11041 - RNA, 1125 nt, synthetic construct
  source 1..1125: mol_type = other RNA
atgaaggcacccctgtatccacataagccaattcactctatcagggcccttgccctggcactcggggaatctgaggccttgcttgagcggttggctgcccgtgcagacaggatgtaccggcacgtgcctcaagaaaagaaagtgaagccaggacagcctccagagacgagggatacttacgatgctcatgaacctctcaagagaattcagaggaaattagtcgatcgggtgctgagtaaggcgattttccccacctatctgcatggcggaatcagagactgcaaaagcccgagatccatccactctaatgcagcagtgcacgctggcgccaggtttgttatcctccaggacatacggaacttctacccctcaatttccaaatcacacgtgcatgctatgtttcggggattgttcggatttggggccggcgtcgccgaactgcttagttcgttatgtacccgctcagggtccacccctcaaggggcatccacttctggctacatcgcaaatctggtattctgggatgttgagcctaaggttgtcagcgacctcagcgggaagggtttccagtatagtcgctttgctgatgacattactatatcctgtacaagagaacccgaagcggacgagctgaccggcatcgtatctgccataacaggcatgcttgccagcaagggctgccatcagaagaggtcgaaactgcacgtgcgaatccgcggtcaggctctcaagtcagaagggactactttccaacccatcaccgtcacaggattgtccatctttaacgctagtcccggactgaccaaatccgagagaaaaagaattcgcagcgccgtgcgcgagctggaactaagcagtgagacaacgagcaattgggttgagctggagcctatgtaccaccgggcgatgggtcgagtgggtcgtttgctggcctgcgctcacccagacggcgaaagcctaaaagtccgactcaatcttattaaacgctcttacgaaaagcctctgctcgagaggtatcagcaggagatagtggaacagtccgcgagagagatcaacaacgtgagctgtgcccgtacactgccctcacaaccgaccgagcccgtagattctccaccatgggagtga

SEQ ID NO: 11042 - RNA, 1083 nt, synthetic construct
  source 1..1083: mol_type = other RNA
atgaaaagtctggcactcgctttgggcgaaagcgaacaactactggaacgtctggccgccagagcagaccgcatgtatcgccacgtaccccagcaaaagaaagtgaagcccggaatgcctccagagactcgtgacacgtacgatgctcatgagcctctgaagcgtgtgcagaggaagttggtggaccggcttctgtccaaggccgtgttcccggcatacctgcatggcggtatcaaagaccgacagtcacctcggagtattcactcgaacgccgctgttcacgccggctcaaagtacctcgtcctgcaagacattcagaatttttacccctccatttcaatgcaacaggtggatgcgctcttccgccagttgtttggtttctccacaccagtggccacactgctgtcctccatctgcaccagggaaggaagcaccccgcagggtgcctcgacatctggatacatcgcgaacctgctgttctgggatgtagaacctaagatagtcgaagatttaatggggaggggttttcagtatagccgctttgcagatgatataaccgtgtcttgcagacacgagccaagcagcgatgaactatccgatatcgttagtacaatcactgggatgctggcaagtaaggggtgtcggcagaaacgggccaaactgcacatccgagtgagaggccaggggattaaagctgacgatgctacgttccagcccgttactgtcaccggcttgagcgtgtttaacccaactcctggactcaccaagagcgagaggaagtgcattcggtctgctgtgagagagctggaattgatgtctgaggccggctctcgatggttagacctggagcccgtctataatcgcgcaatggggcgcgtcggaaggctcatcgcttgtggccatccagacggcaaggccttcaaaggacggcttaatgcggtcaaactctcacatcaaaccccccttcttgacaggtatcagctcgcagctacaggagtagcggagtccgccactcctcctgttggggtgggccttagagagccatactctgccgagagagacgggcccttaccgtgggactga

SEQ ID NO: 11043 - RNA, 1047 nt, synthetic construct
  source 1..1047: mol_type = other RNA
atggaagccccaatctacccatttcgccctatccatagcacccaggctttagctctggccttgggggagtcagaacatcttcttgaacgactggcggtgcgtgccgacaggatgtaccggcacgtgccccagaagaaaaaaggtagaccaggcgagactagagacacgtacgacgcacatgagccgttgaagcgcgtccaaagaaagctggtcgatcgggtcttaagtaaggctatatttcctgcatacctgcacggggggatcagagatctgaagagcccgcgctcaattcactctaatgctgcggtccacgccggagctcgcttcgttattctgcaggacatcaggaacttctatccctcaatatctaagattcaagtggacgcgctttttaggggcttgtttggcttcggagcctccgtggctgccctactgtcctctatctgtactcgtgatagctgcgtgccacagggagccagttcaagtggttatatcgctaatctcgtgttttgggatgtggagcctaaagtggtgaaagacctccaggaccgcggattccagtactccaggtttgctgacgacattaccattagctctggccaggaaccttcgacagaggagatttccactatagtaagtacaatcacaggcatgttggcatcaaagggctgtcgccaaaaacgaaccaagttgcatatgcggattcggggacaggggatcaagagcaatgatgccaccttccaacctgtaactgtgacgggcctttcggtgttcaactctgcccccggtctgaccaagctcgaacggaaaagaatccgaagtgcagtcagagaactggaactgctgagggagttaacatccgattgggccgatctcgagccaaaataccaccgggcaatggggagggttgggaggctcctagcatgcggccaccccgatggagtagccctgaaatccagactgaacgttgttaaacgaagctatcagaagtctctcctcgagcgttatcagcagagcgagaacgcaagccccaattccgactcctga

SEQ ID NO: 11044 - RNA, 1047 nt, synthetic construct
  source 1..1047: mol_type = other RNA
atggaggcaccgatttatccatttaagccaatttactcggctcagtcacttgctctggctctgggcgagtccgaacacctactggaacgattggccgtacgtgctgataggatgtacaggcatgttcctcagaagaagaaaggcaagcctggggagacaagggacacatatgacgcctacgagcctctcaagagagtgcagaggaaactcgttgatagagtgctatccaaagcgatctttcccgcctatttgcacggagggatcagagacttaaagagcccacgctcgatccatagcaatgcagccgtccacgccggagctcggtttgtgatcctgcaggacatccgaaacttctacccctctattagtaagattcaggtcgatactctcttcagaggccttttcggatttgcagccggcgtgtctgccttgttggcgtccatttgtacccgtggggaatcaacaccccagggagctagcactagtggctacatcgccaatctcatcttttgggacgtggagccgaaaattgtcaaatccctgaccgatcgggggttccagtactcccgcttcgccgatgacatcaccataagctgcataagagagccatctagtgaggaactgagtgacattgtgagcaccattaccggcatgttagcatctaagggttgccaccagaagcggtctaaactgcacatgcgcgtacggggccaagggatacgtgccgatgacgcaacgttcctgcccgttaccgtgactggtctgtccgtctttaacggcactccatcactcacgaagctggaaaggaaacgaatcagatctgcggtgaaggagcttgaggtgatctcaggaagcatgcctgagtgggctgcgctcgaacctatgtatcatcgggccatgggtagggttggccgcctccttgcatgtggacatcccgatggggaagcactgaaagcccgcctgaacgtcataaaacggagctaccaaacacccttactggagcgctatcaacagacacttaacgctgaatatgagggtctgaattga

SEQ ID NO: 11045 - RNA, 1053 nt, synthetic construct
  source 1..1053: mol_type = other RNA
atggacgctccaacgtatcctttcaagcctattcattctatccaggccttggccctcgcgctggatgaaagcgagagactgttggagaggcttgccattcgcgcagatcgcatgtatcggcacgtgccacaggagaaaaaggggaaacggcgagacacctacgacgcacatgaaccacttaaacgtgtacaacgcaagttggtagatagggtgctgagtaaggccatctttcccgcctacctgcacggcggtataagagacagaaagtcacctcggagtatccactcgaatgcttctgtgcacgctggtgccagatatgtcattctccaagatatacgaaacttctaccccagcatcctgaagtcccaggtcgacgatctgtttagagggctatttggattcggtgcctccgtatcagcactgctctcacttatctgcaccagggatggatgcgctccgcagggagctagcacaagtggctacattgcaaatctgatcttctggaatgtggaaccaaaaattgtccaggacttcttagctcaaggcttccagtacagcaggtttgcagatgacattactatatcctgcagccgcgaacccacctccgaggaactgagcggcatcgtgtctaccgttacaggaatgctggctgccaaggggtgccatcagaaacgcaccaagcttcacatgcgtgtgcggggccagggaattaagggggacgatgccacttttacgccgctcactgtgactggactgtctgtctttaacggcgctcccagcctcacaaaactcgagagaaagcggatccgatccgccgtgaaagagttagaagtgatgtcagagtccacacctgggtgggccgtcttggagccaaagtatcatcgcgcaatgggcagggttgggaggttactagcgtgtggtcatcccgacggagaagccctgaaagcgaggctcaacgttgtcaagcggtcttgtcagatccctctgcacgagagataccaacaggccatcagtgaatgtctggcaaaagctgttgaggtggacgtgggctga

SEQ ID NO: 11046 - RNA, 1011 nt, synthetic construct
  source 1..1011: mol_type = other RNA
atggacgcccccacctatccactgaaaccaatccatagtatacaagccctagccctggctctcggcgagtcagaaagattactcgaaaggctggccgctagagctgatcggatgtacaggcacgtcccacaagagaaaaaggggaagaagcgagatacatatgacgcgcacgaacctctgaaacgcgtccagagaaaactggtggaccggattctgtcgcgcgctatatttcctcgttatctccatggaggtatcagggatataaagactcccagaagcatcttgagtaatgcagcaccacatgcaggagccaagtacgtgattctacaggacatcaagaacttctacccctccattagcgttgatcaggtagaggcccttttccggggactgttcggattcggcgtgcccgtttcagccctgctcagctcaatctgcacgcgcgaaggctctactcctcaaggtgcgagcactagtggctacatcgcaaacttaattttttgggacgttgagcccaaaatcgtcagatccttgctggacgatgggtttcaatactccaggtttgccgacgatataaccatttcctctggccggaaaccttcgtcagatgagctctctttcattgtttctacagtcaccggcatgcttgcatccaaggggtgccaccagaagcgtgcaaagcttcacatgcgggtgcgcggacagggcatcaaagaagacgatcagacatttaagccgttgacggtgaccggtctgtccgtctataatagcgcccccgggcttaccaaactcgagaggaaacgcatcagaagcgctgtgcgcgagttggagattgcgagcgaaagtgtgagagactggaacgtgctggagcctatgtaccaccgtgctatgggtcgggtagggaggttgctggcctgtaggcacccagacggagaggccttaaaggctcgacttaatacactgaagcattctcatcagaagccgctcctggaacgatatcagcaggtgtga

SEQ ID NO: 11047 - RNA, 1113 nt, synthetic construct
  source 1..1113: mol_type = other RNA
atggatgctccaacttatccgtttaagcccatctactcattacgcgcactggcccttgctctgggggaagacgaacgtctgctggagagggtggccgctagagctgacagaatgtacagacacgtacctcaggagaagaaagggacgaaaggcgaaattaggcatacttatgatgcgcatgagccgttaaagagggttcagagaaaggtagtggatcgcatactcgctaaagcaaaatttccactatacctgcatgggggaatccgggatgtttcctcaccacgaagcatcctgagcaatgccatggtccacgccggcgcgaggtacgttgtcctgcaggacattgagaacttcttccccagtatcagcacacaccaggtcttcaggatctatcgggacctttttggttttggggagcctgtgtccatgctgctggccagtattagcacccgggaggggtctacaccccaaggtgcgagcaccagtggctatctagcaaacctgctgttctgggacgtggagcctaaagtggtcaacgaacttttcatacgggactttcgatactctcgattcgctgatgatatcaccatctcctccgagcgcaagcctacccctcaagagttggcagacattatctcaacgattaccgggatgctcgcttcaaagggatgccggcaaaagcgcaagaaactccacgtcagggtgcgcggacagggagtgaaagtggcagaaggcgactatgaagccttgacagtgactggcctgtctgtttttaattccacacccggcctgaccaaactggagcggaagagaattaggagcgctgtgcgggagctcgaaattctggcctcgtctacaccctcatggagcactatagaaccacgctaccatcaggtcatgggtcgtgtgggccgtctgttggcatgtggacaccccgatggtgaggcccttaagatccgattgaactctgtgaagagattatgccaggtgccactgcttgagaggtacagactcggcctatccgatgacaaagacgtcttggaactcgcctgttccagtgcctctggcgttgccccaagtctcggagtaaatgaacccctcccttgggagtga

SEQ ID NO: 11048 - RNA, 1029 nt, synthetic construct
  source 1..1029: mol_type = other RNA
atggagtacccactgtatccacataggcctatacacaatttaaactcattggctttgctgctgggagagcctttaagcctgctcatcaaactggcacgcaattccgacaaattgtaccgcaaggtgccacaagttaagaaagatggcaccacgcgggagacattcgacgccagcgagcctctcaaatccatccagcgcaaggtagttgataggctgctggttaaggtgctcttccctaactaccttcatgggggcatacgtgatattaactccccgcggtctgtgtactctaatgtgaaaacccacgtgggtgctagaagtatcattttgcaggacattaagaacttcttccccagcattaccctcgaacgggtcttttccgttttcaaaggcttaatggggttttctgacgcagtgtccaatgtccttgcccacctggtcactcgatatggagcagtcccccaaggcgccagtactagcagctatatcgcgaacctggtattttgggatgtggagccccggctggtggcttggatcaggaaccagaagatggcctactcaagatttgccgatgacatcacaatatcatcgttcgatatgataagtgacgacctgaagaccgaggtagtgcgaagggtgactgggatgcttgcagcaaaagggtttgcgcagaagaggcagaaactgcatgtgctgaagagaggtcaagctattacaaaggccaaccagagcgaagtcgccgtgatcaccggactatctgtcgccggccctagacccggagtcacgaaggaagaacgcaaaaaaatccgctctgctgtaaaagaattcgagacactggccctcatgaatccagattcagatcgtctcaaggagctctataatagagccatgggtcggattggccgactacttgcatgcgggcagagtgacggattcgcgttgaaacagaggatgaatattgctttcgaaaagactaagaagtccatctttgttaagcacgcttttatcgagaacaccgtgcccgactga

SEQ ID NO: 11049 - RNA, 1032 nt, synthetic construct
  source 1..1032: mol_type = other RNA
atggattctcccctatatccctacaagagcattcacaatattaagtccctggccttactcttgggggaaaccgtgcccttgctgaacaaacttgcagaggactcacataagatgtacaggagggtccctcaggtgaagaaagacgggtccgaaagagagacattcgatgcgcatgagcctctgaaaagcgttcagcgcaagatagtggatcgcctactcgcaaaagtgtcctacccagattatctccacggggggatcagggacagtaactacccccggtcaatatatagtaatgtgaagagtcactctggggctcgcaacttggtcctgcaagacattaaaaactttttcccctccattacaatcgacaaagtgcttagtatcttcaaaggtatgatggggttcggagatgaggttgcggtcatgctgactcgactggtgacaaagggaggcatcgttcctcagggcgcctccaccagctcctacatcgctaatttagtcttttggaacgtggaaccacggcttgtggtgtggatccgagctctgggcatgtcatattctcgcttcgctgacgacatatctatttcgtctaagaacatcattctgccggatcagaagaccgaaatcgtacgtagggtcaccggcatgttggcagccaagggctttttacagaagagacagaagatgcatgtcctcaaaaaaggacagactatcactacggccaaaaaaccggagccagtagtagtgacaggactttcagtcgccggacctagaccaggtgttaccaaggaggagcggaagaagatacgcagcgccgttcgagaatttgagatcttggctgaggctggtgccgatctgattaaactccgggaactctacaatagagccatgggaagggtggggcgtcttctggcctgtggccaaagcgacggtctggcactcaaaaatcggctgaatctggcaatgagacaatgcaacaagcctctgctggaaaagtatgaaaagggcgaggtgggcggcattagcatctga

SEQ ID NO: 11050 - RNA, 1047 nt, synthetic construct
  source 1..1047: mol_type = other RNA
atggacaagcctcgctactcacaaaagcccatttttaacattgagtcgctcgccctgcgcttgggagaatccccaatgctgttaaataatctggctcgaaacagtcaccgactctatcggacagttccccagcagaagaaggacggctcagtgagggaaaccttcgacgcccatcaacccctcaaagccattcagagaaagatcgtggatagaatctttagtggtgtgatcttcccagactaccttcatggcggaatacgtgatgtcaattctccacgatccatttattcaaatgtggcttgtcacgctggggcaagggtcgttctcatgcaggacattaaaaatttcttcccctccattaccgaggataaggttcttggcgtcttcaaaggcgtactgggcttcggagatgatgtaagtagtctgctggtgaagttgactacacgccggggagtagtccctcaaggggcaagcacgtcctcttacctggccaacctggttttttgggatgtggagcctcggttagtcacttgggttaaggccaacaatctcagctactctagatttgcagatgacattaccataagctccaagggagacgtaagagatgaattaaaaaccgatgtgatacgcaaagtgactgggatgctggcgtccaaagggttctatcagaagcggcagaagatgcacgtgcttaaaaaggggcaggtcatcgtgacaaaaggtggtgttgagccgtttgtcatcacaggcctggctgtgtctggacccaacccaggcgtggcaaaattcgaacgtaagaagattagggccgccgtaaaagagtttgaagacttgatcgggagcggtgtgtttgtcagcgacgttgaaaacaagtacaactcagctatgggcagggtgggaaggctaatcgcctgcggccagagcgacgggatcatcctgaaggagagacttaatgctgcacggctcaaagcctctgtcccgctattggagaaatatctggcggcgaacatcatacctgtggtgcaggccaaggtggaggagtga

SEQ ID NO: 11051 - RNA, 1044 nt, synthetic construct
  source 1..1044: mol_type = other RNA
atgacaactgccaggtacactcgtaagcctgtgtacagcctcaaaaccctcggactgatgctcggcgagtccccagagttgctgctgagactgggcgcctcaagcagtggattttatcgggaggtgctacagcaaaaaaaagataagtctgtgcgtgttaccttcgatgccttccagcccctgaagagagtccaacgcaaaattgtcgaccggctgcttattcatgtaagctacccttcctacctgcacgggggaattagggacgtagactcccctcgctcccctctgagcaatgctagagcgcacttaggcgccaaatctatagcgctgcaggatattacgaacttcttccccagtatatctagggacaaggtccggaatattttcacaggattgttcggatttggctctggagtggcagagcttttgtccctgctggtcacgaaggacggcttcgttccccagggcgcttcaacaagctcctatttagccaacttagtgttttgggacgtcgagccgcgcttggtcagctggatacatagtcagaaccttatttatacaaggttcgccgacgatatcacaatctctagtaaggtgctggtgagcgatgaacagtggactgaaatcatatcgaaggtgaccggcatgcttgcaaccaaaggttttaagcagaaacgaactaagctccatgtgctcaaaaagggccaagctctgaccaaagggaataagcccgaaccactcgtcatcaccggtctggggatctccgggtcatctaccggtgtggtgaaggccgaacggcacaagatcagagcggccgtacgacagtttgaggctgctattgaaagcggttccagcttcgatgaggtggcacacctgtatcactcagccatggggagggttgggagaatgctcgcctgcggccaaccatcggggtttgaatttaagaaacgcttgaacgaggcaaagcgactaggccagatctctcttatcgataaatacatcgcagaaacttcagctgttagtgacgaggaggttcggggatga

SEQ ID NO: 11052 - RNA, 1041 nt, synthetic construct
  source 1..1041: mol_type = other RNA
atggatgccatcctataccactgccgccccatatactctctgaagtccctggcgcttgcactgggtgagtccgtggaatttcttggctggttagcttgccaagccgattccctttaccggcccgtgcaactggtgaagaaagatggcaccccgaggtacgcttatgacgcgagagcagacctgaagaaggtgcaaagaaagatagtggatagaatcctcgctcgggtcgtttaccctaaatacctccatgggggcataaaggacgccgacttccgcaggagcatttattcaaacgccaatctgcataccggggccaagtcatatatcgtgcaggatatcagtaacttcttcccttccatcagctttgctaaggtgtatgacgttttctccctgttctttaactttggccacgtcgtcgctcacctgttgactaggctagtcactcgagccggagttgtcccacagggggcgtcaacttcttcttatctggccaatctcgtattttgggacgttgagcctgaagtcgtattgggattgaaggaaaagggattctgttacagtcgtttcgccgatgacattacagtctctagcccaagtgcgttgagtgccgatgaaaaaaccgagatagtgacaaaggtgacaggaatgctcgcccggaagggatttaaacagaagcgctccaaaatgcacgtgttaaaaaaaggccaggccattgctctctctaatgggaaatatgagcctgcccttatcacggggctctcgatcagcggacccaagccagttatcacaaaaaaggagaggaataggattagaggcctggtgaagaactaccaggctctcattgacatggggcgacccgacagcgagctggaaaaagtatttcacaaggtgatgggccaggtgggtcgcattattgcatgtggccaggcagagggtgcagagttaaagaaaaccctgaatgaagcacggagactgtcgaaaaaatctatcttcgagcgtcatgattccctgatcaacgcaagcgaaagctcacaggcttga

SEQ ID NO: 11053 - RNA, 1116 nt, synthetic construct
  source 1..1116: mol_type = other RNA
atggacgcccccttttaccctcacagctcaatcaattccatcaaggctctggctagggccttgggtgaacccgctgaacgattgctcgcactagctcagaggagttcacgcctctaccgttatgtgccacagaccaagaaggacggcattacaccacgacatacttacgacgcccatgagcctctgaagaccattcaaagaaaaatcgttgaccgggtccttagtaaggtaacgtacccagagtatctccatgggggcatccgcgatcccaaattaccacgcagtatctattccaacgcgcgtatacacattggagccaagactgtgatcttgcaggacattgccgattttttcccctccataacaactgagcacattcagagactgtttgtggggctcttcaggttcagcgccgatgtggccagccttctggcctcactggttactcgggaaggacaggtgccgcaaggagccagtacctctagctatttggctaatctggtattttgggatatagagccagccctggtcacccggtttaaagcccagggaatggcatactctcgattcgctgacgatatcacagtgtcgagcaaaacccgcatcgcttccgcagctactacgcaggttattgcatctgtcacctggatgctgggtcagaaaggttgcctccaaaagagatcaaagctgcacgtgcgcaaaaggggtcaggcattgatcacaggcgagaaagccgaagcagtcacggtgacaggcctggtggtgaatgggccgatacctgcgctccctaaaaaggccagactggctattcggtctgcagtcaaacagctggaagatagggttcggggcaactccggacagctgagcgcggaagacgataaggaggtcaggagagtaatggggcgcatcggccggcttattgcttgtgggcatccggaaggacctcggttaaaggccagagtgcgtgtcctactggcacgaaccccccttttcaagaggtacgcggccggcgtggagatccaaccactcgtggtagctgacacaccccttggcctgaacgcagttgccaacactctacctcacgggcagagagagttaccctggtataccgagtga

SEQ ID NO: 11054 - RNA, 1122 nt, synthetic construct
  source 1..1122: mol_type = other RNA
atggatgcacctttttatccgcacagtccaattcactcagtgaaagcactcgcccgcgccttaggagaaccagcagagagactcctggccctagcgcaaaggtcttcccgattgtacagatacgtgcctcagaccaagaaggacggggtgactcctaggcacacctatgacgctcatgagcctctgaagacgatccagagaaaaattgtggatagaatgctgtgcaaggtgatctatccagagtatctccatggaggtataaaggacgcaaaactgcccagatctatttacagcaatgcccgtgtgcatatcggtgcgaaaacagtcgtgctgcaggatattgcggatttcttcccctctatcacaacggaacatatccaccgagtgttcgttgggttatttagattcagtcccgttgtggccactcttttagcgtcccttgtaactcgcgaagggcaggtcccacagggagcctcaacctcatcctacctggccaacctggtcttttgggacgttgagcccgccctggttaagaggtttgccgcacaggagatggcttactcacggtttgctgacgacatcactgtgagcagcaaaacacacatatcccctattgccaccacccagatcatcgcttctgtgacttggatgctcggccagaagggctgtctgcagaagcggtctaagttgcatgtgcgcaaaagggggcaagcactcattaccggggacaaggccgacgctgtaactgtcaccggcttggttgtcaacggctccatccccgctctgccaaagcaagccagactggctatccgagccgccgtgaagcagctggaggatagggtcgagggaaatagcggccaactaagcgccgaggatgagaaagaggtacggagggtgatgggccggattggtcggctcatagcttgcggccaccccgaaggacagcgtttgaaagctcgcgttagggcagtgcttacaaaagaaaccctgttcaaacgctacacagcagatcctgaattccacccacacgtcgtggctgcaacaagtgaaaagcggggtgtcccggtaagttcgattgggagcataaagccgcttcgcgaccctccctggaacaaagaatga

SEQ ID NO: 11055 - RNA, 1116 nt, synthetic construct
  source 1..1116: mol_type = other RNA
atggacgctccgttctatccccactctcctatccactcaatcagcgctcttgctagggccctcggagaacctgtcgagcgacttatcgccctcgcgcatcgtagctcgcgattgtaccgttatgttcctcagaccaagaaagacggaataactcctcggcatacctacgacgcacatgaacccctcaaaacgatccaaaggaagattgtggatagaatcttatctaaggtcgctttccctggttaccttcacggaggtattcgggacccaaagctgccaaggagcatttattctaatgcaagagtgcacactggagcgaaaaccgtgatcctgcaggacatagccgacttctttccctcaatcaccaacgagcatatacacaggcttttcgtgggcttatttcggtttagcgctgatgtggcaacgctgttagccgacctggtgacccgagagggccaggttccacagggagcgagtacttcatcctatctggcaaacctcgtattttgggatatcgaacccgcactggtcacacgcttcaaagcccaaggcttggcctactccaggtttgctgacgatattactgtgtcttccaagacacggattgatcaggccaccacttcccaagttattgctagcgtgacctggatgctggggcagaaaggctgtctgcagaagcgttcaaagctccacgtcaggaagagaggccaggctctgatcacaagtgataaggcggatgccgttactgtgacaggattggttgtcaacggtccaatcccagccctgccaaaaaagcacagaatggccatacgcgcagccgtaaaacagctagaagaccgcttcgaggggaattccgggcagctgagtgcagacgacgaaaaagaggcccgcagagtgatgggtcgcattggcagacttatcgcctgcgggcatccggaggggcaaaggttgaaggcccgggtacgcgtactgctgatgagagcccccttgatggagcggtacgctgataccgaatttcaggtccaaatggtggcagagacaacagctgatctcgatgtggccgcaagtagcctgcagattgatctacctgtggacctcccctggaaagtcggctga

SEQ ID NO: 11056 - RNA, 1089 nt, synthetic construct
  source 1..1089: mol_type = other RNA
atggacgctccactgtacccgcattccccaatccactcaatcaatgctcttgccagagcactgggcgagccagcagaaagactcctcgcgctggctcagaggacgtcccgtctgtaccgatatgtcgctcagactaagaaggacagaatcacccctcgccatacttacgacgcccacgagccgctgaagaccattcagcgaaaaattgtagaccggatgcttagaaaggtcgtgtatcccaggtatctgcatggcggcatccgtgaccgcaaacttccccggagcatctatagcaacgcgcgcgtccacacaggcgccaaaaccgtcattctgcaagacatttcagatttctttccttccatcacaacagagcatattcaaaggctattcgtggggctgtttcggttcagcgccgacgttgcaagtctgctcgctaacttggttacccgggaggggcaggtccctcaaggtgcttcgacctctagctacttagccaatctggtgttctgggatatcgagcctgccctcgttacacgctttgaggcgcagggtttggcatactcccgctttgccgatgatattaccgtgagttctaggtcacccataagtgccgcggtgaccacacaggtgatagcatccgtgacctggatgctaagccagaagggatgcctccaaaaacggagcaaacttcacgtaagaaagcgaggacaggctctcttgtccggtgagtcagccgaagctgtgacggtcactggcctcgtggtggataaaccgatcccagggctgccaaagaaggtaagactggccatacgggcagccgtgaagcagcttgaagacagggtgaagggagacttacgtcaactgagggccgaagatgagaaagaagctcggcggctgatgggaaggatagggcgcttgattgcatgtgggcaccctgaaggccagagattgaaggcccgagttagggttctcctgactcgcgctcccctactggagagttacgccgcagatgccgatcaccagcctagattacccgccgcaaaactgccctcttcttatcccgacactccaacaatctctgatcagtga

SEQ ID NO: 11057 - RNA, 1122 nt, synthetic construct
  source 1..1122: mol_type = other RNA
atggatgtgcccttctacccacataacccaatccatagcgtgaaggctctcgcgagggcattgggtgagccagtcgagcggcttttagccctggcccagcggagctcaaggctgtacagatacgtgccacagacaaagaaagatggcataactccgagacacacatacgatgctcatgaaccgctgaaaactattcagcggaagattgttgacaggatgctctgcaaggtgacctaccctgggtatctgcacgggggcatcaaggacgcaaaataccctaggtctatttacagtaacgccagagtccatactggggccaagaccgtgattctgcaggacatcgctgattttttcccttccatcaccacagaacacatccatcgcatttttgtcggcctgttttctttctcagccgaagtggcgactctgctggcgaatttagtgacccgagacggacaggttcctcaaggagccagcacgtcctcctatctcgctaatctggtattctgggacatcgagcccgccttagtcatccgattcaaggcgcagggtctggaatatagtcgttttgctgacgacataacagtctcctctaaagcccgcattagtcctgccgctactacacagattattgcttccgtcacttggatgttgggacaaaagggatgcttccagaaaaggagcaagctccacgtgagaaagcggggccaggctctcattaccggggagaaggcagaggctatcaccgtaaccggcctggtggtggataagccgatccctgccctcccaaaaaaggcacgcctggcaatccgtgccgcagtgaaacagctggaggatagggtccacggctatccaggccagctgtcaatagaggacgaaaaagaggttcgtcgggttatggggcgcatcggaagactgatcgcatgtggtcaccccgaagggcaacggttgaaaacccgcgtgcgcgcccttttgacacgagctcccctacttgagagatatgtggccgatgctgaatttcagcctcaaatggttgccgccacgtctggcgagctttcggtaatggccgcaagcgcattgcccatagatctcccccttgacctaccctgggaagcgggatga

SEQ ID NO: 11058 - RNA, 1155 nt, synthetic construct
  source 1..1155: mol_type = other RNA
atggaagcacccttatacccgcactcacccatctacagcgtaaaagccttggctcgggccctggatgaaccattcgaacgcctggtggctctcgctaagcgttcaagcaggctgtacaggtacgtgcctcagttcaaaaaggacggcatcacgcccaggcacacgtatgacgcatacgagccgctcaagaccatacagcgaaagattgtggacaggatcctctccaaagtgaactatccccgatatcttcacggaggcattaaggacgcgaagcaaccccgatccatttattctaacgccagagttcacgccggtgcaaagacagttatcctgcaggatatcgcagattttttccccactatcactactgagcatattcgcctaatatttaccggtctgtttcggttttcagaggacgtgggtgccttactcgcagctttggtcacacgggagggccaagtcccacagggagccagtaccagttcttatctggctaatctggttttctgggatatagagccagctctcgtggcgcgcttcaaagcacaggggctggagttttcgagatttgctgacgatatcacagttagctcaaagtcgaatctgcgcgacgccgtaactgcccagatcatttcctccgtgacatggatgctagggcagaagggctgccagcaaaagaggagtaaaatgcatgtgcggaaaagaggccaggccctgctgcggaccgaaaaagctgaggcagtaacagtcaccgggctcgtcgtcgaccggccaactttgtctctgcctaaaaaggagcgaatggcaattcgtgcggccgtgaaacagctcgagctgcgggtagtgggacatcaggggcagttcagcgaagaagacgatagggagattcgccgtgtgatggggagaatcggccgcttgatagcctgtggacaccctgatggtcagagacttaagtctagagtcagggccttgttaatggccgctcctctgctggacagatacatgggcagcgacgaagtgcctgttgtgatgcttgcgtctaccgacgagcttgttagcaccgagagcgccgctgtggaggatctagatctcccatgggatgtcaacgaactgtcccttgcctgcaagcaaaggagtcaaggatccgaaacatga

SEQ ID NO: 11059 - RNA, 1062 nt, synthetic construct
  source 1..1062: mol_type = other RNA
atggaggttctacgttatccctattcaccaattcactccttaaacgccctggctagagccctcgatgaaccagcagaacgactcgtggctatcgcaaaacgctccagccgcctgtatcggtacgtgccacaaaaaaaaaaagatggcataactccccgccacacctatgacgcacacgaacctttgaagtccatacaacggaagatcgtggataggatgttaaccaaggtcagttaccctgactaccttcaaggtgggattaaggatgcccgtaatcccaggagtatctacgccaacgcgagggtgcatgcggggtcgaaagtggtcattctgcaggatattgctgacttctttcctagtattaccgttgcccacgtccgcgaggtatttagcaagctcttcggattcagccatgacgtcgcccagctgctggctaatcttgttacgagggaaggccaggtaccccaaggcgcctctacctcttcatacctggccaaccttgtcttttgggatattgaacccgccctgatagagaggctcaaggctaagggccttcgttactctcgattcgcagacgacatcacagttagctccaaggctgagatcacacaggattcagtgactcagattatcggatctgtgacttggatgctgggtcagaagggatgccggcctaaacgcagcaaactgcatgttcgcaagagaggacaggcgctgatcagcgatgagaaaatcaatgcggtgacagtgacgggtctggtaatcgacaggtcatttcctggattgccgaagaaggaacggatggctatccgagcagcagtgaagcagctggaggacagtgcctgtgaatggccagaaggcccacccgccgaggagaaaaaggcaatacagagactcatgggcaggatcgggagactaattgcctgtgggcaccctgacgggcagcggttaaaagctagagtgagaacagtgaccagattggtcccattgattgagcggtataccccgaacgtagtggagtccgtcactctcaatcaaacagcccaggaccccgctcagtga

SEQ ID NO: 11060 - RNA, 1038 nt, synthetic construct
  source 1..1038: mol_type = other RNA
atggatgccctgcattacccccacagtcctatttactcagtctcagccctggcacgggccctaggagaaccgactgaacgactgatagcccttgccaagcgtggtagccggctctaccgctacgtgccccagaccaagaaagatggaaagacccctaggcacacatatgatgcacacgagccactgaagacgatacaacggaagattgtggaccggatcctgtcgaaaatttcatatccctgctacctgcagggaggcatcaaggacgtgcacgctcccaggtccatctatgccaacgctcgagtccatgcggggagcaaatcaatcatattacaagacattgcagacttcttccctagcatcacagtggctcatgtacgccaggtcttttctaaactactgggcttttctgatgaagttagtgagctgctggctgatctcgtgacccgggagggccaagttcctcaaggcgcatctacaagctcctatttggctaaccttgtgttctgggacattgaaccagcattagcagagcgtttcaatgctaagggcctccgctactcccgatttgccgacgacatcaccgtttctagcaagacagatatgccgcaggaggtagcgactctcgtcatcggtagtgtaacttggatgctcgggcagaagggctgccgcccaaaacgcagcaagctgcatgtgaggaaaagagggcaggccttaatctctggagacaaggtggacgcggtcactattaccggacttgtcgtggacggtagttccccttcccttcctaagaaggagaggatggcaatccgtacagctgtgaaacagctcgaggatagcgccagagattgggttgggggcccacccttggaaatgcagaaagatattcagagactgatggggaggattggccggttgatcgcctgtggtcacccagagggactgagattgaaagctagggtgcgcctcgtgacgagaagaggcccacccctggagcagcacacccagattgccgggaatatagaagttcattcctga

SEQ ID NO: 11061 - RNA, 1116 nt, synthetic construct
  source 1..1116: mol_type = other RNA
atggaagcccccctgtacccacatcggcccatttacagtcttaaggccctttctctggctctggcagagcccgaagccttgctcgtcgccattgccaagcgctcgtctaacctatatcggtatgtgccccagaaaaaacgagacggctctccaagagacacattcgatgcatttgagccactgaaagcaatccagaggaaaatcgtggacaggattctgatcaaagtcaagtatccggtttacctgcacgggggaatccgcgatgttgcacagcctagatcgatttattccaatgctaggtcacacgccgggtctaagagcataattctccaggatatcaagaacttctttccatccatcacaaccgctcatgtgaaagaaatattctccggattttttgggtttagtagcgaggtgtcatccctactggctgcactcacgacaagagccggtcaggtcccgcagggagctagcacttcctcatacttggcgaacctggtgttctggaatgtagagcccgccctggtcaagcagttaggtagcgaggggcttgcgtactctcggttcgccgacgacattaccgtgtctagcaagagtgagatccttcctgaagcaaagtcacggataatatccgctgttacgtggatgctcagtcaaaaaggatgtcagcaaaagaggagcaagctccacatccgtagaagaggccacagtttgcttgaggtgtcagaacccggagcagtgactgtgaccggcctgacagtagaccgcgcttcccctggcatccctaaagacgagcgacgactcatccgtgccatggtcaggagaatagagttacaagcggctgccgaacccggaccattaagcatcgatttggagagggaggtgcgcagactgatgggcaaggtgggtcgactgattgcctgcggccatccagatgggctgaggtttaaagcccgcctccgtactctcctggtccgggttcctgtgctagaacggtacgctgatacactgccaattaacgagattgaagcgttgacctccaatagcgatgtacaggacggtggcatcttcattcctccctgggagatcgaaacccctactaccgaccgcgtttga

SEQ ID NO: 11062 - RNA, 1128 nt, synthetic construct
  source 1..1128: mol_type = other RNA
atggacgcaccattgtacccacacagacctatttactccttgaaggctctgagcttggcgcttgccgagcccgaagcactgcttgtggcaatcgcaaagcgctcttctaacctgtacagatatgtgcctcagaagaaacgggatggttccaggcgcgacacttttgacgcctacgagcctctgaaagcaattcagaggaaaattgtcgatcggatactgactaaggtgaaataccccgcatatctccatggcgggatccgcgacgctgtacagccacgttccatctatagcaacgctcggtcccacgctggatcaaagtcgatcattctccaggacattaagaacttcttccccagcatcacaacggctcacgtggaggaaatattttcgggactgtttgggttctctaatgaggtgtctagccttttggcggccctcaccacgagagctggccaagttccccagggagcctccacctcctcatatctggccaatctcgttttctgggacgtggagccgaccttagtcaaacagctttctagtgagggcctggcctacagtaggtttgccgacgatataaccgtgtcatccaaatctgagatccctcccatcgctaagagtcgagtgatatcagcagtcacttggatgctgagccaaaaaggctgccagcagaaaaggagtaagctacacattcggagacgaggccaaagcttgatccaggtaaatgaaccaggcgcagtcacagtgacagggctcactgttgataaggttaagccgggaattcctaaagatgaacgaaggttaatccgcgcgatggtgaaaagaattgaaatccaagccgctgccgagcctggtcccttatccatcgatcttgaacgggaatgtagaaagctgatgggaaaggtagggaggctgatcgcctgcggtcacccagacggactgcgcttcaaggctcggctgagagccctgctagtcaggctccccgtcctcgaacgttataccgaggccagcccagatcatgagaacggggtggtagtccgcggcacagcggatcagtattctagcgagtacggggacgttatcattccgagttgggacattgatgtgccttcagcccatggcgtgtga

SEQ ID NO: 11063 - RNA, 1050 nt, synthetic construct
  source 1..1050: mol_type = other RNA
atggatgcgccaaggtatccatgcaagagcatccatagtctgaaggccctgtctttggccctaggggaaccagtggagcttctgctgagcctggccaagcgctcgagcaatttgtaccgacacgttcctcagaccaaaaaggacggttccgtgcggcacacctatgatgcacatgagcccctgaaaaaagttcagcggaagattgtggacaaatttcttgcaagagtgcgttacccggactacctccatgggggcataaaagaccctaacagcaggcgctctatctactccaacgctagaatccacggcaaggccaagacaattttgctccaggatatcaaggacttttttccttcaatcggcgtgcagcatgtgcagcagatcttcagcgggctgttcgggttctctgatgaggtggcacaggtactggcgctccttactaccaggcacggcgttgtaccgcagggggcatcaacgagcggatatttggcaaacctcgttttttgggacactgaacccgctctcgtcgcccgactgcacgctagaggactaaagtattcaaggttcgccgatgatataacaatttcagccatgacaacactcgagcgatctgccctaaccggcctcgtagccgccgtcactgacatgctggcaaaaaaaggctgccaacagaaacgcaccaaactccacattcggaagaggggacagtcccttctggctaaacccaaagtggaggctggatacgaacctttaactgtcacgggtctgtccgtcttcaatgaggcccctggtttgccaaaggcagaaaggaaagcgattcgggctgccgttaagcaggctgaggaccaggccagtcaaggcgcgagttgggcacaactggagcccacttttagatccgtcatgggtcgcgtgggacggcttatcgcctgtgggcatcccgatggcgaacgttacaagctgagactgaaggccttaaagacaagatgtcaagtccccttactggaccgctatgccgctgctgctaccggagcagatgtgccagtggtgtga

SEQ ID NO: 11064 - RNA, 987 nt, synthetic construct
  source 1..987: mol_type = other RNA
atggacgccccgcggtatccctataagcctatttactccctcaaggcgctgagccttgcccttggggaacccgttgagctcttaaagtcactcgctaaacgcagcagcagtttgtatcgtcacgtgccacaaactaaaaaggacggctccgttcgcgatacatatgacgcgcaccagcctctgaaggccatccagcgtaagatcgtggataagttcctggcaagagtcaggtaccccgattacctgcatggagggataaaagacccaagtagtccacgatcaatatactcgaacgcgcttacccacgggaaggccaaaaccattctcttacaggacatcaaggactttttccctagcatcagagtccagcatgtggagcacatctttacgggcctgttcggattttctgaggaagtggcacagctgctggcccttctgacaacgcggaatggtgtcattccacagggcgcaagcacctccgggtacttggcaaatctggtgttttgggacattgagcccactcttgtaagtcgcctgaacctccggggtctgaaatactctcggttcgccgatgatatcacaatctccgctatgatgccgttggacgggctcgttctgaccgagctcgtgggagcagtgactgtcatgttggctaaaaaaggctgccaacagaaacgctcaaagctgcatgtaagaaagcgaggccagactattcaggctaaagccggctttgaggccctaaccattaccggactgtcagtgttcaacgccgctccctctctaactaaagccgagagaaaagccataagggctgcagttaagcaagtagaagatcaggctacacaaggcggatcctgggggcaattagaacctacattcagatctgtgatgggcagggtcggtaggttgatcgcttgcggtcaccctgatggagagcggtataagcagaggctgaaaagcgtgcaggaacattgttacaagaagtga

SEQ ID NO: 11065 - RNA, 1047 nt, synthetic construct
  source 1..1047: mol_type = other RNA
atggacgcaccgctgtacccctttaagccaatttactcactgaaggccctgtctctcaccctgggtgagcctgcagagcttctggagagcctcgctaagcgcagctccaatctgtataggcacgtccctcagactaaaaaggacggaactcctcgtgatacttacgatgcctacgagcctctgaaagctatacagcgaaaaatcgtggacagactcctggcgcgcgtgcgttttccaggctatctacacggcggaatcaaggatccagtcaaacggagaagcatttatagcaatgcacatatccacggcagggcccagtgcgtagtgctgcaggacatcaaagacttctttccaagcattaagacacaacatgttcagcagctcttcgttggactgttcggcttcagtgaaacagtggcaggtatcttggcgcttttgaccaccaggcacggagtggttccccagggagccagctcttccggttacatcgctaatctggtgttttgggacatagaacctgccctggtcgcaaagctcaacacacagggcttgaattactcaagattcgccgatgatattactatcacatctacaaagccgctcgattcatccgctcttacgtccattgtcagtgccgtgactaacatgttagctcagaaaggctgttatcaaaaaagatcgaagctccacatacggaagcgggggcaaactgtgttatcaaagaacggcttcgagccccttaccgtgacagggttgaccatttttaacgccgtgccagggatccccaaggctgagaggaaagccattaggagtgctgtcaaacagctggaagaccaggccacccaggggatgacctggtccgaactggagcccttggtacggcgcgtaatggggcgagttgggcgacttatcgcctgcgctcatcccgaaggcgatagactgaaacaaaggctacatgcgctgaaggcaagatctcaagtcgcccttctcgaccggtatgcggccgcattacaggacgctacggtgaccggacagatacctggttga

SEQ ID NO: 11066 - RNA, 903 nt, synthetic construct
  source 1..903: mol_type = other RNA
atgattggcctgatcagcttttggggtcaggagatggacgcacctctgtacccattcaaacccatttacagcttaaaagcactgagccttacattgggagagagtgtggagcttttggaaagtctggccatgtgctctagtaacctgtaccgctatgtcccccaggaaaaaaaagacgggacgccacgggacacctatgatgcctttcaacccctgaagtccattcagagaaagatcgtcgatcgactgctcgcaagggtaaggtttcctgcttatctgcacggcggcatcaaggatccagtgaaccgcagaagtatatactccaatgcaaaggtgcatggcaatgccaagttcgtactgctccaggacattaaggattttttcccctccataaaagtccagcatgtgcagcagattttcgagcggttgttcgggttttccgaagaagtatccaagttactggcgttgctaaccacccgaaacggcgttgttcctcaaggggcctcttcttctggttacctggctaacttggtgttctgggacgtggagcctatgctcgtggctagactggaggctcaaggactcaattattcaagattcgccgatgacatcacaatctcatcactcaccccgcttaatagcgtgatgttaacgaaactcgtctcggccgttaccggaatgcttgcagagaagggatgttaccaaaagcggagcaagcttcacgtgaggaggcgtggtcagactctgaagatgaaagtgatcgacgaatttgtgcccctcaccgtcactgggctgacaattttcaaccagataccgggcatcccaaaggcggagcgtaaagccatccgcgctgctgttaaacagctagaagatcaggccactcagggacggacttggacatga

SEQ ID NO: 11067 - RNA, 1029 nt, synthetic construct
  source 1..1029: mol_type = other RNA
atgaactccgccctgctgtacctggacaaacacaagatggactttccaagctatccttgctcgccgatttactcactaaatgcgttaagtaggcttctcggagaacctctggacgtactgacacgaattgcgcttaagagcgatagtttgtatagacatgttccgcagcgcaagaaggatgggactccaagaccaacttacgatgcccacgagcccctgaagaagattcagaaaaaaatcgccagccgcatactcaatcggatcatctatccacagtacctgcacgggggagtgaaggacctgaagtctcctcggtctatctataccaattgtgcaccacatctgggaaagaacctcataatcctgatggacatagagaacttttacccctcaatatcccgggaacacgtcttttctattttcaacaagtgcttgggcttcagtagcgatgtaagtctgctgctgtcaacgctgctaacacgaaataatcaggtgcctcagggggcatgcacctcatcgcatttagcaaatctcgttttctgggatcttgaatccactacattttcttacctggaggagaacgagttcacctacaccagatttgctgatgacatcactatctccaccgatgcaaacaaggacaaaaaacaaacaggcgaggccgtctccaaagtgatcgctatgcttgcccggaaaggttgtcgattaaagaggaccaagtttcacattcggaggaggggacaggccattgttaaggacgagaaactcacccccatcacagtgactggcctctctcccttcaataaacatacattggctattacgcagagggagcggaacaaaatcagatctagcgtcaagaaaattgaaattcgcgcacatgctggggaaagctggaaagatctcgctccttcctataaccgcgccatgggccgtgtgggtagacttatcagctgtcgccaccccgagggcgacaggttgaagagacgtttgcaaatgctaaagacctatttcgaagccgctgtgtga

SEQ ID NO: 11068 - RNA, 984 nt, synthetic construct
  source 1..984: mol_type = other RNA
atggagctgccaaagtacccaaacgcgcctatatattccatcaatagcctctcccggatgctgtctgaacctccttccgctctgcagaaactttcagccaaagcagatactctgtataggtccgttccccagaagaaaaaggacggaagtccacgcgaaaccttcgacgcttatgaacccctgaagtctattcagaaaaagatcgccctgagactcctaaacaagacaaaatatccgagttacttgcacggcggcgtgagggacccttcaagtcctcggtccatctactcaaattcaaggccccatttagggagttgccacattatactcctggacattaaggacttctacccctccattacgaagagtcatgtgactaacatcttccaaaatttctttgggtttagcagtgatgtctcagacacactttctagactcctgactaaagatggacgggtcccccagggagcttgcacatcttcccatttggctaaccttattttttgggacgttgagccacaactggtgcacgatttgcaggcaaacggctttaattacaccaggtttgccgatgatattaccattagcagcgccagcaacagagataataaaacgaccggggaagtggtgtccaaagtaatatccatgctgaagtcgaagaattgtcacctcaaacggtcaaagtttcatatccgtagccgaggacagtcgatcactgggaaagacggcgagaaattccctctaacaattacaggtctgtctatctacaacaagagcaaaccaagcatcagccagcacgacagaaataacatcaggtcttctgtaaaggagatagaggtgaagacccatgagggggcaacttggagcgaaatcgccccgctttataaccgcgccatgggccgcgttggcagattgatctcttgtggtcaccccgagggtacccgtctcaagaatcgattacgcatggtcaagaactgcttctga

SEQ ID NO: 11069 - RNA, 1071 nt, synthetic construct
  source 1..1071: mol_type = other RNA
atggatgccccatattatccgtgtaagccaatttattcccttagagccctgtctctatttctcggggaacctgctgagacactgctgaggttaagcaaaaatgccgatcacatgtatcgcctggtgccccagaaaaagaaagacggtagcctccgcgaaactttcgacgcctatgagtctctgaagcgagttcagaagaagctggtgagtagaatgtttgggcgtgtccggtttccagcttacctccacggaggaatcagggacttcaacagtcccagatccattttttctaatgcaggggtccacgcaggagccaagaccgtcgtcttacaggacatcgaggatttcttcccctctatccggtttgagtacgtatacagcatctaccagggattctttggcttcgagcactcagtagcagaggttctggcgaggctgactaccaagcatgggtgcgtgccccagggcgcttgtacatccagctatatagccaacttggtcttctgggatgtggaaccgatcgtctaccgggccttggcagaaaaaggcgtgaggtacacccgattcgctgatgacatgaccatttcatcagctattgagttgtccaatgacgatataggggatgttatctcaagaattgtgtctatgcttcgttccaagggctgccgtcaaaaacggagcaagctgaatgtgcggcgcagaggtcagggcctcaaaaaggcggaaggattcgagtcgttgactgtcacaggcctcaccgtgtccaacttccatggcgtggggatcacacagaaggagcgcaacaagattcggtctagtgtgaaagagatagaaatcaaggcccatatggacatgccttggtcggaccttgaggtgctgtaccaaagggccatggggagggtaggtagactgctagcttgcaaacaccctgagggcgaacgccttaaaaaccgactcaatacggtgaaaagtttttacgacgtgagcaacgtgcgcgaaacgaaggttgtgatgggagataaatttgttgttctggacgcaagcggcgatgtaccaccttgggtcggttga

SEQ ID NO: 11070 - RNA, 1032 nt, synthetic construct
  source 1..1032: mol_type = other RNA
atggagcacacatattacccgcatcaccccattaactctctgaaagcgcttaatagggccctcgggatcgacgaggacgaaatctttcacgccctgtcaaacataagctataaagaagtccccatcaaaaagaaggacggtgccattcgagtaacatatgacgctaccagtgcactaaaggtagtgcagaagaaagtcacgtctaatattttccatcgagtgaatttccctcactacatacacggctgtattcgtgataccaagacaccccgcaatatatatacgaatgcttacccacacgccggatgcaagcaggtgatcttgtgtgatatcaaggatttcttcccttccattaaagcaaagaccgtgttctttatcttccgccattgcttagggttttcccccaacgttagccagaggcttacagacctgtgtacctacaacgggacattgccacaaggcgcatcaactagcagttatatagccaacctggcattttgggatgtggagcctctgctggtgaagaagctggagagtttaggactgacctacactagatttgccgacgatattacaataagcgccaagaaaagtatcagcaaatcactgaagactcaggtcctacacgaggtcagaaggactattcgaaaacggggctgctcgctcaaaaaaaacaagactatcgtcctcaagagatctcaagtaatcattggaaaggacaaagaaacgcaggaaactacaagaaatcctattaccgtgacctctctcagcatccaccactcctcagtgaccatctctaaagttgagcgccggaaagtgcgcgcgttcgtggataagctgagcaagaccgagttcaaccgggtttcctaccatgaatggtgccggaggtacagcagtgctatgggccgcgtgtcccgtttgatctcctgtggtcataaggagggggaaccactgaagcagaggctcaaagctcttaaagacgagcataaaaagtttcatcagcggtcttccaatgtttcaggcagaaagtga

SEQ ID NO: 11071 - RNA, 1032 nt, synthetic construct
  source 1..1032: mol_type = other RNA
atggataagatccagtatccccattctccgatcaattccttgaaagccttacaccgggctctgagagtagacgagtccgtcatgtcaaatgcgttgcagaatattaactacaaggaggttcctcttaagaaaaaagacggaactacaaggatcacctacgacgctgccccagcgctgaaggctgtacaaaagaaaattacttcgcagatcttccacaaaatcacatttccctactatatccatgggtgtatacgagatgccaacaatccaagaagcatatacacgaacgcatcaccgcacgccggcaagaagaacattatactctgtgacattaaggacttctttccatctatcaaggagaagacggtgtttttcatcttcagagagtgcttgagtttctcccccgaagtgtcacagaagcttacagaactgtgtacctacaatggcactcttccacaaggtgccagtacaagttcctacattgctaatttagccttttgggacattgagcctctgctcgtcgaaaaactgtcctcttttggattcacttacactaggtttgcagatgatattaccatgtccaccgataagcctatctcaacaacgctgaagacccaggccctccacgaggtgcgaagagcaattcgcaagcggaactgcagcctgaaaaagcgcaagacaatggtcctgaagcggggccaggtgatcaaagggattgacgagaaaaagcaaaagcccacagattctcctataactgttaccagtctgtccatacaccataaaaacctagctatcagcaagcaggagcggaggaaagtgagggcatgcgtgtataacctcgaaaagaccaatatggaggaaatcagctatcaggaatggtgtcgcaggtattcgtctgccatgggtaaagtgagcagaatcattacctgcggccataaagaaggggagcccctgaaacagcgcctcaaaaaactgaaagacgttcacaagcgtcaccatctacgtagctctaaagtcagcggacggaagtga

SEQ ID NO: 11072 - RNA, 963 nt, synthetic construct
  source 1..963: mol_type = other RNA
atgcgatccagatgcgaactgaccagcacataccctcacaacgctattatcgatcccgaacacctggcactgcttttaaatacccccccggagaagttgaaggatattgccaatgtggcctccggctcctatcgccccgttcctcaaatgaaaaaagacgggacaccaaggatgacatacgacgcctacccagagctgaagagaattcagcaccaaattgtcaagaagatcttacgtaaggtcaggttcccccgctatctgcatgggggaatccgagataccgacttccctagggatcatgtgtctaacgcagcgctgcacactggtgccaccatactagtgctggatgacattgccgacttctaccctagtctggaccggcagttagtgtttactacctggctgcgctttttcgggtttagcccagaggtcagcgagctgctcacaaacctgacaacaagacatggcgttgtcccccagggagcacgcacgtctagctacctggctaatcttgccttctgggataaagaagcccagctcgtggaagatctaggtaacatcggactcacttactcgaggtttgtagacgacgtgacctattcttcacatcggcagatattgaatagtactatcggaaatgcacgggctaaagtctatcgaatgcttgcatccaaaggatgcaggccgaagcggtcaaaaagccacgtttgtcgcaaggggcagaagctcgaggtgacgggcctcgttaccgctggctcaagccctactatagacaaagacgaacgtaaaagaatccgctctgctgtgcacaaccttgagaaggcggtgggcaaggaggggatgaccccagagaacaggaagaaatgggattccgctaagggcagggtgggtagattggtaagactgaaacatccagaatcacggaagctcagtcagcggttggatgccatcagacaaggctga

SEQ ID NO: 11073 - RNA, 957 nt, synthetic construct
  source 1..957: mol_type = other RNA
atgagaagtatctgcaagttaactcccacctatcctcataacgccatcattgacccacagcacttggctcttttgctgaatacacccttagagagcctgaaggctactgcaaagatcgccagtgggtcataccgacccgtacctcagaccaagagggacggcagcccccgtatgacctacgacgcttatccagagctgaagcgaattcagcaccagattgtcaagaagatcctacggaaagttagattccctaggtatctccagggtggaataagagacacggagttcccgcgcgatcatgtgagtaatgcagcgctgcatacaggtgcctccattctggtgttggacgatatcgccgatttttatccttcactcgagtcccagttggtgtttaccatttggctgcggtttttcggcttttctccagacgtttcggagctgctgacaaagcttacgacacggcattgcgtcgttccgcagggtgctcgcacttccagttaccttgctaatctcgccttctgggataaggaagccaaactggtggaggatctgggcaatatgggactcacctactctcgctttgtggacgatgtgtcctactcatctcaccaccaagtcagcaacagcactataggagaagccagggcgaaggtctatcgcatgctcgcatccaaaggatgtcggcccaagagatctaaatctcaagtgtgtagaaaagggcagaaattgaaggtcaccgggcttgtggccgcagggaactacccagcggtagggaaagcagaacgtaaacgaatcaggagcgctgtgcacaacctcgagaaagccgttggaagagacggcatgacacctgaaaatctgaaggcctggaactccgcaaaaggccgcgtgggcatgttattcaggctagagcacctggaagctcggtcactgagccaaaggcttgatactctcctgtga

SEQ ID NO: 11074 - RNA, 993 nt, synthetic construct
  source 1..993: mol_type = other RNA
atgttcgtttcctccgagctgaccccgttctatccccacaatcctattgtggaccctgaacatctggctagacttcttaacactccactcccaaaattagaggccattgccgagagcgctagcagctcataccgcccagtgccccagaaaaagaaggacgggagcccacggatgacctacgacgcctacccagcccttaagcgagtccagcaccagatcgttcagaagacgctgcacaaggtgcgtttccctcgttatctccacggcggcatcaaggacaccgaatttccgcgtgatcacgttagtaacgctgccctccatacgggggctgccatcttgatattggacgacatagcagacttctatcccagtttggatcgcaaactggttttttctgtgtggctgcggttttttcgattcagccctgaggtcgcggccctgctgacaaagctgaccaccaggaaaggatctatcccccaaggtgccaagacatcatcctatctggcaaacctagcattctgggatagagaggcgcaactggtggaagacctaaaagctatgggcctcacttactctaggtttgtagatgatgtcacatactcatcccgctgccgcattcctgattcagctgtcggtgaggcccgggccaaagtatacagaatgctgacttccaagggatgtaggcccaagagatctaagagtcaggtgagtaggaaaggaaggaagctcgaggtgactgggcttatcaccgcgggaagaagccccgcaatcagcaaagatgaacgaaatcgcattcggtcggccgtgcggcatctcgaaaaggctgtgaacgaagagggtatgacacctgaaaatagaaaggcatgggactctgccaaagggagggtaggccgattagtccgcctgaaacacgccgagggcagacggttatcccaacggctggacgcattgctccaggcagctccactggctcatagggtggataatcagtga

SEQ ID NO: 11075 - RNA, 966 nt, synthetic construct
  source 1..966: mol_type = other RNA
atgaaggcaactcctccactgtatttgcacgctagcatcgggtctataaacagcttaagtctcctcctaggagtgagccctgattctctcaaatccatcggcgatgctgcccagaagatgtacagagaggtgcctcagaaaaagaaagacgggagtttgaggatgacgtacgacgcccatccctcactgaagaaaatccaggacaagatttccaagctcatcctgaagaaagtggtctaccccgactacttacagggaggcctgccaaaaaaagatcaggtgagcaacgcagctaagcactctaaagccatcatcctcattcaagacgatattgaagacttctacccctccctgtccgatacaaccgttcggggggtatggcagcagttctttaagttttctcctgaggtggcaaaactcctaacctcactgaccacgctgaatggcaaggtcccacaaggtgcgaaaaccagtagctatctggctaatctggccttctgggactgtgagcatctgcttgttcagaagttgcttgacaaggatctgacatacactaggtttgccgacgatatcattgtatcaacccgagccatcatatccaactccgagattgcggtggtgagagcttctatttataacatgcttgccctgaagagttgcaagccgaagcggtccaaatcgagagtgtgccgcaagggcactcgtttatcagtgacaggtctaaatacaagccttaaaagtcccatggtaaacaagcaagaaaggaggaaaatacgcgccctccttcacaatctcgaagttagcgtctctttgaacggctatactgcagagaatgtcgctgcatgggaaagcattagaggaaaagttgtccggctgaaacgcctgcgacataaggaagccctgggatttgatgagcggctccacttgctgaagagccgtctgttctcttcatcgtccgtgctttga

SEQ ID NO: 11076 - RNA, 999 nt, synthetic construct
  source 1..999: mol_type = other RNA
atgctacgggaccggtacctgataattaagattccctctatcgcaaacacgagctcccttgctagtctgttggaaattacagaaaaggagctcttctacattgcagataatgtgcacgagttttataaaccaggcaaaataatgaggaagaaaaatggcgaccctcggcccacacacgatgccaagccagtccttaaacaaatccatgcgcgtattaagaatcgaatcctgaagcaggttgtgtatccatactatatgctcgggggcatttccgatctggaatccccaagatcctgcaaaacacacgctcagatacattctggaaagaaaatcctgatcagtgaggacattgcaaacttctaccccaatacatcctacgaggtggtaaaaaagatctggaagtaccacttcaaattcggagacgaagtgtccgagctgctgactaagctgaccacctttaacggggagttgccccagggttggaaggccagcgggtatatcgccaacctggctttgatcgataaggaacccgagcttgttcgcatcctggaggaaaaagggttgtcttactcaaggttcatagatgacattactgtctcctctccattctatctaacctcaaatgacaagcaattcatcatcagcaatatctatgccatgctgtttagctgcggatacaagccgaaacgaatcaagcatgagattgtgtcacgcgagatgcctatgtcagtcactagtcttaacgtgaataccaaaaaacccaccatacctagcaaggagaggaagattattcgcgccctcgtgtaccagctggaatgtgcctatcctgatgacggcagaagtatcagattttataaactctggctcagcgtctacggcaaagtaaacagagttaagtcttttcatgctgaagagggttctaaattacagatccggatgaggcagattaagccgcctaaacactttttctcgaacaagaagttactcagcacgtcgtga

SEQ ID NO: 11077 - RNA, 963 nt, synthetic construct
  source 1..963: mol_type = other RNA
atgccgcggaaccgctatccacagccctccatcccccctattgccaatatcacatcactagcgtcacttctgtccgtaaatgtgactgacctgctgtacatagccgacaatatcaacttgttttacaagcctggtaagatactgcagaaaaaaaatggggagcatcggtatacccacgatgctaagagaacccttaaactgatccaccagcacataaagaacaggatcctaaagaagatcgagtacccctactttatgcttggcggaatttccgacccgcagaacccaaggtcgtgtaaggcccatgcacagatccactgcaacaagaagatactgatcaacgaggacatactcgacttctatccaaccacaagctatgaactcgtgaaaagagtgtggaaacaccagttcaatttttccgatacagtggccgaaattctgactaaaatcacgacttatagtgggcaactgccacagggctggaagacaagctcttatattgctaatctggcacttctccccattgaggcccatttagttgagctgttggagaataagggatatagctacagtcggtttattgatgatatcaccgtcagtagccctactttcatctctcctcaggagaagaaaagcattatttctaacatctacggtatgctctttaaatgcgggtacaagcccaagcgaacaaagcacgaaattgtgtcaaacaaagaaaagatgatcgtcacctctttgaacgtcaacactgaaacccctacgctgtcaaaacaagaaaggaataacattcgtgctatggtgtaccaactcgaaaaactgttctccatccagggaaatacccaggcatacattcagaaatggcatagcctgtacggcaaagttaacagactcaaatccttccataagaagaatggcgagcagttgcaagagcgcatgaaactcatcaagccattaaagtga

SEQ ID NO: 11078 - RNA, 963 nt, synthetic construct
  source 1..963: mol_type = other RNA
atgaggaagattcgataccctatcgctaatatacaacccatcgccaaaattagtagtcttgctcgattactgtcggtgcgtgaggctgacctcctcaacataattgacaacatcgaatcatttcacagacccggaaagttgctgaagaagaaaaacggggatccccgccctactcacgatgccaaatccgaactgaagattattcacgcgagaattaacaatcggatcttgaaaaaggttcagttcccatactatttgcaggggggtatcgccgataagtcctatcccagaagttgcaaggaacacgcccaaacccatagtggtatgaaaatcatcatatgcgaagacatagcagatttttacccgagcacctcctatattactgtcctgaagatctggaagcattttttcaacttctccaacgaggtggccgagattcttacacgtctgacaacttaccagggagcactgccacagggctggaaaacaagctcttacatcgctaatttaaccttttggcattgtgagcctgagctggtgaaaataatcgaggagaaaggcctctcctactctaggtatatcgacgatatcacggtaggatcccgccttcatatttcaaacaatgggaaggagttcgtcattagctctgtttatggcatgctgttttctaacggctacaagcctaagagggaaaagcaggaaattgttagctccgagaaaccaatgatcgtcacatcactcaatgtgaacagtcagaagcccaccatcccgaaaaagttccggaataacgtgagagcaatggtgtaccagctcgaaaagtcttttatctcaattggcaatagcattgagtatgacaagaaatggcgcagcgtgaatggatctgtctgtcgggtaaagagcttccacctatcagaaggggccaaactgcaggagcggatgaggcaaataaaaccaatcaaatga

SEQ ID NO: 11079 - RNA, 966 nt, synthetic construct
  source 1..966: mol_type = other RNA
atgtcaataaagatctatacacccgagcctaagatccagtacatttctaagattagttccctggcccgaatcctgagtgttaattctaacgacctgcttaatatttccaataacacccagaagttctataaacagggcaagctcatatcgaaaaaaaatggcgagaaaagagtcacccatgatgcaaagccaaatctgaagaatatccacgagattatcaagaataggttacttaagacggtaaactatcccttttacctgcatggtgggatcgccgacccaagcatcaaacgctcttgcctaagtcacgccaagacccacataaattcccacattatttttcaggaagacattgctaacttctttcctaacactgataaaaacacgatcaagaaaacttggaagtacttgttcaatttctcagacgaaatcgcagagatactgagcaatctgaccactcatgaaaacatgctcccgcaaggttggaaaacttcaggctatctcgctaatctcgtgttttgggaaaaagaagctcaacttgtctccaacttggagaagaaaaatctttcttacagccggttcattgatgatatcgtggtgagcagcccatgtcgcatcaataacaacaacaagaacttcatcatctcaagcatttacaacatgttgtaccattacggatatgagcctaaacggtctaaacacaagatttcaacaaggaaagatcccatgagtatcaccgggctgaacatcaaccccaaatttaagtccttgacaatctccaagtctgaaaggaacgaggcgcgtctggctgtttataatctggagaagaattacaaccggattgagaaagaagactatataagactctggaatagcgcctccggaattatcgccagaattagtctgtttcacaagaaagaagcaaagacactacgagagaagataaacaaagtgaagttactctga

SEQ ID NO: 11080 - RNA, 969 nt, synthetic construct
  source 1..969: mol_type = other RNA
atgtccaccaataactttccgataattaacatccctagcttcagcaaccccgcctctctggcaagtctgctgtctgtttcagagcaggatctctttagaatcacttcttcagtcgataacctctataagcccggtaaaattctccagaaaaagaacggcgagctccgacggacacacgacgctaagaagcctctcaaggacttacacgagattatcaagaacaggatactgaaaaaggtggtctatccctactacctgctaggcggtatagccgatccatttaagccccgcaattgtacaaacaacgcgcttatccattccgggaaaaaaatccttattgcagaagacattgagaatttcttcccatcatcgagttctgacatcgtgttcaatatctggaaactgtgctttaaattctccccaaaaatcgccgacatcttaactaagctcaccacatatcagaaccaactgcctcagggatggaaaacctccgggtatcttgctaacctggtgttttgggataatgaaccggacttggtgagagatttcgaaaaaagaggctatagctacagtcgctttattgacgatatcgccatctcaagcaatcagtttataaacgataaccagaagtcctacattattagccggatctacagtatgctgagacttaagggctacaaacctaaacgcaccaagcatgagatacagactcaaattaaatccatgcacttgacggggctagggattaaccggaagaggcctacagtcccaagaaatcgtaggaataatgtacgcctgttggtgtataatttggaaaagcggcaccgtcatgaaggagacacccatcaataccgagaggactggattagcgtttctggaaaggtaggccacatcaggagcttccacaataatgagtgggagaagctgaagttcaggctgaataagatcaagcccaacgataaagtgtga

SEQ ID NO: 11081 - RNA, 963 nt, synthetic construct
  source 1..963: mol_type = other RNA
atgccaagggacagacatccggtgattaatatttccccaatcgccaaagttagctccttagcgagtctcttgtcaatcaaagagtccgacctgctgtatattgccgctaatgttgatcgattccatcgccccggcaaagaactaaagaaacggaacggtgagcctcgccaaacccacgatgccgagcagcgcttgaagattattcacggtcgaattaacaaccgcatcctgaaaaaggttgactacccctattaccttcagggaggaatcgcagacaaaaagagaagtcgtggatgcagggccaatgcaatcatacatagcaggaagaagctgataataaccgaggacattaaagacttctttccctgcacatcaaagcggatcgtgaagggcatctggcagtactgttttaggttccatcctgagatcgcagacatcctgactcgtctcacgatctaccagaaccagctgccacaggggtggaagacctcatcttacttagccaatcttgtgttttgggacaaggaaccggatcttgtctctctgctcgaacaacggggctatagctattccaggtatatggatgacattactgtcagctcagggcactacatcaacaaccaccagaagaactatatcatcagcaaagtgtacgagatgctgttttctaagggcttcgccccaaaaagaagcaaacacgagatagtaagtcagtcccaacggatggatattacaggtcttgtggtgaatagaaagaatcccaccgtgctaaagtctaagagacgtggcgtacgagtcggggtcttcaaactggaagaactccctattaataaccgcagtgatgctgattaccgggagtgttgggaacacctctccggactggtgtcttacatatcggcttatcatcctaaagaggggaaaaagttgcgggctcgcctgagaaacatcaagcccaataggtga

SEQ ID NO: 11082 - RNA, 1008 nt, synthetic construct
  source 1..1008: mol_type = other RNA
atggctccggaatcgaacaaaacctgttccaaagttgggcccattgcacatgtgaaagccttggcaagtattctctctacgacaccatccgagcttatagcactttctgagaatgtaccaagtctgtggaagcccgggaaagtgctaagaaagaaagacgggactccacgccctacacacgatgcccgaaaagcccttaaggtggtccatgaacgcatcaagaataggttactgcgccaggtggattacccagggtacctcctaggcggcattagcgacaagctgacaacccgagactattcccggcacgcagccctgcacgctaaaaagaagatcctgatcagcgaggacatccaggacttcttcccctcaacaaccgctgaggtagtgcaagaaatatggcagcgcttgtttaacttccatcctgacgttgcagagcttctgaccaggctcacaatctatgagggagccttaccccagggctggaaaaccagtggctacttagcgaacctcgctttgtggaggcgggaaccggactttgtcgctagactccaccggcagggtttggcctatagtagattcatggacgatgtgactgtctctgctccgtaccccctgtctaagactcagctgacaaacattatatccggaatttacggcatgctggcctcaggtgaatttgcccccaagcgggccaagcacaaaattgcaactggtcgaagccggatggaggtgactggactgaacgtgaatgccgccaaaccttctatgcctaagaagcgtagggatcaaatcagagcgcaagtttatcagtgcgagcagggatacaagagggatcctcggagcccagagtatctcacgcagtggagaaatgcatcaggcaaggtgggcaccatgaaaagatttaatcctggagaagcgaagtcactgaggacccgtccagctctgtacccccaagtcgcccagaccagccgctatggggctgtctcctttgatttcatcagctga

SEQ ID NO: 11083 - RNA, 999 nt, synthetic construct
  source 1..999: mol_type = other RNA
atggctctagagaataacaaggcatgtagcaaggtcggctccattgcccgcatcgaagctctggccagtgtgctgtccacaactccagcggagcttttggaactatctgagaatatccatagtctgtggaaaccaggtaaaatactccgtaagaaggacggcaaacctcgccatactcacgacgcaagaaaaccgcttaaggtcattcacgagaggataaaaaaccgcctcctgaagcaggtggattatcctcactacatcttaggcgggatctccgataaacagaccacaagagattattctagacatgcagctctgcactcaaagaaaaagatccttatcagcgaagacattcgagacttctttcctagcacgacctctgacgttgtgctgaacatttggttgcggttttttaactttcatcctgaagtggccgcattactgaccaaactgacaacccacgagggagtactcccccagggctggaaaacctcagggtacctggccaatttggccctttgggaccgcgagcccgatttcgtgactcagctccaccggcagggcctggtttattctcgcttcatggacgatgtcacagtgagcgccccttatcccataagcaagacgcaggtgaccaatattatttcaggtatttacggtatgctcgctagtagggattacaagccaaagcgtagtaaacacaaaatctccaccggacggcataggatggaggtcaccgggttgaatgtgaacgcgacacgaccctcaatgcctaagctgcggaggaaccagatcagagcacaagttttccaatgcgagcagctctttaaacagaatgcccggtccccagaatacctggctcaatggaggaatgccagcggaaacgtcggcactatgaagcggttcaacccctcggaagccaagggactgcgagcgagattaactgctgtaaagccctgcgccccaagaagggactgcacacgtgggttcccgtgttga

SEQ ID NO: 11084 - RNA, 966 nt, synthetic construct
  source 1..966: mol_type = other RNA
atggagcatcaggatcgtaaagcttacagtaaggttgggcctatcggatgcattgacgcgcttgccagtatgctgtcaatcagcgctaaagacctgttgactgtatctaagagcgtggagagcttctggataccaggtaagacccttcgaaagaaatcaggagagcccaggctcacctcaaacgccaaggagccacttaagggcctgcatgaaaagatcaagaatcgcctcctgaaacgggtgtgctatccttattacctactcgggggcatctccgactccatgatgccccgcgattacaaatgccacgctgctatacactctggaaagaatatcttgatttcggaggatatcaaggactttttcagctccaccaaaaccgatgttgtacactccatatggcagtgtttatttcatacaagtcctgacgtggcatccgtgctgaccagcttaactacatataacgattgtctaccgcaaggctggaagactagcgggtatttggccaaccttgccttttgggacttggaacccgacctcgtggaaaggctggaaaaacgaggcttcagctactcacgcttcattgatgacatcaccgtgagttcccgctgccgtatcggtgcctccaagaaatctttcgtcatatcggagatttacaggatgctgtccctccgaggatacagccccaagcgggcaaaacaccgcattgcaacaaatgataacagaatgggggtcacaggtctgaacgttaacaagaatacgtcttctatgccaaaggagaagaggaaaatcattagggccatggtgcatagatgtgagaatcactacatgcaggacagaacatctgaagggtataggaaatcatgggaacggacatctggcaaggtcagtactctgacccggtttcacgaaactgagggcaataaactgagaaagcggctgcagacggtcaaacctattagatga

SEQ ID NO: 11085 - RNA, 1026 nt, synthetic construct
  source 1..1026: mol_type = other RNA
atgggctttcatcctctcccacaggtaaccccgatcgccaatatatctagcctggctaacctcttagagatcacagtcgaagatctggagtatgtccttgccaacaaggaccgttactggtgcccagggaagaaactaaccaaacctaatggtgaagtgaggcacacacacaacgcaaagcctcggctgaaagccatacaccagaagattttggacaagctgttgaagaaagtgttttacccgatctacatgcagggcggcgtggcggatctgcttaatccccggagctgtaggacccacgccgcgtttcattgtaataagtctatcgtgatctccgaggacatcaagtcctttttccccaactgcgactataaaaacattagatcgatctggcaggggtttttctgcatggcaccagaaatcgctgagatcttgacacagctgacaacatatcaaaatgagctaccacagggttggaaaacctccggctacctggcacaacttattttctacgatattgagcctaaactcgtcgaagaacttgacaggcagcaagtagcttattccagatacattgatgacatcactatcagctcatcaagactgctgacagatcgacagaagacggacattatctcaaagatttacagcatggttttccacaaggcccatcacccaaatcggaagaagcagactattttttccccctctgttaacggagtggggaaaaccgtgactggactgacggtgaatagcaaaaagcccacaataaacaatgacaaacgcaaaaagctccgaagtgatatacataagttaagcctcagattccacactgacaagaacctgtatagttatgacaaggattggcgctctattacttccaaagtcggacacatcaagactagtcatcctcggcagtggaaaaaattcaggcaagagatgaacgccataaagcccaccttcaaacgcaagaaaaagaccaacaccaaaaaagctgttttcaagggaacgattgatggcaagtga

SEQ ID NO: 11086 - RNA, 966 nt, synthetic construct
  source 1..966: mol_type = other RNA
atgtctagtaaagacctggctcctagggtaggctctatatcaaatattgcaagagtgtcctccctagcccggatcctggggactacagacgataggctgttgtacatcgccggaaatatcgataagtattggaagccagggaagaagttaccgaaatccgatggtagtatcagaatcaccaatgatgctaacgacgtgctgaagaatatacacgagaggatcaataggaaccttctgaagccatgcttttatccacgatacttaaacgggagtctgccgggcagatcaattagaaaaaacgccgagtttcatctgcgctctatggtgctcgtgaacgaagacatcgaaaatttttaccccagcgcccggttccgccagattaagggcatttggaagtacttcttcaaatgttcagacgaagtggctgtcatcttgacgaagctgaccacatataaaggcagccttccacagggctggaaaccctcgagctatcttgctaaccttctcttctgggacaccgagtatatacttgtcgagaaactccaagcagccggattttcttactcccgcctgatggatgatatcaccgttagcagtcgcaagccctacactcctgaaaaattgtcagttctcataagcgatctcaacctgtttctccactccaaagagtttaagttgaagagaagcaaacactccatcaagccctcttatacacggcaaacagtcaacaatcagattgtgaacggttcgaaggtgaccgtccctcgagagaggcgtaaactgattcgggcgctcgtacacagcttagaaattgactactcttacggagcagtgttctccgacaaatataagactaagtggaagagcgccagtcagcgcgttgggggtctgaaacatggacatctgtcagagcggaattccctacgacagcgtctgcagaacattaagcctagaatcaggttctga

SEQ ID NO: 11087 - RNA, 909 nt, synthetic construct
  source 1..909: mol_type = other RNA
atggccaagcacctgggcctccctacagaacacttgatcgagatcgctcagaactcagccagccattggaggcaggggcctgatcttgtcaaacccgacggctctattagaaagaccaattccgccacgcagcagctgaaggacgtgcacacgagggttaagtttaagattctccgcaaaaccttttacccagattatttgtacggttctctccccaaaacacttgaacagggagtaaggaatcatattgctaatgcagagctgcacgcgggacagaggctgatcatcagcgccgacattaaagggtactttccaagcgtcgaccccgttgttgtgcacgggatatggcaggggttctacccgtttgcgcatgatgtggctgaggtgctgaccaagctgagtacctacaagaacgaaatgcctcaaggatggggcccaagctcgtacctggcacagttagtattctatgacactgaacatgatgtggtcgagtacttacaatcacagggtttccaatattccagactgaccgatgatataacattgagtaccaaccggtccctcaaaaaatctgagatcactgacgcaatccgcactctgaatcgaatgctcaatcggaagggtactaacattaaccgttcaaagacacgcgtcgacagccccaaaagacagcaaagtgtcaacaagatcaacgtttccgtgcgtggcatgacactaagtcagaaatatcgcaaggctgtgcgagccaaagtgcacaatgtggtgaccaaccctgaactattcggagataagcttcacagagagcttcagtcagcaaagggcaaaatatcctatttgggcaagttccatgaggccgacgccaaaaagctgaaaagccggattcggaattttgagctgtctactaagtga

SEQ ID NO: 11088 - RNA, 975 nt, synthetic construct
  source 1..975: mol_type = other RNA
atgaggctctctcagctgtcacctcgctatgcgaggcgtcgaatccagcgggtggaatctcttgcaaagttgcttggcacttccccaactgaccttgcagccctggcggccaattctgctcactattggatcccgggccggactaaaacaaagagcgatgggaccaagaggcacacgtccaacgccctcgaaccactaaaatccattcataaggccatcaagaacaaaattctgcgggccacgagttatcctcactacctgatgggaggtcttccatcagacgaagaggccggctgcattcgtcattgtgaagagaatgctaagagacacagcggccagagaattgtggtgacagaagatatcaagagtttctaccccagtattactgcaagtagaattcatgacatttggcaggggttctaccgattctcgccagaggttgcagagttgttgacaaaactcacaacgtaccgcggcgtagtccctcaagggtgggttccatcatcctatcttgccaatctcgccctgtgggactgcgagcccgggttagtcgcacacctcgagcggcagggtctgacctacactaggtggatcgacgatatcaccataagcagcaaaacatttgtggctcccgcgtgtaagaccgccatcgtgacagctgtgtacggtatgctgcgctccgccaatttttctcccgctcgaaccaagcataggataaggacccggggacaaaatcaacgcgtcatgaacctgaacgtgtcgggaaaaagacccaccgtacctcgacagcggttggccgaactgagagctactgttcgcaacctgttacgcgacgctggctcactgtctgcggccgattataccagcaaaagagataggatcgaggggcagataggatccatcagcaggatgcacccgcgcctagctgagagactccggaaccagctggcaagcgtcagacgtcctgcaaattga

SEQ ID NO: 11089 - RNA, 924 nt, synthetic construct
  source 1..924: mol_type = other RNA
atgtcaatcgtgctgagctccttctatccctacaaacctataagtaggcttgatagcttagcaaaagttctctccgtcgacgtgagtgcactggaaaaaattgcatctctggcctcatcgtactatagggagaataagctcaaaaacaataggatcacttacacagtcctgtccccgctgaaggagatacaggagaagatcaaaaagaatctgctggacaaggtcgtgtgggcctattatctgcactcttatattaagaagcggaatacgaaaaccaacgctaccgctcacctgtttaaaaaagccctctttaataaggacatcaaaaagtacttcgacaattgcaaagaaaagcacatctacaatgtatggtccaagttcttcaactttactgacaatgtggcctctatactgaccaagttgacaattcgaaacggcgagctcccacaaggttcttgtacctctcccagccttagtaacctcatattctggaaagatgaaccacggcttgtgtcagaatttaacaagatcggactagcgtacaccagatatgccgatgatatctcagtttcctctaagaacaaaaaactggataaggtgtacattatcggcaaaatatacgggatgttttccaaaaatggtttcaagcctgctagagagaaacataagatttataacagcagcgagaaaatggtagtgaatgggcagacagtcaactccaaaaacgtgactttggataagaagtacattttgaaggttcgcagctatatttacaagcttgagaaacgtatcaacacgttaacaaagagcgaattcgacatcgactatcagagtattttagggaagattaactacatcaagcagtacaacaaaaagggcctgggactagagtcgcgcttgaataagctcctggacatcttttga

SEQ ID NO: 11090 - RNA, 960 nt, synthetic construct
  source 1..960: mol_type = other RNA
atgaagccacactacctaaacaagccgatatctagtatttcatccctggccaagtgcctacagacaaccgtcgacgaattgcaaaatctgagcactaatgctgacaagtatttttttcttgccaacagggtccagaaggaagatgggtcttaccgagacacttacgacgtgcgccaacgcctgaagatcatccatgacaagatcaccaaaaatatcctcaagaaggtgtactaccccgattatcttcaaggatccctggcaaagaaagaccacatcagtaacgcagaaatccactctgggaaaaaggtgataataaagggcgacatttccaattttttcccaagcataagcaaagatatcatttaccagatctggattgaattcttcaacttctcaaaggaggtggccgagttgctctcccggctgacaacatttaacggaaagatggtgcagggctgtaaaacatctagttatctggcgaacctggtcctgtggtcccgggagtacaagtttgtgaacctgctgaaatcacagggttttacctatactcgctatgtcgatgatgtgcatgtatccagcgaacgaatcatgcacaaatctgagaagacgaaaattatctctaggatctacaatctcttcgctagcattaacgtacggcctaacagaaagaaacaagagatcatgcctaggaatcagcagcagattgttcacaaactcaacgttgataagagtacccctaacatgcccaaacagaaaagaaacgagattagaaaactcgtgttcatctgcggtaaagccttcgaggacaataatatcaccttgagcgagtacacgaaaaattataacactgtcatgggaaaggttaattatcttagacggctccatcccaaatgtggcaatcttttgctgtcaaatttaaggtcgatttccccattaaagcgtatgaagataattagctga

SEQ ID NO: 11091 - RNA, 951 nt, synthetic construct
  source 1..951: mol_type = other RNA
atgaaaccacgctacctgaataaaccaatctcttcaatcttttctctcgcaaagtcactccaaactacggtggaagagctgcagtacctaagcgccaacgccgataaatacttctttttggccagtaaagttcagaaagatgacggttcctatcgtgaaatttacgatgtcagtcagaagctgaagaatatccacgacaagattacaaaaaacatcctcaagaaggtctactaccccgactatttgcagggctccctcagcaagaaagatcacatctctaatgcggagatacatactcgcaaaaaagtgattgtcaaaggagacatctcgaatttctttccgtccatcggaaagaacatagtgtatcaagtatgggtggttttctttaatttctccaaggaggtggctgaactcttaagtaacttgatcaccttcaatggtaggatggtacagggctgcaagacatcctcttatcttgccaatctggttctgtggtctagggagtccaaacttgtcgagagcctgaaattgcagggctttacctatacaaggtatgttgacgatgtacatgtgagcgctaagaggattatgagcaagagtgagaaaaccagaatcatcaagggaatctacaacctgttcgcatcaattaacgtgcggcctaacagaaagaagcaggaaattatgcccagaaacttacaacagaccatacacaagctcaatgtgaacaagtctatgccaagcatgcctaaacagaagagaaatgacattcggcaactggtgtttctatgtgggaaagctttcggcgataatcggcttgcaatcaacgagtacacaaagatgtacaattcggtcatggggaacgtgaactatctgcgacgcatacatcctgaagaggggggccggcttctgagcaagctgaagtcaattactccctccaaccgattcatttga

SEQ ID NO: 11092 - RNA, 957 nt, synthetic construct
  source 1..957: mol_type = other RNA
atgattgtgtatccatataagccaatctcctcactgaaaagtctttctatcgtcctatgcattagcgagcaggagctgcactacatttatatgaactccgatagctactatttcctgacgaaggacattattaaaaacgacggtagtcataggttgacttacgatgtgaaatctaagctcaagaccatccacgataagattaccaaactgatcttgaagaaggtgaattaccctgactatttgcaggggagcctcagcggcaaagatttcataagtaacgccaaaaaccactccaaaaagcggattataatcagcgaggacattactaacttcttcccgtctatatcaaaggaaatcatataccagacgttttccaagctgttcaattttagccccatagtttgtgacatcctttccaaacttgtaacatataaggggtatctcgtccaaggctgtaagacatcatcttacctatgcaatctggtgttatggaatagagaaaaagcgctcgtggacaatttcaaaaagaagggatttacgtacacccggtacgtggatgatatccacattagctcgaactcatttatcaacaacgacgaaaaggaatacatcatcaaaaaggtgtacaatctgatgagaagtatcaatgtcaagcctaatcgcaaaaagcacaaaattatgaccaacgacaatagtcagtctgtccatggagttattgtaaacaaaaaggccgctttttccaaggaatatcgcaatgagatccgaggcctcgtgtttaattgccagaagaagtttaagctttcaattaacgagaaggagtataccaaattctaccaatccgtcttaggtaaagttaatctgttgaagaggctgaacgagaacgaggcaaagaaacatctgaacactctgtctaaaatcaaacccatccacttcaaggaaaaagagaaacatgattga

SEQ ID NO: 11093 - RNA, 945 nt, synthetic construct
  source 1..945: mol_type = other RNA
atgatgaagttttcatatcaaaacaagcccatttcaagcatcgacagcttggctaaggctttatccatcagtgttgacgaactgttctacctgtacaacaattccgataaattctactacgtcgccaagatagagccaaaacctgatgggtcctttcgtaaaacctatgacgtgaagactcgcctgaagaagattcatgagaagatcaacacaaatatcctgaagtgcgtgaaataccccgattatctacagggctcacttaaggagagagatttcctcagcgatgcaaacaagcacaccaacaagaagattattatcaaggaggacgttagcaatttctttccatctatctccaagaagattgtatatcaggtttgggcgattttctttaacttcactcatgaggtgtctgaaatgcttagtgagctgattacatataaagggttcgtcgtgcagggctgtaagacctccagttacatatgtaatctcatcttgtggaatcgggaggaaaagctcgtaaatgagttcaagaaacgcggctttatatatacaaggtacgtggacgacattcacgtctcatcgtgcaacataatcaaaaaagagaacaagcgatacatcatcaacaacatctataagctcatgtattctgttggagtgcggcctaatcgagaaaagcactctgtcatgcctaaaagcgacgtgcagaccgtgcataacgtaaatgtggataaagccataccaagctttcccaaacagaagaggaacaaaattagacttggtgtgtacaattgcgagaaactgtacgacattgaaaagcacacggaaaaataccggaaactgtattttagggtcctgggacaaatcaatatgatgaaaagattgcacgagaaagaagcccataaattaattcagagactgcgcaagatcaggccggaaaatatctga

SEQ ID NO: 11094 - RNA, 945 nt, synthetic construct
  source 1..945: mol_type = other RNA
atgatcccaaagtacctctttaaacctgtggccgacttagatcttctggcgaagatacttggcattacaaaacaggaactggacgacctctatcattcttcagattccttttttttcctgcacgagagaaagcaaaagagtgacggttcttatagagacacctataacgttaagaagaggctgaaaattatccacgggaaaattagcaaagagttcctgaagaaagttaattatccggactatctacagggcagcctcaaggataaagattttctgaccaatgccaaaaaccatctgggacaaaaaattctcataactgaggacatcaccaacttttttccctctatcagcaagaaaatcgtcttcgaggtgtgggtcggattctttaaattctcgaaagaagtcagcgagtacctcgctgaacttatcacgttcgagggctacctggttcaggggggaaagacttcatcatacatttgcaaccttatcttctggagtagggaatccgagctagtggactacctcgccaagaagggctacaaatatacacgttacgtcgacgatattactgtgagcgcaaacaaaattatcaccttaaaggagaagaccgatattatacgccggatttattccctgctgaagtctgtaggggccaaacccaatagaatcaaacatcagataatgccacgcaacaagcggcagatcatccacaacctgaatgtgaaccagaataagcccagtatgacaaagaagaagaagaacatgatcaaggcagctgtgttcgaatgtgaaaagaagttccaaaccgatcctaattccaaggagtacttgaaattgttcaataagacaatgggccgagtaaatcacatgaaaaggatacaccctaaaattggtgacgtgttgcagaaaaagttgaaactgatcaagccccaggataaattttga

SEQ ID NO: 11095 - RNA, 966 nt, synthetic construct
  source 1..966: mol_type = other RNA
atgtccgagcatagtagctttagatatccatacaaaccaatcgcgtccctggaaaaattagccatctgcctgaatataacgcttgaggaactgaactatctacaagagaacgccgactcattttactttctgaccacacgcgaacagaaaaaggacgggagcttccgcgagtgctacgatgtgaagaagcggttgaaggacatacatgagaagatctccatcaagttcctcaaactgattgagtatcctgaatacctgcagggcggcatcaaaaagagggattacatttcaaacgctagtcagcacacatgtagtttcgacttgatagaagaggacatctccaatttttaccctagcatcagccgggagatcatctatcaggtatgggttggattcttctgtttttcacatgaagtcgcagattgtctgtctaagttggtaacttttcaggggtatctggtgcagggatctaaggtcagcggtctgctttgtaatctgattctgtggaaccgagaaacaaagttagtcatgaatctcaagaggcaggggctcacttacacccgttatgtggacgatgtgacggtgtcttgcgatcgctacctcagtaacaaggaaaagcagcaaatcattaggaagatctatgctctgttctacactgtgggagcaaaacccaaccggcgcaaacacaaaattgaaagaaaaggcacacggcagaccgtgaataaccttaatgttacctcagagaacccgaccttgcccaaggagcaaaggaacaaaattcgagccgccgtcttcgaatgcgagaagattttcagaataggtaactcttcccttattcaatacaaggagctgtttgagagcaccaagggccgtgttaatcagctcaaaaggtttcacaaaaaacaggcaaattcgctactcaaaagactcgaggaaattcaccccaataagttcaaagctacttga

SEQ ID NO: 11096 - RNA, 966 nt, synthetic construct
  source 1..966: mol_type = other RNA
atgaacgattgtacgagtttcaattaccctggaaaacccatcgcttctctggagaaactggcattactcctcggcataagcctcgaagacctgatttacttacaaaaaaacgctgacagtttctacttcctggtgaaaagggaggagaaaaaaaatggctgttttcgggaatgctacgatgtgagagagcgcttgaagaacattcatgagaagaatttcgtcaggcttctaaaggtgatttcttatcctgagtacctacagggcgggattaaaaagagagactatattagcaacgccaaccaacataccagaagccacacaatcataaacgaggacatctccaacttttatccatcaatcagcaggaagatcatctatcaggtatgggtaggattctttcacttctccccggaggtggccgactgtctgtctcagttggttacatttcagggcaagctcgtccagggatcgaaggtgtccggactgctttgcaatctgatcctgtggaatcgagaagataaactggtgatgtcccttaagagccgtggcttgacatatacccgctacgtggatgatattacagtgtcctctaatagatacctgtcaaatcgcgaaaagcagcagatcatccgagagatttatacgctgttttatactgtcggtgcgaaacctaaccggtccaagcacaaaattgcttacaaggggaccaaacagaccgttaataacttgaacgttacttcagaaaagccaacccttcccaaggaaaaacggaacgaaatccgtgcagccgtcttcgaatgcgagaagaagttccaggaagggagtagttctatcgtggagtacaagaagatatttgagtcaactaaaggtagggtcaatcagctcaagcggttccataaaaagcaagccaacgacttactgcaacgcctcgagaaaatacaccccaatagctttaaggccgcatga

SEQ ID NO: 11097 - RNA, 963 nt, synthetic construct
  source 1..963: mol_type = other RNA
atgaacaagcctgtgtctttttgttatccccacaaaccaatagcctccctggaaaagttggctatttacctgggtatcaccttagaggaactgctctatttacgccagtactctaatagtttttacttcctgcatgaacggaaggaaaaagccgacggcaccttcagggatacttacaacgtgagagatcggctgaagaacgttcacgagaagattgctaagaagttctttacgattctggattaccctgaatatctccagggagggatatgcaaaaggagctctattacaaatgccaaacagcacatcggcatgaatatcctgatcaaggaggacatatctaactttttcccatcaatctccaagaagattgtacatcaggtgtggaccgggttcttccatttttcacatgacgtggcggactgccttgctgagcttgtgacttaccagggctatctcgttcaagggagcaaggtcagtggattcctgtgcaatctaatctggtggcaaagagaggccgacctggttgcagagttccagaaacagggactggtctatacaagattcgtggatgacgtaaccgtcagcacaaaacgcaacctttcaaacgcagagaagaagaagatcatcagcaagatttactcgctctttcacagtgtcgatgccaaggctaatcggaaaaaacagaagatcatgcacaaaggtcaccagcaaactgtcaataacatgaatgttagcataggcaagccgacattgcccaaagagaagcgtaaagaaatcaggaccattgtgttcaaatgtgagctgaccttccaaaataaagaaattcacatcactgcatacgagaagttgtttaactccgcgaaaggcaaggtgttttatctaaaacagtttcatacggtgcaagccgaacagcttttgcagcgactcaacaaaattcagcccaagttctttaactcctga

SEQ ID NO: 11098 - RNA, 936 nt, synthetic construct
  source 1..936: mol_type = other RNA
atggctgaatttgcatatccgcaccggcctatagcttcgctcgagaaacttgctatcgtcctcgatactaccgtcgccgagttagactttctcagtcagaacgcaaataacttctacttcaaggtgaaaagcatccagaaagccgacgccagctatcgtgacacttacgacgtccgggatagattaaaaaccatccacgccaagatcgtgaagaatttccttagaattatcgattacccagattatatccaaggtggggtacctcaccgggactacctgtccaatactgccatgcacactgcgaagcaggtggtcatatctgaagacattacgaacttcttctcaagcgttagctgcaccatcatatatcaggtctggtctaggttctttaaatttgctcccgttgtgtgtgagtgtctaaccaatctggtgacataccagggatttctcgtacagggcgccaagaccagtgggtacttgtgcaacctgattttttggaaccgcgagcaattcctggttgacacattggcaagtcagggttttacatattcaagattcgtggacgatatttcaataagctccccaaaagtgattacgtccgagcacaagaccgaggtcattgcaaagacatacggaatgttgcagtcttgcggcgtgaaacccaaccgcaaaaaacatcatatcatgtcaaagggcagctcccaaaaggtgcatcgagtgaatgtagtgtccaataaacctacattcgataagaaagagcgcaacgccattcgagccgcagtgcatgaatgtgagatgaacttctccaagagcaaatctagttctgaatatgagaagctgtttaataccactatggggagggttcaaaagatcaagaggcttcacattgaagaagcgaataagctgctggctaggctgcagaagatcaagccctga

SEQ ID NO: 11099 - RNA, 942 nt, synthetic construct
  source 1..942: mol_type = other RNA
atggataacaatgcattccattatccctataaaccaatcgctaatctgaagtctctggccctcagcctggacatcaccttggagcgattactctttctacagaagaactccgataatttcttttttctgcagggcagagtgaaaaaagaggacgggtccttcagggagacttatgatgtgaaagaggagctgaagaaggtgcatgctaagatcgtgaaaaactttttcaatgtgctgaagttcccttcatatctgcacggcggaattaagaagagggattacattacgaacgccaagcagcacctccaaccaaaaaccatcattagtgaggacatcaaaaatttcttcccctctatcactaagaatctggtctaccagatttggagcaacttctttaagtttagtcatgaggtagccgaatgtttggcggaaattactacatttaaaggtagcctagtgcagggcagcaaggtcagtgggtatattggcaacctggttctctggcaacgggagcccaaacttgtggaggaattcggcaagaaggggtggatatatacacgttttgtcgacgatatcaccatatcgtctaagcgcatacttagcaataaggagaagagcgaaatcatttctaaagtctatggattgttggcaagtataaacgtcaagccgaatcggaagaaacactccatcatgaaaaatggtaaagaccgccaaaaagtgacacagatcaatgtttcaacccagcggcttacattatcaaaaaaggagaggaattccattagatccgaagtttacttctgcgagaagttttacaagaactacaacaaggaagaatacaagaaactctacaactccattaaaggaaaggtatacaaccttcgaagattccaccaggacgaagccgataaactcctgaacaagctgaacaaaatccctccttga

SEQ ID NO: 11100 - RNA, 951 nt, synthetic construct
  source 1..951: mol_type = other RNA
atgagcaaccctatttacccacataaacccatcgggtccctggaagtattagcgaacgtcctcggaattcgggacattgatgagttactcctgatcaagaagcactctgacaattttttctttgtggcctccgtcattaaaaagagggatgggaccttgcgaaacacttacgatataaagcataagctcaagagcatccatagaaaaatcaagaacgttttcctgaagaagatttactatcccgaatacctgcagggcagtctggcaaagagggattacctgacaaacgcaaacattcacacaaactcaaagtgcataattacagaggacatcaagaatttcttcccctctatatcaaaagacattgtggtgtcgatctggaaaaacatctttcacttcccacacgatgtcagtgaaacccttgcagagctgatcacgtataagggatttttggtacagggttccccagtgagcagttacatagccaatcttgctctgtggtacaaggagccggagttggtgaatactctatctcagaagggctttatttacactcggtatgttgacgacatcagcgtgtctagtaaacgaccgatcacaaaaaaagagaagacccgcataatccggcagatccacacgatgctaagctccattggtgtggagctgaatcgcaaaaaacacaaaattatgccccgtaataacagacaagaaatccatcgcgtgaatgtgaatactaacgctcctaccctgcccaaaaaggagagagaaaaaatcgaatcagccgtctatcaatgcgagataatgtataaaagctccccaaaatcaagcgaatataagaccctgttcaatgctacccagggcagagttaatatgctttctcggttgcattcccctcttgccactaggctcaaatgtaggctcgagaagatcaagcctattaagaacacatga

SEQ ID NO: 11101 - RNA, 948 nt, synthetic construct
  source 1..948: mol_type = other RNA
atggacatcctgacaaaagtgctggggcttaaggacactaaccagctgaaggaattaaaggagaacagcgactcgttctttttcatagcgaagaaagagaaaaagagggatggtacaatacgcattacctatgacgtgaagagtgagcttaaactggtgcataagaaaatcactcggaagctactcaagaaggttaattacccagattacctcaaaggcagcctaccaaagagagattatttggacaacgccgatgcccacacaagttcaaagtgcatcatcacagaggacatcaagaattttttcccctcaatcagaaaagacatcgtaattagcatctggaaaaacattttccactttccccacgacgtagctgaaactctggctgagctgattacctacaaaggctgtctcgttcagggtggcacagctagctcttacatagctaatttggccctgtggtacaaggaaccagccctcgtcaaagagctgcatgatcaggggtttaggtataccagatatgtggatgatatctccgtgagctccaaaactataattacgccgaaggaaaagaccaaaatcattcgcaagattcacatcatgctttctagcataggagtcaaactgaatcgtaagaagcataaaatcatgcccagaaatgagtcccaaaagattcaccggattaacgttaacactaataatcctaccttgcccaagaacgaaaggcgaaaaattggatcggcagtgtaccaatgtgaacagatgtttaattcttcctccaactctcaggaatatgagaacctgttcaacagcacgttggggcgagtcaatatgttaagtaggctgcatgacagtctcgcagcaaagctcaagtgccggcttgagaagatcaaacctatcaaaaaaaccaccatgtcacaggcctcctcactggtgcctcgctcttga

SEQ ID NO: 11102 - RNA, 939 nt, synthetic construct
  source 1..939: mol_type = other RNA
atgaacaagccaaattacccctatgaacccattggatcgatttcaacccttgcacgagttctgggcctagaaacacaaaaactccagaacttatacgataactctgacgacttctttttcgtcacaaagaagaaactgaagagcgacggtagcttccgcataacttacgacgtgaaagccgaactgaaaagtgtgcaccggaagatcgccaaggaactttttaagaaggtgttctaccctgagtatctgcagggcgggatcgccaggagggattatatcggtaacgcgaatatccatatcgattccaaatgcatcatcacagaggacatgaagaattttttcccctctatctccaaggaaattgttatcgatgtctggaaaaacgtctttcactttccacctgatgtatcagagattctggctgagttgattacctataaaggatacttggtgcagggatgtgtcgcaagcggctacatttgcaatctggttctgtggaatcgtgaggcaaagctcgtcgtgaaattgaagaaccgaggcttcatctattcacgctatgtggacgatatctctgtgtcttccaaacggattttcacgactaaggagaagactgagattatcaaagacatacactccatggtgacaagtataggggtgaagcttaaccgcaaaaaacacgagattatgccaagaaataacagacagaagatacataggctaaatgttaactcctaccaggcttcaatgcctaagtccgaaagagagaagatcaaagctgccgtgtatcagtgtgagaagctgtacataaccgaaccctctagcgaaaagtacaaaagcctctttaatagtacccaagggagagtaaacagcctgagtaggctgcataaggaccacggcgataaactcaatttacggctcatgaagattaaaccgtactga

SEQ ID NO: 11103 - RNA, 942 nt, synthetic construct
  source 1..942: mol_type = other RNA
atgaactctccaacttaccctaactcaccaattgggagccctgccattctcgctcgtgtcctgggtattgatcccaacatactcctgagcctcaagaagaactcaaattcatttttcttccaggcaaaaaccgaagaaaaatccgacggcaccctccgaataacatacgatgtgaaagagcctttgaaaacgatccatagaaggatcgctgaaagacttctaaaaaaggtgacgtatccactgtacttgcagggtagtctgcctaaaagagactatttagggaatgccgctatccatacaaactctacctgcatcatttcccaggatgtgaagaacttctttccatccatcagcaaaaatacagtggtgcaagtctggaaaaatgttttcaagtttcccgaggatatcagcgaaattctggcggaactgatcacatatgaggggtttcttgtacaaggctgcatcaccagtagctatatatgtaatctggtcctgtggaatcgggagtctaagctcgttgacgagttaaaagaaaaaggattcacctacacaaggtatgttgacgacattactgtgagttcaaagcgaatcttcacactggaggagaaaaaggagatcataaagtccattcactctatgcttaagtcgatctccgtcaagctgaatcggcgcaaacacaagatcatgccccgtaacagtcagcaacaggtgcacagggtcaatgttaactccgatcgcactactatgcccaagtctgagagggagaaaattaaggccgcagtacatcagtgtgaggaattatacaaaaccctagccgaaactgaggagtacaaaaagttgtttaaccagaccctgggacgcgtggtgcacctcagcagactgcacgaacggcagggcaagaagttgaagcagaagcttagcaagatttacccgcggaagtga

SEQ ID NO: 11104 - RNA, 990 nt, synthetic construct
  source 1..990: mol_type = other RNA
atgaataaactgtcttacccacatgctcccatcggcgaacttgataagctggccaaagccttgaacattgaattaagcgagttacagacaataaccgataaatccgactcacttttctttcaaacgaaagagatcatcaagaatgacggtagttctcggttcacatacgatgcaaggcccacactcaaagtcatacatggcaaggtttgtgaagctttcctaaaacgcgtgaattaccccgactatttgcagggtagcatcaaacggcgcgattacctgactgacgcccggaagcacgccggatcaaaggtcctgatcagcgaagacattaccaactttttcccctctataagtaaaaaggttgtgcacgaaatgtgggtgggggtctttggattctctaacgttgtggccgagtgccttgcggagctggtgactttaaatggatttgtcgttcagggcgcaaagactagcagctatatttgtaatctggtgctctggaacagagaggagcgtctcgtaaactcacttaaaacgagaggactgatttataccaggtatgtggacgacgtgactgtgtcgtcaaagcgtctgatctcgctgaacgagaaaagcaagatcatcaattccatttactccctattccgcagcattggggcaaaacctaaccgaaataagcacaagattatgccacggaatacccagcaggaagtgcatggcgtaaatgtgaacaaaaaccaaccgaccatgcctaaggaaaaaaggaagaagatcagagcggctgtccacaggtgcgagattacttataagcagaccccagatagtatcgagtactgcgctttgtttaactccgtaatggggaaagtcaacacactcgggagaatgcacacatccgaggccgataagctccgactgcgcctgtctcaagtcaagcctgttagtgcacagtccttgaacaagcctctcgtgtctaataccggcctgataacctga

SEQ ID NO: 11105 - RNA, 945 nt, synthetic construct
  source 1..945: mol_type = other RNA
atgagaaagcccaattatccccacgcaccgattggtgatctcgataagctggcactggctttgcatgttagcaaaaaggggctgcagacagtgacagcccaatccaatgacctgtttttcctgactcggaagataaagaaagaggatggctcctatagactgacgtacgacgcgaaaccctcgctgaaaagcctacatggcaagatctgtgaggcattcctcaaaagagtagaatacccagactatcttcagggttctattcggaagagggactatctgacagacgctcgcagtcatgtgggctccaaggtgttaatcagcgaggacataaccaacttctttccttcaatttctaagaaaaccgttcacgagatgtgggtcggagtgtttgggttttctaatatcgttgccgaatgcttagccgagctggttacgatgaatggagatgtggtgcaaggagccaagacttcatcttacatttgtaacttggtcctttggaacagggaagcccagctcgtaagtcagctgcgaaagaaaggtctggtatatacccggtacgtcgatgatattactgtctcaagtagacgcagcctctccaagagcgagaagagtaggatcatcagctccatttactcaatgtttcgatcaattggcgctaaacccaaccggcggaaacacaagatcatgccacgtaacacacaacaggacgtgcatggcgtgaacgtgaataaggacaggcctactatgccaatggagaaacgtaatcagataagggcagccgtccaccgctgcgaaatcgcgttcaacgggaggccttcctctagtgaatacgtgtccttgttcaactctgtgatggggaaggtcaataccatgggcagaatgcaccgcagcgaggctggaaaactaaaagcccgactccttcaggttaagcctgtgatcacctga

SEQ ID NO: 11106 - RNA, 945 nt, synthetic construct
  source 1..945: mol_type = other RNA
atgaaccagccccgctatccctttgctcctataggcgacctggagaaattatccttagccctgggagtgaaactgctagagctgtacgacttgaaggcacgtagtaatgaactgttcttccaaacaagagacattgtaaagcctgatgggtcccatcggatcacttacgacgttcgcgctccactaaaactggttcacggcaagatatgtgaggtgtttctgaggagagtggaatacccggaatacctgcagggcagtattaagaaacgagattacttgactgacgccaataagcacgtcagatctaaagtgttgatcagcgaagacattacgaacttctttccctgtatcagcaagaaagtaattcacgaagtgtgggtgggagtgtttgggttcagcaacgaagtgtcagattttcttgcggagctcgtgaccctggatgggtttgttgtgcagggctccaaaactagcagttatctttgcaatctcgtcctgtggtcccgagaggcacaactcgtgaagaggctgaagatgaagggccttgtctataccaggtacgtggacgacataaccgtctcgagtaaaagaatcttgaacaacaaggagaaatctgatatcatcaacagcatttacgctatgttccggtcagtcggtgccaaacctaatcgcagaaagcacaaaattatgccacgcagcgcacagcaggaagtacacggggttaacgttaatcggcagcaggccacaatgccaaagtataagaggaatcaaattcgggctgcagtacatgagtgcgagatcatattcgattcagattcttcatccgagacatatatctctacattcaactctgccatgggtcgtgttaatacccttggaaggatgcataaggtcgaggccgaaaagctcaaggtgcggctcgaggcggtgaaacccatcctcgtctga

SEQ ID NO: 11107 - RNA, 945 nt, synthetic construct
  source 1..945: mol_type = other RNA
atgaatctacctgtatatccccatgcttctgtggcgaacctgtcatccctcgctttggcccttggcttgtcactgaaagaactgcatgagctggcgtctacctccgatgactactattttttaacgaggaaaatcgagaagcctgatggctcgctccgactgacttatgacgctcagccaatcctcaaggcaattcacggtaaaatcagcgaagtctttctgaaacgtgtggactaccctcggtttcttcaggggagtataaaaaaaagagactacatctctgacgccaagcagcacgtgtcaagcaaaatgcttatttccgaggatattacaaacttcttcccaagcatctctaagaaggtcgttcatgaggtttgggtgggggtgtttgggttctccaatgaggtagccgatctgttggcagaactggtgacctatcaggggtacgtggtgcaaggctctaagaccagcagctacatatgcaatctggtactgtggaagagggaagctgagttagtcagtaagttggaggccaagggtttcacctacacccggtatgtggacgacgtaacagtctcaacaaagcggattgtttccaaggccgaaaagtcggagatcatcaactctatttattccctcttcagatccgttggcgccaagccgaaccggaaaaaacacaaagtcatgcccaggaacaatcgccaggaagtccacggcgtcaatgtgaacaagactgcccccactatgcccaagaaggcacgagatcaaataagagccgcagtgcaccagtgtgagctcgcatttggagatgacccaactaccagtgagtaccagagcgcttacagtagcgccatgggacgcgtgaatacaatgggaagaatgcatgaaaaagaagctcgcgatctaagggctcgtctggccgcagttaaacctgtgacgaactga

SEQ ID NO: 11108 - RNA, 945 nt, synthetic construct
  source 1..945: mol_type = other RNA
atgactccaaagtatccgcatgatcccattgcccacgtggattccctgtgcttgagcctgggtgtgacccagtctaaactgaaggagatccaacgaaagtccgatacatacttttttgtcacgaaggaaattgtgaaaaaggacaacacaattagacagaccttcgacgtgaaaccagagctgaaacggatccacgagcggatatgtagtgcgttcttaaagaaggtagagtacccagcttatctgcaaggctccatcaaaaagcgcgactatctcagcaattgtgctctgcacacaggccagaaacttgtcatcagcgaagacgtgaccaatttcttccctagcatctcatcattggtggtacatcagatgtgggttggagtttttaagttttctaacgaaatcgccaccatactcaccgacctcgtttgtttcaacggatggttagtgcagggcgctaagccttcgtccttcatttgcaaccttatcctgtggaacagagaatcaaaattggtggaggaactgaaccagagggggctcaaatacacgcggtatgtcgatgatattaccgtctcatcccctactaatctgtctaagagtagcataacagagattttgagcaacatctacggtatgctggcatccgtgaatgccaagccgaataggaagaaacatcaggtgatgcccaatgggaaaagacagaacgtgcacagagtgaatgtcaaccatagtactcccacactgcctaagaaggagaggtctaagataaaagccgccgtttatcagtgcgagaaggattttgcaatcaaggtcagtaaagacgaatacgaactcctgtacaatcaaactcttggacgagtaaacaacctcaaacgtatgcacccaaagatgggggaggagctacttgcacgcctaaggaaaattaaaccctgcaatcgctcttga

SEQ ID NO: 11109 - RNA, 939 nt, synthetic construct
  source 1..939: mol_type = other RNA
atgacaccccaatacccgcacgagcccatagccaatttgaatacactgtgcctggcccttggcctgaccgcttcaaagctgaagtacttgcagactaattcggacagctacttcttcataaccaaagaaatcgttaagcctgaccagtctatccggcagacctttgatgttaaaccagagttgaagagaatccatgaaagaatctgcagcgcattcctgcgcaaggtggattaccctaactaccttcaaggtagtattaagaaacgagactatctctccaactgtgcccttcataccaacaagaagctggttatatctgaggacgtcaccaactttttcccatccatcagctccaaaatcgttcacgagatgtgggtcggcgtgtttaagtttagcaacgaaattgctagtatcctcacagatctggtatgttttaagggatggctggtacagggagcaaaaccatctagctttatctgtaacctgattctgtggaatagggaagcgaggctcgtgctcaaactgaatagcatggggttaacttatactcgctatgtggatgacattactgtgtccagctctatgaatctgtctaaatcgctcatcacggaaatactgagtgatatttatgggatgctaggttcagtgaatgccaaacccaatagaaaaaagcataaactcatgcctaacggatcacggcagaacgtccaccgggtgaatgtcaacacggacatcccaacacttcctaagaaggagaggaataaggtgaaggctgcagtccacgagtgctccttaaaattcaaagccgataactcctcaattgagtacaagtctctctataacagtacccttgggcgagtgaacaatctggctcgtatgcaccccaaattgggcaaggagttaaggacaaaactaattcgcttcaagcccattatctga

SEQ ID NO: 11110 - RNA, 1002 nt, synthetic construct
  source 1..1002: mol_type = other RNA
atgctgattaaacccacttatttacacaaacctatcgggagcatcgagagcttagcaaagtctctcggcctgtctaaggaggacctgattgaactggcgtcaaactctaatgagtacttcttcattgcaaagaaggtcgagaagcccgataaaagtatccgattgacttacgacgtcaagccacggctaaagcaaattcatgagaagatctgttgcaacttgttgaagaaggtaaactaccccgactatattcagggaggggtgcgcggcaagagctatctgagcaactgccaaaaccacacccacaaaaaaatagtgatcaaggaggacgtgtcgaacttctttcccagcatatccaaaaagattatacacgaggtgtgggcaggtttctttcattttccatcagatgtcagtgaacttctgtccgaacttgtgacctttaatgggtatttagttcaaggaggcaaagcttccggattcctgtgtaacctcgtattgtacgaccgggagtctaaactggtggaagagttctccaaaaagggattcaagtatacccggttcgtcgatgatatcacaatatcctgtctccgcaatattacaaaagatgagcagacttacatcattagaaagacctacggtctgctgaaatctatcgaagtgaaccctaataaacgtaagcacaaaatcatgtccaacggggtgcaacagcagctgcatggcgtcaatctcaatacaaataagcctacgcttcctaaggctgaaaggaagaaaattgaagccgccgtttttcagtgcgaaaaagcccatagtgaaaacagcaattcaatccagtacatcaagcagtttaactcagccatgggcagagttaataccatgaaaaggatgcatccaaaagccggtcaggctctcctagagaggctttgcaaaatcaagccgcagattaacagtcgcacatttgagcagaagcacagactggagatcttccgaaatctcgtgaattga

SEQ ID NO: 11111 - RNA, 939 nt, synthetic construct
  source 1..939: mol_type = other RNA
atgataccactgtaccctcataaacccatcgccagcttgaactcactcgctaaggctctcgggaccacctccgatacactctctaacctgactgccaattccgacaaatacttctatctgaccaaggtgattaacaagcccgatggtagcgtaagaaacacctatgacgtcaagccagagctgaaaaaattccacgagcgcatcaataccttctttttgaagcaggttaagtatcctaacttcttacacggatctctgaaaggcaaggattatatttctaacaccaaagaacacaccaacaaaaaagtggtgatctctacggatgtgtccaactttttcccctcaatttcaaagaagactatacatgaggtgtgggtgggcgtgtttaatttttctcacactgtcgccgactgcctgtccgaactagtcacgcacaagggttttcttgtgcagggctcaaaagtttctagttacctggccaatctggttctgtggggccgggaaagcaaattggtgtgcttctttaataagaaagggtacgtctatactaggtacgtggacgatatcactatttcctgtgaccggaacctgacaaagatagagatcgcggacatcacaagccaggtttatgccatgttaaaatcgattgacgtcgcacctaacaggaaaaaatacgcagtgatgacaaacggaaatagtcaaagcgtacatcgactcaatgtcaaccggagtgtccccacaatgtcaaagtccgagcgcgccaagatcaagtccgcagtattcgagtgtgaaagtaaggctgctgagaatcgtggcactcacgaatacattaaactatacaatcagaccatgggaagagtgaatagcatgaagaggctccatagcgatcttggggacaagctgatcagtagacttaagtgcgttaagccgacaccatga

SEQ ID NO: 11112 - RNA, 939 nt, synthetic construct
  source 1..939: mol_type = other RNA
atgaaacccacttatccccatcaacctgttgccaaactcgactccctggccctggcacttggcctcacccactcagagctcatcgaactggcttctgttgccaactccatgtatttcgtcaccagagtgattgaaaagccagacggtagtaagaggatcacacacgacgtgaaagctcgcttgaaacgggtgcacgagagaataaatagcgtctttctgaaacaggtcagctaccctagctacttgcagggaagcttaaaagggcgagattacctttccaacacgaaacagcacatcaataagcacatcattatctccgaggatatttctaacttctaccctagcatcagcaacaaggtggtgcacgaggtctgggtgggctgctttggattttctaacgaagttgccagttgccttaccgcactagtaacacataacggacacctagtacagggggggaagacctctagctacatatcaaatctggtgctctggtcccgggaatcgaagcttgtggaagagctgaaaagaaagggcatgacctatacacggtacgtggacgatgttacagtctcctcccctcgacccctgtcaaagtcggagatcacaaacgctattagttctgtgtatggcttgttcaaaacgattaatgtcaaaccgaatcgtacaaagcatgaagtgatgtctaagggcaagaggcagactgttcatcgcgtgaatgtgagcgcgggtcggccaaccttttcaaaaaaggaacgttccaagataaagactgccgtctttcagtgtgagcagctgttccccaaggctagtactactcaagagtacttgtcaatgtatagatctgcactggggagggtaaataccttagcccgcctccataagaaagaggcagatagtctgaaggagaggctgaaagcgattcaaccattcatgtga

SEQ ID NO: 11113 - RNA, 957 nt, synthetic construct
  source 1..957: mol_type = other RNA
atgacattgaccccgaagtacaattttaagactataggctccattaacgcattagcacgactgctccagatccccctgaacagagtcatttatctctccaataacgccagcgatttctatcgcgtggccagagtggagcagaagaagacaggcgggcaacggatcacatacgatgcctacaaaaccctgaaagtgatccatcggaagatacagacccagattttcaaaaaggtcatctatccccagtacatgcatggctctatcagcggccgctcttacatcacgaatattaagaatcacacgaagtccaagatcgtgatttgcgaagacatctccaactttttcccaactataaaggctgaacaagtagagaaaatgttcatccgactgtttcactacccaaaaaacgtagccaaaacccttaccaatttggtcacacttaacggatccgtgcctcaggggggaatctgctcatcttacattgcaaacctagtgatgtgggagaaagaaagcattttggtcgcgaggctggctcgggaagagctcacttacacccgttatgtggacgacatcactgtttcagctaaaagttatatgtcaaagcctaaagtgagtgaggtgatcgctctgatttacggtatgcttaggtattatggtctggagcctaataaaaagaagcacgaagttctgggcaacggaacatatcaaactgtacatagagttggagtgaatgggaggaggcccagtttcggacacgacgaaaagcagctcatacgcagcgccgttcataacctgcacattctctttgtggataaacaatgtacctacgagaattacctaaaagtgttttcgagcgtcagctcaaaggtcggcaagcttaaacagctgaacgagtaccaggggaagaagtatagaacgttgttaaacaccatcaaactgtctattaaggataattga

SEQ ID NO: 11114 - RNA, 966 nt, synthetic construct
  source 1..966: mol_type = other RNA
atgacactgacgcctaaatacacactatccccgatcggctccattaacgccttggcacggctgctgcagttgcccctcaatcgcgtacagtatctcgcaaagaattctagcgacctgtaccgcatcgcccgtatcgagcaaaaaaaatcgggagggaaaagggtgacatatgatgcctacaaggaactgaagagtgtccataggaagttacagcaccaaatttttaagaaggtgatctatcctcagtttatgcagggatctataagcggcagaagttatataactaatgtcaagctccataccaagagtaaactcgtgatctgtgaggacatttctaacttctttcctaccatacaggctgaaaaggtcgagaatatgtttatgagattgttccatttcccccaggatgtcgctaaaacactgacctctctggtgaccctgaacggttctattccacagggcggaatctgcagcagttacatcgcaaatctggtgatgtgggagaaggagtcagtgctggtgcttagacttaataacgctaagctaacctatactaggtacgttgacgacattacggtatcatcaaagaactacattaacaagcaggagatcagcgacgtgatcgctagcatatacgggatgttgcagcactatgggtttaaacccaaccgatcaaagcatgatgtcctcgggaatgggtcccatcagactgtgcacagggttggagttaatggtaaacgagcctccttcggcaaggaagaaaagaagaaagtgcgctctgcggtacacaaccttattaatcttttcagcgatggccaatgctcctacgagcactacttaaaaatctttagcagtgttagctccagagtgggaaagattcaacagctcaacgagtatcaaggtaaaaaataccgggaatcactgaacgccatcaaaccatccattaaacggttctatcacggctga

SEQ ID NO: 11115 - RNA, 966 nt, synthetic construct
  source 1..966: mol_type = other RNA
atgacattaacgccggaatataagctgaaaagtataggctcgatcgatgcactcgctttcttgctggatctgcctttgaacagagtgcagtacctggcaaacaatgcatccgacctgtacagggtcgctcgaattgaacagaagaaaagcggcggacagcgtgtaacttatgacgcttacaaggtgctaaaagcgatacatcgcaagctgcaacaccagatcttcaagaaagtgatctaccctcagtatatgcagggttctatctcaggaaggtcttatataacaaacgtgagataccacactaaatgtaaaatcgtcatttgcgaggacatttcgaatttctttcctacaattcaggccgtacaggtggaaaagatgttcatgcggctctttcgttttcccttagaagttgccaagaccctcactaatctggtaacactgaacggatctgttccacaaggagggatctgcagtagctacatcgctaatctggttatgtgggagaaagagtccattctcgtctcacgccttttgaccgtgaaacttacctatacccggtacgtggatgacatcactgtcagcagcaaatcctatatgacgaaacaggagatttccgaggtgatcgccagtatctatggtatgttgaggtactatggcgtcgaaccaaataagtctaagcacgaggtgctaggcaatgggagccatcaagccgtccatagagttggcgtgaacggcaacagacccagcttcggtaaggaggaaaagaaaaagatacgatcagccgtgcacaacctctctacacttttttccgatgacaagtgtacctatgaggcctacctccgcgaatttagctctgtgagttcacaggttgggaagcttcaacagctgaatgagtaccagggaaaacggtaccggggggatctgaacaccatgaagccctccattaagaggttcaatctggggtga

SEQ ID NO: 11116 - RNA, 909 nt, synthetic construct
  source 1..909: mol_type = other RNA
atgttgcagctgccggtccctagaattagatatctggcccagaatgcctctgatttctaccgtgtggcaaggataaagaccaaagccaacggggataagaggattacctatgacgcataccgctcactgaaagatcttcacaagacactaaaagtgcggttatttcagaacgtcagttatcccgactacatccaaggagccatctcggggaggtcctatattggtaacgtgaagaagcacacaaaatccaccataattatatgcgaggacattaccaacttttttccaaccatccgagagtccgatgttgagaagatgttcatgcgcttgtttcacttccccaaggaagtggcctcaattctgactggactcgttaccttgaatggcactgtgcctcaaggcggggtttgtagctcctatgtggcgaatctggtcatgtgggaaagggagagcgcattagtgagcctcctccaggctaaaaacctgacatacacacggtacgttgacgacatcactgtaagcagtaaatactacatcgagaaagtggaaatcggcaacgtgatcgcttctatctacgggatgcttaagcatttcggtgtgaagcctaacaaagccaaacacgaggtgctgtcaaacggaatgcatcagaaggtacatcgggtcggcgtaaatggtaagcgcccaagttttggcaaagaggagaagaaacgggtcagatccgccgtctataacctggaagctctgttcaaggacaatacgtgctcttacgatgaatacctcaaggcgttcaattctgctagcgcccttgtggctaagctaaaacaactgaacgaacaccagggacagaaatatcgagaaagcctgaatcttctcaagcccagtgcaaagagagttgagttgtcaaattga

SEQ ID NO: 11117 - RNA, 978 nt, synthetic construct
  source 1..978: mol_type = other RNA
atgaaccaaacccccgaatacccacacctgtcaatcggaagcattaacagcttggcaagactgctccgtcttcccgtgaaccgggtgaagtacctcgctacaaactcctcagacttttttcgggttgccaggatcgaggaaaaaaaaagcgggggccagcggattacctacgacgccttcaagtgtctcaaagatgttcaccgccgcttgaaggtccagatctttcagcgagtaatctatcctagctatctgcagggctccctgaaaggatgctcctacataaccaacgtcaaaaatcacactaagtccaaaatcgtcatttgcgaagatatatccaattacttcccctctatcaagagccctcttattgaaaagatgttcatccgcttattctccttcccagaggacgtggcacgcattttgactcagctggtaacactaaacggactgctcccccaaggcggggtgtgttcatcttacatcgccaacctgatcatgtgggaaaaggaagtgctcctggtgggaagttttgagaaaaggggtcttacttacaccagatatgtggatgatataacagtcagtagtaaggcgcatctgaccaagtcagagattagcgaggtgatttccagtatctacgggatgatgaagcactatggtataaagccaaatttaaagaagcaccaggtgttaggcgacggttctcatcagaaggtccacaacgttggggtgaatggccgaagaccgtcatttgggaaagaggaaaagaaacgtgtacggtctgcagtgcataaactgaaactgctgtttgacagccctgattgcacatatgaggactatctagccgctttcggcagggcttcttcgttggttggaaagctgaaacagcttaatgagcagcaagctacgaagcataggggcgagctcaataaaattaagccttctttcagaaacgccagcaatagtaatctcgtcgagtga

SEQ ID NO: 11118 - RNA, 978 nt, synthetic construct
  source 1..978: mol_type = other RNA
atgaccttgattccaaggtatacctccctgagtttaggatctattaatgcactggccagattactgcagctgcccataaatcgggtcagtcacttggcagaaaattcttcctcctattaccgcgtggctaagataaccgagaagaagaacggagacaaaagagtaacatatgacgctttcaaggtactcaaagatgttcaccggaagctaaaaaaccagctgttcaataaggtgatttatcctgactacctgcagggcagtctgcgcggacgtagctacctttccaacgtgaagaaacacaccaagtcaaagctgctcatctgcgaagacataacgaatttctttccgagcatttcagcggcccaggtggagaaaatgtttatgcggctgttttctttcccaaaatgcgtcgcagagattttgacaaagctcgtaacgctgaatgggtgtgtgccccagggaggggtctgtagctcttacatcgctaacctcgtgatgtggaacaaagaggcagtgctcgtggaaaaactgatttctgacgggctgcgctacactagatacgtcgatgatatcacagtgagtagcagaaggtatgtcacaaaggaaaagatcagcaaggtgatcgcgttaatctatgggatgctaggacattacggtgtgaaacctaatcgggccaagcatgaggttctcggcaatggcagccaccagactgttcaccgtgtaggcgtcaacggtagccaaccttccttcggcaaggatgaaaaaaaacgaatcaggtcagccgttcacaagttggataccatgtttcatgacaacaactgctcctacgccgactatcttaaggcttttggttcagtttcatcgaaagtggggaagctgaaacaacttaatgagcatcaagccactaaattccgaggccagctgaacgtgatccgcccctccgtcaaaaggctcaagcttgacatggataactcttga

SEQ ID NO: 11119 - RNA, 960 nt, synthetic construct
  source 1..960: mol_type = other RNA
atgaacagcgcattttacaacgggaagcccatagcttctattgccgccctcagcagcgcacttaatgtccccgaggacatcctgatcgacatgagccacaacgctaataagtactataagaaaaaccgccccgaaatcaaaagcaacggcaaggagcgcattcactactctgtatcggaatccttgaaggccattcaccaaaggatcaaagttattctcttccaaaacgtgacatacccagagtatcttcagggatccatcagggatacaaagaagacgcgggactacattagtgatgctcgcatgcactccggcaagagaatgctgatatctgaagacgttagcgactttttcccgtccatcaagtatgatcaggtgctcaagttgtggatgtacttcttcaacttcccgaaaaaaattgccaccactctgacggacctgaccacctacaaagggtttttacctcagggatcaaaaacatcatcttacgtcgccaacctaatattttggcaatatgaacctgccctgtacaataagctcaaggcgcagggtatcacttattctcggtatgtggatgatactaccctgtcatttgaccgatacgtgagcgataaagagttaggacagatcatatccagtattttcggtatgatgtgccaggttaatattaagccaaacagagagaagcaagacatcaaaagtagaaagaacaataccacagtacataatctgaatgtcactaagaaaagtcccaccatccctaagaaaaagaaaaacaatctgcggatggcagtgtttaactgtattaagcattctgatctccatggcaggaaatcagagacatataaaaagatgtaccgatccaccatcactagggtgggccagcttgggcgtttgcacccaaatcagtcccagaagctgaaggacaaactagctccatataaacctttcaatagctga

SEQ ID NO: 11120 - RNA, 939 nt, synthetic construct
  source 1..939: mol_type = other RNA
atgagcgcttactatccccacaaacctatcgccagcattgagtcccttgccaagactttggatgtgactgaagccgaactgttagaggttgcccagaatagcgactcactcttctttgtcgcaaaatgtgtaaagaaggaaaacgggaaggtgagagttacatacgacgcccgccctgcactaaagaacattcacgataggatcaaaatagctctgtttcgggtagtcaaatatcccttctatctgcaaggaggcatcagcggccgagattatatcagcaacaccaagatccatgccggtaaaaagtttcttataaccgaggacgtgtcaaatttctttccctccatccaggactcagtcgtgaagaaaatgtggctctacttcttccacttttctcctgaagtggccgatgtcctgactaagctgaccactcataatggttttgtgccacagggggccaagacgtctggctacatagcaaatctcattttgtgggataaagagcccgtgctcgtggaatatctgcgcaagaaaggaatgagttacagtcgtctggtagatgacattaccatctcgtgcgactacaagccatctaaaaagcttttggcttccatgatttccgatgtgtacgggatgctgctatctaaagacgtcaagccaaacaggggaaagcacaaaatcatgacccagggcgagaagcagcggatacacaacctgaatgttgataaaggaagaccttcattaccgaagtccaaacgagctgacattagggcagcggtgttccaatgcgaagagatggcgaagtacggcagaaagacagaggagtataacaagctgttcaacagtaccgtggggagagttgctacaatgaagcggctccatccgacacaggcaacgattctgaggaatcgccttgacatgatcaaaccaaaaaaatga

SEQ ID NO: 11121 - RNA, 1140 nt, synthetic construct
  source 1..1140: mol_type = other RNA
atgaatcttcgtccaaaatacacccagaaacctattgggtctattgaagctctggctaatctcctgaacttgactctccatgacctagataagctgattcagtcctcgaacgacgattatatcgtcgccgacaaaatcgagaaggatgatggttctattcgagtcacgtacaaagccaagcccaaactccggaccgcactggacagtattaaatccagggtattcgacaaggtcgagcaccccgattacataacagcgggacagataggtaaaagctatgtagacaatgcgcaggcccacatcaactcaagaatgttgatgtccgaggacattaggaatttctttcctagcattagcgtcaaggaggttaaccgaatcttccagcacttcttttgcttcccgccaaaggtgtccaacgctctaagcgaactttccaccaaagaaggctttctggtgcaggggtcccccctctcaggggaaatcgcaaacctgatattttatcgggatgaacccgaactcgttaagttctgtcaggatcaaggcctccgctacactaggtactatgacgacattcacatctcttcagatgagaaggacttctatgagcttattcctcatttgaagagtgagatataccggatctttgggaaatcaggagtgaagccacatagagccaagaagaagtcacacttctcaacatgtagttctcggctgtccgtgcacgacgtgacagtgaattcgaagaagaccaatcctagccaaaaaagaatctctaaggtgagacagctgctgtttacgtacgagtatatggtggataataactgcgatatcgaggacattataaaaaaataccgctccatccatggacacatcaacacccttcaacagcaaggctattctcaggcaggcaaattaaaggagcatttgagcctgattacttgccgcatcagtgaatctgaagctaagaagtacgcacgtaaataccgcaaagtgaagagcaaaaaggagctgacacagttttcatctaaggtcagcatcttaaaaaggatttccggcagagttgccatggttatcaatagtgagaagaaatgtgccaacgataagatcaagaaaaagctgagtaggaacagcagcatgtga

SEQ ID NO: 11122 - RNA, 1140 nt, synthetic construct
  source 1..1140: mol_type = other RNA
atgaacctccagcccaaatatacccaaaaacccgtcggttcaatcaaagctctcgccaatttactgaatttgaccctgaacgaactcgaggaattaattcagtcctctaacaatgactacattatagccagtaagatcgagaaggccgacggctctttaagggtgacttataaagctaagcagaaactgagaatcgctctggataccatcaaaagccgcattttcgataaagtcaagcacccagactatatcgcggcaggccagctcggaaaatcatacacgaacaatgccaaggcccatatcaattctaaaatgctcatgagcgaagatatcaagaacttcttcccttcaattagtacaaaggaggttaaccgcatttttcagcacttcttctgctttcctcccgaggtgagcaatgccctatcagaactttcaactaaagacggctttctggttcaggggagcccacttagcggtgaaatcgcaaatcttattttttaccaggacgagccggaactggtcgagtattgtcagtctcaggagctgagatacaccaggtattatgatgatatccacatttcctccgacaagaaagagttccacgaattgatcccacatctgaagtcgaagatctaccggatctttgggaagcatggggtgaggcctcatagatccaagaagaagtcccacttctccacatgtagcagccggctaagtgtgcacgatgttactgtaaatagcaaaaagacaaacccctcacacgagcggattagtaaggtcaggcagctgctgttcacctacgagtatatggtggacaacaatagcaatattgaggacatcattaagaagcacagatccatacgtggacatataaatacgctgcaacagcaagactactcgcaggtgaaccggttgaaagaacaacttagttttatcactcgcaagataaacgagtccgaagccaagaaatacgcacgaaagtacaggaaagtgaaatctaagaaggagctcacacaattttctagcaaggtctgcatattgaagaaaatttcagtacgagtggcgatggtgatcaactccgaaaagaaagcagctgatgataagattaaacgcaaactgtctcgtaacagtgtttcttga

SEQ ID NO: 11123 - RNA, 1056 nt, synthetic construct
  source 1..1056: mol_type = other RNA
atgcaccttcgggtagagcgtgtttacatcgtggccaataaaatcgaaaaagatgatggaagcctgcgggtgacctataaggcaaagcctaaactccgggtcgtgctagactccattaagagtagaattttcgataaggtcgaacatccagactatatcacagctggccagatcgggaaatcttacatagacaacgcgaaagttcatattaattcccgcatgctgatgtctgaggatatcaggaattttttccccagcattagcataaaggaagtgaaccgcatctttcagcactttttctgcttcccccctaaggtaagcaacgccctgtccgagctgtctacaaaggaaggttatctggtgcaggggtcacctttatctggtgagattgcaaacctggtgttctatagagacgagccggagctcgtgaaatactgccaggaccaaggcttgcggtacacccggtattacgatgatatacacattagtagtgacaagaaggagttcaacgaattgatcccacacctgaaatccgagatatacagaatctttggcaagagtggggtcaagccccatcgctctaaaaaaaaaagccattttagctcctgttcgtcccgattgtccgtccacgacgtgacggtcaattcaaagaaaacaaatccaagccacaaaagaatatctcaggtcaggaagctcctgtttacctacgagcacatggtagataataacttcaacattgaggacatcatcaaaaagtacaggtcaatccttggccatattaataccttgcagcagcaaggctatagtaaggccggaaagctgaaggaacaactgtcactcattacttgtcgtatttctgagtccgaagctaaaaagtacgccagaaagtatcgaaaagttaaatccaagaaggaactgactcagttcagctcgaaggtgtatatcctaaaaaggattagcggaagggttgctatggtgatcaactcagagaagaaccttcaaatgatcaagttacgcaaaagctacctcgtgattcagatctacaatcagcactga

SEQ ID NO: 11124 - RNA, 1140 nt, synthetic construct
  source 1..1140: mol_type = other RNA
atgaggaatctgtcccccgtgtacaaacaaaaacccatttcctcaatcgatgccctgtgcagactgctgcaggtggagcagagggacctgctgtctctggccgaaaaatctaacagccattacctaaagaagaccgttgaaaaatcgggaagtaagcctcgcgtaacctataaggcatcacccgagcttcgtccaatcttggacagtctgaaggatcgagtcttttcctgtgtctcctttccggcctatatcgccgctggccaactggggaagagttatgtggccaacgctgaatctcacataggtgcaaaaatgctcatgtctgaggacatcaaagactttttcccaagtatcactcagtcccaagtggagaatgtttacaagcatttcttcaaattcgcaccaaatgtgtctctgttactctctgagctatgtaccaaagacggtaaacttgtacaggggtccccactgtcaggatacctcgcaaatctggtgttcttccgggaggaacacagcatagtcgcctcatgcattgaacacggcctacactacacacgttactatgatgacattcacatctcctcatgtcagttgttttacgaggaagtccatgatctcaagcagttactttacgggatgatgggaagagtgggagtttcacctcaccgcagccctaagaagtgcaatattaaattgtcgaacacccgcctttatgtgcatgatgtgacgataaatagtcataagacgagcccttctcgaaaacgcgttagcacagtgcggaacctcctgttcaactttaacaattgtgtctccagcggctgcgacattgaaactctggtgaaacactatcggagcatcttgggccacatcaacacactgcagcagcagggctacgggaagtccaaaaccctcaagaaggagttaagggaagcagtccatcatatcgatgagaaatccgctaagaaatatgcgagaggctacaggaaggtaaagaactcaaaggagtttaaggctttctctttgaaagctagcattctcaagaggattagcggtagagttgccagcgtgatcaacgctgagcacgacacagccaaaaagaagcttgagagaaatcgggcgagtcggaagcccactagctga

SEQ ID NO: 11125 - RNA, 1131 nt, synthetic construct
  source 1..1131: mol_type = other RNA
atgtgcaatttaagccctatctacaacttaaaacccattggctcaatcgaggcgctgtgcagggtgcttcagattgagcagagcctgttattcagcatcgccaagaatagcaatgctcactactttaagaagacgattaagaagaacaacggcaagcctcgaatcacatacaaggcctccccccaacttaggaacattttggataagctgaagcacagagtgttctctcatatcgtgttcccgtcctacatatctgctggccagctggggaaatcatatgtggacaacgcaaattcacacactggcgcgaagatgttgatgagtgaagacattaaggatttctttcccagtatcacccagctccagatacagcaggtatacaagcatttcttcaagtttacccctgaagtctcacttctgctatccgaactatgtactaaagacggaaaactagtgcagggctcaccactgtccggttatctggccaacttggtcttctttaaagaggagcatactatcgtggacctgtgtatcaaaaatggactccactatacccgatactatgacgatattcatatctctagtcacacacccttctttgaagaggtatcggagttgaagcaacaactctatggcatgatggggagagtgggagtttccccacaccgttcccagaagaagtgtaatattaagctgtcgaacacccggctcgacgttcacgacatcaccatcaacagtcataaaacaagcccaagcaaaaagcgcgtttcccgcgtccggaacctgctcttccaatttcagaaatcagtgtctctgaatgatgatatagaggggatcattaatcagtaccggagcattttgggtcacattaatacactccagcagcaagggtatctcaaaagcaaagctctgaaaaaagagctttctaacattgccctttgcataaacgagaagaacgcaaaaaagtacgctagaggatataggaaagtgaagaacgacaaggaactgaaagcctttagcgccaaagtctccatcctgaagcgcataaacggtaaggtcgcatctgttatcaatgccgaacaggatgctgcaaaaaggaagctgaagaatagacagtctaaaagtaattga

SEQ ID NO: 11126 - RNA, 1116 nt, synthetic construct
  source 1..1116: mol_type = other RNA
atggttacgaatcttcagttcaaatacaccaacaaacctatttcaagctatgaatcccttagtaagaccttgagcataagtattcaggagatccacgacattgagagcaaatctaatgacttttacacgatcagcaagaagatcaaaaaacctgacggatctctcagagttacatataaagtccatccccgtctgaggtgcgtccttgatttgctgaagaaacgcgtgtttgattctgttgaagctccagaatacattctggctggtcagaagaataggtcttacatcctgaatgcgaagacacacactgagtcacagatgctcctgtgcgaggacattaagtccttctttccaagcattcacaaaaagttcgtcaaaaagatcttccagcacttctttttcttttcacccgatatttccgagagcttagccgagatcagcactttaaataactatcttgtgcaaggctcccccctcagcggcgaaatagcaaacctcatattctttgacctggaaccagccctagtagagagactgaaaaaatacaatctgcgttacacacgctactatgacgacatctacatctcctcaaaagagcataatttctatgaacataccgaggagataaagaggcagatctatcggatgtttaacacagtgaacctgaagcctaatcggaagaaaaacaagatctcaaaacaaagttccagaatatctgtccacaatattaccgtaaattctagcaagatctcaccgtccaaagagcgcctgagtatggtgcggaagaagatttacatcttcaagtgttccattgagaacaacatcgatattcaggatttgatcggacagtataagagtttgcaggggcacatatctaccctgaaaactcaagagtacaccaagcataaaattactaaacgggaactagaactgctgatctcgaaaatcgacgaacgattagccaaaaagtactcgcgaaagttcaggtctgtgaagaccaaggaaaactttaacaagctcgccaactccagtaacctcctgacaaagattagccccagagtgactggggtgtataaggatgagaaaatgaaggcaaagaaacgcctctggaagtga

SEQ ID NO: 11127 - RNA, 1152 nt, synthetic construct
  source 1..1152: mol_type = other RNA
atggtgagcgaggccaatacggtggagaattttcagtgcaggcaatcacagatagggtctatcaaagccctggccaagactctgtcactcattgaatctgaactcatcgacctggctgagtgcagtgatcagtactataaggtgagtaaagaaatcccaaagtctgacggctctgtgagacgaacctactccgtgtcctatccattgaagaaagttctaatccgcatccggtctaggattatatcgaatgtggattatccggactatatcctggcaggccgcctcggaagatcatacctggataatgccaataagcacaagagcagtgcgatgattctctctgaggacattacccggttctttgatagcataaagcaggagtacgtcgagcagatcttcaagtattttttccatttccccccagacgttgccaagacactgagtcaactgtgtacccttgacggttatttggtccagggctcccctttatccggggatatcgcgaacctaatcttcaacgagaaagagcctaacgttgtgaaactcgctgccgaactcggcctgaaatatagtcggtactacgacgatatctacgtctcaagtctgaccaacaactttgacgcccacattggcactttaagaaccgctatttacggtatgttcgcaagcgtcgaagtgaagcccaataagtctccccaaaaaagccgtgtaatgagatcatctcacagaatggacgtacacgatgtgactgttaactcacataaattgagccctagcaaaaaacgtacctccaaagtccggctgtccgttgacaggctgcgcaagatggtagccgaggatgccgccatttccgacatccttaaggtgtaccgctcgacgtttggacaattgataacacttaagagccagggatctcccaaatacgtaaaaatgaggtcagaactggatcagatcatgaagtccattgaacctgcaaaagctcggaagttcgcaaggaagtttcgaaacatcaaaacagaagcggatttcaaaagtttcgctcagaagatatccgtcttaaagcgaattagcccaagcgtggctggggtgatcaatgcagagagcaagtccgctaagcttaaaattaagtttaagcaggcaactacacattga

SEQ ID NO: 11128 - RNA, 1137 nt, synthetic construct
  source 1..1137: mol_type = other RNA
atggtgagtgaaacagatcccgtcaatgatttccagtgcaaacagtcccaggtggggagcattcggactctggctaagacccttagtctcaccgagccggaactcgtccggcttgccaagcattcagataagtactataacgtgagtaaggagatccccaaatcagatggatctgtgagactgacatattccgtgtcgtatcctctaaagaaagtgttgattcggatccgcaatcgcattattagcaacgttaattaccctgactatatactcgcggggagacaaggcaaaagctatttggacaacgccaagaagcacaaatccagcactatgatcctgtctgaagatattaccaggttcttcgactcaattaagcaagaatatgtcgaacagctgttcaagtacttcttccgctttccacctgacgtatcccagacgttaagtcaactgtgtaccctggacggttccttagtccagggatcaccaatctctggtgacatagctaacctgatatttcacgagaaagagccaagcgtcgtgcgcttggctgcaagtctggggctgaagtactctagatactacgatgacatatatgttagctcagctaccacgaacttcgactcccacgtggggacaatgagaactgccatctacggcatgttcgcttctgttgaggtaaagccaaataaatcacctcagaagtctcgtgttatgaggagctccaaaaggatggatgtccatgacgtgactgtcaattctcataaattgagcccctctaaaaaacggaccagcgaggtgaggctcaggatcgacagacttcgtaaaatggtagccgacaatgccgagatggccgatatccttaagttttaccggagtacatttggcaagctaatcacactcaaatcgcagggatcccccaaatacgcaaaaatgcggagtgaactggatggcgtgatgaagtccatcgagcccgcaaaagctcgaaagtttgcgcgaaagtttaggaagatcaagaaccagagcgagttctccagctttgcccaacgcatttcaatcctgaaacgaatttctccgtccgttgccggcgtgatcaacgccgaaagcgcaatagcgaagtttaagattgaggcaaagtga

SEQ ID NO: 11129 - RNA, 1125 nt, synthetic construct
  source 1..1125: mol_type = other RNA
atggagagattcaacttcttctacacacagaagcaaattggtagcctgagcgttctcgcaaagaccctgagcattaccgtcaacgaacttaatcgcttgcgcgcaaactccgattcttactaccagattgcgaagcgggtggtgaaggcagatggctcagagaggataacctatgacgtaaagtaccccctcaaaacaatcttgcaaaaactgaggtcccgcgttatcaagaacgtccagctgcctaaatatatcctggccgggcgtaaaggaaaaagctaccttgacaacgccatggagcatatgtcaaccaagatgatacaatccgaggacatctctaacttcttcgacagcataaagtccaagtacgtgatcaatgtcttcaagtacctgttcaaatttccaaatgatgtcgccgaagctctgactgatctctgtacctttaaaggccacttagtccaggggagtccagtgtccggagacattgccaatctgattttttatcacaaggaacctcagctcgtgcaggctatcgagtcgcttggactcaaatataccaggtattacgacgatatttacgtttcttcgaaagaagggaacttttaccagcatgtgtctttcttaaaagcccagatttatggcatgtttagcagcatccaagtcaaacccaatcgctccctgtctaaaagtagggtgatgcggaattcttcacgaattgatgtgcacgacgtaactgttaatagtcataaacttagtccgtccaggaagagagtctcaaatgtgcgggctcagatcaacaagctcaagaattccgttaatagccggggctgcctttcagaaacgatcagtctgtttaagagtacattgggtcaggtgaacacactgaaggcgcaagggagccccaaagccaaggacatgctcaaaaacatactggacgccctgaagggcatcgatgaagctcaggcaaagaagtattgccgaaaggcgagaaaggtgaaagagctaagacagctgaataagctagctcagaacttgtcagtgttaaaaaaagtgtctcctactattgccggagtagccaacgctgagttgaaacaggcaagagagcgtatcaagaagaagcagtga

SEQ ID NO: 11130 - RNA, 1116 nt, synthetic construct
  source 1..1116: mol_type = other RNA
atgtctagccagattgaatatccccaggccgggatcgccagtattgactcactggcttctgcccttcgcattccaagctcagaattagttgctctcgccaacaatacaagcaatttgtacagaaagagtgagcaaattgagaaggacgacggatcaaaaaggatcacctatgatgctttgccaccccttaagatcgtgctcagtaacttccgcaaacggatcattgataaggtgctccttccagagtacatatctgcaggtaagaaaggaaagagctatattgataacgccgaggtccacgcaggatccaagggcctgttatccgaagatatcaagaacttctttcctcaggtatcctttaaaagtgtttttgaagcgttcaagtacctgtacaaaatgtcccccgaagtcgctgaagtagccgctctcctgtgtaccaaagatggctacctggtccagggttctcctgttagcggtagcttggccaatattatcttctatgcgaaggagccctttctcgtcgaccgtcttaagttgctgggctttaggtatacccgttattatgacgacgttcacatcagccacaagactgatgactttagccgagacatcggagaacttcgaaccaaagtttacgggatattcattagtcagggcttgcaaccgcataggactgccaaaaagtcaaattacgcaaattcttcccggaggatgtcggtgcatgggatcgtcattaataacgagaagattaagcctaatcctaagaaggtcagcgacacccgggcgatgttattcaagttcgaacggctcctggagacggattacacaatcgatagtgtggtgtcactgtatcgctctatcagaggcaaaatacagaccctgaaagcacaggggtccacaaagtccgaggcctacctcacgactctgaactctctaatgagaaaagtggacgaggcaaaggctaaaaagttcgtacgcaaagtcaggaaggtgaaaacaatcaaagagtacaacaaactgtcatccaagctgtcggtgctgaagaaaatcaacgtgaaagtgactagagtggtgaaaatagagtgcgatctggccaagaaatccctaaaggcatga

SEQ ID NO: 11131 - RNA, 1113 nt, synthetic construct
  source 1..1113: mol_type = other RNA
atgcacaaaaattggagctactcaaatagacccttagcaaatattgaatccctgctcaagatgttggaaacgaatgaggaaaggctcgcatatgtgctcaagaacaagaagaactatttcaaaaccgtcccagtcctacggaagggcaagaaaagaaccacttacaaagtggtcggcgagttgctgaagatacatgagttgattaagcaacatgtcttcagtaagatctctctgccagaatatatcactggcggccgacggggagtgtcatatctcgatgattgcatcagccactgtaacaaatccattatcattcaggaggacatcaaagacttcttcccctcaataaaggaagagctgatcgctaaagcctttcagtactatatgaacttttcccctgaggtgagtagcctaattgccaagttgagtacactggagggatcgctggttcagggtaccaagctttctacagacatcgctaatctcatttttttagaggaagaagcgctaatctctgctgaagtcggtaagcttgggggcaattatactcgctacgttgatgatataactattagctttgagagcgaagttaataacgaggacatatcaaagatcaagacgatgatcctgtccatggcgttgaagtctggggtgaggcttaaccggcagaagagcaaggtgttaaggaatggacacagtaagattgttcatggcgtaaaagtgattaaggaactgcgccccacccagaaaaggaaagattccatccgaatgtgcctgtttaacctgaagaagaaagtgatcgaaaaggagtccataatggacattctggctctttactttaagatcagaggactcattaacaccctgaaacaacagggggataagaatcacgccgagtacattaagcaagccaatcagctggtagccgccgtagacaaaaaagatgcaatcaaaagtatccgtaagatgagaaaagtgaaagacgtgaaaaaacttcgctctttctactctaaactgaagcctctggggaacatcagcaaaacaattagcgtgatcctcgactcagagtacaagacatgtaaatgcaaattcaacaacaagtccatagagtga

SEQ ID NO: 11132 - RNA, 1101 nt, synthetic construct
  source 1..1101: mol_type = other RNA
atgcataagaattggaactattcaaataggcctctggctaatttggaatccctctttaagatactcgaaaccaaagaagagcgtctcggatatatcctgaagaacaagatggtctacttcaagaaagttcccgtgatccgaaaagagaagaagcgcacgacatacaaggtaatcggggagctgtccaagatccacgacttgatcaaacagcggatcttcagtaagattacccttccagaatacgtgactgggggaagacgcggaatttcctacatagatgactgcatgtctcattgtgacaaatcgattatcatccaagaggacatcaaagattttttcccaagcattaccgaagaattaattgccaaggcttttcagtactatatgaacttcagccctgaggtttcaagcctcatagccaacctgagcaccctggagggctctctcgtgcagggtacaaaactctctacggatattgccaatctgatatttctcgaggaagaggtgctgatctcggaggaggttgcaaaacttgggggtaattatacccgttatgtggacgacattacaattagtttcgaatcagaggtgaacaatgaggatatctccaagatcaaaacaatgatccttagcatggctattaagagtggcgtgcgactaaataagaagaaaagccgggtactgcggaatggccagtgtaaaatcgtgcacggcgttaaggtcatcaaggaactaagacccactcagaagagaaagaataacatcaggatgtatctgttcaaccttaggaagaaggtgttcgataaggagaacgtcatggacgtgttgtccttttattttaagatacggggcctgataaacactctgaaacagcaaggggatatcaatcacgccaaatacctgaaggaagcaaaccagttagtcgccgacatagacaaaaaagacgccattaagagtatcagggcaatgcgcaaagtcaaagatattaagaagattagagcgttgtactctaaactgaaaccgctgggaaatatttctaaaagcatctcagcgattcttgatgctgagtacaaatcctgcaaatacaagttcaacaactga

SEQ ID NO: 11133 - RNA, 1104 nt, synthetic construct
  source 1..1104: mol_type = other RNA
atgcataagaattggacatactccgatcgtccactggccaacttagagagcttgtttaagcttttggaaaccaaacaggagcgcctcacctatattctgaagaacaagaagatctacttcaagaaagtgcctgtcatccgcaaggggaagaaacggactacttataaggtcacaggggaattatcccggattcatgagcttattaagcagcgcattttctccaaaatcaccttgccggaatatatcactggcgggaggagaggaatcagctacattgatgactgtatttcccactgtgacaaaagcattataatccaagaggacgtcaaggacttttttccatcaataaccgaaggacttatagccaaggccttccagtattatatgaactttagccctgaggtgagttctctgatagcaaacctgagcacactggaaggctcactagtgcaagggaccaaactctcgacagacattgctaaccttatttttcttgaggaggagatcttcatctcagaggaagtgaccaaactgggcggtaactatactagatacgtggatgatattacgataagtttcgagtctgaggtgaacaataaggacatcagcaagatcaagacaatgatcttctctatggcgattaaatccggagtccgactgaataagaagaaaagtcggattctccgaaatggacagtccaaagtcgtacacggcgtaaaagtgataaaagaactcagacccactcagaagaggaagagcgatatcaggatgtgcctctttaatttacggaaaaagatcctggataaggaaaacatcatggatatcctgtctttctacttcaaaattagaggcctcataaataccctgaaacagcagggcgacgctaagcacacggagtacttgaacgaggttaatcatatcctgacaggtattgacaaaaaggacgcaatcaaatccattcgtgctatgaggaagctacgcgaggtgaagaaactgagggttttttacagtaaactcaaacccttgggtagagtgtcagaaaacgtttctaccatcctggatgttgaataccgggcctgcaagtctaaactgaataagatctga

SEQ ID NO: 11134 - RNA, 996 nt, synthetic construct
  source 1..996: mol_type = other RNA
atggaaaccaacccaatttacaaggggaaacagatctcaacaattcaagatctcagcgaaatcctcaatgtggaagtgaatcggatcaagcacatactctacagggcgaacagcttctacattgagaacccgcagcccaaagatgacggtaccatgaggatgacgtacatcattaagcctcctctgcagcagatccaagaacgaatcaaggacaatatctttagttgtgtagagtttccccactatctgatgggcgggataagagatgaggccaatcctagagatcatatacgtaatgcaaagatccattcaggcaagaaatggctaatctctcttgacatcaagaattacttccccagcatcaaaaacgagtatgtctacttcatgtggagaaagttctttggcttttcggatgaggtgtcaagggttttaactaggctgacgacatataacggatttctgccacagggctccaaaactagcagtggcatcgccaacctgctgttgtgggacaaagaaccccatttcgtcgattccttgaacaagcaagatttcgtttatactcggtttgtcgatgacattaccatatcatctaccaagttagtggaaaaagagatggtgagtaagataattgtggacatgaaacatcttctgcgccagtacgacctgaaactaaagggaaagaagaccaagtttcagacacgctctcagaaaatgaccgtgaataaagtaacagtcaacggtaaaaagccaactatctcctctgaggagcggaataatattcggctggaagtgcacctcttcgagaaaaaagctgacaatacaaagaattggaacgaaatcgatcacgactattacagcctcatggggaagcttaactatattaagaaggttcactccgcttacgccgagaaattgattagcagactggagattaagcgcgaggagttctattccaaaaactacgaaaaggacgggaacggatgccgactgtga

SEQ ID NO: 11135 - RNA, 936 nt, synthetic construct
  source 1..936: mol_type = other RNA
atggataagccacaatacaagaagaagccaattggatatgtcgattcccttgccaaggcactcagtgcagaaagggaccacctcattagagtggctaatgatgccgactcattttaccgtcttcataagaggatcgagaaacccgatgggacttttagggagatctatgatgcaagataccctctgaaacttttccagagacgaattaaccggaaactgatctcccgcgtcgatttcccccagtatctacatgccgtgaagcatcggtcccatataacagccgctagtaaacataatattcccctgctgcttctgaacctggatatctccaacttctttccttctatctcatctgagttggtctttgacatatggcggctgttttttagattccctaagcacgtctctcagatgctcaccaaactaacaacatacaacgggttcctgcctcaaggcgcccccactagtccaggcttggctaatttggcgttctgggacattgaaagcaagttagtagaggggatgaatgctaaaggcttcgtgtacacacgattcgtggacgacgtgacgattagctcagaaaggaaagtacagatggacgaactggcaccgattatcgcctcgatttttggaatgtttcgcaaccgcggtgtgaaggctaaccggaataaaatacacatctctacgagcggccacgagatgttggttcacaacctgaatatcaattccggcgtgccaaccatacctaagagggaacgcggtcgtatcagggcggccgtcaaggactgcgagatcacttacaccgaaattatccagaccgaggtttacaaaaagctctggcacagcactttaggacgagtgaattatctgaaccacttccaccccaccgaggcccagaaatatcatcaaagactccaggcagttcggccgagctga

SEQ ID NO: 11136 - RNA, 942 nt, synthetic construct
  source 1..942: mol_type = other RNA
atggataagccacaataccagaagaaaccaattgcccacatagatagcttggctaaactcctctcagttgacacaaacaaactggtgaatctggctgaccaggctgactctttttactacctctcggagcgaattgagaaacccgacggctcttttagggatgtctatggggtcagggacgagttgaagatcttacagcagcaaattgtgaacaaaatctacagcaatgtccggttcccgaattatctgtatgggtctattaagggcaccaatcatatcatggacgcatatgtgcacgcacatgcccagctgcttgtgaaaatggacatcagcaattttttccccacgctgacctctaagaacatcttcaacatctggaagaggttcttcaacttcagtgagcccgtggccaaaatcctgaccaaactaactacattcaacaattttctgcctcaaggtgcccctactagcccagggcttgctaatcttgccttttgggatattgaatccgcgatagtggatcgcctacagagaaacggctttacctacactcgttttgttgatgacgtaacagtatcatccaaatccagaacagaaatgcacaagttgaacaccattttcaagagtgttttcggaatgtttagatcaaaaggagttaaggccaacaggaagaaaaccaatattagcaccagcggatatcggatggccgtgcacaacctgaacatcaattcgggtacgcctacaatatccactaagaagcgctcccaaataagaagcgctgtccgaggctgcgaaaagagttaccaggaccagaagcagtcagaagattacaaaaagctctgggagagtgccatcggccgcgtgaattatctgtctcagttccaccctactcaagcacaggcactccataagcggttacaggcggtcctgcccgtgtcctaa

SEQ ID NO: 11137 - RNA, 1032 nt, synthetic construct
  source 1..1032: mol_type = other RNA
atgagtcaaaaccatctttcgaagtcactgcagactccattactcgcacctaagttttcgggcaccaggattagctccgtggagtctttgtcctttgtgctgaaaacacccatcgacgaattggtgagcatcgcagacacaagtgagtcatactatagaatacacaaggagattgagaagccggatgggtccattcgtaaaatctattctgtcagagaaccgctcaaaggaattcagcggaaaatcaacagcctcatactgaagaagtgcaagtacccagagtacctcacaggcagcctccccaactgtacccacatcaagaatatcaactttcatgtgggccaaaaaacgattattagtatcgatgccacgaacttcttccctagcatcaacgcctctgatgtcatgaatctgtgggctgagttctttaactttgagtctcagacttccacattgctgacccagctgtgctccttccaaggtggactggctcagggagcccctactagctcctacatctctaatcttgtgttctgggatgtagagccactcatagttcaggaatttcaccggaagggctacatctattctcgatatgtggacgatatttgtattagcaaatccagtcgcaccactaaagaggaaaaaacctgggcgataaaaactgctcagaaggtattcatctctaaggggctgtccatcaagtcacggaaaaccaagattatggagaagggcagccgccaggaagtcaataaaaagaccatccataacggaaaagttaatgcttcaaaagccgacaaggataaaattcgcgcggagattcacaatctgaagattaggatcgacaagaaccttctacccgacattccatacgaaaagaggtacttatcaatccgaggtaagatcctgtatcttgaaaagttcaacaagacagccgcccaaaaactacagaatcagttggacgaactggttgcatacataaaaagtaaaggggtgatctggagaagccccaaaaataagtatataccttga

SEQ ID NO: 11138 - RNA, 1026 nt, synthetic construct
  source 1..1026: mol_type = other RNA
atggccgaattagagtacccatttgcccctattggctccttgaacgctctggcacgccatctgggtctaagccggtggtatttggatggggctattgcgaaagctggtccgcgagcctatcgggtgcggaaagtgacacccagcgatgccagaggagtacccgacaaagtggaatacgcgccagccccttggcttaaagaactgcaacgcaccatcaatcgccggcttttaaaggcagttgaaatgcccgcctatgttataggcggcgtgcctggcaggaggattgaagacgccatccaacgacacgcatgtagtcaggcactcctgtcctttgatgttagaagattctacgagtctactagcgctgctgaggtgaggaaggtcttcatgaggctgctccggttccctccagaattgacggacgcccttctggctctgaccacggttagagggcatctgccccgtggcgcacccacaagttcttacttagccaatctcgtcctctttgatgtcgaaccagagctggttgacttcctgtctgggctgcagcctcgggcacttagatactcaaggtgggtggatgatatcaacatctcttcgccatggccgatcgacgagagactggcgggagaggtcaaggaccgagtcagcactatgcttcggcgccacggactgtccatcaactggaccaagtatcgcgagaacttgaggactaaatcagtcgtggtgcatcacgtgagaatagagggtagccgcttttccgtggccggctccaagaggcgtaatgtgagggccgctgtacacaatctcgaactggcatctcagaagcggcctctaagtgctagcgagctctccgaactgaccagacagcgaagtcgcgtagagttcatccgcccgtttcaccctcgagagatggagcccctcagaattaagttgcaggccattaaggagaaacagccaggaaggtcaaaaagcaaggacgggcccgactggcgttcaacagtgtggggatgcacaaagacctga

SEQ ID NO: 11139 - RNA, 1008 nt, synthetic construct
  source 1..1008: mol_type = other RNA
atgagcaccaaaaaacagagccctgagctccgacccctggtgtctttgtcctacctggagtaccttctgggcacaaaaagagatcgcctgcagaagatcgcgactagtgcgggatcttattaccaaccatttgacatacacaagaaaggcacagataaatggcgtcacattgacaacccccagcatcctctcaaaactctgcagaagcggatactgaagaacatcctcaacaggaatatccgcaggctaccagatgggatgaccggaggtatttccgggagatcgattgtcgaaaatgcaaagattcatatcgggaaggagtgtatcggcgtcattgacatcaaaaattgcttcccctcaaccaattatcatcagataaatcaggtgtggatcgaccatttcggttgtgggtacaagactgctaatctactgacaaagctgaccacctttcaacacagattgcctcaaggagctccgacgtcacctttactttgcaatttcgccctggctccagtttttggcgagattaaagccgtagcagactccgcaggcctggatatcacgattttcatagatgacattaccgtgagcggaagtaaaaagagcataactgactcaatcgagcccattattaagatccttgtgaagcatggctacgccgtccgcaagcgaaaggtgaaggtgataacaagtaactattcccagaaggttacagggatcccagtaaataggaagctctcaatcggtcgggggcacatccaacagattcggaacttgatcctggaaacagcctccttgaaaggatatatccccagcaacgattattgtaagatccagggaaaaatttcctttgctaagagcgtgtctaagacccagggcgtgaagctcggcaaattcgccgaaaaaatgttagtccacccgcttatgcaggtcggtgttaaaaaagatgaggcctctcgggactgcaaaaggtttagtgacaaccacaagtacactgaaagaaactga

SEQ ID NO: 11140 - RNA, 981 nt, synthetic construct
  source 1..981: mol_type = other RNA
atgaacaattctttgatttctctgaagaagttggaatttacactgtgcaccagcagggacgaattgcgcaggattgcagatagagtgggccgattatacgaaccttatgacctgcacaagaagggaactgataaatggagacacattgacaacccccatgacgagctcaaaaagctgcagcggatcattaacaagaacgtcctcaaaaagaacatttcactcctccctgagcgtatgaccggtggaatcaccggcaaaagcataattgacaatgctaagaatcacgtggggaaagagtacatcctaatcgtggatatcaagaattgttttccaaacacagatcagctcaaaatacttcatgtttggagaacctatttcggatgtggcaatacgactgcacggatcttaacccagctgacgacatttcaggctagacttccccaaggcgccccgaccagctcacttctgtgtaacttcgctctcctgccaattttccgaaaaatcgaccattacgctagtttgaacaatctgtctttcagcatatttgtcgatgatatcactatctccggtaggaaggcagatgtgattaagtccattaagcctatcatcaagattctgaaagagcacgactacgcggtaaagaaaaagaagattaagatcttcgcctccgggtacagtcaacggacaacaggtatcaatgtgaacaagaaactgtcagtcggacgtcggaaacttaacgaaatacgcaagttaatcatcgaatccgccaaactgaaggggtatctccccagcactctaattaataaaatcactggggacatcaactttaccaagcaggtgtcgccaaatgatggcaaaaaacttaaggagctggccaataaactgctgatagcccccatcaagattgttaagtctgagagtgattgcaataccaggacatgcaacgacttcaaacgcaaccacaaatatatattggactga

SEQ ID NO: 11141 - RNA, 978 nt, synthetic construct
  source 1..978: mol_type = other RNA
atgagcacactccagaagactaaaatcaaatccgtcgcagagttatctcagaccctgaaagtgggggttaaggagtttgttaagacggctaaaaacgccaatctcttctataggccctttgatttatccaaaaagggatccgaaaaatggcgacatattgataatccaaccggcaaattgaagatcatccagaaggctatcaacaagcagatacttcgtgacctaatgtttcaattaccacctaacattatggggggaattgaaaataagtcaatcctggaaaatgcaaaggtgcatgtagggcaggaaatggtggtgacgatcgatataaaaaattgcttcccgaagactaagaacgaagtgattttcactatttggaagaaccttcttggctttgagcccaacagcgccagactgctgacacagctgacaaccactaaagggcacctgccacaaggatctccagccagtcctagcctctccaatctcgctctcctgccgatctcaaaagaaattctgaactacagtaagaagcaccaccttaatttcaccatctatgtcgacgatataacactgtctggtaagaagagttctgctctggactccataagccctgtagtcaaaatcatccaaaaatacggctatgccattcgcaacaaaaaggtgaaaaagatgccctcatataaaacccagaccacaactggcattcagctaaatagcgagatttcaatcggaaagcagaagattgacgagatcaggaaggagattattaacttggcgaagctgcaaaaaccctacataaccaagaaatcgatattcagcaagattgactacgtgaagaaaatctcccccgaaaagggccagaaattgctggagtttgcgaacatgatcctcgaagaggacatcgactacatcgccgttgatcctgagaaggatgagaagcgggactgtaatggtaaagcatgcttggccaaatga

SEQ ID NO: 11142 - RNA, 1026 nt, synthetic construct
  source 1..1026: mol_type = other RNA
atgagtggccacgaacaccagctgaatatcccgagtccctttccaattctctccgttaacaagctcgctttcattctgcgtaccaaacctaacgaactgaaaaagctgagtgagaacgctggtaattattacaccccttttgacaggaaacagattaaagataatgggaaggtaaagtggagacatattgataatcccgcccccaaactcaaaaaaatacagcagaagatcaaccgtgtgctgctgaaggccaaggttgagtccctcccaacaggcatgaccggcgggattaagggaaggtcaatatttaccaacgcagcccagcacctgaaccagaaagccgttgtcaccatcgatttaaaggactgttttccgagaacatccaacaaaagaatcttccgggtgtggcgcaatcatctgggaacgagcgagtgcgtcgccaacatattaactaagctcactacgttccagcgcaggcttccacaaggctcacctacatcctcaagcctgtgcaatctcgcactattccctttgtttaaaaagacaaagcggtactgccagaaggaaaaatttaacttgactctctatgtcgatgacatcacgatctctggtcagacaattccaattagacttgcaatcgggcggatcatcaatttcatccaggaagaggggtatgcggtgcgacggaataaaatcaagattatgaccgcgagcgtgcaacaaaagacaacaggactgatagtaaacaaacagctgtccgtcagtgcaaaagctagagaggaaattcgaaaagagatattcatcttgagcaggcaggagatgttctcttcaaagcgcatgaggagcctatggggtaagatcaactatattaagaaggtgtcccccaaacaaggcggaaagcttgcttctctggcccacaccctgttattggacactctggccagccattcgtacgaaaatgtgacctctgagaaggaagtgactcgcgagtgtaagaatactcggcgacacaaatactctctttga

SEQ ID NO: 11143 - RNA, 1008 nt, synthetic construct
  source 1..1008: mol_type = other RNA
atgtcactggcgcgacctcagatcgtgtcatggaatctcatccgacaagtcacaggtttcagtgccgatgagttgagatcagtggccgaacgcgcaggaggactgtacgagagcagagatagactggcccacaaagcaaaaaaacccaaatggcggcatattgacgaccccgtccccgaactcaaacgcatacagagggcccttgtacgcggacttctccggccgatacccctacctgcctttttctgcggatccgtaagtggaagatctccagttgatgctatcaaaccacatgtcggcagaccgtctatcctggccctggatcttcgagactttttcccccgtactagccacaagagagtgtaccgggcatggacgagggtagtgggctgcagtcctgagatcgccggggttttgacacagttaacgaccctgcatcgaagactgccccaaggcgccccatcttcccctccactagccaatctggcctttcttgagattgggctggctatcgagagcgcttgtcggaacgctggtttacgtgtgacattcttcgtggacgacattttaatctccggtgaccagcctggcactgtgctcgatgagattatcgatctgctgcagcagagcggctatggggtcaagaggtccaagatggaattcatgggacctagggaaagacacgcagccctcggcgcggtttttaaccgctttatctcttatggccggggccccttcgcaataatacgtcagaggattttggcactcattgactccgctgaggtgaccccgtcgcaaatcaggtcactcaccggggcggctcactacgtccggtttctgaacaagaaccaaggggataagcttctggctttgattgtgcagttgaggcccactgttgaagacggcccacgggagcctaaggctcagtgggaaacctgccgcggtggaaataagtgtaaggcaaagccaagggggagccgcccactggtgacaactaccgggagctga

SEQ ID NO: 11144 - RNA, 1047 nt, synthetic construct
  source 1..1047: mol_type = other RNA
atgacacagtcccctgccgccgatccaggattggtgcctctggtaagcatgagaagactagaacagttactgggacgtagcagggaagacttaatccgcctcgccgagcatgccggtagatactacgccccatttgatgaatttaagcctaaccgagcagaaccgagacacattgaccggcccgttggggagctaaagctggtgcaggagaggattcaaacctctatccttcgccatatccctttgccaccaactatgttaggcggggttaaacgttgttcaattcgggacaatgcccagtaccacctgggcagccctttggtcgtcacaatcgacctgcgggattgtttcccgcggactcacgatctggccgtctattccgccttctgcagggtgctcggtgcttctgaaaagattgcacggctcctcaccaagctgacaacctatcagcatcgcgtaccgcaaggcgctcccacttctagccttctcgtcaattgggtcctgctgccacttcatgatgcaattcagacgattgcacagggggctgactgcaggtgcacattctgggttgacgacatcaccgtgagtggacccgcggctttggacgtggtggaacccatagtgatggcgatccaacgccatgggtatagtatccgccaccggaaactgcacctcatgcctgcttgcaggccccaggaggtgactggtgtgctggtgaaccgtcaccccgcagcaagaagggaataccgtaccgagctaagggccactatactgcagctgtcctcagaggtcgaagtatcagctagaaaacttgagcggataaagggccgaatctcgcacgttcgccacctgcatcctagacatggcgagagtttggaccaactccttgagcgaacaatgatgggcaggcgcgtcgatgagctgggagcttgtccacccaaagaggtgcggacgcgcgttcgatgtaaccacgtgcggagacacagggccggaagaagggcctctgctcgatccagagcagataccgggggcattgcgggtgagtga

SEQ ID NO: 11145 - RNA, 1074 nt, synthetic construct
  source 1..1074: mol_type = other RNA
atgtcagaggcgacagcgcggaccttttatagcaaggccgggctgggttttcatttaaagcgggattggtcgactctcgaaagcctggcagaacacgcgggcgcccactacagaagttttgatgagtggatgggcaataagtggcgtcacttcgacgtaccaagcaagcgccttgccgacgtgcaaagggaaatagccaggttccttaaggcaagagtcaaattcccagatacaatgctgggagggctcaagggaggctcacccaaaaaaaacgctgaggcacaccgaggccagggtctagtgtttaagctcgatatcagagactgcttcccatccatcggtcataggagagtgtttcgcatgtttcgggaacagctcaaattctctgaccctatctccaatcttctgacgaaactgactaccttccagaacaggttaccccaggggagccccgcctctagtgtgattgctaaccttgtcctcatggaattgcacgaatcaattcagttagagtgcgaggcactgggcttgaagtgcacctttttcgtggacgatatcactctgtccggggagagggttcgcgaggtgattgccccagttgtgcggctggttcagcgtcatggattcagtatgcgcccgtgtaaggttcggctcctggctgctcatagggaaaagctgtcagtcacaggggtgcttgttaacagacggaggctgtctgtgggacgaacgcgaaagaataagttgagagcccgcatccatcagctaagcagaggggagcgagtaaccgacagcgatctcaggtctattcagtcctccgtggtccaggtcaaacacataagtaatcatcagggcgaaaccttggagagactggtacaagagaagctgcctaagcgcggtgtgcaaacacctaaagagcgtgccaaaaagatccgcagggtctgtaaatgtacccataaacatcggcacaaacgaaacgaggagagcgtgactgctacacaccagcctgcctcttccgtggctgcaggattgccccggcaacacttcgtccacactctggaagccggcctgagatga

SEQ ID NO: 11146 - RNA, 963 nt, synthetic construct
  source 1..963: mol_type = other RNA
atgatgctgtccgctaaaccattagtctcccggagggagctctctttccggctggcctttcctagggatagactcgaatctgtggcggagagggccgggagatattaccgccccttcgatcgcgagaagaaacccggggctaaaaaatggcgccatattgacaatcctattgagccgctgaaatgggtccagaagcggataggccggggcatcctgaagtccgtcgacttcccagcagagctcacaggaggattgtcgggtcgatcactcgtggacaatgcaagaccacacataggtcaacctacacttgtgtgcctggatctggactcttttttcccccacgtcaaccatgatagagtttacgacgcactgaggcgccacctcggctgttcaggcgaaattgccaacctgctgactaagctaacgacctttcagaagagactccctcagggcagccccgcatccacattccttgcgaatctcgtgctgatcgatattgtggaagagttgcgggctatcgcacgcgaccgacatctggccttgtcctgttatatcgatgatttgaccttcagcgggatcggagcagaagaggccatcggagatgttgtggcagtgttaaaagcccaccaccttaagattagtcgtgagaaactgagcattgcgcatgaacatgaagctcgaagcgtcacaggcataggggttagcagacggttgaccaagcccagagacaagatgctggaggccagggactttatcaacagcctggccgcttcagagactgtgagtgaacgggaccttgccagagcccgcggaatcgtggctcacgttgggcaggtaaacaagagtcaagccgcctacttagctaggaggctggcccgtctaccacctgcaggtgatgacgctccgcaggaggtagaaaaaaccaagactcgacgttgctcatcttttcttaggccacactga

SEQ ID NO: 11147 - RNA, 978 nt, synthetic construct
  source 1..978: mol_type = other RNA
atgattaacagctactctgacctgtccccacttgttagcattcggcgactcgagcgcctgttgggctttgataggcaggcgatccagtggatcgccaatagagcagggagatactatcggcctttcgatgtgcgccgggtgggtaccaggaagtggaggcatatcgacaatccgcaaggcaagttgaagactatccagaaaaggattttaactaacatcctgaagaccgtcaacttccccgcggccatcttagggggaattgccggcgctagcattaaagagaacgctcgggtgcatcttggccaacctatcttggttgtgattgacatcaaggacttcttccctaatattacgcaccggaaagcttactcagcctataaaacatgtctaggctgttctgcgaagatagcaggactgctgacgaaactgaccactttccagcgccgtattccacagggagcccccacaagtaccttgctggcaaatatgagcgtcttaacactccacgacgagcttaaggaactagccgataatctcggcctgcgtgtgaccttttgggtggacgacattgctttctcaggtcctaacgcagataagataataggtgccgcagtcgagatcatctcccgacatggttttgccgtatccagcaaaaagataagggtaatgggacgcggaagtaggcaggaggttaccggggtccccattaacagaaagatctccgctgggagaaagtatatcgaagagctgaggaatagcatcctggattttaaacgaactgggatcacagcccacgaatttgcctcactgcgctccaaaatttctcacgtgcggtggctttgccccagtcagggaataaagctcgaagagtttgctaaagaacaactctctgacctcgtgctgtcgatcggctgcaaggcagctaaaaacgagtaccgcaagtgcgaagattggtcaagacacagaagagagccatga

SEQ ID NO: 11148 - RNA, 984 nt, synthetic construct
  source 1..984: mol_type = other RNA
atggcaggtaccgcgccccctgccgaaagcattttccctatcaaaagcttacggaggctggagcggttgctctgcgtccctagggaagagcttcgattcctggccgacgccgctgagcaccactatcgtccctttgacagatttcgtcctcgcgccgatgggacggtgaaagtgaggcatattgacaaccccgtggacaggctgaagtccgtacaagcaaggatcaattcacgcctcctccgaaccgttccttttccagcaacaatgatcggcggtgtgcgcaggagaggcccaagagatggagccagtcttcactgtgcatccccagatctggttaccttggatctgtccaattgttacccgcgtaccaccaaccggcaggtgttcgcggtgttccgcaacacgttgggctgtagtgaagaggtcgcccggctgctgaccaggctcacaacacgtcagggtcatttaccccaaggcgcccccactagcggactgctttcgaacctgtgtcttctggacctacatcagacaattgctggcctggctgcctctagaggactcgccttttcacagtacgtggatgattttgcactatccgggccgggggctagaaatgcactgggtgacatcctccccatgttctttgggcacgctagcgcgcgcttgaatcgcagtaagctgcgctgctgtggacgcggcagcagacaggaggtcactgggatttgcgttaatcgacgaactatgtctgctagaggcccaaagtatgaagcactcagaaatcgggtaaggtctttcgacccaaacgcctctgacgcgggaactgagcgacaggccatactgggcgcaatcgcccacgtccggtcaataaaccaattgcaggctgattcagtggtccggcttgctgaaaggtgcggattacggcgggacggatgcagggacacaccagattccgttagacctgtggggagagccgctggcgattga

SEQ ID NO: 11149 - RNA, 972 nt, synthetic construct
  source 1..972: mol_type = other RNA
atgtcaagaagaaagatcgagtctcttctaggcgagaagatcgaatatctggaacacgttgcatccaaagtgggaaattactacaagccttttgacatatacactcccggaaaaaagccccggcacatcgataacccaaactcagaccttaaaaagatccagaagaaaatcaagtcccgggtgttagagacagttatcctgcctgagacaatgatgggtggtattaaagataaaagccacaaggacaacgctctaaggcacattgacaaaaaggtggtgattacgctggacctcaaaagttactttccaaagaccaataaccgaaacatatacgacgtgtttatcaatgtgttcgggtgtaatagggagacagcccacctcttcactaagttgacttcctatcaacggcgtttgccccagggtgccccttctagtaccctgctggctaacatgtgcgtcttgccaatgcataacgatctccaggaacttttcaataggaacgacataacctggaccttttatattgatgacattgctttcagcggggataacgccgataaggtcattgacgaagccatcaaaattatccagaatcatggccagggggtgtcttgcaagaagaaaaagatcatgtacgcgaacaatcgccagatggtaactaaactgtgtgtcaaccgcaaagtcggcatcaagaaggaaaaaatcaacaagatcagagaggatatcattaatctctcctggcaacctaatattgataatcgaaaactgcaggccattaagggaagcattaactacgtaaagagcatctgcgcagtcaggggccaatcactggacaatctgtataaaaagatgttacccgcaaaaaccgggctcataggcaagaaaccgaagataaaaacaacctcgtgcaagtgttctaagaaacatcgcgagtatgtgaagggagttagaaacattagtaataaagagtga

SEQ ID NO: 11150 - RNA, 930 nt, synthetic construct
  source 1..930: mol_type = other RNA
atgaagtccctgaaccaggacgataatgtgaagctgcgaagcatgcgcagactggagtctctgctggggagaagtcgaaaggatattaagcgaatcgcagagaactccggtcgttactaccggccctttccaaaacgccagggagataaggtccgcaccattgataacccaactggggaattaaagcagatccagaaaagaatccaggaacgtatactgacggacttcgaattgcctgagagtatgctcggaggcgtgaagggccgatcaattaagctcaatgccaaattgcattgcggggctcccacagtggtgcacttggacctggtgaagtgctttccacggatcagtaataaggtcgtatacaaagccttcgtggagcatctgggctgtacacctaggatagccggtctgcttacccagttaactacctatcgccggaggcttcctcaaggctctcctgccagtacgatgctggccaatatctgtctcctgcggatgcacaacgagcttagggacgtagctcagactaatggctcaatgctgtcattcttcgtcgacgacatagggctcagcgggaaccggcccgaggtcttaattgagcaaatgattggaatcgtgcggaaccatggtcactctgtctctcaccgtaaaagaaaaatcatgagaagccatgagccgcaaactctcaccggactatcccttaatagaaggcccctggttccaagaaccaggagggcgcaagttaggaaacagatttatcactgggcctcccagggcaactgcaccgatgaattgcagagaatccgcggtgctgtgaattttgtgcggtgggtttccgaacaccaaggcgaagctctcgagaggacactaagccgcgcacagagctcaacaagcgcagaatctgatcgctcgcggcagggatgttga

SEQ ID NO: 11151 - RNA, 912 nt, synthetic construct
  source 1..912: mol_type = other RNA
atgacatcttctgaacaacagaagtccagccccaacccctttccactggagtccccgaataagtttgcctggatcatcagagtcaaaccgcacgaactgcaggaggtggcagcagttgcagaatccctgtataatccctacttcgagaagaaaaagggaaaaaaacctcggctgatccacaacccatcagacaggctgaagataatccagaagaagatcaacacgtggattctacagaagtatccttttccggatttcatagtcggcgggattaaaggtaaggccctcgaagaccattttaaattgcatcttaggaaagacatcgttgtgactctcgacattaaaaattgcttcccatctatcaccaacaagcacatttacgacgtgttcaaagataagctcggggccttgagcgatactgctcgcctcgccacactgctaaccgcctacaaggggcagttacctgtaggagcgccaaccagtccacttttggccaacctggtgctgttgcctgtgcttatagagatcaagaagctggttaactctcacggattcgagatgagtcagttcatcgatgacagcgcgttttcgggcaagcgcttacctgtggagctggtgtccgaagtctgtaagatgatggctcgtgctggttttaccatctcacataaaaagacactggtgatgcctaagagtgattcacagacggtgacaaagcgaattgtcaatcaaactcccggaattccacggaaagaaatgaataggattcgaagcgcagtcaatgagctcaaaaacacccccaaaaatgatcccctttatggcaaaagactggctagcgtaaaaggcagagttatatccattcggaagttctacccccaagtggccgagaagttcctccaggagatcggcgggtga

SEQ ID NO: 11152 - RNA, 939 nt, synthetic construct
  source 1..939: mol_type = other RNA
atggtggctgctcccatactttctattagggatttggccgcccgggtaggcacacctatagagagaatgaccgaaatcgccgacgatattgattctcactaccgccctaccgcactctatgacgagaaaagaggccggagtcgcatgctcaacgtcccgaggaaagaacttaaggccctacagcaacgcattcatcgagttatcctggatccaattgagctctccgcttgcgtgcatggagctgtgtcaggcagaagccctcggactaatgccgagcagcatctcggcaagccctgtgtgatctgcgttgatgtgaaaagtttcttcgactcagtccgccactacgtcgtgtatagaatgtttcggaacgatctcgggttcggaagggacgtggcacgcctgttgacaaggctgaccacgtacgactcccagttgccacagggggctccgactagtccagcaatcgcgaatctggtgctggcatttcaagtggacaagcctctggaagcagctgcggcaagcttggaccttacatacacccggtttgtcgacgacatcgccatctcggggggagatccacggcctctaatcaacgttgcagccaagctgttatccgccaggcgtctgaaggtgcaccgagccactggacgaggtagactcaaacccaagctgaaaatcatgagcggtggggtacaacagaagataacagggctggtcgtaaattctgcgtcagcgcccaccattccccgacgctatagggatcaggtgcgtgcagctatacaccagctgcgagaaatgcagtccggcgcctctttcaaccgctccgtggacagcattagaggaagaattgctcatgtcagacggctgcacccaagcggtgccgctaggttagccggcgagcttgcccgtgttatcgagaataggcgggaatgtggctga

SEQ ID NO: 11153 - RNA, 924 nt, synthetic construct
  source 1..924: mol_type = other RNA
atgattctggtccagccaatcctttcggtccgagatctggcagccaggttggggatcgaggctggttacttaagggaagtgggcagagacattgagagccattataaaatccagccattgaaacagggagccaaggtgcggatgctggccatccctcaggcggaacttaaaatgattcagagacggataaaccgcgctatcctcgccaaggtacccctcgccaaggcggtttacggaggggtcgcaggcggtagtccacggaaaaacgctgcagagcacgcgaaccaacggtgcgtgattactatggacgtgaagcacttcttccctaatgttcggcattacatggtatatcgcatgtttcgctctgaattgggcttcggtagagatgtagctagcatactgaccagactgacaacataccgttcctatttaccccagggagcgccaacttccaccgccgttgctaatctgctcctggcagcccccgttgatgtgcccatgtcagccgaagctgaaaggcaaggggtgcgctattctaggtttgtcgacgacatcgcaatcagcggggagaatccccggccgttgataaacaaagtggctaaactccttagttccaggaggctgccagttcataggagaaagattaatggaccttcaaagctacgaatagccccgtctggggtggcccagcgtattaccggactaatcgtgaacgcccaaaatggcctgtccgtgcctcgcgagcggagagataaggtgagggctgcaatttacgccctccgcagagctcctaagcacgagcttaaaaaagcagtcgccagcattagaggcaagatcacacacatcgcacagtttaacgctgccgccgcaaagcgtctgaatacctacctcgatggcacgctgcgacagcgactggacggctga

SEQ ID NO: 11154 - RNA, 939 nt, synthetic construct
  source 1..939: mol_type = other RNA
atgaacgaacctatcctgagcctccagaaactggcctggcggttaggcgtgcccgtcaacaggttgcgccagttggccgacgaaatcagcagggatcaccgagagcactataacgcttttgcactgaagacgggcaaagataagattcgtcagattcggccaccgaaagaagagctaaaggcaattcaaagaaagatcgtgaagagagtgctcgctcccatcggactagcccctaccgcacacggaggtgttcccggaaggagccagcgctccaatgccgagttacatttggggcaagctagagtggtgactgtagatgtcaaaaatttctttgaccgtgtgcagcatcgccggatataccggatgtttagaaatgagcatggcttcggggcggacgtgtccaggctcttaacccgcctgatcactcttcgcggaagccttccacagggcgcccctacttctccagctgctgcaaatctctttctgaggagagcggtcgacgagaagctgggcagtacactcgctaaactgccagtcacatactcccgcttcatagatgaccttacgttctcaggccccgatcctcgatcgcttatcactaccgtggcccatctgctttcagaatgcgggttgaccgtaaaaaagagtaaggttaaaatcgccccacggcattgccctcagaaggtgacaggtctgctcgtgaactctgcaaccgggggtcgactgacaattcccagggcccagagggaagcggtaagagccgctattcaccaactcccgagactggcaatacgaaaagagtgggataagcaagtccgctccatcagggggcggattgcccacgttgagcgttatcaccctggagacggtgcacggctgcggaagtgtttgagagttgctctggacggccagcagccaaaatctgacgcccccctgtga

SEQ ID NO: 11155 - RNA, 906 nt, synthetic construct
  source 1..906: mol_type = other RNA
atgcggagccctgtagatcactatagcgacgcctggttatctttcgagttaaggcatcctgttgacagattgagactgcttgcaggaatggtacccgaggacctgtacagtgtgaggagggtcgaaataaaccgcaaggttagggatatttcgaacccctgcgatgagctcaaagctgtgcagagaagtatccgcgagcgtctccttctgcccatccctctttccccaattgtgtactctgatgtcccggggcatagcgctgcgcaaaatgcagagagacacctgcatcaggcaaatgtcggaagcgctgatatccgggattgctataactctatgacaaatgccatggtgtttcgagtgttcaggcacacgctgaggctcggtgattcccttgctgacctgctcaccggcctcactacctcacgcggacacttgcctcatggagccccaacatccggtgcactcgccaacctgatcctgtcaccaatcgacgtcgagctagaacgaatagcggtagaactggacctgaagattacacgctacgtggacaatatcgacttttcagggcaaagaacccggcatgccttcctgcccattgtggccttgatccaatccttggggttcgcggtgaagcgccggaaggtgtttaatgcctctagacagcgcgtccagatcgttactggtcgaacagtgagtggccgggtcctgcgtcttcccagagccaaaagggctaacgtgagagcaaacgttcacgaagtgctctgtcgtcggcgagacggcttgccgatacaggataagcagattaacaggctaagaggccgcctgaattatctgcggactcaggggcacccaaaagaagcccgagacttagccacccggctggctgctgttggcattaatatttga

SEQ ID NO: 11156 - RNA, 903 nt, synthetic construct
  source 1..903: mol_type = other RNA
atgagaatgccagttgaacactacagcgagcgatggttgagtttcaccctgtcacaccccagagagcggcttcgggttctcgccagcactgcagaacgtctctacaagtccggatggagagatgtgaagggtaaacagcgttacattactgagccgtttgaagagctgaaaatagtgcagcgcgctattcgcgaacacctgctgctgcccatccccttaagctccatcgtgtatagcgatgtgcctgggcgctctgctacaatgaacgcggtccagcatgttaaccagcctaatgtggcgtctatcgacatccgggactgctatccatcaatgaccaacgcaatggtcttcagggtctttaggggaccagttggtctgggagataacctggcacatacactgacccgccttaccacgctctccgggcatctaccccaagggacccccacatcaggcgccttggctaatctgattctgtctcctgtcgacgtgatattagagcagatcgccgagggtctgagactcgtcgtcactcgatacgtggacaatattgacttcagtggagtgcgatcccgggaggccatcctgcctactatagttgctctgcaggccgccggcttttcggtaaggcataagaaggtgatgaatgccggctaccgtcgggctcacgtggtaaccggaaatcttgtcgatggctgtaggcttcgcttgcctcatcgaaaacgggccaacgtgagagccgcggtgtatgaaatcgtacagcgctatgaggatgggctcccaatcgcaacgaaggctatgaacagactcagggggaggctccaacacctaaggacacaaggccacccgcgggacgctgaaagattagccgctcagttggtggcagccggcattgcaatttga

SEQ ID NO: 11157 - RNA, 915 nt, synthetic construct
  source 1..915: mol_type = other RNA
atgccctacaatgtgaagtccattaagtcactggccaagctgctggatgtggatgtggaagagctggtcaggatagaacaaaacccagagaaatactatgagcccttcgaaaaaaagcgaggggagaaatcaaggtctatcgacaacccaactggcgaactcgccgctctgcagattaggattaagaagttcctgctctgcgacgtcgacgtgtttcggcctatagctacgggtggcgtcaaggggcactccacaaagacatcagcactgctgcacaccaataaagattgcgtggcaaccgtggacgtaaaaagctttttcccttgcgtgacaaacaataaggtgtacaaggtcttctgtaacctcggatactcccccccagtgtctcggatgttgaccaggatcaccacttataagggacatctccctcagggttccgcgactagtactatcattgccaatctggccctttataacttcgatgagtacctctacaaccagagcttgagattagggtgtgattgcatccgatttgtggacgacatcattatcagtggcagctacggaaaagtcaccgaacttgtgagccttgtctttcccgccttacatcggatgagattttctgtccaccgcgcgaagaaactgaaaatcatgaagtctaacaagcggcaggaggttctgggactaaccgtgaatagagccgttggcgttacaaaatcatatgtggaggaagttagaacccaaatcgcttgtgtagagaagtgcagtgtaacaagctgtgtatatttgaaacttgttgggaagatacagtatattggcactacgaaacctattatcgctggtaatctaatgcgcaagttgcgcaattccctcatgcgtccggagaaagaatgtctggcatcgatagagcagtga

SEQ ID NO: 11158 - RNA, 1014 nt, synthetic construct
  source 1..1014: mol_type = other RNA
atgacagtggacctgccagaaaagaacatagacctggcagcagcccctaagctggacctgctgagcatcagagaattagagttcaagcttggtttggaacgaggttacctcaggacccttgctgcacacgccggaggacactataatcccttcgtgaaaccagaaaaagtttttccatttcagcgacggttcaagaacaagaagaagcgcatcatcgataaccccgacgagcagctgcgggatgtccagaagaggatctacagaagactgttgaggcctgaatcgcttcctgattacatttatgggggggtgacaaacaagtgcattcaggataatgtgaaccggcatctgggggccagaatgctggtcaccgtggatattgcgaatttctttcccagtgtgacgaatgagtatatttattggctatggaaccatgtacttagatgttccagcgagatctccatcctgctgacgaaattgacttctttcgagcgccacttaccgcaaggcgccgctacttctacacctctggctaacatcctcatatgcacaatcgataaacagatccggtctgagtgcgaacggatggggattacctactcaacctgggtcgacgatttagcattttcaggagacgacccacgaagaatcataccggtcgtgatcggcgccctgcgcaaaagtggcctacggcttagccgtaagaaaattactatcatgggtcctgccacacgcaaagtgctcaatggcattgtcctcggaaagaaactgggggtaacccgcgaggttcggtctaggattcgcgctggcatccatcgtctcaaaactggagcggttcccatacaagaccagcccaagtacatgaggagcttgattgcccgtattagacaggccgagactatcaattcctcccaaattcaaaagttgaggagtcagctcgctgccgtgctaagggacaggtcaatagctctcaccgagcgacagcagtttctgaaacagctcggctgtgcatga

SEQ ID NO: 11159 - RNA, 957 nt, synthetic construct
  source 1..957: mol_type = other RNA
atgagtatcccgcagctgagtatcgttagcgtgaacgacctggcgcagcgccttaggattgaccctaaaaaactgcggcacattgccgcccatgccggtgattattacaaacctttcaagcaacgcaagaagcccaaacctttcgcaaagaagtctaagccagccaaggtccgggaaatcgacaatccctcagaattactcaagactatacaacgccgtatctgtgataatcttttgtgcggtgtcccctggccagagcacgtgttcggcggaattaaggaacgaaacacagtcaaaaatgctaagcttcacttgggcaatgagaagctcgttaccatcgacatccgtagctattttcccagtatttccaacaaggtgatatatgacatttggtttagattcttgggatgtggctcagaggtgtccgcaatgttaacacagctgacgacatttcgaagaaggctgcctcaaggggcccctactagtaccgcactggcaaatctggtactcatctctatcgatggggagttggtcgagttttgccggcagaattccattacttacaccacctgggtggatgaccttgccttttctggcgagaacgctgaactcgccctagaaaaggctattagctccttaaggagggctgggctcagagtggcccggaacaaagtaaaagttatgcgaggatcaaaaccacagatcctgatgaatcagacactgaacaactctatgggcgtgaataaaatctataggagcaacgtgagaagcgctatcaataaactggtgacgcatccacccctgaatctgaaagagcagttcgcgtcaataaacagcaagatcagatacgtcgatacaataaacaagaaccaggctcgggcactaaccaagaatctgaactcgaccctcaatcgcattaagaactcctctctctccccgtacactaaagccatttga

SEQ ID NO: 11160 - RNA, 909 nt, synthetic construct
  source 1..909: mol_type = other RNA
atgaaccgcaatggcagaaaccagttacgactgaatataggaagtctggatgtgctggggtatgccttgggcctgtcacccgaagacccatttataaagatcagcaatcctgccccatttgcagccgacccaatcgagcccaagcaaaggaagatcgataaccccattctaatcacaaaggaaatacagaagagaatcaatcgatcactacttcgcccactgcacctgcccgggcatatatgcggtggggtgaagggcaagaccttattggacaacatcattcctcacctgaatgccagggtgattgttaccgcagacattaagggtttttttccctcaataactactttccaggtgtatgccatttggtccagactcctgggctgttctccggaaatcgctgctattttgactcgcctcacaaccttcgagcgacggctccctcaaggagctccaacgtcttccacgttggccaacctgatcctgttctcgtttgatcagcctatcaggagcttctgcgcacagcatggaattacatacaccacctgggtggacgatctgattttctctggggctgagagcaggtccgtgatcaatgtcgcagttgcggctctcagagagggtggcttttccctccctcataaaaagcttaaaattatgaccgcgggcaaacgcatgagggtgacaggggtccttctggggaaaaaacccggtgtcatccgtcggtatgcacgcgatacaagggccggcatctacagactcactaaaggagacttagccgagccgaaagtagaccggtacgtaaaaagtatccggggacggattgcccacatcaacagactgaaccctaatgtcgcccggagtcttgatcaccagttccagcttgctctcaagcgtgcggttagctga

SEQ ID NO: 11161 - RNA, 990 nt, synthetic construct
  source 1..990: mol_type = other RNA
atgacacttcagaggaataaaagactgccccttgaccagctccccctgcgatctctacgggaattagagcacttgctgggtgcctctcgcgaggctctgctgagattggctgaatgggaggccaattattccccctttgagcaagccaagccactgaagccacacgcaaagaaaccgcagacaaaaaagctcaggaagatcgataaccccggcgtggaactcaaaaagatacagaggcgcattttgagccggttgcttctcccattaaatctgcctaacttcctgttcggcgccgtgcctaagcggtcagtaagagagcacgccgctgcacatctcggagcgaccaccatcgttaagatggacatcaaatcatactaccccaaccttaccaatgaacacgtctataaggtgtggcacgagatactatgttgctccgcaccagtgtcaaagatcctgacaaagctgactacttgcgatttccatctccctcagggggccccaacttcgccgacacttgccaacttgtttctggctagcatctacggtcccattatacaagattgtgtggctaaggacatcgtggcgaccgtttgggtggatgacttaactttcagcggggaacggagtcgcgacgtgatggagcttgtccgacagaccctcgcctgcaacggcttgcgggactctcgaaagaagcgcgtgattctgacgggaaaaagttctaaactggttacaggagcgaggctcgggagggaagagctcagagcttgtaagctgaaagtccgggagattcgtgcaggcattcataatctgaagaggggtaaagtgacgactcgcgggcgttccaaagatgttcagagcctgctggggaaagtcggctttgtaagaagtctgtgcccttcagatgcaatccctctggaaaaacagttgagatccatcaacgtcagcattcctagtcaagccggactaacctcccgtagcgccaagggctga

SEQ ID NO: 11162 - RNA, 963 nt, synthetic construct
  source 1..963: mol_type = other RNA
atggacctgcctcagacaaaacctatcgttggatctctgtctgacctggaacaccgcctaggaatcaagcgtggggatttggccgtcctcctacaatgccgtgccggtctttacagaccgttcaagattcccaaaaagcaacacccctacccaggcaaactcagacggctgaaggcttccgagccagtcaagtatagacagattgacgatccggtgaagcagttgaaagacatacagcgacgcatccttgcaactgtactttcccgggtggaactgcccgcttacatgttcggggccgtctcaggtcggactttactcgggcatgccaaggaacatgtgcctaaccagagctcgattgttgtccggatggacattagcagttattaccccaacatcacctgtgagcatgtctattacgtatggaatgtggtactgggctgtccccccccaatcgccaggttgctcactgagcttaccacgtttgactggcatctgcctcaaggcgcgcctacctccccagctatagcaaatatcttcctcgcctcaatttatgctcccatctgcttagcgagcgagcaggcgggactgaccattacaacatgggtggatgatctgattttttcaggcgtggccgcccacacagtgatggagactgtgagggctaccttggcggctcacggttttaagatggcaccagataaacgagagatatttggcccaaaagaccagaagaatatcacggggacacgactggggagattcgaggttcgcgttacccataaaaagatgtccgaactgcgcgccgcaattttcagactggctatcggagcactcgaacctggcgaactcgagaagtacaggcggaacttaagtgccaggatagcacacattgctactatccacaaaggagatgccgcaaaggtgcgcaggcacgccatcaaaagctctgtgatcctgaagtga

SEQ ID NO: 11163 - RNA, 975 nt, synthetic construct
  source 1..975: mol_type = other RNA
atgatgatcatgaagaagaagaacaagcacaagctgattacaatcagtgacctagctttgcacctgggcatttccgagggttatctacaagatatcctgtccgagttgtattcagaagataccaaactctaccgcagttgggacaaaattaagccaaacggagagacgaggcccatggacgctcctagggataagctcaagtttatccagaaaagaatcaacggacggatcttgcagcggacacagatttcaaaaatagcaaccggcggtgtcaggggacgtaagttgaaagacaatcttatcccacatctcagacagcaaatggtggctaattttgacctgaagcgatttttccccaacatcactaataagcaggtgtatgagatcttcattcttattggagtgtccccagacgtcgccagagttttaactagactgaccacctttaaaaatcgaatccctcagggcgcacctacaagttccatgctggcgaaccttgttgccgggtacggcggcagccattgtctggacggacgcatagaaaatctctgcgccatcaataatttcaatctgcgacgctgggtggacgacatctcaattagcgggcctaattacattaaaaagttcgagccgaccattgagaaaatcatctttgaatccggttttatccccaatcgggataagacggcgttcatttctaaaaacaacgcccagataatcacagggcacctggtgaacgaaaaggcaaacgtagtcaaacaagaaaggagacggatccgcgccatactgcacaagtgcaagactagcggcctcgatggctacagcaaaaaccgtatagatcatcttaaacggtctttacgcgggaaaattgctcacatcagctctataaatcccaggagtgggaacaagctgctcgataagttcaactcaattgagtggtcgagcctgattaatgagatgactaactctgcctga

SEQ ID NO: 11164 - RNA, 999 nt, synthetic construct
  source 1..999: mol_type = other RNA
atgctgcggatacgacaggtcaaacatttggccagaaggcttaaattccctactcgagtgctggagaagatcgcagaggcgcccgaactgtggtgcgaggagctcgtcctcttagatcctgcgaagccaaccaaaccacggaacgtgctcaacgttcgcgggcagctacgacaactccagagcaggatgctgcgcagcattctgcttcccgtgctgccggtttcccagttttcacacggctccactcgccagcgtcatattaagagtaatatcgaaccccaccttagatccacattcgcttttaccaccgacattgcagatttttacccttctgtgtcccacaatcgcgtctatagactctttgctaaaaccttagagtgttcgccagacgtggcacgcgtttgtaccaagctgtgtacatatgatcaccacttggccctgggcctgattacgtcacccatactcgccgaccagactatgcaccagatcgatagaaggataggactggcctgctggaaggctaagctggtgtatacccggtacgtggacgatttgactatctctggtggatatgatttggctaaaagcgggtttgcaaatcttgtgcaaggcattttggaagagcatggcttcgcagtcaatccagacaagcatagattcggtagactggaagagggcactacaatcacaaaaatccgtgtcaaccgcggtcaccctgatgtacgaaggcagtacgtgaccgaactggaaaggcaaatcgaggacgcccatcggctagccgtagacgagcagttcgacggaccttactacacggaagggcagatctgggggcggattcagtttgtttcttgggtcaacccgggccgtcaacgggccttagtgcggaagttcagagctgtaccatggaacaaagtgaaggaagttgctgagtgcagggggctggtgtgcctgaagaaagtccttagcaagaggattctcgccagtcccggaacagtgtga

SEQ ID NO: 11165 - RNA, 984 nt, synthetic construct
  source 1..984: mol_type = other RNA
atgctcaacattcagcaagtgaagcacctcgcccaccggttaggggtgtcggtgaaacatttggaggaggtggcggaatctccagaaggatattgtgaagaattggtgctgttggacccagccaaaccggagaaaccccgcgatgtgctggatgtacgtgggcccctcagaaagatgcaactccagctgctcagagaggtcctgctgcctaagctgcctataagcgcacactctcatggtggcgttcgaggcaggcacatcaaaagtaatgtgacgccgcatctggatagcaccttcgtgtttggcacagatatctcagacttctaccctgggatcaaacacaaccgcgtgtaccggttgttcacacagcagtttgggtgcgcacctgacgtcgcccgaatatgcacaaagctttgcacgtatcaatatcatttagccttagggctcattacttctccaatcctagctgatcaggtgatgggacccatcgacgaacgcattggtactgcttgtagaaaggctaagctagtctacacacgctacgtagatgacctcactataagtgggccctttgatttgcatgagaataagtccggcattgccggtctggtgcagagaattcttaacgatcacggcttcgccactaacccatccaagaattccttcggacggcttgccgacggagttcccatcaccaagattcgggttaagagaggccacctggacgtgaggggagagtatgtcaaagagctggaacgacagctggctgacgctgcgtcactggccaatggcggtgattttgacggaccctactacaccgagagccagatcaggggcagggtgcagttcgtatgttgggtgaacccaggcaggaaacgggaactgatgcgccattttcacgtcgtcccttgggacaaagttggacaagaggcagtaaggcgtgggcttgttgcaaccaaaaaggtcctgatgaagagaacctga

SEQ ID NO: 11166 - RNA, 1014 nt, synthetic construct
  source 1..1014: mol_type = other RNA
atgctcaatctgaaaaccccgaagaatttggcgtaccgcctgggtgtatccctgtccgtgttgagggatgtcgcggatagacccgacgactggatcgagacacttctccttaacgatccaacaagacccaacaaacagagggaggtgttaaatgtaaaggggaagctgaaacagatacagactaggctgctcagagtggtgcttctcccagtgctaaacgtatcgccttattcccacggtggcattagcggtcgtaacatcaagacaaatgcctcttgccacttaaacgccaactatctgttcagtgccgacatctctaatttctatccttccatcggacaccgccgggtctaccaactgtttagtaaacggctcaattgttcgccagacgtttcaaggctgtgcacgaagttaaccacgtacgattacaagctggctctcgggctccccaccagtccaattctggcagaccaattgttccatcccatagatgcacggattgccggggcatgccgaagcatgggactttcttattcccgatttgtcgatgacatcgcaatctcaggaagctttgatttgtcacctgagagctgtggcgtgtctgccttgctagagaggattgttactggaaacggctttgagctgcagctggaaaaatcccgattcggccggctgagtgaggatgaaatgactatcacccagctgcgagtccggaatggaagattggatgtccgggagcagtacgtgctggagctggaacgccaactggctgacgccggcgaactgagcaacgatcgccattttgacggtcctttctacacagagagccaggtgcgcggccgcgttcaattcgtgggctggattaatagggacaggaagagacagcttctccagcgttttagagaagtgaactggacccaggctatggctgttgggagaagccgggggctcgtcgtgcagaagaaaactcttatacgtatgcagaagtctgacctagactcaacagaaacctga

SEQ ID NO: 11167 - RNA, 996 nt, synthetic construct
  source 1..996: mol_type = other RNA
atgctaaaaatccggcaagtcaagcatctcgcttctgctctttctacgacccctgccgaaatggcggccgtgttgaaatccccagccgacttttatgaggaacttgaactgagagatccgagtcgaccagacaagcctcgcattgttgtcaatgttacaggagccctcagagcgctgcagtccaaactgtaccgtagaatactcctacccaagttgagccaaagtgcacactcacacggtggagtgtccgggcggtccattaaaaccaacgtagagcctcatttaggctcgaagtttgtgttcaaaactgacatcgcaaacttttacccctctatccatttccggcgggtgtacaagttgttcgtggaagatttcgagtgtagcccagacgttgccagtgtttgcaccaaaatctcaacgtatcgtcaccatctcgcactgggactgatatgcagccccatgcttgccgatcaggtattgcgacgcgtggacaggagaattggaggcgcttgcgccggtttagggctggtctacacaaggtatgtggacgatgtggccattagcggtccgtttaatatcgagactagcggcttgcctcgcctggtcgaggatatcttagctaaggacgggtttaaggccaatgctgacaagcacctgttcggctctctcgccgaggacctcagtattacttccctgcgcgaagtccgagggcaccttgatgtgagacgggaatatctggatgagctcgagcgacagatcgatgacgcagcttctctggcaagggatggcgaattcattggcccctacttcacctccgagcagatcctggggcgtgtcagattcgtgtgttgggttaaccctggccgcagaaggagccttatatcacggtttcggacagtgaagtggaaaaaggctagaaaggtggcgaaaaggaggggatacgaggtaactaggaaaaccctgacaaagctgccccgcagggaagagccatcatga

SEQ ID NO: 11168 - RNA, 993 nt, synthetic construct
  source 1..993: mol_type = other RNA
atgttgaggataaggcagactaaacaccttttagagactctgggagtatcaagcgacgaactgtccgctatcctcgcgaacccgagcgattactatgaggagctcctccttaccgatcctcagaaaccccacaagccccgcgcggtggttaacgtaacaggccggctgcgaaccctacaatcccgcctgtatcggagggtgctgctgactaagctgtgccctagtattcactcgcatgggggagtgagaggtagaagtataaaaacgaacgctgagccccatctcggctccgcttttgttttccgcactgatatttccgatttctacccgagcattcatttccggcgtgtctataggctatttgccgaaagactggaatgctctccagacgtagccagaatctgtaccaagatctgcacctaccggcaccatctcgcccttggtctgatttgttcaccaattttggccgatcaagtgctggcacgggttgacaggagattgggaggcgcctgtgctaaggaaaatctgacctacacaaggtacgtggacgacattgcaatctccggccctttcgattttgagaagtctggctttgctaaccttgtgcagaggatactggccacagacgggttcaaagtcaatcctcagaagcacgtctttggcagtcttgctaaagattgtactatcacaaatctgcgggaggtgcgaggacatctggacgtcagacacgaatatgtggaagagctccagaggcagctcgcagatgcatcatctctggcacaggaccgcgaattcgaggggccatactacacatttggtcagatcttaggacgcgtccgtttcgtgtgctgggtcaatccagggcgacgccgagacttaatgctacgtttgagaagcgtgaactggcgcaccgttaaggccatcgccagaaaacggggctatgaggtgagcaagaagacgttgtctaaacgggacgggcccctcgcccaatga

SEQ ID NO: 11169 - RNA, 993 nt, synthetic construct
  source 1..993: mol_type = other RNA
atgctgaacgtgcggtccgaaaggtgtttggccgatatcctgggggttactgttcacgcgcttaaagtggatttaggcaggctgaaccgcgatgttcgcgagtttcaactgattgaccccgctcgccccgacaaagttcgggaggtcatccaaattgtaggagcatggcggaggcacctcgacagattgatggaaaggctgctgctcccacgaatcactccttctatccacaatcacgggggtgtcaaggggcgttccatcttcactaacgccagtgcacacgccgagaacgtgtatgtctacaccgctgatgtgcgggactttttcccaagcatacatcatagaagggtgtatcgactcttttttggaaggttcgggtgcagcccggatgtcgctagcatctgcacgcgactctgcacacacaattaccatctggccgtgggactaccctcttcgcctttgctggctgaccaggcaatgcgtgaggtggatgaacggattcatggagcatgtcagagcgctggcttaacctataccagattcgtcgacgacctcacaatttcaggcggtttcgacttcgcaggcagtggcttcctgaaactcctgcctaggattcttgaaaagcatggatttagactgaatccgcgcaaaatagagatagggaggctggatgacggccctcaggtgacaaagctgtgggtgaacagaggacgccccgatgtcgcccgggagttcatccagaggttaatggagcagatggaagatgccgagagactcgccaatggaggcgactttgtaggcccatactttaccccagaccagatttatggtagagtgtgtttcgtgagatccatccgatgggggcgtggtcgggatttgatgcgccggtacagatcagttcagtggtctaaagtggaggccgaagcaggccgccttgggcttgtagctgaacgaaagcgcctaattcctaagcccaaggaagaggcgggctga

SEQ ID NO: 11170 - RNA, 1005 nt, synthetic construct
  source 1..1005: mol_type = other RNA
atgttacatattggatacgataaactcttggctcggatgcttgggaccaccagggctgagctgaacgacattttggacaatgccgatgagtattttgacgagctgtcccttttcaacccggaaaagccagacaagccccgggacgttatttccgtacgcggcaagctacgaactttccaggcaaagttctataggaaagttctactcaggaagctgtctgtttcaccccattctcacggtggcgtgaaaggacgaaatattaagactaatgccaagccccatctgaattccagatacatatacaagatcgacctccaggacttctttcctagtatcaaacagcctcgcatttaccgccttttcaacagcaaatttgcttgcagcccgcctgtagccaagctgtgtacaaggctgtgcacatacgaacaccacctggccctggggctgataacctcgccaatcctcgccgatcaaataatgcagagcgtcgacactcgtatcgggagcatgtgcgataatgctaaattggagtatacacgttttgtggacgatctgacgatctctggacccttcgattttgaagaaagtgggatcccagacctgatcaaccagatactcctggagtccggcctgaccccaaatcccaagaaatatgtgtacggaaagatcgataacggcatcagtatcaccggcatcaggaaaaatcaggagggtaaaattgacgtggaagaggagtatgcattgaaagtcgaagagcaactggaggcaagcaagtcacttgagctggggaattggcctgatctttcctgtttatatcacactcccgcgcagattcggggtagaattgatcacattaaatggatcaacgaatctagaggcaagaagctgctaaacatttacaagaagatcaactggtcacgggtggatgaggaagcccgcaagttaaaattggtcgtgtcaaagaaaagactcacgaaaaagacaaaaaccctcctcgtggactga

SEQ ID NO: 11171 - RNA, 1014 nt, synthetic construct
  source 1..1014: mol_type = other RNA
atgctcaatctgtggcgacttgaccagctgtgtcgacttctcaaaactgaccctgaaaaattggcttccgcactggaaagtccctcgaagtttatcaaggagctgttactgtgcgatccagcgggtgagaagcgtcctagacgagtgatagatgtctcaggcgaccttagactggtgcaggagcgcttctatcgtcgggtcctattacagagactgtggccaagccataacagtcacggtggaatacgggggagatccattaagtctaatgtcatcgcccacgcagggagcagattcgccttcaagtctgatattaggaatttctatccttccatccatcgacggagggtttacaggctctttgcggataggttgcactgctccgccgacgtggctagagcatgtacagctctgactacttttaatcaccacttagccctggggcttgtttcatctccgattctagcagaccagatcctctgtcccattgacaacaggatcgcggaagcctgcaagagcatcggcgtggtgtatacccgctttgtcgacgacattacactgtccgctagatatgacttgcgtcggagtaatgtcgccagcattgttcggaagatcctgggagatcatggatttgagattcaccctgggaaagaagctttcggaaggctcgaagatctcgcaataacgggtataaggatgcgagatagtaaactggacgtaacccgcgagtacgccgaccgcctggatcaacagctgaaagatgctaagtcattggccgacggcgcccatttcgatggcccatttcaaaccttcaaccaactcagggggaaggtgcagttcgtggggtgggtaaaccccggacggaaggcttacctcatgcggcgccttttctctatcggccgcgagaaataccggcgcgaggctatcaacaggggcctggtggccagcaaaaccggtctgatgagcctagatcccacaccggcagcccagttgagagtgtttacaccaggctga

SEQ ID NO: 11172 - RNA, 1032 nt, synthetic construct
  source 1..1032: mol_type = other RNA
atgtctagtatcggcatggacgccaagctgttcagcctgcatcgcccacgccaggtggcagatagactggggctagacgaatcttggctgctccgcctgagcgaagagttgcgcaccgcagaaggccgtagcaactacatccgggaatttaccttgttcgatcctcgaccagggaaaaagccgagggatataataagtgtcaggggtgatctgaggctcgcacagagacgtctccaccagcgcttattgtcccattcaatcgagcctactccttactctcacggaggtgttcgcgggcggtcaattaagacaaatgccgggcaacacgcgagaaatcgatttgtctacctcaccgatattgccaacttctatccatccatccactcatcccgcattaacgatttttttaaatccaacggctgcctgcctgcagttgctagactcctgactagtcttacaaccctagactaccacctggctcttggtcttatcacatctcccatcctggccgaagccatcatccagcccgtggacagacggatcgccgttgcttgtgatcgacagggccttgtctacagcaggtatgtggacgacatatgtatcagttccaagcactcgctgcatggcagcggcattgacgccacagtgagaactattctgagacagtccggattcaaggtgcgggtgtcaaaagacagatttatacgggtagacgagggatgcgcggtaacgggcgtgagaatccaccggggacgcctgtctgtcacgccaagctatattggagagctggagactgatctgagctccgctttgtcttttgcccggggagggcatcataccggcctcttcttcaccaaggagcaactctggggccgagtgcagtttgtccgatggatcaatccgggtagggctaaacccttgattaggttattcaggcaaattccctggcgtcggtacagggttgcggcaagccagtcagggttaattgccgctaaagctttcttcgccgagaggaagagttatgtgctttga

SEQ ID NO: 11173 - RNA, 999 nt, synthetic construct
  source 1..999: mol_type = other RNA
atgcagaaccccgcgacccgtagcaagtacattaacgaatttaccatagtggacccacgggaggacagaaagccacgcgacgtcatttctatcaggggcgacttcaggacagtgcaacgaagaatttatcagcgtatcctctcccaggtgatcaaacccgggcccagctcacacggcggaatcagaggtaagtcaatcaagtctaacgccgaggcccacctgggtaatgtctacgcctaccaaactgatatcgctaactttttcccttccatacatagagacagggtaagatccgttctgcaaaactacgtcgggagccgagacgtggctgagctgttagctcagttagtcactctggacgaccaccttgcgctgggcctggttacgagtccaattctggcagaggccgtaatccagcccgtggacacccgtatttccggtgcatgccggaaaatgggcctgacatatagcagattcgtcgatgatatctgcattagcggaagttttccgatcgacaagagttgtattcctcggatggtgcgcggaatactccagaacaatgggttcaaaatccgcccagaaaaggatcgcttcgttagcctttctacagatcttttttcattgaccgggatagaaatccgcaaaaatagactgcgggtcccgcagcgctatatcaatgatctggtgcatgatctggagtccgcaaatgcaattgccatgggctgtgaacaccctgttaccttgtattacactagggaacaaatagtgggtcggatccagtttgtcaggtgggtgaataaaggccagtcttccattctcgtgaagaagttcaagaagatcaactggcgactacatagcaaacaggccctccttaggggcttgattgtactcaaaccccggagtgttgataggtcctcaggagctgtgtcggatggaacggtggtgggggagtctacacctctacagtctaaaaaacgaagtattaagtcagtagactga

SEQ ID NO: 11174 - RNA, 987 nt, synthetic construct
  source 1..987: mol_type = other RNA
atggagtcatcaaatctgcaggccatgaactgcaagacacttaggatacggaccataccgcacctcgccaatcagctgggaatacatgaaaacgggctgatcgacgtagcagaaaatacggaacgctattacagagattttaaacggaatgtgaagggaaaagaccgagatttggtcatgtctatcaaccctttagccatgctccagagacgcattctggatcgaattctgcatcgtctgccaattagtgattacgcgtacggcgctattaagggccgcagtatactagacaacgctaaaaagcattctaacagccttttcatcgctaagttcgacgttaagtccttctatccaagtgtcaggtaccaaaagatctatgactttttcatgggccaggaatgcgcccctgatgtttccagaattttgaccctgctcaccacacggaagtattcgcttcccctgggcacctcaacatcacccatgctcgctgaccaagtgatccagcctttagacaaacgcatttgtgggatggccgcaaaggcggggctgaaatatacgcggtacgtggatgacattactatctccggaagctaccctgtggagcagtttacagacctagtgatcgagattatcaggcagaatggctttaaggttaaacaatccaaaatcgatgtctacgcaccaggtgacggcaaagagaggatcatctgtggcgtcagagtgcagaatggtaaggtatccgcctctactgattacatcaagactctcagaggggaactcttgaaggcaatacagcagagccagcacagggacatctctggagattttgatactcggaaccagtaccgggggcgaattggtttcgtgatgtggttagacaggcccgagggattgaaacttctgagcctgtatcgtaaggtgaaatggcgccacctcgagtggattctgtatgagagaaacaaaagcccccaaaagaccagcctgtga

SEQ ID NO: 11175 - RNA, 969 nt, synthetic construct
  source 1..969: mol_type = other RNA
atggagccagattccccctcttctgacggcctgcgcatccagagaattgagcacctggcatctcagctgggtttccccgttgacagactcgtggattgcgcagaacacgcaggtgacttctatcatgactttaagaggaacgtgaagggcaaagatcgtgacctgaccatggcgaggcccccacttagcgtcttgcagcgaagaattctcgacaggatcctctgcaggctcccagtatccgagcacgctttcggcgccattaaagggcgtagtattcgggataatgccgtggcacatgcacgggcccctttcgtagctaaactggatatacgtgatttctacccatcaatcagataccagaagatttacgatttctttatggcgcagggatgttcaccggacgttgcccgaacactgactctattaacgacgaggaactattctttacctctgggcaccagcacctcaccgttcttggctgatcaggtggtccatcccatagatactcgcattggagggctggctaaggccaaagggctgaggtatactcgctacgtggatgacgttacactgagtggaccttttgaccttgaacagctggccaagcaaatcgtaacaatcatcagacaagcaggctttgcgattaagaggactaaaatggaattttaccgccctgacgacggcaaggagcggatcatcaccggagtgagagtgcaagacggtaaagttagcgcccccagcaattatatcgaactccttaagcgcgacttggtcttggcccggaaggccagtctccacgaggtggtgcatcaggattttgacacccgggaccagttccgggggaagataggatacgtgatgtggctggatcctaaggctgggagaaagcttatacggctataccgaaaagtcaagtggtcgcactttgagtatgctacatccaggcgcaaatccatggccaaagtctga

SEQ ID NO: 11176 - RNA, 960 nt, synthetic construct
  source 1..960: mol_type = other RNA
atgatcaagcgcatagtggacaagttaagaatcgtcgaggtgaagcacctgagcatgcacctgggctcaactcccgtggaactggcgcacgtgtgtagcagcattagcagacacccgtcccagtactacagatggtggaacaagtgctttcccaacggcaagaccaggcctatggtggaagtgcgaggtcgtctgcgagaaatactggacagactcaacgatctgcttcagcatgtctgcctcccagaatacgttaacggcggggtaccgggacggtctgttctctcgaacgcaatgccacatctgaataagcctatgttgatgaaaaccgacctcgccaatcattttccccgggtgtctccaggtagggtctacgctatgttccgcaaacagcaagaatgttctcccgaggtggcccggatattgacccggctgacgacacaaagcggggggttgcctcagggcagtccaacttcagttgcagtttccaatctggtcactcttggacttagtagaaggctaaggaggtttgcagaggcccgcggagcagttctaacacagtatgtagacgattatatcttcagtggcggcaaaaggttggctggatgcaaggaaaaaatcatctcaattgtgaagcaagaggggttcaaagcgaatgaggcaaagactgtgtccgtccctgccgacaaggagcagatcgtgacgggaattcgggtaaacggttcccagatggatgccccttcttccaaggtagctgatgtgcgcaaagccatacgtcgcctgcgatgtgagctggaggtgacaggcagtgtccccacaaagcgcattaaaagcatcgaggggaaaatctcatacattgccgcttataatcggggtaccggcaaatatttacgtagacagctcgatcacatcaagaccccaggggtcaggattgccggcagagaggaaattgctggatga

SEQ ID NO: 11177 - RNA, 945 nt, synthetic construct
  source 1..945: mol_type = other RNA
atgaagcgaaggatctataacctgcgaatcagggacgtgcagcatcttgcaaagctgctgagtacaactcctcaggagttgcacgccctatgcgacaccgtggcgtcacatcccaagaggtactatgtgcagtggagcaaacctactaagaagggcaaaatccggccaatggtgaagattcacggcaggctgcgtgcaatactcgatcagctgaaatctctgctgcacaccatcgctttaccttcccacgtgcacggcggagtacccaaacgctccacatataccaatgccataccccacctggggaaaccgatgttgctccgaattgacctccagaaccatttcccatcagtctcccaccacaaagtgtacgcaatgttccgcaacgaacaaggctgtacccctgatgtcgccaggttgttaactagactcaccacgcttaatggaggattaccacaggggtcccccacatcaacaataatcagcaatctcgtcacccttcatctgagcaaaaggctgagaggatttgcccagtctagaggcgccggttgtactcagtacgtcgatgactataccttttctggggagagaagactcgccaagcatagtgggcggattgtatcaatcgttgctcaagagggattcaaagcgaacccaaccaagacaattgcagtgccagctgattgcgagcaagttactactggtatccgcgtgaacggcaagcaagctgatgttccgacttctaatctaaaggacattcggagcgatctgaatagtctggacaagcagatagctcttggctcgaagagctctgaaaagattatcaaacgcatcgaagggaaaattcggtacgtgagacgctggaaccctggtgccgcaaaaagtctgacccgtaagttgacgcggatcacactcaagcccgccacgtccgctagcacagtctga

SEQ ID NO: 11178 - RNA, 966 nt, synthetic construct
  source 1..966: mol_type = other RNA
atggctttccatcagggcaccacaatggtctgcaataatctcgataactaccaagaaaatggattaagccctattaacttcatgatatccacaaaagccgccctttacaatactttgaagttcaccgaaaagcacatttggtacatcattaagaacatagcaaagcactacaaggaaaaagaggttgacaaaactaagtatgggaaaccacaactggataagaatgggagtatccgtaaacgaaacctgaggatccccacttatcctttggacagaatccagaagactatacatgagtttatcaccgctcagtcagcctttcccgactacatgtatggatccatccggggtcgcaatcacatccaaaacgcgtttagacattgcaacaatgtctatttcctgaaggtggacctaaagaactttttcccgaacatttctcatagacaggtctatgggagtctagtaaaattcggcctcccccatgatatagcacggatcgtgaccccactcactacagtggagggaaaactgcctcagggcgcccctacctcctgtattattgctaacctggtgctgcagaacgttgcccggcgactgcacgactttgcgaggaccaataacctgacatttacgtgttaccttgacgatttaaccttctcatcgaaggaagatttcagggccctgaacgagaagatccttaatatcattaaggaggaaggctttttcccgagcccaaagaaaatttcttaccgcaaaattagctgcgagattacgggcatcatcgtgaaaaacaacactcttgatctgatacacgagatgaaaagggaggccttgacaaatctccacatctatcactactacatgtctttcctcaagcagagagacagcttgtttaatctgagctatcccaacacattttccaatgctttcctcggtgcaccacgcaatatcacctcaccccagtga

SEQ ID NO: 11179 - RNA, 921 nt, synthetic construct
  source 1..921: mol_type = other RNA
atgattaagagtgtgcataatttgtatagcttcttaggcctgacccctggggagctcgatagtataactagccgcatcactgaaaactattatcagcgctctcgcccaaaaattaaatatggagaattccagcgggacgattcagggaatatcaaatatagggacctccttataccatcctatcttctgaagtcacgacagcagaggattgcaagactgctctccggtatcacactcccagtgtacatgttcggcagcatcaaagaaaggtcaaacatccagaacgccaggcagcacctgaaccatcaatactttttcaccctggacttgaagaagttcttccctaacatcaatcaccgacaggtgaatatgatgctgtgtgaaaatggcttctcgttttccgtgagtagaatcctcacccagctgacgacctaccaggcgtctttgccgcaaggcgcccctagctccccagtcatagccaatcttgtgtttatgcctactggaaatagactaaacgagctggccaaaatgaacaacataatctttaccacgttccttgacgatctcacattttctagcgatcattgtttcaagaagcggatccccgaaatcattaagattgttaaacaagggggattttacccggcttacgacaaaatgcactaccggaaaggttacagcgaggttacaggcttgtttgtcaagggtgatcggctcgagctgccctactctatgaataaaaaaacccgtgagaaccaccacattaagtcctacaaggagcaggtaagaaagtataactcagtgcgtccctgcttaattaagcactgcaagaaagacctaagactgtttgaggctaataagaagggacatcgcctggtcacattagcacccctgcaaaacctgcccactggcgggctgtga

SEQ ID NO: 11180 - RNA, 912 nt, synthetic construct
  source 1..912: mol_type = other RNA
atgcctcagaaggagatgataaacacactaacccatctcgcctttgagctcaaattcaaactccccgagatcgagagcataatcaacaacatcgacaagttctactatgaaaaagtggagatcaaaccggataagtttggaaatccgaagttgaaaaatggcgtgatacagaagagggtgctcaaccccagtattacaaggctgaagctgcttcaaaagaacattcagcgtaacatcttattgaagctggaaatgcctgattatgcattcggcgctgtcaaagggaaggacaatgtccagaatgcaaaacaacaccagggcaaaaagtacatctttactaccgacctgaaatcctttttcccaagcattaaccataaacgggtatttgagatgttcagatccttcaacttttcacccactgtggctagagtcctgacccaactgacaacgttcaaaggacggctacctcagggggcaccaacgagtcctaccgttgccaatcttgtcttcgtcaagaccggtaagaaactgctcgagttcgcgaaggaaaataagctcacttttactagctttgtggatgacttgaccttctccgcaccaaccgattttaagtctaaggctcagttcattattgaaactcttcaggctgacggatttaaaattagccacaacaagacgaactacaagacaaaaatgcccgtggtgaccggtgttgtagttaagaataacaagctgtctctgaccgacaatttcaagatcaagttgaacaatactgaggattcaactcccgaacgcatcaaaggcttacagcaatatgccgccaaagtggccaaaacaaattcgtctccactgcttacagccattcgacagcctctgacaggcgggctggcgttactgggacagacctggtga

SEQ ID NO: 11181 - RNA, 936 nt, synthetic construct
  source 1..936: mol_type = other RNA
atgaatagctcacagttcaagaagaatgaattcaagaaactgtgcgcgaccatcggttttaagcccgcacaggtagaggaactcattagtaagctggatacctattacaaagagtgggtcgaacaaaaaacggataagaaaaccggagactttaaacggtataaggatgggacaatcaagcaacggactattagaccttcccttaaggagttgaaggttatccagacaaacatcaagacgcgcatcctggcacccatagctctgccaaactcagtgcatgggggggtgaaaaagaggagcaatatatccaacgctaaacctcatcagggcaataaatatcagtttaccactgacttgcaggagttttaccccaacatcgacttcaagagagtgtacaatacattcatcggtctgaagttttctccacattatgctcactggctcactaagctgaccacttggaagtacgagcttccacagggcactcctacctctacacacattgccaatctggtgttccttgagacagatattaaactcatagacctatgcaacaagaacggcattacctacacgaggtatgttgacgacttaactttcagttcccagcaggattttaggcacttgttaaacgacatcctccaaattgtgacttcggggggcttcaagctcagctacagaaaaaccaaatactctgataatcagaccatcacaggaattaacgtcttcctgaataaaatagacgctccggaaaaaatcatcgaaaaggccaatgccgagaaaaacacaaagtttaacactaagcctttcacaaactatctgaacaacatccgcaaaaccaatcgtgccaaacggaaaccagccaccaataagtccattgcggcaattggagccggccgaaagcccaatcaccagcaatgtataagcaaactgtga

SEQ ID NO: 11182 - RNA, 903 nt, synthetic construct
  source 1..903: mol_type = other RNA
atgaacagctcacagttcaagatcaatgagtttaagaagatctgctccatagtgtgtttcaaaccaaatgaggtcgaaaatatcgctaagaacttagacaagtactacaaggagtggattgagaagaagctggacaaaaagaccgggctccccaaaaagtatctggacgggacggagaagcaacggaccatcaggcccagccagaaggaactaaagctgatacagtcacgtattaagaacaagattttggtcccaatcaaacttcccgccgaaatccatggaggcgtgaaagggtgttctaacatcaccaacgctaaaccgcaccagggcaacaaatacgtgttcactacagatttgcaggagttttatccaaacattacaagtcaaagagtgtatgatacattctgcaaactcaagttttccccacattttagccattggctgactaatctgacgacctggaaatacgaactccctcagggaacccctacttccactcacattgcaaaccttgttttcctggacacagacattaagttaatagaactctgcaacgccaataatatcacttacacacggtatgtggatgatctgacattcagtagccaacaggattttaaacacttgctgaaccctatactcgacattgtcacctctggaaatttcaagctgtcttataggaaaactcagtacaaaggcaaacagacaataaccggcgtggatgtatttcttaataaaatcgacgcccccgagaagattatccaaaagtcaaagatcgaggttgataccaaagcagaccttaagccctataccatctacttgaacaatattcgcaagacgaattccctccgaaaatcgctaccgcctactctgggtctggcgaaagtaggtagaaccgaatga

SEQ ID NO: 11183 - RNA, 951 nt, synthetic construct
  source 1..951: mol_type = other RNA
atgattaagagcttgagacatcttgaagctgtgatcgggtataaactgaaagacatcgacgctgtgctcgacaacctgcataagtattacaatagcttttcgcgcacaaaaaagtcaggcaaaaagcgtgacatcgattcttccgagaatattctgcgtgatttacacaatagaatcaatgaccgcattttcagccagatctctctcccgtaccatgtgaccggttccgtgaagtaccgatcagcggtcctgaacgccaaataccacagtgggaaaaagtatcactttcagactgacctcgttggctattttcagttcgtgtctaataggttggtgtactctacactggtatcattcgggttctccgccgatgtggcctcctacattaccaaaataactacctataagggacacgtaccccaaggtgtgcctactagtccatttctctgcaacgtggtcggactacgcattcttgacggtgagatcctggagttttgcaagtcccgctctataatttacacccggtacatcgatgacctgactttcagcagcgatgtcgacatcaaagatttcatccctgacatactccagatcatcaacaacaagaactttctgtattcccatagaaagacaatctataaagcaggagatattgtggttacgggcgtattaaccacatgtaacggcctgaaaatgccagagcggttgattgaaaagatgagtaacgaggttgatataatcaaaaggaagggctacgagaatttcgcaaatcagattcaacggatacacaagcttgggacgctgaacgctatcgtcgataggcagagagaattagttttccccggacggcttaaagaccgaaagaaaaagaatgcaagcagtgccgtgctagatctcgtctcactggaaaataagaagttggaaattgagagggagattaacctgtactga

SEQ ID NO: 11184 - RNA, 909 nt, synthetic construct
  source 1..909: mol_type = other RNA
atgatcaagtctaaaaaaattttctccctcgtcctaggctacgaactgaaaacgatcgacaacataatcgagtgtttagaggacgaacagaagagaggaaagtattataacccctacaaggtgaagaaaagtggcgggaagttcagagtcattgcccctagcaggggtgaactgaaaaaaattcaagcgcgaatacacgaaaatatcttctcgcatattcagctacctttctatgttactggaagtctcaaacggagatccggggttatcaatggtaagattcactctggaaagaaataccactttcaaaccgaccttgtgaatttctttggctttgtatcatatcggaatgtgcttaaggcactgaagatgctgggcttttcacatgacgtggcattctacatcaccaagctgacaacctatgacggccaccttccacagggggtgtgcacatcaccctttctcgccaacttggtggggctgaacatcgatgatgctatgctggatttctgcaaatcccgcaacatcacctactcaaggtacgtcgatgacctcactttcagcagccagagcgactttaaagatgagctgaagatcttcttatctgggataattgctcagggattcatctacagttaccgcaagacaaagtataaaattggcagcattgacgttaccgggactaaggtaacaaatgaaggaataaagggcactgacaaacagtacggtcgtgcccttctgatcgatactaaatccagctccttcaagggcctggtcggacatctcgagtatgtggaggagatcaacgataaatttaatctgacaacgtaccgaaacgagaatatttttttgcggtttccaaccaggttgtttccctatatgaacttcaagaagaaagagtctaagtga

SEQ ID NO: 11185 - RNA, 939 nt, synthetic construct
  source 1..939: mol_type = other RNA
atgggcggatttgactatgcaagctctctgcggctggatggactagcagctgcgcttggggttactgtctctttcttagaaaaactccagatttaccctggtgcgtactacgacgactttgcaaaaaaaaaggatggcggactgaggaagattgtgaaagttgactggcccgtacggcgactgcaagagcgtctgcaccacaacgtattcggcaaaattaaactgccagatttcgtggagtgccagtcaggccgcagctctatcgatcacgctctcagacataaaaaccagacgcagatcatcaccttcgacattgagagctacttcccatccataacttacaggagagttcgccagacattggccttttttgggttcaatcagctcgtgtcagccgtgattgccagaatcaccatccgagatggaagcctcccccaggggacacctacaagtacggacatcgctaatttcgtcggcacatttcttgatcgccggttgcttggtctgtgtgagaagcataactgggtctacagtcgctatgtggacgatgtagctatatctggattcaagaatatgggctgggccaagaagctaatcaacaagataattatctcggaaggcttccgtatctccaccaaacaaggagggttaagtgtgaccatggtgaaggacgtgcctcttgtcactggtgtgaggataaacaaaacctttatccaagccccaaaggagtattatcggagcgtcaggcagaaaatttacctgtggcagaagttcggctatgaatccgcctatcccggcttttcaaagaagcaatccatttccaagctgcacgggaaagtgcattacctgatgtatctcgacaaggtttcaaagagatttaatggtcaagggtaccagttgtttaaacagttccagaagctgcacaaggatccggcctga

SEQ ID NO: 11186 - RNA, 918 nt, synthetic construct
  source 1..918: mol_type = other RNA
atgtcactgccctcttctcttactaaatggaccccaagtctcgtgacccctcctgatccattatgtccaattgtgggcatcaaatcccccaagtctctggcacgcattctggggtaccccctaagccagctggaggagctttgcggaaatattgagagcaattaccacaagaaggaaatcacaaagaaaaatggtgccgtgcgtgtattgagcgtgccgagcggagcactccgtaaggtccagactgccattctgcggcagcttcaaaaacacccactccatcccgcagcctatggtgccgttcagcgaaggtgccatatagataacgctaaacggcacgctgccgcgccctatgtgtattgcctcgatttttcatcctttttcccatctatcagcagtaaccgaatctataagctgctcgccgaacaattaggatgcagcccccctgtgtcaaacattttgaccaagttgacaacgtacaaatataagctccctaccggcagcccaacctcccctgtactgactaatatcctgtgttttccgctggataatcgcctgaacagtctggcttgtgattatgggctgacgtacacacggtttatcgacgaccttaccttttctggcagaaggatccctgaaggattcatcagaaagacaaaggagattattacttcgttcgggctcctactgaatgacgaaaaagaggagttattcacaccctacaaaggtaagctggttacaggcatcaacgtgaacaccaacaaagtcagggttagtagatactacaagaaatccgtccgcgctcagaagcatcagttcgggcttttcaaggactatatgactgactcagaaaagtccaaagaggagtccagaatagacggcaaagaacaatacataaggttggtccagcggcgctga

SEQ ID NO: 11187 - RNA, 909 nt, synthetic construct
  source 1..909: mol_type = other RNA
atgtcccatttgcacttccccattaacaccgtgagtgagctatcaaccttgctttctatgcctattcgagatctgtggaggctggcaaagaatacagataaaagctatttcacctggaaggaaccaaaaagcagcgggggctttcgctccctttgcacgccagattctagactgaaggaggttcagaaaaagctgcataagctggttttctccaagataattcactcccggttttcacattacggcttaaagaagaaatcgaatgttaccaatgcttctgaacattacgggaatgatgtgatctttgccttcgatctgaaaagcttctttccgtcaatcaggcctgaacgagtccggaaggcactcattgacgaggtcggttgtcctgcccctctcgcctctctgatcactaagctagtgactttgaactatcagctgccccagggtgctccaacgtctaccgacatagcgaatattgtgacatttcggctgcagagaagattgtatagtcttgctaagcagtggggaatcaagaaattcactatctacgccgacgatatcaccttcagcggaaacaacattccccacggttttatgaagcttgccaagaaagtggtacgtgaggaagggtacaagatccacccagaaaaagggggcgtgttcgacaaaagtggcaatcagataattaccggaataaacatcacacacggcctcacagtgggaaagatgaacaagatctggcgcgctgagaggcaccaaaactttctccaatacctcaaaggccagctgcccactacagagttcgacagctccgagaaaaggtttaatagccgcattgtctattcaaacttcatcaagaaatccgggctgaaagtagcagacaattatttaagttcggcctacaaatga

SEQ ID NO: 11188 - RNA, 1401 nt, synthetic construct
  source 1..1401: mol_type = other RNA
atggaaaagtggtgtattttacctaacaacctcatacagaagctgaataaagacgatgtgatcgtggcaagcctgactcgtttctgcaagtgtagcactgatgaattgttcgcagtccttaaaaatcggtctaaggaaaacaggtggtggtggtatgggtacacccagtataccaaaaataacggcaaaaagatccgcactattagcgtgccgcgcaagaacctgaaaaaaattcaggaagccattaaagatcgactcgaccagatacccgtttctctggcttccactgcttggaagattggtgattctgccgagaaaaacattgaactgcacaaacacaatctgtatcttctttccatggacatcaaaaatgcctacccgtcaatcaccacccatcgggtgtacaagaacctgcagtgggccttgccactcaaataccggtgccctcagctgattacagatgaggacaaggacatttttattaggacgattacgcatctttgtgtgcacgacaatcagctgccacaatgggctagcacatcgggccagatccagaatatagtgtttagtagtttggatatccagatcgagaaaaaaatacctgaactggtatggagtcatatggtctactcgagatatgctgatgatatggcgataagtttcccacattttagcaccctggagatcctgaaggagaaaatggaaaagtacatacaaaccctgaagaaacaccgagagagaagaagcatcctactggatgagttcagcaaggacacattcatcgttacagataactttgagcagaagtatctgcaaaagaagatcgaggacattaaagagctcatgaaatggtcttggctccccgatgaggaaatttataagcacattggcactcttgacgcctacaagaaaaacatcaagtattcaacctggagaatctccgacatacatgacgagatcttgaaagtcatttggtgggaatggcgcaagatcaataatataaagactaacatgcggaccccccaatccgatcgagaacgcgagatcaatggaatcacactagacgaggaaggtaacaagtggttaaacaaaagaaagagggcccagtatttgaaaatcttcaatcacctcatcaagcactcacaaaacgacctaaaggggttcaccttttaccgtgagaagtttaatacactcgagaactttgacatctgctcttccactatcacgcagataatcgatggaatttatcaccgcattgcaaggatttacggaacagggcggatcccaaagcctctgcatgaagcgtaccagaaggcaaagcataaaaggtcctctcacgagatttacctcacctacctgcccaacaattcagacacaaacaatgaagagttacttttctga

SEQ ID NO: 11189 - RNA, 966 nt, synthetic construct
  source 1..966: mol_type = other RNA
atgcgcaacaatgaaattaggactctgaagcgtttgtgttccctgctccacctgaaggaggaatacatacttgatctggccagcagagcaaactcttgctactactcatacgacaaaaagagtagaaagaaagacgggacagcaaagattcggcatatagattcccccaacattgagctcaagaacatacaaaagaagattgacagcgcgatcatcaagccttatgtgaacctgcttcctgattacatacacggagcccgaactggaaagagcattgtgaccaatgctaccaatcatgctgggtatgaggccattctgtcattagacatcgaaaactgtttccccagtattacatccaagcgaatctactatatcttccgcaataccatccattgttcagataaagtcgcaagcgtgcttaccacattgacaactaaggacggtgtgctgccacagggttgccctacctctgcgtctctgtgtaatctggtactcgtgcagatgattgaaaaactctccgagattgacgggagtttggactacaatatttcgcactatattgacgatatcttctacagcggcagatattgcgatctgcaaaagattcggaagccggccatgacggaaatcggcaaaaatggctttcgcccaaacactaagaagacactgctagtaaaaaacggaaggcccatgaaagtgacgggcatcacagtcaataccaaagtttccgccggacgtcggcggatacgcaaaattcagaggaaaatcctcaaaatcaccgagaaagataaagccgagtatgacatcgtcctaaagaatagaaaaaggaacaacaactcgaaaatcaaagcttgcaagatcgaaaaactctttggcgagataagcaatgttatctctatcaacaaggagcaggggtataagttaaagaagaagatcgaggctaaattgaatgatcttatcacttga

SEQ ID NO: 11190 - RNA, 981 nt, synthetic construct
  source 1..981: mol_type = other RNA
atgcgacaggaaccccctaccatccgtcgcccattggagcctcgtgttgtcacaatccagcagctggctgccctggtgaatctaccagtcaaccagttggatagattcgtgctggaagccccgaagctctattccagctttgaggttcctaaacctaatggcaagactagaacaattcgcccaccggcacgcccgcttagagacttacagaggatgctgcttgaggtcctccaggagtgtgtgagatatccaaggtggcttatgggtggtgtgcctaagcgcagtatttttgaccatgcaaaacctcatgtgggatggaaaatggtggccacctttgatgttaaggctttcttcccctcaacacggtcggcgatgattcggcccgtgctcgagagaattgggatcagcgatgccgcggctgatgccgtgctacgactggtaattaaggatgacgaactcccccaggggtccccaactagtggcttcctcgctaacctgacattagaacccgctgaccggagaatcgatgctctgtgcaggcggcacggactgaactttaccaggtatgttgatgacatggccatcagcggcaatactgacctgaccaaatttcaaggtgcgatagtcgaagccgtcaaggagtctggctacgaggtggctcccgagaagatacactacatggatcggtctaagacacaattaattacgaaactccgtgtgaatgacaagataaggccaacccgggagttcatcgccgaggtgaaagccgatatctgggaatgcctgaacgtcggggcagcagtcgttgcaattgaacgcggcgtgcagctccaccgactgaagtcctctcttacgggaaaagtgtcacatatccgatccgccgacagggaagccggcgagaaactgaaaggaatgttgtacggggtagactggaaccagcaactgcacactaagttcgacgtacccagcttgaccgcatga

SEQ ID NO: 11191 - RNA, 954 nt, synthetic construct
  source 1..954: mol_type = other RNA
atgagggctgaacccccagtcgttaggtataatcggagcctacagatctctactctcgatcaggtggccggatgggtgggagtagagctttcaccgttgtctgatactatcaaccgcgcctctaccatgtactcctgtttcgagataaaaaaaccaaacgggggcagcagaacaattcgaccacctaacaaggtgctgaggaccctgcaacacaatattctgcgcgagctgcagagcatggtcaggtaccctcggtggatgatggggggtatcccgcgccgtagtatctttctgcacgcaggcccccacgtcgctaaacggatggtggcaacgtttgacgtcaagtcattctatcccagcacaaattcctgtctggtcaggtctgtgttagagagactaggcttttccggcgaagctctcgatgcaatggtgcaaattctgatcaaggacgacgagctaccacagggagggccagccagtggcttgattgccaaccttgctctcgagcctgctgaccgtcgcattgacgccatttgccgaaagcatgacttgcggttcacccgctacgtggatgacatcgccatatcaggggaacacgatctcagagtgtaccagggtgcgattattgatgccataggtctgtgtggatatgaggttgcccctgacaaaatcaagtttatgggtaaggaacagtgccaggtgatcacaaaactcgtagtgaatgaacagcttagaccctcgaaatccttcatcttcgaggttaaggccaaaatcagggaatgcctggcgaatggagcatttgttgttgctgtagagcatggcatctccgtgcctcagcttaagagcaaactgaacgggaaggtcagccatataaagcaagcagaccaacggctggggaagagtctccagagaaaattaaatggcgtgaactggtcacgacagctgcccgattga

SEQ ID NO: 11192 - RNA, 957 nt, synthetic construct
  source 1..957: mol_type = other RNA
atgaatatgctctctcaacacaccatgcagcagaacgactggcctccccctatttccaccagagagaggctggcccgcacgctgaacgtcagtcctgtggtgatcggggaatttgttgcagaacccgcgcggtggtattcccagtttaccgtgcccaaaccctcagggggcaatcgtattatccagccaccgaagaagccactgaggcgagtacaacgggctctgttgcgccttctttacagcagactgcaggtgcctccatacctacacgggggcgtgccgaagaggagcatcttgacccatgctcgcagccaccttgggcgcaaaatggtcgccacactcgacgttaaaaacttcttcccctctacacagcagaagttcgtgcagccaatttttgaaatggccggaatagtggatgaagcgctgactgacgctctcgccattacaatgttagcagagggactgccccaaggcgctccgacttcatcattgctggccaacttagctttcgtccctgtggataaggccgtgatcgccctgtgtcgaagcagaaatctgtcctttagcaggtacgtcgatgatatcgccctcagtggaaatgtggatttcagagagttaaaaggcccactgatagaccggatccacgctgctgagtatgagattgccgaacataaggttcggtttatgcctgcctccgagcggcaggtcgttactggccttgtggtgaaccaaaagctgaggccaacagcagagttcgtagcaacgctcaaaagtgacatcagagtatgcctcggccacggtgtcgactttctcgcggactctgagggtatttccactcgtggaatgcgtatgcgcctatcgggtcgagctgcccatatagccgcagcagatcccaagctgggcaagcggatcagaggaatgttgtgcggggttaaatggaccaccgcatctaggtga

SEQ ID NO: 11193 - RNA, 960 nt, synthetic construct
  source 1..960: mol_type = other RNA
atgcctattcaattgcacgcaacccgtaaggctgcaaatctggtatccaatcttgacgggctcggcaagttactcggctttccggtcgtgcggttaaacgcggtcatcgaatgcccatctcgacattattccagtttcgacgtccccaagaaaaacggtggcgtgcggacaattgagccgccccacagacctttgcgcgagattcagagatccctgcttaacaggctgtatcgccggatcaaaattccaaagcacatacatggaggagttcccaggcgctctatttttacattcgcaagacctcatgtggggaaaagcatggttgctacgttggatatcaaggatttcttcccaagcgtgggccccagccacttagagccagtgtttttccagctcggttttaggggtgaggcgctgaatgccgtagtgtcgttgactatgctgcgagattgtcttcctcagggcgcccccaccagttgtctactggctaatctgtcattctcaaacgccgacgccagttttaacgctgtctgtcggaaacgcaacctcctgtacggaagattcgttgacgacatcgccatatctggcaatgtggacttcggtgagctgcgcggaacgtttctcggcatcatcgaagccaaggattttcaggccgcagaagataaaattcacttctacgcacaaagccagagacagatagtaaccgggctcgtgctgaacgagaagctgaggcctactcgagaatacgtggccagcctgaaacaaaggatccataattgcagaaccttcggaccaacatttatcgctaattccgatggactgactgtcaggaagctcaaaaatagccttacatcttccgctcgttttgttggccagtctgaccccaagctggggaagaaattgcgggggcttctatgcagtgtggcgtggggggcctcaaccaaccggttctcagactga

SEQ ID NO: 11194 - RNA, 1047 nt, synthetic construct
  source 1..1047: mol_type = other RNA
atgtcctaccggcatctgcttaagccaggagccaggcgggctgaggctttggtagatgtggacgggctggctcgagcgtgcggacaagatgccactcgcttgcgaaggttgcgcgaaaatctcccgtctgcatacggtcgcattgagaggcctaaacccaagggggggtttcgcatcataaggcctccacgtcaagatctcaaagaggtccaaagaggcctactcgattggctggagacacgcttcaccgccaagccctggatgcacggaggagtagcccagcgcagcataattagtcatgctcaacctcactgtgggaaggccatggtggccgtccttgatgtgagagatttttttgggagcgttcggcgtgagaggcttgctgccctcctcactgcagcaggactggaaggggaagccctggagacactgctggacctcgttacactggatgacaccctcccacagggagctccaacaagttgcctactcgccaacttggctttctttcccgcagaccagcggttcagacgggtgtcagcgaaaaggggtcttgtttacaccagatatctggatgaccttgcactgagcggcgacgaggactttaaagaactgagaggcccactggtggaagctctcacgctggaaggattccaggtggcagcggagaaggtcgccttcatgggtagacatgagccacaggtggtcactggtctggtggtcaatgaccggttacgtcctaccagggccttcagagaagcgctgattgctgaaatcaacgactgtcagatcgagggcttgggcgctcggtccgacagacttggcacaaacccccagaggttgcgggccagactactgggccagatccggcacctggcacgatttgatcccgcacctgcccgccgtttagaacgacgcttaaggagtgcccctggcggccgagctactcagtcatcgagggccagacgacgcaccagcaaggcatcttcctctagctccgcctatctggcccaggagagttcagagccgccctcacggagggcatga

SEQ ID NO: 11195 - RNA, 984 nt, synthetic construct
  source 1..984: mol_type = other RNA
atgcactacgagctgctcaggcgacggccagctcaggatgctctggctgatgtgagtgacttggcgagagctctcctgcttccgcgcaaggggctgtgtgagctggccgaaaacaccgagtcccattacatcgaaattcggattcctaagcggcatggagggttgcgccggattcacgcacctgacccaagcctgaagaaggctcaacgcgctgtgctacggttgcttgaggatcggatggtgcccaagtcatggatgcatggaggcgtcacaggtcgctctatagttacgcacgccgccccacattgcggcaggtgttgggtggcagttttggacctcgccgatttctttccatctgtcagacgcagcagggtccaggccatcctcgaagcagcaggctttactggcgacgccctgaaagtgctgctggcgcttacaacactcggtggagcattaccccagggggcccctacctcatctcacctcgccaatctcgccttatttccattagacaggagacttcgcagcttggcgaggcgatgggggcttacctattcgagatatctggatgacatcgcactgagtggcaaacgtcccctgcggcccctcaaaggaccactgcacgatgcagtgataagagagggattcaggccctcaccctccaaaaccgcctttatgggtcgtcacgaacctcaagttgttactgggctgctagtgaacgaccgcctgaggcctgtgaagtcctacagacgcgctcttgtggaggaggtcgaagcgtgcagacaggacggcccgaaagtccgagcagccctacagggcatctccgtagcccgctatcggagcaggattttggggcgaatcagacattgggctagattcgatgccgaaaaggccgagcggctggagcgtaggttcagacacctcccccgacctggtgctgcagctagggagactgacggacgtgaaaaagtaggcctgcggtga

SEQ ID NO: 11196 - RNA, 909 nt, synthetic construct
  source 1..909: mol_type = other RNA
atgtggcgtgtgctgaatgacgactttgcccattggagtccaagacgcttagctgagctcctgggcagggacttagaccggctcgtgcagttgacggagggtacagctggccgataccgagcgatccggctgccaaagcgaggaggcggtcatcgggaactggctgtgccagagccggaactcaaagcgctccagcacgaccttatggtcctgctcgatcgcgctctggaggctcctccatgggtactgggcgggagaaggggtcggtctttcgttgaccatgccgcccgacatcaagggcggtcctggcttctgaccgtggacgtggctgacttcttcgggaggattggacccgccttggtggctcccgttctgagagagtttgggctgcctgaggcaagcataacacttatcgtcgcgctcgcattccgtcacggagccttaccccaaggagccccgtcgtccccactcctagccaaccttgccatggcacctattgatctgcgcctaagacgtctcgcaaggcgcaggggccttgccttctccagatattttgatgatctggctttttcaggcgacagggattttggggagctgagagggcccattgcagcactactccggcaggccggactgccattggccgaacacaagactcgctacactgggcgtgacagacctcaggttgtcaccggcctggtcgtaaacgatagactgaggcccaccaggagctttcggggcgagttggaggaagagctgcgcttgttgcagggtggcgcactccccagacctcgcttagaagccagggtggaaggaagactgcaccacctggcccggttcgatcgacgggaagctgatcgccttaggcgccggtatggaagggcgctgcctagctcttcaagttcttga

SEQ ID NO: 11197 - RNA, 933 nt, synthetic construct
  source 1..933: mol_type = other RNA
atgcttaaaatcgtgcccctaaaactgaatagcattgctgagattgagaatatcctggggttttccttcgataagattaagaagatcgttgagaacaagaacaacttttattccaaggtaagcatcgtgattaagggcaagatgaggatcctggacatccctaactcgtcactcaaaatcatccagggtaaactggcccactactttggggaaaacgttgtgtggccctattacgtacagggcggtgttaggaatcggagcgtgaaaactaatgcaagacaacattctggaaagaaatttgtcctgaacctggacatcaaagacttctttcctagcatcacaacaaaaatggtgaagaattccctgatggagttgggactcaatcagaaagtgagtactctcatatcagagctttctacctacgaaaacagagttccacaaggctctccctcctctacctacgtggccaatatgttcttcttgaagatcgataaactcatcaacaacttttgcaagaagcacagtttgatttatacacgcttcgtcgatgatctgactatatcagggaaaaacaacatcttcccgtataagggaactattattcagtacattgcgagaaatcgccttatagtcagtgagaaaaagacgacaattcgatcttcaagtgaaaagcagattgtcaccaagctggtcgtgaatgataagattcgaccagacaagaagtacatcctgacgctcaagaaggacataagggaaacctggaaaggaaacgagggcatacgcaaagtcgccttaaagaacaatattaccatgcctaaagtgaagggtaatttatggggccgtaccaactatatccggcagttcgataaaaaaatagggcgggaagtgagggctctactggtaaaaagcaatttcgtggacgtgagctcctga

SEQ ID NO: 11198 - RNA, 972 nt, synthetic construct
  source 1..972: mol_type = other RNA
atgaagctgctgaagttcctttttgatatcacgctgaacctcacaattcacccccacaaatcgctgaagccccaccaaatccagacagaacaggacgtcgcaagactggccaatcaggaagtcagcgcgctgcaggagataatatctaataaagaggagcactatggatttttcagacaagagaaaaaggatgggaccctacgggatatccatcccccacggaagaaacttaaactcatccaacgcaagattaagaagttcttcgaccatttcccatggcccagatacgtccagggggggatacggaaaaggtcaattttatccaatgctcgtctgcattgcggaaagaagatggtggcctggttagatatccgaaagtttttcccgagcaccaatcccagtatggtgctcgagagcctagaaaaaattggcattggtaaagcagcaagcaagctcattgttgaactgggcacttataaaaatgcgctgcctcagggttcccctgcatctgtgtccttggccaatttggttttcctggatgccgatgacaggtttgagcttttttgtaagaagcaccgactcatctacagtaggtacatcgacgatatctctatctccggcgatatcgatttccgtccacataagggccagttcctcaagtttattgaacaaaaggggtatgtagtagctaaggacaaaattgactttattggacgcgacaggcctcagatagtgaacaacctcgtggtgaacgacaaagttagaccgaacaaagactttattaacgacctgaagaacgatatccggtgttgctggactgaggaaggtatggagcttctggctgccgacttcggcctgttgccaagggagttgcagcgctcactttggggccgcataaatttcaccaaacagtttgatcctaagttatacaaagacctgaaggctatcatgatcggagcctttttcaaatga

SEQ ID NO: 11199 - RNA, 942 nt, synthetic construct
  source 1..942: mol_type = other RNA
atgccggagaaaagaacggagggcattaaacagattactcaggaatgcgtggccacgctggaaagcatactaaagaacaaaagcgctctttactatgaattcaagatccccaagaaaagtggagaatcccgagtcattaccccctccaagcccccccttaagaatattcagcacaggatcaataagtatttcgccaggaaacagttcccagcctgtgtgcatggatacgttcggaatcggaacgtgctgactaatgctcagtcccatgtggggaagaagtgggttatcacaatcgatctgaaggacttctttccatcttgcgacaccattaaaatcagtcaggccttcctgaacatcttctcaaacgaccaaactattaatctgttgacagagcttgtcacctttaataatcagttgcctcagggtacaccaactagccctataatcagcaacctggtactccataacttagatcaagaatttgtgagactctctaagaagcacggttttacatatacccgctatgcggatgacctaacccttagtactaacggaaaaaacccccacgatttcctgaaagcctttacagacatcataacgtcaaacggcttcaagatcaatcctgacaaactcaaagttatgccctgctcagctcggcaaatcgtcaccgggtttgtggtcaataagtacgatgggaacggctttctgaaaccaaccaagaagtatatctccgacttcaagatcttgattcgcaactgttaccaactcaacatgtttcagcagattgcggcagatcagggcaaaactgtgccgaaactgaagagatcgatagagggcaagatactgtacattaaacacgcaaatcctgcattagctcgtgagattagcaacctcaggtaccctctgaagccatctgccacagagattaccgtaaatatctga

SEQ ID NO: 11200 - RNA, 1152 nt, synthetic construct
  source 1..1152: mol_type = other RNA
atgacccaccaagatagcaaacttacgattgacgacattggaaataaactgggcgtgaccccacagttccttttagaggcggcatctgccgctagcacccagtatgagctgtttgacctcccaaaaaagtcaggcgggactaggacaatctgtagtcctaaaaatgagttgaaaaggctgcagcggacgatcctggaggagctcttgcacaccttcgccatgccagattacgtacacggttgcgtcaaaggacgatcaatagtcaccaacgctaagccgcacactaataagccgttagtgctcaccatcgacattaaggattttttcggatccatcaatcccgaacaaattaatagaatcttccgcattagcttcaactgcgacgataagtccgctgaagtgcttacagccctgaccacctatggcacatttctgcctcaaggagccccaaccagtcccgctttggccaacatcgcggccctccctctagatgctgccatcctggatatatgtgagcagtccggcctgcagttttcttatacccgttacgtcgacgatattactatttctggcgacaaccgcctggctcttatgctggcaagcttttacaagacagtttccgcacatgggttcaccgcaagtcccggtaagctacgtgtgggtcggccttcgaaccgccagaaagtgacaggcatcatcgttaacaagaagatggccccacccaagaagctgatacggaagattaggcaacagctgtattactgcgagaagttcgggattgaggaccactgtagaaaagaagggatcgaagaacaggaatttttgaatcagatcaacgggatgttaggcttcatcagattgacacagcctacgacagcggatctgttcaagattaaactcacaactctgcaggggtacacttttgtttctgttgacgaatcagtgctcctgatactcaaacatgcagtcgaagaggagaagcatgtcaatttcgtgtaccatggaagtactaggaaagtagcccccgtggaggtgtttatcgatgacgaaggcatgaaatttatgcgaggatatcagactgtgcccgagcagaagtgggaacggtacatgatacctgacatccaaagcctaagactttccgagaacgcctga

SEQ ID NO: 11201 - RNA, 1152 nt, synthetic construct
  source 1..1152: mol_type = other RNA
atgacgcaccagaaaagtaagctaactattgacgatatcggcaagcgtctcggactcacccctcaatttctgtttgaggccgcaaagacggcagaaacccagtacgaactttttgacctccccaaaaagtctggtggggccaggacaatctgcacacctaagggagagctcaaacgagtgcagagagctattctggaggaactgcttcagcagtttgagatgcccgaattcgtccacgggtgtgtgaaaggacggagcatagttaccaacgccaaaccacatgtggacaaaccactggtactgaagatcgacataaaggacttcttcggttcaataaaacccgctcgggtgctggaaatttacaaggatatcttcgattgcgatgagaagtctgcggaagctctgaccgcgctcacaacctacggcaatttcctaccccaaggcgctcccacttcgccagccttggccaacctggtggctctgcccctggatcgaacacttctcgacatttgtgagcaaagcggcctccagtatgactacaccagatatgtcgatgacatcaccatctccggggattctagactgggacagctcctagccgcattttacaaggccatccagcatcacggctttattgcctcacctgggaagctgaaagttagtaggccatgcaatagacagaaggtgaccggaattatagtgaataagaaaatggcgccacctaaaaaactgattcgcaaaattaggcagcagctctattattgcgagaagttcggtttggaagatcactgtcaaaaggagggtatcgaagaggaagagttcttggataggattaacggaatgttaggctttattagactgactcaaccggtcacagcagacctgttcaagtccaaattgactcgtctgcagaaattcgaacttgttgatcaggacgagagcatcctgctgttgttaaagttggcagtggaagaggagaggcatgtcatcttcagctaccacgaggctactcggaaggtcgccccggtagaaatcttcatagatgacgacgggtttaagtttatgcgcggctaccagacaatgccagagcctaagtgggagcggtatcttatccctgacatccgctcccttcgcatctttgagaaattatga

SEQ ID NO: 11202 - RNA, 1215 nt, synthetic construct
  source 1..1215: mol_type = other RNA
atgacctccaacctgagcctcaccctaaccgacctctgcgacgagctcgaactgccctctcagtttgtgctagacctcgctaactctgccgaagacgaaaaacgctatcacagttataagcggcttaagaagtccgggggcgctcgttacatcaatgcatcggtcgggtccctgaagagattgcagcgtagcattcacgaacgcattctctctaggcataaaatgcctgagcatttgcacggcggcataaaggggcgctctatcgtgacaaacgctgcagcccatgtaggaaagaaactggtaattaacatcgacctgacagacttcttctcaacgatcaaagtggccgttgttaaacaaatttacatgcgggatcttcacttcgatgacgagacagccactgttctggcccaggtcagtacgttcaaaggagccttgccaacaggggctcccaccagttcagcgctggctaatctggccggcttggtggtggatgacgcagtcatttcaacacttactaagaagattgaacgaacagagtttggatacagccgatacgtggatgatatcaccattagcggcgacgatagaattgtcgagatcttacctgatatctttgaggccgtgaagtccgccgggttcacctgcaacgataaaaagaccagaatcttaaggagatctacccgtcagtgggtaactggagtggtagtgaataggaagctgaatcctccgaaaaacatcgtcagaaaaatccggcagtatctgtactatatgcaccgctggggtgttgaggaacactgtgaaactcacggcataaatccctacaggtttatgagacagataacaggctacattgcctatgtccggctcactcaacctgagttagctgacgaattcctgcggtcccttaaaccgcacctggcacggtttcatcaggtggacgaagaaagcgctcccagcactcttaatatcctgaaggttatgatcgacaaggaggagatagcgcattttctgtatgatagggaggaccgagctgttaaccacccttcctatgagccagtggccgtgtcagtggcgccagagagcctcgacgtcgacgatgatggaactctgaccatgaggggtttcgaactcgcacccaagcaacgctggggtatttaccatttggagagtatctcggcactgtctgataaaccactaacggatgtgacctga

SEQ ID NO: 11203 - RNA, 1317 nt, synthetic construct
  source 1..1317: mol_type = other RNA
atgcattccctggccttagaggctgtcatcgccgacctggggaaggagaattgtagagcagccctgaccttgctcgcggagatggttggtgtcgagcggcaggctatactggactgcttagaactactgaaccgacatggcgaggtggaggacggagagagggtggtggcttatacatcgttttacaggccaaagaagagcgggggaaaaagactgatcatagcccctgttgagccaattaaggacctgttgaggaaagtaaaagatgagattctctgtcgtagtagcctccctcgcttcgttcacggataccgaacgcggcgctcctggcttacaaatgcccgtgtgcacttcgatgcaggagcggtgtatgccataaacttagacatcaaggactgcttcccttctaccaaaattcagctggtccggcgcgtttactggcagacaaccggccgaatgctcagggatgagggcattccagaagaggtggcaagagccgcagtagagattctcaccgcgctatctaccctgaagtatgggcggtcaaaggtgcccgttttacctgtcggatcacccacttctccagcactcgtgaatctggtgctaactcctgcctgcatccgcattgctagggcactgaaaagactgcccggcgaatacgcattctccatctacggggacgatctgacagtctcaagccgcgaaccattgccgccagaggtcaaaatgatcgtactgcgagagtggcagagactggggtatcgggctaacccgggcaagacaagagtgatgagacgcgatggatccggtacgcccatagaagtcactggcctgatcctcggccgggatcgtattctgttgcctgacgactggctgcagaggactgaacttatgcttatcgcttacgccggctcccccaaatatcctggcgataaggctaaacgcgggctgcaaagtagggtttcaatggtgaggaagctctatggcgtcgagatgcccgggcgagtgggtaactgtttgaagagccttatcgcccaggcgaagtctaatcttgtcatgagggaacgcctcgcagaattgctccggggcaaaatgcctgaagtggtagaaggaagcgaagaagctccagaaccagccatggaacaggccgtggagcaggatcgggattggagaaccgaatacgggcccgtgccccaaagtatggacgccagaggtcaacttttttgggattttgacgatgacagccccggaggagctgatgacccgtttgtgcctgagcacggtcagctggagcaaggcgagtgggagggggagtga

SEQ ID NO: 11204 - RNA, 933 nt, synthetic construct
  source 1..933: mol_type = other RNA
atgaacagtaaacaggccatgaagtgggccgatattagacccattctgcagagctccgagggcctgagcaggcacttgagcgtgtctgaagacacactgtttagacttagtagaactgccagccgattatatacacggcgcgagatagagaagggaaggatcctgaacctcccctcgggtgagcttaagcggatccagtctctaatccacaagaagattctgctgtttgccccctatcatgcctcaatccacggctatcgcaaaggccgctcacagaggtccgcagcagaacctcatcaagacaaaccaatgttgttgaagggggatatccaaaaatacttcccctctatttctccagacgctgttctcaaagcctttcgacagcttgggatcagttaccaagtttccaagttactcgtggatctgtgtacccatgagggccaactacctcagggggctccgaccagccctctcatctccaatctgatatggtcgcggccagcacgcaggattcggggattcgcggaccagcacggatttgaccacacgatattcggggacgatgtttttatttctggcgcttgccgggcaaaaaagttcaagaacctcttgaagagaatcattcgtgaggaaggtttatctgtgtccgaacgcaaaactcaggcgctcccatgcacaacccgtcaggtggtccttggtctggtcgtcaacaagaatctgggtgtagacaaggatgtgaggagagatattaggcaggtgattcataactacgtgagcaaagggttctcagacccgctcggaagtaatctgcgagcagccaagacctcactggctggacggatcgcccacatcaaacatataaatccttcccagggccaaaaactgcagcgtgaattcaagagaatcaattgggaggagggcgctagcgtatga

SEQ ID NO: 11205 - RNA, 906 nt, synthetic construct
  source 1..906: mol_type = other RNA
atgaagtggggggaagtgcgcgcccacttgcaatctattgattcactggctcggtatctcggggttggcaaagacactctgttcaggctctgccgaacctcaagtaggtgttacgtccggggagaagagcccaaagattccggaggtgtgagggagttctataaaccacgcggcgaactcaaggagattcagcgcttaatacacaaaagcatcctgttgtttgccccatcccacgaggcaattcacggttacaggaagaaacgcaaccagcgaaccgctgccatgccccatctgaagaaggacatgttggtgaaggctgacatcaaaacctttttccccagcgtaaagcccaaacaggtctatgatgcctttatgggcatcggactacctcattgcgttgcggacatgctcacaaaactgtgtacacacgcagaccaactccctcagggggctccaacatcccctatggtcgccaacctgctttggctgaggcctgctagacggatacaaggagtggccgacaagcatggttttggtcataccatcctgggcgatgatgtgttcttaagcggcaagaagcgtgctgctaagtacaagtccttccttaagagagtaatctctgaagaaggcttccgtgctaatgatagaaagactattgcggtcagtcacaacggaccacagacggtcgcaggcctttctgtgaaccagaaagttaacgtgccgaaagcctacagaaaggccctccgaaatgagatctacagatatgcactgagcggagaggacgagaatgggcttgcccgccagaagggacgggcaagtctggagggcaagattgcgtacgtgaaacagtttaattcgctacaaggggccaaattgcagcagaagctggccgcagggcggaaatga

SEQ ID NO: 11206 - RNA, 909 nt, synthetic construct
  source 1..909: mol_type = other RNA
atgttcgacagcaggctggcaactgttgaagagctgtcggtgctgatcggggttccttccggcgagcttatctactttgctaccgcgattgaaaagaattaccgaagaaaagtcgagcataaaccagacggggatacccgaatcttcttcgtgccgtcacccggtcttaaaaaaattcagaaatgcattcaccggaggttcctcagaaagctgccagtccacgagtctatacactcatataggcgccggcgggacacaatcagcaacgcctctgtgcacgttggcaagcagatcctcgctaagctggacattaagaagttcttcccctctatactgcctcaacgcgtgtatagggtcttcttgagtcggggttgtagtcctagtgtggcctcccttctgacaaagctgaccacctttgaaaatcagttaccccaggggccaccgacatcacctgggattgctaatcaggtgctcactcccctggccaaaaggctcaagggagtctgcgatcagcataacctcacgctatccatcttcgccgacgatatctttgttagcggatccgagcatgtgccacaagtcaacaatttgttaaagcgcatcgtggaaagcgagggctttacatttaaccttagaaaaaccgagatgcggtggcccggcgaaaagaaaattgtaactgggataagcgtgactgccagaattaacattgagaaaggctattaccgtaaggtacgtgcactggtacatcacgcagcgaaccatggttacatgcacctctttccaggagtgacgcctctgtctgccaaagataagttgcagggcatgattagatatataagtcgcctaaatgcttccaagggacaccagttgcaaatcaagagcctgcagatcgccgatgcaaccaaatga

SEQ ID NO: 11207 - RNA, 999 nt, synthetic construct
  source 1..999: mol_type = other RNA
atgcgatcgaataactgcttctcaaagagcaaggtattcgtctggccgatctgggcgagaagtctggacaatcacgtgcaggatggcatcccactggccgatctgaccgatttatccgacttggctaggaaactctctgtgaccgaaacggatcttcaggccatcgcccaaactcactctctgtactaccgtagaaaggacaaggtgaagcccgatggccggcggagaactttctacatcccccacggtgacctcaagaaaatacagggggccatcgcaaaaaagttgctcgccccattaccattgcatcgcgccattcattcataccgtaagggcaaaagtaccctgacaaacgctagggtgcacctgggctccccctttatggttaagcttgacatagaggactacttcccaagcatttctcgggaccatgtctttaaacttctgggaaggctcgaattttccgggccgattgccaggatgctagcggtgctcacaacttttaagaaccagctgccccagggagcacccacgtctcaagcaatcgctaatctggtgttcgatgaaatcatcaaaaagcgcattgctcctttatgtgaggcccataatctggaggttacagtatatggcgatgacctgacaatctccggctcaaaacgcatagtcggcctaaagcggctgctcgagacaattatcaaggaggagggatttaaagtgagtactaagcctagcaaaaatcaactgctgcgcgagcacgaccagaaaatggtcaccgggtatgttctaagaggggataaactggatgtccctaagagcagatatcgagaagttagggcaataattcacaactgtttgaaaaacggaggtgctagccagttcgactgcgatgtgaagaccgcaaaacttcgattgcgcgggaagatcgagtatattcggaaggtgaaccctctcaggggaggtaaacttatgagagactttgaacggatttcctggatgtga

SEQ ID NO: 11208 - RNA, 912 nt, synthetic construct
  source 1..912: mol_type = other RNA
atgagcctgaaagtgcccccttcatcaatcccatctctgggacagacacttggcctacctgacggcgctctggaagcctgcatccgggacctgcccggtcttgtaagccgctgtccgaagcgtaagccctctggatccatgcgaagggtgtacgcccctagagatccgctccacgatatccagcagagaatcctccataagctcctgcggccaatcgagcactctagcgagcttcatggaagcgtggtcgggagaaaccctaagacgaacgtcaccccacacgtaggcgctttcgtgtcaatcagtatggatattaccgacttctatccatccataagcaaggctagggtgaaccgcatctggatagatctgggatactctagacgagtcgcacaagcgctgacgcaccttaccacttttgatcaacacctagcccagggcttcccacccagttccgacattgccaacattgttctggagcaagatctgcttccacgtctgcgccccctgtgctcgcagcatcacttaacattaactatgtaccaggacgatttgactatcagtggtggggcccgcttgaggagtttgggaaatttaatacaacggatcttgctgcagtccgggtatcctgtgaatgtggacaaaacacggattagcaaccctggtcagcgccacatgtcaactggcctcgtctacaacacaaagccgaacattcctaaagagaggtacagagctctccggggggaactgcacaggtgtctgaccaatggcgttattaccgaagccgtcgacagacccatctggcagtataaacatcatctcgcatctcgaatcgagcatgttcggtatcacaatccctccagggcaaataatctccagattgtgtttgaccgtatagactgggggatttga

SEQ ID NO: 11209 - RNA, 990 nt, synthetic construct
  source 1..990: mol_type = other RNA
atgaagtgtacgaaaataataatcaaccagaccaacaaagaggaaggcattctgcggattaacacaatcgatgagttagctgagaggctgggacactcaccgggagaactcaagcgtatagccaataccaagatccgatactacaaggttaacgaaaaaatcaaaccttccgggaaactgaggactctttacgaacccatgggccctctcagtaagattctaaagctaatcaaggagcgtttgcttgacgggatagagctgcccgaatgcatgcacggctatagaacgggacgggattatatcagcaacgcttgtgtacacgtcggaaaaaacattatctgcaagctcgacattaaaaatttctttcccagcatccatcatggcagagttttcaatatcctgatggatctcggatgctccaaacaggtggccaaacttttgaccagactggtaacatgcgacaaccataccccacaaggctttaatacttcacccacactgagcaatatcgtggtgtctaatctggccaggcgcttgcaggggctctgtaatcactatcgcctgacattaaccatctactctgatgacattaccatatccggcaatatagaacagaaaaagttcgagggcctgttctataaggagcttctcccaattatcgaggagattatcaagcaggagggtttttcgcttaactttggtaagattaagctggtcaagagacgggatagccaaaaggtcactgggatcattgtgaataagaaacctaacattccaaagcaaaagcggcgggaattgctctcaactatcaaagagtaccagatgaacggggtgagtatttcacacgacagcgacctgttaaaagtgaaacagtccctgcgcggtaagatcgcgaacgcacagcgagtgaaccgcagtttcggtcagctgttgctgagggagttcgaaaaaattgattggtccaggagagttagcttttcttctaattga

SEQ ID NO: 11210 - RNA, 1536 nt, synthetic construct
  source 1..1536: mol_type = other RNA
atgttgaagaatacccttaatatacagtcaatcgaagagctcgctgaaaaattggacgagtcacccgagtatttcaaatcaatttccaagcggattccgaagctgtactactcgcctacaaaacgcaagaaacccaaaggaggggtccggaaaacgaacgagcctataaacaaattgaagtctcttcagtccaaaattctgcgaaacatacttgaatccgtgcctctgaatagctgcatacatggttataggaagaaccattcgccactaactaatgcaaagccacacgtcggcaaaaagtttctcctgaagcttgatatcaaagacttctttcccagtatccactataaacgagtggagaaactgttcagcgatctaggttgttctctggaagtgtctcgcatgttaacgcagctgaccacattccaacattacttgcctcagggtgcgccaacttctccctacatctccaatttaatcccagccaacgttgacaagcagttacaaaagatttgccgccgtaacaatctccctccgcacaagagatatggcgatgacattaccatctccggcaataagaatttcagtaaactgattcccgagatcgagaacacaattaagcagaacggcttcaaaataagcaagaaagagtttctgacccccaaagacaggaaggtggtgaccggcttgattgtgaacacaaaggtcaatgtgcccaaggaaaaggtgagaaaggtatgtgccatcattcacaactgtattaaatatggcccagattcccagaaccgggaagggaaacccaatttcaaggatagtctcagggggcacgttgaatatatcagaagcattaatcctccactgggagataagctcatgcaggagttcaacaaaatcgaatggaatagcccggagaaaatcaccatctctagtgtttctatagagaataatgaggtcgtcgagatctttgtagacggcgctaccagtccaaaccctggacccagcgctattgggtggattgcctttcgtaaggaaaataagctagaagagtacttcgagtatatcgggtgcacaactaacaatatcgccgaatacactgccgttatcagggcactggaagccgcgcagtccaaatggccacaagagaaaatcatcattaggtctgactccgagctggtggtaaaccaagtgaatggaagttggaacattaaccagcagtacctggctgacctgtgtaagcaggtgaagaagtcaggaaaggataccgagtggcaactgctctgggtcagcagaaaggaaaacctggcacataaactgtcaatgcgcggtctttacgaagagaagataaaagcacgggccagcgggcttgctgtgagaaagtcaagccctggaatttacaaagttgagtccgcaagcgggcatggcatgtacgacgtcacactcgcccctgattcttgcacttgcctcttttttcagaaacggaagtgtgtgtgcaagcacatctttgctgcccgaatcgccggcaaggcggacaactga

SEQ ID NO: 11211 - RNA, 984 nt, synthetic construct
  source 1..984: mol_type = other RNA
atggacgggaaaatatcagagtttgccggatctgcactatattctttgacgtataagatcggttacaatgaggaaaagctaaggtatatcctgagccattttcgagagcagtactacaaacgcaaagaactggacaaaaaaggaaagaaacggattatctcttccccatcaaagaacctgctgaagctccagaggttgattcttgcctacattagcaagaagaccctgtttcctgaaaccttccatggttacaaaaagaagcgtagtaacctgactaacgctcggtgtcacctcaataagcgagttattactaagctggacataaaggacttcttcccatccgtacacttcaagaaagtgctggctttgtttgggtccctgggcttcaatgagcaagagagcaaaatactctctcggcttacaactgcggattattgtctcccgcacggctttagcacatcgcccaccctcgctgcattgatgctcattaatttggataagcgcctcaagactttatttatgaaaatcggcctggattacacctataccttcttcagcgatgatatcacaatctcaggcaacaaaggcattaaaactctgaagaagctgatatgcaaaattttcagacaggaggggtttatcgtcaacgagtcaaagatcaaggagcaaaatttctgggagaagcaggaagtgacaggaatttccgtgaacgaaaaactgaacgtcccttacgattaccgccacaatcttagggccatcgtgcataactgcattaccttagggccccgtacacagatcgacagatttaattccgagttttgcctagacaggaaacttgacttaagcctcagtaaatttagagaacggatcttcggcaaaatcaactatataaagcctattaaccgcgaactgtacaatcagctgctggcctatttcaacaagatcaactggagaacgaataatcccgtcagtgttcttgtgtga

SEQ ID NO: 11212 - RNA, 960 nt, synthetic construct
  source 1..960: mol_type = other RNA
atgtgcgcagtgaatgagcggaattatttcgatactccctctattcagagcgtggcagaaaagctgcgcctttcagcgaatgccttgcacgaggttttagacaaatttcacacacattaccggaaaaagtcagagacaaagagtggcaaaaccagaacgtatcactgccctttccccgtgctgagggatatccagaagcgaatcaacaaatatatcctgaaggccatccccttgccatcatccatgcatggctacgtagccaagaggtccattctcaccaacgctacagtgcatctgggcaagaagaacattgctaacgtagacattaaaagcttctttccaagtattcactaccagcgcgtgcagagaatcttcaggcaaatcggatttaacgagggagagacgctagtgctgacccgccttacaactgccgattgttgtgttcctcacggtttcccgacttcccctcgcctggctaacctcgtcctgataaatgccgacaagaggctcagagatcttttcggtcagcagaaaattaaccacaccttctattctgacgatataactatttctgggaacaaaaacctgcggcagctcttacagccgatccgcaccatcttccgacaggaaggctttcggatccataggaaggaatcgtctccccagaaaccttactttaaacgtcagaaaatcacaggactccttgtgaacaataagaggctgaatctgcccagagaggacatacggagcctcgaggccattattcacaactgtctagttaaggggccatccagtcaaatagctgaatttgaggcacatttcgggcctccaaagcgagaactgagcaccgtccaaaaatttaaagaacgggtcttgggcaaattgaataatgtgagacgtgtcaattgcgaccaatacaagaagctgaagaaggactttgacagaatcgattggaattga

SEQ ID NO: 11213 - RNA, 903 nt, synthetic construct
  source 1..903: mol_type = other RNA
atgtgcgaacaatccatcattactaatctgaagaccgttgaggacatcgcgtttacaattggcgtagatgagttccaattaagagagatatcacagaacattccactacactataaacagatctacatcaggaccagtcccactaaaattcggaaaatctctaaacctaacgagaaactcaaggccattcagaagctggtcaataaaaggatcctccagcggatccccttacctgactcagtgcattctcggaagaagcgcagtatactgacaaacgcagaacagcatgtgggcaaagaagtgatcgttagcctggatataaaggacttctttcccagcattagttctttgcgtgtcaaccaacttttcaaaaagattggctacaactccgaagccagcgcagtgctgacgagactcaccaccctggacggatgtctccctcagggtgcccccacatccccatctatcgctaatctaatcattactgacatggataaacgctttgaaactctttgcgccgagcaagagtttacctatacgaggtacacagatgacattaccatctccggggatcagtatgtgcgaaagttcttgccgctcttttgcaagatagtacgccagagcgggtttttggtgaacgaaaagatcaaggtcgagccaaggagtcgtcggcaggagacaactggaatagtcgtgaacgttagaccaaatattccgaaagagaaacacagaaagatatcagctattatccatcgatgtaagaccttcgggccctcgagcgtgacaaatgaagatctgagcaagttccgcgagagactgctgggtcacatctcatacatgtcccacattaatcctaccctgggaaggcggcttctgaacgacttcaatcacatcgcttggtga

SEQ ID NO: 11214 - RNA, 912 nt, synthetic construct
  source 1..912: mol_type = other RNA
atgtctctagtcgtgatcgggagtgactttcactccccagaggaactcgtggagttcctgggattagattatagcgagattcaacatatcctgcaaacactcagctatcagtatagaccactccttatccctaaggcagaagatgagtggaggaagctcttggctcccaaacgggagttaaaacatacgcagagggtggttttggacatgcttctagacgatgtccccttccccgattccatccatggttacaggaagggacggagcatcctgacaaatgctgagccgcacatacaacaggagttggtcatcaatattgacatcgagaatttctttccatctgtacacccggaacgagttaagcgaaacttcttgatgcttggctaccgtgatcccgtggccaagtttctagtcagattatgtaccttcaaccatcagttgccacaaggtgctccaacctcacctgcacttgcgaatctggccatctccagaaccatgctggccctcgagaagttttgcaagaaaagagggattaacttcactggctacagtgacgatctgaccttttccgggccccaggccatcgagaaacacattgaaacactcatgagcattattagggagaacggctttcgggtcaacaaaaacgaaattaagatacagccttcttcacagctccaggaagtgacaggactggtggtgaatgacaaagttaatctgaacaagtcgctgaagaaaaaagtgcgcgccatgctgcatactgcacggaccaatggacctgaatcactgcaccgcgacaataagccttatcgcaaagatcagctgctcggcctgatacttcacactaaaaacgtagaccagaagctgggcgaaaagcacctgaaggaattctacgagatagactgggagtga

SEQ ID NO: 11215 - RNA, 918 nt, synthetic construct
  source 1..918: mol_type = other RNA
atgaagaagattatcacacacaaaaacctgtgtaaagacatcaaaaccaccgatgacttttgtagaatactctcactggagaagtctttcgtacagaaacacatccgcctgtgccctcttctttatgtcgagatacctcttaagaagaaagacgggactccccgacctataagggcgccaaaagataagctgaagatcatccaacgcgccatcttgaagaacatcctctccgatattaaactccccccatgctgctacggattctcgaaaaacaagtcaatcattgagaacgcaaaggttcattcaaaaaacgatttcctactgaacctggatatccaggacttctttcccagtgtgcattataaaaaggtgcagcagatttttctggacgtggggctgaacgaccagattgccggaattctgtgttctctcactacttatgaatatcggcttcctcagggggctccgaccagtccatttttagcctccttcgctttgagcaatttagactatagactgatgcagctagcaaaatccaattacttgacatacacccggtactttgatgacatatccttcagcggtaataagagggtggttgtgttggaaaaggatattatgcggatcattaaagaaggcggatacgttgtgaagatcaaaaagaggaaactgtttaccaagaaggaggtcaaggaggtcaatggcattctgatcacagacaaaaagctttctttaaagaacacggacgagctcttcaactacgtgagtgacattaataaatacggtctgtctaagctccaaactgataatcccgagaaagaacgtcagagcattaagggcaagattgcctttctcaaacaaatcgatgagacagtaacgcacagcatagaaaccatcttcaataagatcaattggtga

SEQ ID NO: 11216 - RNA, 915 nt, synthetic construct
  source 1..915: mol_type = other RNA
atgatcataaggaatctgtcaaaacgagtggaaaccattgacgatttctgtcacctcatcctgctggacaaactatatcttcaaaaactggtcagactgtgccccctccactacattgaaatcccattcaagaagaaggatggaacaccgcgccccattagggcacccaaagaaaagctgaaaattatccaaagagtgatcctagataacttgctcagctgcattaaattgccaccctgttgttacggtttttctaaaggcaagagtattatcgagaacgcgaaagcccacctgaggggtgattatctcctcaatttagacataaaggactttttcccatctgtgcattacaccaaggttgagaagattttccttgggatggggctggatcgtgattttactaatattctgtgcaacttgaccacacatgagtataaactgcctcagggggcccctacctcaccaaaacttgcctcagtggtactgcacaatttggactaccgcctgttaaagttggctcagagtaaccatcttacctatacgaggtactttgatgatatcagcttctccggaaacaagcggattatcactttagaaaaggacatcctgcggatcatccgcgaggagggatatagcgtgcacacatccaaggacaagaaaaaactcttcgcaaagaacgagactaaggagataaacggcattcttctgaaggacaaaaagctgtctctcaagaatatcgacgaattgtttagctacgtcgaaaacatcaatcggcatggcctgtccagactcataacagataatcctgagaaagagcggcagagtatcgctggcaaaatatcgtttcttcgacagattgaccctgaaagatcccacaagctcaaggttctgtacgacttcatcgagtggctatga

SEQ ID NO: 11217 - RNA, 1011 nt, synthetic construct
  source 1..1011: mol_type = other RNA
atggaccaggaaatcgattttgactcacacgaggacctgcctgtgttacccccacactcatcccccttctgttggcgatgcttcgtttttatgaagaagattctccagatccagaaatctaagtctagcatagacacgcgcgaaaaactgatatcatttctaggactcaagaaagagaaatttgaggagtgtttcaaagtgatccctttactctacgaactgactccaatcttgaaaaagaataacgccggttaccggaagctgtctatcccaaaacaagagctcagagatattcaacggtgcgtgctggataagatttttacagacattaaactgcccagctgtgtatatgggttcagtagtgggaagtctatagtggagaacgccaagtatcacagtaaaaacgactacctgctcaatctcgatattaaagattttttcccgagcgtgcattttgaaagagttcgacagatattcaaagacctggggtttaatgatagtgtcagcgagatcctatgcattctgacaacctacaaccatgaactgcctcagggagccccaaccagtccccttctcgcttcccttgctctgaacaacttggacaagaggctgatgaagctggcttcacttaaccatatcctttattcccgctacttcgacgatatttctttcagcggctctaaaaggatcctggacatcgaggaaacaatcaagcagataatccgtagcgaaaattacagaatcaacagcaaacggtatctgtacggcaagggtgaagcaaaagagatcaatggcatctccatttcctccgggaagctgttcctcaagaataccgacgacctcatgggctatttggaagatcttaaaaatttcggagtcagcaagttaaggtcagataaccctgagaaggagcgcaagtccttgattggcaagatttcgtttctaaaggaagtcgatattgagaagggagtggaggcgaaaaatttgctggagactatcaagtggctttga

SEQ ID NO: 11218 - RNA, 924 nt, synthetic construct
  source 1..924: mol_type = other RNA
atgaagaagatctatccgcaaactttctcgagattcaaagacctgcggattgagttgctacccaacctgttcggagtgcgagacatggaattttacagggttagttccaacgcccacttcttatatcgccccatagagatcaaaaagaagtctggaggagtgaggcaaatctatgctccaagcggtcgcctcaagtttctccagcggcggatccttagtaaactcttagaaaaagtcaggttacctcctttcgtctttggaggagtgaagggcaaaagcatcattaataacgcgtcctgtcatcttgggtccaagtacctgctgaatctcgatattgagaatttctttccctccgtaaattggcagttggtccgaaaactcttcattgacctgggctgcgactcatctgtggcagatgtgttgactagatttacgacactcgattataggcttccacagggggcccctacttctccatacatactgaacctggtattgtccaacctagaccgtcggtttttcctactggcttgcagcaatcgcctcacatacagtcgttacttcgatgacattacaatcagtgggggtaaaagactgatcggcttggaggagtccttcctcgaaatcctgcgccaggaggggtttaccattaacctgaagaagaagtatctgtacggacccagcgaagacaaaaaggtgaccggccttgtcctgaagagcgggggcagaatggagctggtttctatgtcaggcctcctgaaatacttaaatgaactgataaccgaagggctctcaaatcttgatggcattaatttggagaaggaaaaacagacccttctgggcaaaatagagtttgttaagagcatcgacaaggtggatggtcagaacctgaacacactgtttaacaagatcaaatgggtgtga

SEQ ID NO: 11219 - RNA, 1140 nt, synthetic construct
  source 1..1140: mol_type = other RNA
atgactcatggcttcagtaacacagaggtcgtgatgataaagacacctgatatccctgaagatatgccgttcctcattgacgactgtacattagccttcttcttgggctttaatacacgtatcctttggtacgctatcacccgcaaggacgaactatacaccagactgacaattcccaagaagagcggggggtcacgcgtcatacatgccccagacaaagttatgaaactgttcggaaagagaattttggagcggctattaaatccccttcaaaaacagcttggggatcacgtaactgcatacagggagggccgatcgacacagatggctgtggaacagcacgtacctgaatgtccgatttgtgatactgcaccaccagggaccgagcatgattgcccccacagagggacctactttaacctggacctgaagaacttctttccatctacccgaagggtctggattaggcagtattttaagcaggtgattggatatagtcattatgttagcgacctgctggcgagtctcgtgacggtttacgcattcactgactccagcggttatcagtttagcggtgttcctcagggaaaccccgcctctggggccatctgcaatctcgtggcagattggatgctggacactcccatgctcgcgctgatagatgatctgaataaggagcagggactggagggcgaatacgcctggaagtataccagatatgctgacgatctggcgtttacgtgcggtaaaaggttctcctactacaaacgcatggccatcttgaataagttgatgaacgtgtgtacccggtcaggctacgccgtgaaccacactaagacccgaatctgggacggcagacaccggaaggcattactgggcgccgtgttcaatacacacactaacatccctagggaccagtatatttccgtccgctccctgacctataattgctggaaacatggttttgagtcccaatgctctcgggctggcaaggacagcgaagaagagctccggtggtggctccttggacgtatcaactacatggagcagatccactctggaaaaggccaacaactcaaatcagtctataacgccgctgtgcagaagtacgataaaaataaaacgcacccaaccgcttga

SEQ ID NO: 11220 - RNA, 1158 nt, synthetic construct
  source 1..1158: mol_type = other RNA
atgacctacggctttacagaatcaaccttcgagacaattacagttccggatacagaattcttattgctggatgactgcactttggcatttttcatcggttttcggaacaaaaccatgtggcatctgctccagaataagtcagaccagtacaaagtgtttcacatacccaagtcaaatggtaagaaacggattatccacgccccctcccctctgatgaaggtgtttctgcatagacttcacgctcgcctcctgctgccgttacaggagcaattgggcgatcatgtgacggcatataggcctagcaggtccatcgtcgatgccgtgagccgccatatccctgcttgtgacatctgtgatactgctcccaagggacagactccacaacagcatacctgcccaaaacagggcgtctatatcaagatggatctaaagaacttcttcccctccacccgacgagcgtggattcgccactactttcaaagtatagggtattcttttcacgttagcggactactggctaacctcatgacagtgcctattaaaaattcgaaagggatcgacgacgataagtatcggggtaccccccggcagcagttcttccatggaacaccacagggcgctcctaccagtggcgccatctgcaatcttgtggccaaccacagattcgaccaacggattcttgagtactttaacgacagaaataagagggaggggctggaaagtccatgggactggagatacagcaggtacgccgatgacctcactataacctgtggacaagatatacctgcagcagagaaaaaagagattgcgaaggacgtgacgcagatcgtagaatcttctggctataagataaatagagccaaaactcgcattgcgtccgccttctaccgccgtaagatgctgggtattgtcatgaaccagaagccaaacattgagtacaatgaatatctgcgaatcagggccattgtacacaattgcatggtttctgggatcgaaacgcagcatgagagagcagggatgactacacccgaagagctcctccagtatcttaggggcaaggtcagcttcatccgtcaggtgcactccgataagggagacaaactgaaagctgagttggatgtcgccatcgacaactggaaagcccacgacaagtga

SEQ ID NO: 11221 - RNA, 1041 nt, synthetic construct
  source 1..1041: mol_type = other RNA
atgccctcttatagagagacacgcgtcgatattgtagaattcccgttagaagttccatacgaactgccccacgccattgacgacatgagtcttgctttccatctgggtatcagaaactcgacgatgtggtggatgatccacgacaagaaaaagatgtataaggtgttcaagctgcctaaacgaggaagacctggccgttatagaaacatacagaacccaatcgatgtgttgaagaacgtgcagaagaacatactcagcaggttcctctctgccgtgccagtcatggcacatatcggcgcctatgtccccggtagatcctgtagggacaccgcggcccaacatgtggggaaaggggtgatcgtctcccttgacattcaggacttctttccaagtatgcgcaggtctatggtgaaacagtgcctccacagaaagattggttacgggtacagggtcgcttcactacttgccgagctaatgacctacacaaattttgtaccgcagggggctcctacctcaggactgatcgctaatctggtggcacatgacaggtttgataggcagatcttgcgtgatctcaaggagctcgatccccagtggacatacacccggtactccgatgacatagacctgtctcacccagaagttcaggagcccgaccggttgactgcaatcattgcacttgtgcgggatgccgttgagagtgctggcttcaaactgaatcaacgcaagactaaagtggagcctcattggaagagacaaaaagtgctcggaatggtggtcaatgaacgcgttaacattcctcggtacgagtatatgcgaactaggtccatcatacacaattgcttagtggatggcttcgataaccaatttgaacgagcaggaatgaatagcgctagcggcctgaaatcacacctgcgcggcaaattggcctttttccgccaggtcgatcccattaaggcccagcggctgaaggatcagtttgacctggcctgtcagatgcacgcggatgttcaagacaatgaggtacggtttgacagctga

SEQ ID NO: 11222 - RNA, 1038 nt, synthetic construct
  source 1..1038: mol_type = other RNA
atgtcctcctataaagagacggagttgtcatacatagacctgccaagtgactcttgtctccagacaacctggccctggctgctggacgactttgccctggccctgcagctaggcatcagatgtaaaaccctgtggttctgcattaccacaaaagataagcagtacaagcgcttcaccataccgaaaagaacggggggaagacggcctattcacgcgcctgaacccgtgatcaagtggatccagcagcagattcatgagcgcatcctcaagccctttcctatcttagactgcgtaggggcctatgtcgaaggaaagcggtgtgcagactctgctcaagtgcatgtcggcgctggcgtgaggattggaatggacttaaaagattttttcccatcacacggtagggcacggatcaggaatttcttcaagaggcattatgggtacaaccaccaggtggcatctctgctcgccgatctgtgcactgttagagaaggtgctcaccactatgctcctcaagggtcccccgccagtccaatgttgtgtaatatgatggcccaggagactcttgatcgagagattatgcgagtgctcggcccacacggatgggcttatacaaggtactctgatgatttgtcattgagccacaaagatgacttaccttcgaaggaggtgaatcaagccataaaacaagttactaagatcagcaaggaaagcggttaccgtattaacctcaagaagactaaggtgcagcgaagatggcggcggcaacagatgctaggcatcgtcaccaatgagaaacttaacatttcacgccctctgtatcgtcagtaccgcgcaatccttcacaactgcctgcatcagggcgtcgaagtaaacgctcttcgctttggttgggaccccccagaaagcttcatctcccatctcgagggaaagatttcctactttgcgagcataagtgagacaaggggcgggaaactgaaaacaatgctgcatgaggttaagagagcactggaagaggaaaatgcccagacccacccgtga

SEQ ID NO: 11223 - RNA, 1119 nt, synthetic construct
  source 1..1119: mol_type = other RNA
atggaactcaatcaattgcagcagcagttgtcttcacaaaacccagtttacccccagctaagtttataccccgtggcctcccccctgtttaccatacagactaaccgccagttggccctcaagctgaagatgaagtttgcaaatcggctcacatacgtgggaatgaacaaactgaatcactactcgaccctttccataagaaaacgtggagcggcaggcaagtaccgaactctgtataacccagatcagcctatgcgcctgattcagttcaaaatcctgaaggaaatcttggaacaggtgcaggttccagactatctttatgcctttgagaagggccggtcaattcccgctatggcacaaaaacacgtaggtaaaaaagtcattgtgagcgtggatctcaaggattatttccaatcaatcaagcagtaccatctgaaccaggtgttcaaacatctcgggttcggggagaaacctgctctattactgagcgagctctgcacttataaatccttcgtgcctcaaggagcccttacttctccaaagctgtctaatattatcaccacatataccttcggacctttaatcaaggaatactgtgaagaaaggggctatacgctgactatttacgcggacgacatcacaatctcatctgactctttgatagatgacatgggcagcgacaccgtacatagtcttataagttacctgaaagagacagtgggccggtttgggtttagggttaacagcgagaagaccaaagtcatgaagtattaccagagacagtacgtgtgtggtgccgtggtcaactcgaaggtcaatctccaaaaatccgagcgcaatacactgagagccattattcacaactgcgagatcaatggaattgaggccgaagccagcaagacccagatcaccgaagatgagtttattagtgctatgaacggtagactgaactggttcaaccagcttaacccgcaggctgggagccacttcatcaaccagtttaaggagatctatgggcgatccacggcaaatgtcaggaattcccaggatgttagggtagaggaactggtcagccaaggcgttaataatgtggaggtgcagcaggctcaaacagcatga

SEQ ID NO: 11224 - RNA, 1266 nt, synthetic construct
  source 1..1266: mol_type = other RNA
atgattaagaaaattatagagcggttcctatctatctttaaacgcgagggaactactagcgagaaggagctgcccgagactgagcacaaaccagaattacacactaatctccctagcattaatccgattaaaacctcccataagtcctctgtaacccagaatctgcttaaggaaagactgaaggaagataatatcctgctgctgggtcacctggtgtcaaaagacgaagggaagagcaatcttaagatacctggtattcccaattttaacacaatctcagatgtgttggaatacttcgagaaggagtacaaaataaagaaaagtaagctcgcaaacttcgccagcttttctagtaagactaatcagttctacatcgagcggaagattcttcagaaatcctccaaaattggaaacaaagcgaggtatatttacattccgaaaccatttgtcaagtttgtccaaaaagtcatccttaaggacatactggagaaggtagagactcccccacagttagttggcttcaccaagaacaaatccatcaaagacgccgtggtgtcacatgttaaaaaggacgtggtgctcattttggacattgaaaagttctttcagaacaccaccgccaagaaggtgttcaatatcttcaagaatatcggctattccagggaggttagtctgtttctgacagctctgacaacaacgaaagtaaaggtggaaaacaaaaaggggtttaaaggcaaacgggccctacccacaggatcgcctaccagcccatatttaagcaagttggctttgattgactttgttgcagagctgaacgaactgatcaagaagtggcaaaatatgccgatcaaagatgtcgatttttctgtgtacgccgataacatcatcataagcttcaacaccgagaacaaagaaaagcgcaaggagatttctaaggggatcatagagaatcttcaggaactcctcaaaaaacacggctataagttgaacaaggaaaaaaccaagatcctcacgaagaagaagaaggtgctgggactcgtcatcaatgaaaagatcaacatcgacagaaactattacagaaaattgcgagctgagattcataatctctggaagaataagcagcgttttggcgaatcatccttccagatcgatgagaagctgatccaaaaaatcagggggaaactgaactatcttaaactgattaaccccagtaaatacaactcgctcttcataaaatactctacacacctggaagagctattctga

SEQ ID NO: 11225 - RNA, 1170 nt, synthetic construct
  source 1..1170: mol_type = other RNA
atgctgaagaacattttcaactacatcaagaagatccttaagctggaaaataagaacaaaaccaagagcgtgtatctgagcggcctgaagatcaagacaactgataatctgaaaactaaccctctggagtactttaaatcggaggaaagaaagctgttagaggtcaatagtagtattaacccggatattccatattttccgtcaatcaaggaaatcctgaaatatttcaacgacaactacaaggtgttaccaaagatgcttataaactttgccttgttcaacacaaagacgtcagatttttacattgagaaacggatcataacgaaaaataaggagaggtacatttacattcccaaaaacttcacaaagaagattcagaagatcataaagaaggatatcctcgataaactgacctttcccgaagagatttgcggttacattaaaaacaagaacatcaaactcgccgtggaaaaacacgttaaaaaagacatcctcattctgatcgacattaaaaatttcttccccggcattgggaggataaaagttcgcaaggcttttgaaaacttgggttatccttccgacgtggccgcttttctcaccgccctcactaccacaaagatcaagtaccaagaagacaacaaaattaagacaaagtgtgctctgccaataggctcacctacttcccctaccatagcgaatctaatcatcacaaacatcaataaccagatcaagaactacttcaaaacccttcagaacgataataacatcagctctattgaccacactatctatgcagacaacattatcatttccttcaataccagcctaaaaggacaggacctcaaaaatatcaccaacaagatcatcattgagctcaagaagattatagcaaagaacaaactgaagatcaacgatagtaaaatccgtgtactgaaaaaacggaaaattgtcctcggactgtccataaatcagaagatcaacatcaacaagaagtactacaaaaaccttcgagccgagatacataatctgagcttcaataagaacaagctgactaaagagaagatagagacgttgaaagggaaattgtcttacttgaactttatcaaccccaacaaatacaacaacctttacaagaagtaccatacacgcttatctgaaattttccaatga

SEQ ID NO: 11226 - RNA, 3057 nt, synthetic construct
  source 1..3057: mol_type = other RNA
atgaatagcatcaattattccaccaagtataagtttgtcgacgacaatttgttcctgattgcaaaaattaaccccaagaccaaaaaacagtgtctcgtatttcagcagattgacaaggaatctagaaatgtaatcttctcccgtcagctgacttgcattcacaccgctgtcacccgcatatctattgctgactacgagtcaatgataaacgatgactctgagaggaagaagttcaacaacaacttgctcaacatcataagtaccgagaatctggagccaatcgatttggaactcgacgaaaaatattttgccttcaagtcatgggttcagggcatcgccgaaagcggtctaagtgcgatattgattcaagacgagatcgagagaatggccctcatcaacaaccccatttctattttcctgtcttcatgtctcataaaggctgagcctgattttattgatgattacctggcactaatcaagcagagctgtaagaataaagatatctggaacaaagggaatgagaatagggacaattggcaccgctctagcttaattgctagcgtggatcgaatcattacgattatcaaagaactcgacgaaactgagttacttgtagagacagtctacaagctcattaagttctatatcactgagtccctgcccacatgcgtgataaactttatcctggaaaaattcgacttcaatatcctgggagacttgctggcagaactggaatacgactggatagtgaagatctacaacgattctcagttagaggagagaaacagagacttaattttttcgttccgaattgaaaccgattccgaatttgtcaatgattacctggaggtgatcaagaaagaagcgaatatcaaaatcaagagagataactcgggcaaagaggatgatcgcggtgagaatccctccctgaaaaagaaggtgaagaaaatcatctacgtgattaatcacatcaagaaggagcaatcccggcgcgaactgagctacaagttttttaagctttacttcacagagtcacttccacttcaggtgatgatcctgatcttcgagaacataaactcctatactctgtcaaacattctcgataacctcgaaaatgattggatcaagaagattctcaacgattacatccaaagcattaagattaagtgcaagaacaactatgagcaaagggagtcagacaagatctatgaaagctggaataagcagtcactgaggtactctatctcaattatcctaactttcatcgaacgtatggaaaatcctaaaaagagatccgaggtgttgtacagcgtttttaaattctacttcaccgagtgcttgccggtctatgtgctgaactatatcttcaagaccgtgaagaagaaatttctccgtgaggtgcttagtgacctggagagaaattgggtgattacagcatacaatacccctgatctgaagaaagaacacaagttcctgatcttcagctttttaattgccaccgactccgaatttctgaatgactacctcaaggtgataaagctgtgcaattcggggaaagaccataatcgggaaaatgtttccagtttgaaaaagagcgttaagaagttcattcgggtcatcaatgatatcgagaactataggatcaagaaaaaactgttgtacaagctgcttgatctgtatttcactgaatcattgccaagttatatcctccggctgatatttgacacaatgaacaaaaagaaccactccaatatcctggacctcatgcaaaacatgcctaataactggatcgtggccatccacaacatcgaagatttctataacaagaagtgcctgtttaatcagttttgtagaaaacacgacctgtctgacttactgttcatacaggattacagcatatggaactccaccatgtctcacagatggagggtttttgacgtccttaaacatatcgatcgggaggagatcaataaaaaagcccgcaagaataacattgacagtttctttattcggaactgcataactaaggtcaaaagcaagaaaaataccattgaagagcttgtcaaacataaaactaaggttcctaagatcggaagcatttatgaattctgcgtgctcgccaactacaatccaaaaaaacttaaacgatggctcgcaccccagatttccctgcataaatcctacatcgaaaaaaaaatccccaagagaaaaggagggtataggacgttgcacattccttatcccaaacttaaacgaattcaggtgtggattaaggaggaaatcctggacaaactccccgccctgcagtgtgctaccggcttcatcaagaataaatcaacgaagaacaacgccaaaccgcattgtcaaaagaaactgatcatcaaaatggatctcatggacttctttcccagcatcaagttttggcagatttacaggatatttcgctctctgcggtatattcatgagataagtatcgtactgacatatctttgtacagtgccattagcgaagcatataacacacaagggcaaccagaaagagtactttctagagacaagttttaggttcctgcctcagggggccccaacaagtcctggtctgtctaatctcgtattgatagaagctgacaaggagttacagaatcttaccaagtctctaaatatgagctatacgcggtatgcagacgatctaactttttctgtgaacgacagcgagtttaaaattaggcccttcatccagaaggttttcaacattgtgcgcaagcatcacttctgggtgaacaaaaagaaaatcaagattcttaggccgtacatgcaacaacgcgtgactggactggtcgtgaataaagaagttcacattccacggtcctactatatgcgcatacgtgggatcctgcataagttggagaactacggcagtgagatgcctctcgaggaacgaaagacactaaaaaatatggtatccggcatgattgcctacatgcactcaattcagccacggaaagctgagaagatgattaactggtacaaccgaatcaaaataaacgtcagtaagtga

SEQ ID NO: 11227 - RNA, 1359 nt, synthetic construct
  source 1..1359: mol_type = other RNA
atgattgcgaaaaaaaaggtgaagaagtcaaagattgagaagctcccggtgcgcgtgaaaaaaatgctcaatatcggcctgtggtcttatgaagtgcaagtgcctgacgatcagacccttgagcggttacatcttctggaccgggatataatcaagaggaaaaaggatatccacattcccgagacagggaaaaaacagatctatcgacaggccgaaaaacagtatgataaacattcgagcaagaaaagaagcgagagaaaaaagttggccccaatacggcaaatcaaaaaaaaagaggactgggaagagtttaagaaggtaaatttcgtccacctcggtacgagcgtttcgaattggctcaatctcagggtagagaacactgataagttaaataaggtcggtctgccatctattagcgattcccatcagctcgccaagttgctgggaattagcattgctcagataaagtactttgcgtatcaccgcaaaagtagtcaagtgaaccactatgtcgatttttacatccctaaaggcaaacgcggccgtcgactgatctccaggccgaagaaggagttggaaaatatccaaagcatcatcaaaaaggagatcctggacaagattagtttttccgacgccgttttcgggttcattcctggaaagtcccacataaataatgctcaggagcacgtgaaacgagacttcatcatcaacattgatatccaggacttcttcccatctaccaacttctataaggtcagatccatcttcaggaaccttggatactccggggaaatttcatctgtgctggctcttcttaccaccaaacaggacacacggtcaatcactattggcgaagatcagtaccataccttcactgaaaataggtacctgccccagggcgcatgtacttctcccaccctgtctaacctggcactggtgaaggtagataaccaactaattaagcgtagtattgagctggggtacaagtactccagatacgtggacgacttgacctttagcatcaataagccaatctccaaaataaagacgctgctgtatatggtgaggaagacactcgaataccacggatatgaggccaacccccataagacaaagattctaggcaagaacaacagccagaacattactgggttagttattaattcaggagagtcaaacgtccctcggtattggagacggcgcctaagagctgcagttcatcagtttcagtacataaaagacgacgaaataaagagtatcgagctggtgcgtctgctcggttgcatcaattatttgaaaatcagccactctcgccttgcccagaactactttgaactggtcacaaaatactaccaatga

SEQ ID NO: 11228 - RNA, 1005 nt, synthetic construct
  source 1..1005: mol_type = other RNA
atgaagctcaacgattttaatgatgttagttgcgtcctgggggaggagctgaagatgcttacgtacctcaagaaactgaaaaacaggctgtacacatcttattacataaaaaagcgcaacggcaaacgggagattaatacttatctctacaagcgcagactgtctgacctcgaggatgacattcctcagctgcatggctatgaattagccaaactcagccgcgcatccgaaaagcttgaggagatccacaggaagatcgattccagaattctcgacgaaatagaattgcccgagtgcgtcaacggctttaaaaagggcgagagtattaaaaaggctgtgcagccgcacgtcggtaatgactatgtcgcctgtcttgacattcataacttcttccctagtgtaaaatcagattacgtgctggaagggctccagtcctgtgggatcggtgctgacgcagcttggctgatcgcccggctggtgtcatacaagggacatctgccacaaggcgcggtgacatcacccaaggctagcaatattgcgttcatgaaggtagacaagcagatcttagaattgtctagatcgaagggaattacctacactcggtacgccgatgacttggtttttagcgccaattttgaactcaaggacttcgttgaggaagctatccagctggtcaccaatgcaggctacaccattaacagccagaaaatcaaattctacggacccaaggagcctcactatatactggggatcatcgcaaatagcaaactgaacatgccaagggataaacgacggaacttggaagccgccatccacaattatgtggataagcaccttgtgcctgctggagtgaacgagatcaggtataagaaaacattactaggcaaggccgcatatatgctgtccataaacccaaatttggggcgtctacaaaaactagtgatgaaactgagagagttcgaccccaacggtattgagtttgaacgaatctaccttggagattga

SEQ ID NO: 11229 - RNA, 1032 nt, synthetic construct
  source 1..1032: mol_type = other RNA
atgaacgccgaagcagttgcattagagatccaggaaccgctgaagaagctcacctacctcgagaagataagaaataggctgtacgtcgagtattacatttcgaagcggtccgggggcaaaagagagatctgtgtgtacctgtgcgattccaaggaggctcaggctcgtctgaaaaataagcttcgcaccctgaaaaaaaacgatgctgagctggagaagcttgtgcgcgccgcccaggagcttaagacagtgcatcggaaactgaaagaattattggatcgcatacctctgccagactgcgtatttgggttcagaaaaaacgagagtattgttacttgtgccaggaaacacgtgggaaaaaagtatgtcatcagccttgacataaaggattttttcccatccgttacatctgacatggtgctccggcagttgaagcgagagggtttcgaagatactggggcatggctcatagctcggttagtcgccttcaaaggtgtcctgcctcagggtgccatcacaagcccagcggcctcaaacgtagctttcaaaccctatgacgagaagctgcagaaatacttcgaagaacgaggctttgtgtatacccgttacgctgacgacgtcaccgtgtctactgaccaggaagtcacagatgagatgatccaacaaatcgtggaagaaacgagtcaaattattgcaccctttaagtggaacgcgaaaaagattaaaatctacggacctaacgaaccacactacgtgttgggcctcattgtaaacgccaagcctaatgtgcccaagcagaagaggaggctcatcagggccatggtgcataattttgtgcgcaaacacgcattgccgcagggcgaggaccccattagatataagcgaaagctcatgggaaagctggcgtattgcctgtttgttaatccccatatcgaaagcctgctagagctatacgaagagcttagaaaattcgatcctaatcgggtcagcgagtggaagtctctgtatgtttcagaggaggagggcgaatga

SEQ ID NO: 11230 - RNA, 963 nt, synthetic construct
  source 1..963: mol_type = other RNA
atgcaaaaaatcggctacgccaatcgactcaatctgccaaggaaattgttgacctaccttgagaagatcagatcccggctgtacgctgattattatctgaggaagaaagatggatccaagcgcgagatagccgtctatgtttgtgacagtcgcatcgccagccagctggatgagaagcttgttgagtactctaaagtgttgaaactcgtgcatcggaggatcaaaaacctccttgacgaaacaattgacctgcctgattgcgtgttcggattcaaaaaaaactgctctacaaagatcgccgcatcaaaacacgtggggaagaagtacatcttctcagtggatataaaggactttttcccctccattactagcgatatggttcagcaagcgttgatgaatgagggggtggagcagaacgatgcttggctaattgcaagactggttgcctacaaaggacgcctgccccagggtgcaatcactagcccaacggtgtcgaacgtcgtgtttaaacctaaagacctgcagattctcaagctctgtgaacgttacggcctcacctatacacgttatgctgatgacttaacctttagtaccaacgacgaaattaattgggtggaattcactgacgaactggagaagatactgcagccagaataccggattaacactaagaagttaaagatctacgggcctaagcaggcccattatgtcctgggcctcattgtcaacagaaaggtgaatacccccaagtcttataggaggacgctgcgagcagctgtgtataactacttgaatggcaaagtgccctatggtgtcgaccctgtaaagtacaaagctacactaaaagccaagctgggctacgcgctttatatcaacgagataccgagccttcggcgcctgtacgagcaattaaagagatttgacccaaatgaggtaaagaattgggaacacatcgtcgtatga

SEQ ID NO: 11231 - RNA, 924 nt, synthetic construct
  source 1..924: mol_type = other RNA
atgaggttaataaagcagttggcgcaagaactcaacaagtcggaaatcgaggttagtcacttcctcctgaacgcgcctaaaaaatataaagtgtacaccatccccaagagaaccagcggccatcgcactattgctcagccctccagagaattaaaagagtatcagcgaaagtacctcgaactgcagcagcttcctattcacgatgtcgctatggcatatagacagggcgtgtccataaagcagaacgccatcgcacacaaaaataatccatatctcctcaagatggacttggagaatttctttaacagcatcagcaacattttgttttgggaagtatgggagtcaattcagccgctgccatccaaacaagacaagaaggttctcgaacaactgctgttttggtgtccctcaaagattaccggtggagccctgatcctttctatcggagcacctagttccccattagtgagtaacttcttcatgtacctattcgactgcgctctcagcgagaagtgcggagagaagaatattacttacactcggtacgccgatgacctgaccttctctacaaaaagtgagggggtgctttttgacattcccaagctggtagaggagctgctgcatgaaaagtttgggaatcatatcaagatcaatcggaagaagacaaaattctcatctaaagcccacaataggcacgtgacagggattacactgagcaacgatggaaaacttagccttggccgttctaggaagcgctacatcaaacacctggtccatcagatccaggtgggttgtctgtccgatgaggatatcttgcacctaaaaggcctgctagcctttgctgaacatatagagcctaccttcctccaagccctgaaaaagaagtattcagtcgagttgatcacgcagattataaaaggctga

SEQ ID NO: 11232 - RNA, 924 nt, synthetic construct
  source 1..924: mol_type = other RNA
atgggattaatcaaacagctggcccagaatctctgtaagagcgaagcagaggttgcacactttttgttgaatgccccaaaaatgtacaaggtatatacgattcccaaaaggacctccgggcatcggaccattgctcagccaagcaaagaactcaaggaatatcagaggaagtatctcgaactgcagcagttacccattcacgaagcggcgatggcttaccgagagggcatcggtattaagcaaaatgccatagcccacaaaaacaatccttacctgctgaagctggacctggagaatttcttcaactcaatcagtaacctgcttttctgggaagtgtggaaaagcattcaacccctccccagctccaaagatcagaaggccctggagcaactgttattttggtgcccgagcaagattacagggggccgtctggtgctatctattggtgctccatccagtcctctggtgtccaacttctttatgtaccagtttgactgtactatcagtgagatctgccgccataagaacatcgtgtacactcgctatgccgacgatttgactttttccaccaagattaagggcatcctgttcgatatgcctaacatagtaaaggaccacctatcactgcattttggcgacgcaatcaacatcaacaagaagaagacaaagttctcgtctaaagctcataatcggcacgtgacaggaataaccttgaataacgatgggaaactttctctcggaagggagagaaaaagatatatcaagcacttggtccatcaggttaaactgggctgcctcgagaatgaggataagcaacaccttgtcggactacttgccttcgtgaaacacattgaacctatgttcctcgagtcactgaaaaacaaatactctgtcgagcttatcacaaagatcatagaagggtga

SEQ ID NO: 11233 - RNA, 933 nt, synthetic construct
  source 1..933: mol_type = other RNA
atgagtctcatcaaacagttggcccagaagctgaataagtcagaaatcgaggtgtctcatttcctcctgaatgcaccgaaaaagtacaaggtttatacaattcccaagcggacatctggacacagaaccattgctcagccttcaaaggaacttaagaagtatcagagaaagtatcttgaactccagcaactgcccatccatgaggccgcgatggcatatcgcgaaggcattagcattaaacaaaatgctatcgcccataaaaacaacccttatctcttaaagctggacttagagaacttctttaatagcatcagcaattccctcttctggaaagtgtggaagagtatcaaaccactgccaccccgacaagatcagcgagcactagagcagctgctgttttggtgcccaagtaaaaccacgggcggttccttagtcttgagcataggggccccaagcagtcctctggtgtccaacttcttcatgtaccattttgatttcgatatctccgagatttgcagaaaaaaaggtatcacctacacaaggtacgccgatgacctgaccttttccacaaaaaacaaggagatactattcgagcttcctcagattgtcaaagaacacctggaggaacactttgagaactcgatcaagattaacaagaagaaaaccaggttctcttccaaggctcacaataggcacgtaactgggatcactctgaataatgatggcaagctctctttgggccggaaacgtaagcggtacattaaacaccttgtgcaccaggttcaaataggatgtttgagcgacgaagaccgcttgcatctgaaagggctgctggcttttgccaagcacatcgagcccatgtttctccagtcacttaagaagaaatactctgtggacctgattactcagataatcgaagactcaaacggatga

SEQ ID NO: 11234 - RNA, 924 nt, synthetic construct
  source 1..924: mol_type = other RNA
atgtcccttatcaagcaactcgcccagaagctcaataagtccgaagtcgaagtgtcaaggtttctgagcaatgctcccaagaaatacaaggtatacacaatccctaaacggacctccggccataggactatcgcccagccgtctaaagaactcaaagaatatcagcgcatatacctcgaagttcaacagtttccactgcataaggcagcaatggcctatagagaaggcatttcgataaaacagaatgctatggcccacaagagtaacccttatctgttaaagatggacctagagaacttctttaacagcatctcaaacaatcttttctggaatgtgtgggagaaaataaagcccctcccattgccacaggaacagctgattattgagaagttactgttctggtgcccttctaagactaccggtggaagcctgatcctgtccataggtgcaccttcaagtcccctgattagtaacttcatcatgtatcagttcgacaccgttataaaccagatgtgtgtcaacaagaatatcacatacacccggtacgctgatgacctgacattcagcaccaaaggcaaaggagagctgtttgacatccccaaagtcgtagaggaatacctgttcgagatctttgggaacgctatcaaaattaacaaaaagaagacggcgttcagttccaaagcccacaatagacatgtgacaggcattactttgaataataacggcaacgtgagcttggggcggcaaagaaaaaggtacatcaagcacctcgtgcatcaatttaagttgggatgcctttctgaggaggatcgcctgcacctgcgtgggctgttatctttttcaaagcacattgagccaatgttcctccagagccttaagaaaaagtattctgtggagctaatcgatcagattattcgaggatga

SEQ ID NO: 11235 - RNA, 933 nt, synthetic construct
  source 1..933: mol_type = other RNA
atgactctgatcgagcagctggctctggagctcaagaagtccgaagacgaagtggctcgattcctcctttctgcccctaagaggtacaaagtctatacaataccaaagcggacttcagggcaccgtgtcatcgcccagcccagtaaagaacttaaagagtatcagcggaagtacttggagcttcagcagttgcccatccatgattccgcaatggcttatagaaagggtatgtctattaagcagaatgcaatcgcccacaaaaataatccgtatctcctcaaactggatttggagaacttttttaactccataagcgacaaactattctggaaagtgtgggaatcgattctaccactgccaagcgaccaggacaagcaaactctggaaaacctcttgttttggtgtcctagcaagacaacgggaggcgccctcgtgctctcaatcggtgcacctagtagccccttagtcagtaacttcttcatgtaccaatttgattgcacactttctaaactgtgcgtggagaaagaaattatgtacacccgctacgcggacgatctgactttttctacaaagcataaagacagcctgttcaccctgcctgaactgatcaaggagaaattggctgttttatttggatcagctatcaggatcaataggaaaaagacccgcttctcaagtagggcgcacaacagacatgtaaccgggattaccattagcaatgatgggtccctgagcctaggacgggagagaaagcgctatattaagcacctggtttaccaagtgaagcttaataagctggacgccgaggatcggcaacatctgcgaggcctcattgccttcgcaaaacacgtagaacccgtgttcgtgcagtccttaaagagaaagtactctgccgagctgataacccagatcgttgaggagtccaacggctga

SEQ ID NO: 11236 - RNA, 933 nt, synthetic construct
  source 1..933: mol_type = other RNA
atgacactgattgaacagttggcgcttgagctgaaaaagagcgaagaggaagtaaataggttcctcctgtccgcaccaaaaaagtataaggtctacaccattcctaagagaacttccggccatagagttatagctcagccctcaaaggaattgaagatgtatcagcggaaattcctggaactgcagaatctcccaattcacagtagcgccatggcctaccgagagggcctgagcattaagcaaaacgctattgcccacaaaaataacccgtacttgctgaaactggacctggagaacttctttaattccattagtaacaagctcttctggaacgtgtgggagtccatccaacccttacccagcgagcaagacatgagaacactagagaaactcttgttttggtgtcctagtaagacgactggggggaccctcatcctatctattggagccccatcttctcctctgatcagtaactttttcatgtatcagttcgattgcatactctccggattatgttttgagaagggcatcgtgtacacacgctatgcagacgatctgactttttcgacaaagtacaagaacatcctcttcgatcttcccatcctgatcaaggagaaactgtcagatctttttggctcttcaatccgcatcaaccggaaaaaaaccaagttttcttcaaaagctcacaatagacatgtgaccgggatcaccataaataatgaaggttgcataagcattggtcgggagaggaaacgttacatcaagcacttaattcatcagagccagctgaatcgccttgacgccgatgacaggcagcacttgaggggcctgatagcctttgcaaagcatatcgaacctatgttcttccaatcccttaaacgaaagtattcggctgagatcattacccagatcgtcgaggaaagcaacggatga

SEQ ID NO: 11237 - RNA, 924 nt, synthetic construct
  source 1..924: mol_type = other RNA
atgtccttgatcaagcagctggccttttccctgaaaaagaacgaagatgaggttattaggtttcttctcaacgccccaaagaaatacaaggtgtatactatacccaagcgcactagtggccaccgggtaattgcccagccatctaaggagcttaaaatctaccagcgcgagtatctggagctccagcagttaccaattcacgatacagctatcgcttatagagaggggatctcaattaaagaaaatgccatcgcgcataaggataaccagtatctgcttaagctggacctggaaaattttttcaactccatctccaatcacctgttctgggagatttgggagtccatcattcctctgcctctgaaaagcgacaaacaaatcctcgataacttactgttctggtgtccctcaaagaaaaccggcggcaacctcgtgctgtcaattggtgcacctacatctccccttatcagtaacttcttcatgtacaagtttgacagcatcgtgtcaaaagcctgcttggaaaaaaatatcacctacacacggtatgctgacgacctaacgttcagcactaattacaaggatactctattcgaagtgcccttgtttattaagaaacaattgacagcactgttcggaaactcgattaggattaatcgaaagaagaccaagttcagtagcaaggcacataacaggcatattaccgggataaccattaacaatgacggaaaactctctttgggtcggaaacgtaagagatacataaaacacctgatccatcaattccagttaaatacgctggggaaagaggataagctccacctaaagggactcatgtcttttgctaaacacatcgagccgatctttatacagagccttgtcaaaaagtacagctttgaactgatcaccaagataatggaggaatga

SEQ ID NO: 11238 - RNA, 933 nt, synthetic construct
  source 1..933: mol_type = other RNA
atgacccttgtcgagcggctggcactggagcttaagaagagcgaaggggagatcacacattttctgcaatccgcgccaaagaggtataaagtgtacactattcctaagaggacaagcggacaccgagttatcgcccagcctagcaaggaattaaaagaataccagaggaaattcctcgagatacaacagttgcccattcacggctcagcaatggcgtaccgaaaagggatatccattaagcagaacgccattgctcataagaataacccctatctgctgaagctcgacttggaaaatttcttcaattccatcagtgacaagttgttttgggaagtatggggtgctatccttcctctgccgtcgaaccaggataagcagacacttgagaacctactgttctggtgcccatctaagatcaccggcggagcactcgtgttaagcattggagccccttcttctcccctgatatccaatttcttcatgtaccagtttgattgtgcactatcagagttttgcgccgaaaaaaagatcacctatacgcgttatgccgacgacctgaccttcagtactaagaataaagacaccctctttgttctgcccgagttcgtgaaagaaaaacttagtgaactctttggttcctcaattcgcattaacaggaaaaagacgaaatttagctctcgggctcataatagacacgtcactggcataactatcagtaacaatggcaatctcagcctcgggcgcgagagaaaaagatatatcaagcatttggtgcaccaggtcaagttatccaaactgaacagcgaggatcgccaacacctgcggggcctgatcgcttttgccaagtacattgagccagtgttcatcgagtctctgaagagaaaatactcagaggatttgattacacagatcatcgaggaaccaaacgattga

SEQ ID NO: 11239 - RNA, 933 nt, synthetic construct
  source 1..933: mol_type = other RNA
atgacgctgatcgaacggttggccttggaactgaaaaaatcagaagatgagatcacacactttctccaaagtgctcctaagcgctataaggtgtacaccatccctaaaagaactagcgggcatagggtcattgcgcaaccttctaaagagctcaaggagtatcagaggaaattcctggagatacagaatctgccaatccacgaaagcgccatggcttatcgcaagggggttagtatcaaacacaatgccatagcacacaagaacaatccttacctgctgaaaatggatcttgaaaacttcttcaactcaatcagcgacaagattttctggaagacatgggaatccatcctgcccttgccgagctcgcaggacaaaaagacattggagaatctgctgttttggtgcccctctaagaagaccgaaggagctctcgtcctatctattggagctccatcttcacccttagtgtccaatttcttcatgtaccagtttgattgcgccgtgagtaacttttgttccgagaaggagatcgtttatactagatacgcggatgacttaacgttctctaccaaacataaagacagtctttttttcgcaccatccatggtgaaggagaatttacgagagctttttggcggtactatccgaattaacaggaagaagactcggtttagctcccgtgcccacaatcggcatgtgaccggcatcaccattgcaaacaacggttctctgagcctggggagagagcgtaaaaggtacatcaagcacctcgtgcaccaggcccagctcaacaagctcgacattgagtcccgccagcatcttagaggactcatagcatttgccaagcatgtagaacccgtcttcctgaagtcgctgaaacggaaatacacatcagagctaataacccaaattattgaggaaagcaatggctga

SEQ ID NO: 11240 - RNA, 945 nt, synthetic construct
  source 1..945: mol_type = other RNA
atggagctagagatgactctcattgaacagttggcccttaaattgaaaaagagcgaagatcaagttgcccatttcctcctatccgcccctaaaaggtacaaagtttacaccatcccaaagagaacctcagggcacagggtgatcgctcagcccagcaaggagttgaaagaataccagcggaagtatctggaactgcagaaacttcctattcacgattctgctacagcatacagaaaggggaccggaattaagcaaaatgccttcgcccataagaacaatccctatctgctgaagctggacctggaaaacttctttaattccatcagcaacaaactgttttgggaggtgtgggagagcattctccccctaccaccagagcacgacaagcaggctttggagaggctcttattctggtgccccagtaagacgaccggaggtgcactcgtcctgagtattggcgcccctagttcaccactgatctctaatttcttcatgtaccagtttgactgtgccctgagtaagttatgcgttgagaaggagataatgtatacacgttatgctgacgatctgaccttttctacgaaacacaaggattcccttttcgcactccctgaactcgtgaaggagaagctggtggaacattttggctcagcaatacgaatcaaccgcaagaaaactagattttcgtctaaagcgcataaccgccacgtaactggcataacaatctctaacaatggtaatctctcattaggacgcgagcgaaaacggtacatcaagcatctggtccaccaggtgcagctgaacaaactggatgcggaagacagacaacacttgcgggggcttatcgcttttagcaagcacgtagaaccgctgttcgtgcaatccctgaaaaggaaatattccgccgagcttattacacagattgtcgaggaaagcaatgactga

SEQ ID NO: 11241 - RNA, 933 nt, synthetic construct
  source 1..933: mol_type = other RNA
atgacactcattagaaagctcgccctcgaactcgagaaatcagaagatgaagtggcaaattttttgctcaacgcaccaaagcgctacaaagtgtataccatacctaagaggacttccggacatcgggttatagctcagcccagtaaagagttaaaggagtatcagcgcaagtacctcggctttcagaaattgcctatccatgattccgcgctggcatatcggaaaggcattagtatcaagcaaaatgctctcgcccacaagaataacccctacctgcttaagctggaccttgagaactttttcaattccatttctgacaagttgttctggaaagtatgggcttcgttactgccacttccaagtagccaggatcggcaaacccttaaaaatctgttattctggtgtcctagcaagaaaacgggaggaccgctggtgttgtcaatcggagccccctctagccccctgatatctaacttctttatgtacaagttcgacagcatcatgtccaaattctgctcagagagggaaattgtgtacactcgatatgcggatgacctgacatttagcactaaacacaagggcagcctgtttcagctgcccgaggtggtcaaggagatgctatccgaactgttcggtggggcaataaggatcaaccggaaaaagacaaggtttagctccaaagcccacaatagacatgtcaccgggataaccatcaacaacaatggtgatattagtatcggccgtaagcagaagcgatatattaagtacctggtccaccaggttgaactaaatagagctgggagagaggacattgaacatcttcgcggcctgattgccttcgcctcacacatcgaacctatgttcatccaatctctgaagaagaaatacacaaccgagatcatttctaaaatcatcgaggggcagaacggttga

SEQ ID NO: 11242 - RNA, 933 nt, synthetic construct
  source 1..933: mol_type = other RNA
atgtccttagtgaaacagctaagcctgggtctgaatcggtctgaggaagaagtgtctagatttctgctcaacgctcccaaaaaatataaggtatacaccatcccaaagcgaacctcaggccacagggtaatcgcccagcctagcaaggagctgaagcggtaccagcgccagtatctggaaatccaaaagcttcctatccaccattcagccatggcctatagacaaggcataagcattaaggaaaacgccgcagcacaccagaagtccaggtatctcctgaagttagacttcgagaatttctttaactccatatcctctcacgtgttttggaaagtctgggagtcgatccacccccttcctagcgagctggaccgacagacattggaaaaattgctgttctggtgtccttctaagaagagcggagggccactagtcctgagtattggggctccctcgagtccgttggtgtccaacttctttatgtatcatttcgactgccacctgagtcagatttgcctagagaaagagattgtgtacaccagatacgcggatgatttgactttcagcaccaaccacaaagacattctctttgatctgccacttctggtgaaggagcagctcgtcacactctttggcggaactatcagaatcaaccgcaagaagacacgctttagttctaaggcacataatcgtcacgtgactggaatcacgatcaacaataatggtaaactctcactcgggcgggaaaggaaaaggtacataaaacatctggttcatcaggttaagctgaagaaatcagataaagaagaccgtcttcatcttcggggcctgctggctttcgctaagcacattgagccactcttcatgcaaagcttgattaagaaatactccgccgagctgatattaaaaatcgttgaagagcccaatgattga

SEQ ID NO: 11243 - RNA, 933 nt, synthetic construct
  source 1..933: mol_type = other RNA
atgaccgtagtggagcagctggcgctcgtcctcaaaaagtctccaacagacgtaacactttttttgaacaacgcacccaagaagtacaaagtctacaccatacctaaacggactagcgggcatagggtgattgcccaaccaagcaaggaattaaaaatctaccagcgcaagttcctggagttacaggaccttcccattcatgagtctgctatggcatatcgtaaggggctttcaattaagaataatgctaatgcccacaagaacaaccggtatctgctaaagctagacctggagaacttcttcaactcaatctcgagcgagctcttttggaaagtgtgggggtcaatcttgccccggccccctgaaaccgataaacgaacacttgaaaatctcctgttttggtgtccgtccaagacgaccggaggcaggctgatcctctccataggtgcccctagctccccactcgtgagcaacttttttatgtacaagtttgacggtgctgtccaagttctctgcgcagagagagaaattaaatataccagatacgctgatgatctgacattctccaccaatcaaaaaaatacgctgttcgaactgccgaggctgatcgagatccagttaatgactttgttcggcagtgaaatcagggtgaatcgcaagaagaccaaattttcttctacagcccataacagacatgttactggcattacaataagcaatgaccagaagctgagtctgggacgctctagaaagcgttatattaaacacctggtccaccagtatatcttgaacaaactggatcctgaacacactcagcaccttcgaggactgctatccttcgccaagcatgtggaaccatcattcctccacagtttggccaaaaaatacagtactgagctgattgtgaagatcgttgagtcccgggatgagtga

SEQ ID NO: 11244 - RNA, 933 nt, synthetic construct
  source 1..933: mol_type = other RNA
atgtctctgattgaaaaactcgcctcagctttgaaaaagagtgaggccgaggtgttaatctttcttaagaacgcaccgaaaaagtacaaagtgtacaccatcccaaaaagaacatccgggcacagagtcatcgcccaaccatccaaggagctgaaagagtatcagcggaagtatctggaattgcaggattttcccattcacaacagcgccatagcatatcggaagaatttctctatcaaggacaatgcgaatgcgcataagaaaaatcgctacctgctaaagttagatctggagaatttcttcaactccataagcaatcacctattttggcgcgtctgggaaagtattttacctatgcctcccgaggctgataaaaggattctggaaaatctcctgttttggtgtccaagtaaaacaatcggaggacggctcattctaagtataggggcaccttcaagccccttgatctccaactttttcatgtacaagtttgacgacgctatctatgagatttgcatggagcgtgaaatcaagtataccaggtatgccgatgacctgactttctctactaacaggaaaaacatactctttgaactccctcatctcgttgagacgctgcttttctctctttttggctcagccatcagaatcaacaagaagaagaccaagttctccagcacaggacacaaccgccacgtaacaggcattaccattagcaataaccagaaactttctctcggcagagatcgaaaacgatacatcaagcatctggtgcaccactacatgttggaaaaactgtccaacgaggacacccagcatctgcggggtctgctcagcttcgctaaacatgttgagcccctgttccttcactcgttggaaaataagtactcaactgggctgatccataagattgtggagggtagggatgactga

SEQ ID NO: 11245 - RNA, 924 nt, synthetic construct
  source 1..924: mol_type = other RNA
atgagcgtcattgagaagttggcccttgcactcgagaagtcagaagccaaagtaattgcttttttacggaatgcacccaataagtataagatttacaccatcccgaagagaacctctggccatcggatcatcgctcagccatccaaagagctgaaactctaccagagaaaattccttatgctgcagaagttgcccgtgcacaagtcagccatggcgtatagaaacggcctctctattaaagataacgccgaactccacaaacgaaacaggtatctcttgaagatggacttcgaaaacttcttcaattcgatcagttctgagctgttctggtcagtctggaagaatacaatcggcacacctactgatctggacaagtacacattggaaagactgctattctggaggccatcaaagaatactgccggacgcctgatccttagcgtgggagcgcccagcagtccaatggtcagcaactttctaatgtacaaattcgactgcctggtgcacgaaatatgcgctagcaaggaaatcacgtacacgcgttatgccgacgatctgacattctccacttgtcacaaagacgtattattcgaggttcctgcactcatagaggccaatcttgaacacctctacgacggtgcactgcggatcaataaaaggaagaccaagttttctagcatggctcataaccgacatgtgaccggggtgaccattaacaacaaggctagtctgtcccttgggcggtcccgtaagaggtatatcaaacatttgacacaccagtttgtgttagataaactgtcctctgatgatcgcctgcatctgcgcggtctgatcgcttttgcaaaacacattgagcctaccttttttcaatccctggttaagaagtacactgccgagagcataagtaaaattatagaggactga

SEQ ID NO: 11246 - RNA, 933 nt, synthetic construct
  source 1..933: mol_type = other RNA
atgtcttttatcaaacagctggcccagaagctgaataagtctgagtctgagatagaacacttcctggttagtgcccctaagagatacaaggtttatactattcccaagcgtaccagcggtcaccgggtaatcgcccagccgagcaaagagctcaaaacttatcaaagagcattcctcgacattcagtctctgccaatacataatgccgccacggcatacaggacagggctatcgatcaaagagaacgcattagcccataagaacaaccagtatctcttgaaactggacctggagaacttctttaatagtatctcctcccgacttttctggaaggtgtggcaatcaatactgccaaagctcgcttcagaggacaagactttgatggagaatcttcttttttggtgtccttcaaaagctacaggaggacccttagtcctgtcgataggggctccaagcagccctctgatcagcaatttcttcatgtaccactttgatatcgcaatcagtcagttctgctccgagaacaaaatttcctacacccgctatgcggatgacctgaccttcagcacaaaccagaaagatctccttttctcagtgcccacctttgtcggcgaacaactgaaaaatctttttggaaacggcatcaagatcaaccgcaagaagacgtccttcagttctaaggcgcataacaggcacgtgacaggcattaccattaataatgaaggcaaactgtccttgggtagagagcggaagaggtacattaaacatctcgtgcatcaataccagctgaataagctaaatcaggaagacatttttcacctcaaagggctgttggcctttgctaagcacattgagcccaagttcatcaacactttaaagagcaaacactctgatgaattgatcacccggatttttgaagaacagaacgattga

SEQ ID NO: 11247 - RNA, 933 nt, synthetic construct
  source 1..933: mol_type = other RNA
atggagctcatcaaaaaactggctacaaagcttaacaagtccgagtctgaagtcattaggttccttgccagcgcgcccctcaaatataaagtgtacaccattcctaagaggacaagcgggcaccgggttattgctcagccaagtagggaattgaaagagtaccaacgcgcattcataagcctgtacagacttaatatccatgacgctgcgatggcatatcgggagggcctgagcatcaaggacaacgccaagttgcattgtaagaacaggtatcttctgaaaatcgatctggagagcttctttaactcaattaccagtgagttattctggacgatatggcagcagcactacgaaatgccaaataatgatgagaaagtcctgatggagcgccttctcttttggagtccctcaaaatctagtacgggtaagctggtgctgtctataggagccccctcaagccctctcttgtccaacttttttatgtaccagttcgacgagctcgtgactcagcattgcgagtccttagagatcaagtacacccgatatgcagatgatctcaccttctccaccaaagcaaagaatgttctgtttgacatgcctcggtacatctccgatacattaacaaatctattcgggtcagccctgatcatcaatagacgtaagaccgccttctcttcgaaagctcacaatcgccatgtgactggtatcactattgacaacgaatctgatctgtccctgggccgggaaaagaagagatacattaagcatctggtgcaccagtatagactaaacaagctggacaaagaaaatgtcttccacttgaagggcttgctggcctttgccaagcacatagaaccgaagtttatcactagcctcgagattaaatattcggctgaggtaatcacacaaatttttgaagaacgaaacggatga

SEQ ID NO: 11248 - RNA, 933 nt, synthetic construct
  source 1..933: mol_type = other RNA
atggaatttatagcaacactggctgccaaactatcaaagagtgagccagaagtggtgtcatttctcgcttcagccccactgaaatataaggtgtataccatccctaaacggacaagcggtcacagagtcattgcgcaaccatcccgcgaattaaaggagtaccagcgcaccttcctctctatttacaagctgaagatccattctgcagcaatggcctaccgagagggacttagcattaaagataacgcccaggcacactgcaaaaacagatacctgctaaagattgacctcaagaacttcttcaattccataagtaacgaactcttctggaatgtttggcagcagcactacaccctgcctgccaagagggaaaaagtcctgatggagaggctcttattctggagcccttccaaaagcagcaagggcaagttgatacttagtatcggagcccccagctcacccttgatcagcaacttttttatgtaccagtttgacgagttagtgacacagcaatgtgagactctcaatataacttacacacgatatgctgatgatcttactttcagtactaatgagaaagacatcctgttcgatatacccaaagccgtcactgagtttctgacgctgttgtttggcaactctatgatcattaacagaaggaaaacggtattctcttccatggctcacaaccgccatatcaccgggatcaccatcaataataagtccgagctgtctcttgggcgggagcggaagcgttatattaaacatctggttcaccactatcagaccaaacagattgaccaggagacaatcctgcaactcaagggcttgctggccttctcgtcccatatcgaaccggacttcatcaagaggctggaggcgaagtattcttccgctgtgattagccaaatttttgaagaacagaatggttga

SEQ ID NO: 11249 - RNA, 933 nt, synthetic construct
  source 1..933: mol_type = other RNA
atgtctctgatcaagaaattggctaagaagctggagaagagtgaggctgaggtggccacctttcttgctaacgctcccttgaagtacaaggtgtataaaatccctaagcggacttctggtcaccgggtgatcgcccaaccctccaaggaacttaagaagtatcagcgagcatttatcagcctgttcaaactgacaatccataattctgccatggcgtatcgggagaagaggagtatcaaagataacgccaataaacacaaacacaacccatatttactcaagctagacctggagaacttctttaacagcatctcaagcgaacttttttggaaagtttggcaagcccattaccctatcccacagactgaggataaagtgttcatggaaaaactgctcttctggtcaccgtctaagagcgtatatggcaagctgatcttatcaattggagcccccacatcccccctgctatcgaatttctttatgtaccagtttgatcacatcatacatgatttatgcgtccatagagagataatatacacacgctacgccgacgatctgaccttctccaccaaacataaaggtgcactgtttaatatgcctgacctcgtcaccgaacagctgagaaagtgtttcggggaggcgataaacattaatcgtcgaaaaactgctttcagttccaagggccacaacagacacattacagggattactattgacaataatgacaacctctcactcggacgcgaaaggaagaggtacattaagcacctcattaatgagtacaagttcaacaaacttggcaaggaagacatcaatcacctgaaagggctgttggcatacgcaaaacatattgagccaagcttgatgacccgcctggaacacaagtattccacggagttgatgacgcagctctttgaggaaaactatgaatga

SEQ ID NO: 11250 - RNA, 933 nt, synthetic construct
  source 1..933: mol_type = other RNA
atgtccttcttggaggaactagccagcgtgttgcagaaaagcgaggctgaggttgaaggcttcctggagggagcacccaaaaagtatcggacgtacaagattcctaaacgcactagcggctttcggacaatcgctcagcctagtaaggagctgaaggagtaccaacgggccttcttgaagatacagtctttaccaatccataacgcggccaaagcctatagaaagaacctttcgatcaaggataatgctacagtccacaaatctagcagatactttctgagtatggacctggaaaacttctttaatagcatttcttccgatctgttctggcgcgtgtattcacggcactttgacagtttcagcgggcaggataagcgagtgatggaatcactgctcttctggtccccaggcaaaagcaataaacagggactggtgctatcagtcggcgctccctcatccccgctcttgagtaacttcttcatgtacacattcgatctgattatgtccaattattgtgacgaaaccaacatcctgtacacaaggtatgcagatgactttacgttctctactaatgacaagaacatcctgttttccgttcctgaggtggtaaagggatttttagagaaatgctttgggagggggattaacgttaacaaacgtaagaccgtattttccagtaaggcacataaccgacacgtcaccggaatcactataaataataacggtgacctgtctctcggtagggagcgcaagagatacattaaacaccttattttccagtacagcatcaacaagcttgaggaaggcatgctccaacacttacaggggcttctcgccttttctaatcatattgagcccatgtttatcttcaccctgaatgaaaagtataccaaagagctgatgctcagaatatcagaagaaaggcatgtgtga

SEQ ID NO: 11251 - RNA, 933 nt, synthetic construct
  source 1..933: mol_type = other RNA
atgtcatttcttcgggtcttagcaagtaaggtgaacaaaacagagacagaggtaatacagtacttggccaatgccccactgaagtacaaagtgtatactatccccaagcgcacaagtggcaatcgtgtgatagctcaacctaccaaagaactcaaagagtatcagagggcttttctgcagatcaagtcctttccagttcaccaggtcgccacagcctactgtttaggactgtctatcaaagacaacgcgctgagccataaggctaattcctacctgctcaaaatggacttgaagaatttcttcaactccattaacaacaacctgttctggaagatatgggccgtcaacaagaagcttccggaagccaaggacaaggagttaatcgaaaaactgctattctggagccccagcaagagtctgcagggcaaactgattctgtctgtgggtgctccttctagccctctgctatcgaatttcatcatgtattcattcgatgagcacttgtttaaggcatgcaacaagctgaatgtgacgtacacccgctacgcagatgatctcacgtttagcaccaacaagaaagacattttgtttaaagtgcccaacctggttgcagaacagctcagatttgaattcggctccagcattatcgttaacaggaaaaagaccaagttctcatcaaaagcccataacaggcatgtaactggaattactctcaataacaatcaggctatcagtctggggcggaaacgaaaaagatatatcaaacacctggtgcatcaactgctactcaataagctgactgtcgatgacataaatcacctcaaagggttgcttgcgttcgcaaagcacattgagccaacctttatcctttcccttgaaaagaagtattctctcgctaagattacccacatcttcgaggccgagaatgagtga

SEQ ID NO: 11252 - RNA, 933 nt, synthetic construct
  source 1..933: mol_type = other RNA
atggagatcgtacggtctttagcccaaaaactcaatattacggagcaggaggtgagttcattcctggcctcagcaccgttgaaatataaggtctacaagatccccaaaaggaccagcggttttaggattatagctcaacccagcaaaaaactgaaggaataccagcgggcctttatcgagctttttccactggcttgtcaccaggccgcatacgcgtatcgcgagggaatttctatcaaggataatgccctcattcataagaagtctaagtacctgcttaagattgacctggagaatttcttcaactccatcaccaacgaactattctgggacatttggcaaaaaaacagcgtccttccagatctgaatgaaaaggtgctgttggagcggctgctgttctggtcccccgataagaaaatctctagtcgcttaatcctgtccgtgggtgctccttccagtccatccctctcaaactttttcatgtacgactttgatgagagcctatctagatattgcctcgaaaagaaaatacgttatacccggtacgcagacgaccttactttctccacatacgaaaaggggattctgtttgaaatccctgattttgtcagtcacatcctcagacagctctttggagataaactgtcaatcaatcgtaggaaaaccattttcagcagcaaagcccacaaccgacatgtgactggcgttacattaagcaacgaagagagtctgtcgatcgggagacagaggaaaagatacattaagcatctcgtgcaccagtatctcctgaacaagctggaccaggacgatgtttcccatttgaagggccttttggcgttcgctaagcacatcgagcctgatttcttggaccgcctgaaagcaaagtattctgacaagacaatatcacagatactaggcgaacgaaatgggtga

SEQ ID NO: 11253 - RNA, 933 nt, synthetic construct
  source 1..933: mol_type = other RNA
atgggcatcattgagtcactcgccggcaagctggacaagtccccatcagcagtcaagaagttcctggcaagcgcgagtctaaagtaccgggtgtatacaattccaaaaaggacacatggatacaggttaatagcccatcctagcaaagagctgaagaaatatcagcgagccttcctcgaactgatgcctttggccatccacccttgtgcaatggcataccgtaagggactgtccattaaggacaacgcgcttgctcacgttgataagaagtatttgctgaagctggatctggagaacttcttcaacagcatagatcctaacatcttctggaaggtttatcaccttcacgaggaggtctgtgagccctcttctctgggtgagcgcttactcattgatcaattgttgttttggtgcccctccaaaagaaaaggagggaagcttgtgctgagcgtaggtgctccatccagccccatggtcagtaatttttgcatgctcttctttgatgtcgtgatctctaagtactgcaaaatcaatcacatctcctacaccagatatgctgacgacttgacctttagtacgaacgaaaaaggtgccctgtttaaaattccggaactcgttagggacactctgttcagcgagtttgggaatcgggttgtgctgaacaatgccaagactaaattctcttctagagctcacaacaggcacgtaaccggagtgaccctttcgaatagtgacacaatatcagtgggcagagaacgaaaacgctacatcaaacacctggtgcatgaatatcagctagggcggatgaattacgaggaaatcctacatctcaaaggcttactctcacatgtgtcccatattgagccagtgtttatcaatagcctggccaaaaagtacggccccgatgtccttaagcgcattcacaaggaatga

SEQ ID NO: 11254 - RNA, 942 nt, synthetic construct
  source 1..942: mol_type = other RNA
atgggaattgtcaagcagctggccagcgaacttgacaaatccgaggctgaaatcatggcattcctcagccgcgcgcccctgtactacaaggtgtataaaataccgaagcgcacacacggggagcgtacaattgcacagcctacccccgagctaaaaaatctgcagagaacttttctcctgcttaaccctcttcctatgcattccgcagctatggcttataggtccggtttaagcattaaggacaatgctaacgctcataagcgcaactcatacctattaaagctcgacttgaatagcttctttaattcgatcactcccgctattttttgggcagagtgggataagttttttgatccattggactctaacgaaaagacactgatagaacgactgctgttctggagtcctagcaagagtttgagcggctccctcatgctctcagtgggagccccatctagcccagcagtatctaactttgtcatgcacgggtttgacacaaaactggaccagctgagtcggaacaaaggcgtagtgtacacgagatatgccgatgacctaactttcagtactcgaaatcagggggttctgatgggaatgcccgagctggtgaccgacttactggttgagtgcttcggcgcggccctgaccgttaaccggtctaaaacaatcttctcttccaaggcccacaataggcatgtgaccgggatcaccctcacgaacgaggccaagctttcattgggaaggaaaagaaaacggtacatcaagcacctggtccatcaattcaccctccaacagctcggccttgaagatgtgaattatcttaggggactgctgtcattcgcaaagcacatcgaaccagatttcatctacgccttggagaaaaaatatggtgctgccgccctgattgccatatacgaggtgaatgatggcggctccaagtga

SEQ ID NO: 11255 - RNA, 933 nt, synthetic construct
  source 1..933: mol_type = other RNA
atggctattgtgtcctttctggccactcacttggacattcccgaagatcaagtggagagcattgtacagcgcgcaccccttctctacaaagtgtacaagattcctaaacgaagcttcggtaccagaactatcgcccagcccactcccgagttgaaaaagctacagcgtgccttcttactcaccaaaccgttgccagttcattctgccgcaatggcctatcaacctggcctttccataaagaaaaacgctctgcaccacctgcacaataagtacctgttgaagctggatttgcttaacttcttcaattccatcacgccggatatcctttggcaagaatggaaacagcattttgaaattcctcccccaaaagaaaaaaagcacatcgagaatctgctcttttgggccccacaacggaaaccaaatacacacttaatgcttagcgtgggagctcctagttctcctaatctctcgaactttatcctgtacaggtttgacgaacggttacagaatctgtgcaagaagctgaacataacatacacaaggtatgccgatgacctgaccttctccacaaacacaagatatgcgctgttcagtataccagaacaggtcgcaatgctgctcaacgaactgtttaccgggcgcattaatatcaacaagagaaagacgatcttcacctctaaagcccacaaccggcacgttactggagtgggcctcagttctgagaacaagctgagcctagggcgagctaagaagaggtacctcaaacatctggtccatcagtttaccctctcactgctggcagacgaggagatctcacacctccagggttggctagctcacgcgaaacatatcgagcccaccttcatagagtcacttacaaataagtatggccaggacattatccataagattttcgagactaaccatgattga

SEQ ID NO: 11256 - RNA, 1050 nt, synthetic construct
  source 1..1050: mol_type = other RNA
atggtagctattgtgagccctcccaacttagttccaagattgggaggggaaactatcgccagctccagcaaagagctgtctcctagagccaaaagctgggcctttctgtggactgtcctgatgggagtgattgagcagcttgctagtgcactgggcaagaaagacgaggatgtcattgacttcttggttaccgcccctcgcaagtataaagtgtacaccattcctaaaaggagcgtgggccacagattgattgcccagcccagtcaggagctgaagatatatcagaagaagtacatcgagcttaatccgctccccgtgcacgatacagccatggcttacaggcaagggctctctatcaaggaaaacgccaaggcgcaccagaaaaatagttacctactgaagatggatcttgagaattttttcaactcgatcacgacagatgtcttttggcaggagtggcttgctttctacccgcaaccatctgacgtggactccatcattctggaacgcctgctgttctgggctcccaacaaaaagctagacggcaagctgattttgtctataggtgcgccctcctcaccagcactctcgaattttattatgcatcgatttgacgaagccgtcgtaaacaactgcgtggcaatcggagtgaagtatacccgatatgcagacgatctcacattttcaagcaacaccaaggatatcttattcaccctccctgggctgattgaaaacattctgatgatgctcttcaacggagccatacgcgttaataagaggaaaacgatcttttcaagcaaggctcataatcgtcacgttaccggcgtgacaatcagtaatgacaacaacatttccttgggtcgggagcggaaacggtatatcaaacatctggtgtatcagtacatgaatgggaagttagagaaggatcaggtcaatcatcttcagggcctcctgtccttcgcaaaacacatagaaccaaatttcatcacttctctgaacatcaagtacactcacaaaatcatccattccataatgtcagacaaacaatga

SEQ ID NO: 11257 - RNA, 933 nt, synthetic construct
  source 1..933: mol_type = other RNA
atgaccgttctgtttggcttggtgaagacacttgggatctctgagagggaagctattactttcctgagtgacgccccaaaaaaatacaaagtgtacagcattccgaagcggtcatcggggcacaggatcattgcacagccaagcaagcgacttaaagaatatcagaccgcttttctaaagtgttgcttgctgcctgtacaccctagcgccatggcgtatcgccagggcctgtccataaaagataacgccaattatcacaaggataatcaatacctccttaagatggacttggagaactttttcaatagcattacccccaacattctttgggagagttggaataagaaagagctgttcattgatgacaacgacagaaagatcttgcaaagactcctcttttggtgcccctccaagaaaaacagtggtaaactggtcttatccataggcgcccctacctcaccagctgtcagtaactcttttctctataacttcgatgaggagttatacaacttttgcctgaagtaccagatcgcatacactagatatgctgatgatctgacgttttccacaaatcagaccggggtcctgttcactgtgcacgaaatggtgaaaaagctcctcatcaaacactttgaccggcagatcactctgaatcatggaaagaccattttctcttccaaggcccataatcgtcatatcacaggagtgacaatcacgaacgacggcaaactctctattggcaggcagaagaagcggtatatcaaacacctagtatatcagttcgagttaggggttctgtcaatcgaggacatatgttaccttcagggattgctggcattcgccaaacatattgaacccctgttcataccccgcctggtgcaaaagtacagcaaggaaacactgaagaatatcttcgacatcggtagctcatga

SEQ ID NO: 11258 - RNA, 1071 nt, synthetic construct
  source 1..1071: mol_type = other RNA
atgttctcacactctaaactggttagccttctgctgcccccgctggagtgcaaaaacattgcggtcttttctaaagaaccaatgagtaaactggtcacgtccctggggttcctgtcgcgtgctttgaaaatgaagaccatccttgagttcgcaagtcgcactgagcaatccccagatcaggtgatgaggtatctgaagtcagcctccaagaagtataaagtgtacagcatccttaaacggacacatggccggcgcattattgcacaacctgccaaggaattaaagcagtaccagaatatctttctcgacacacactcactacccgtgcatagttgcgcctacgcgtacaaaaaaggtgtaagcataaaggagaatgcacaacagcacgttgaaaataattacctcctgaagatggacctcgagaactttttcaattctattacccccgatatcctgtggaaccagtgggaggatcattttggttggaagtttcagagcatcgaaaaggtcctcctggagcagacattgttttggtctacctcaaaaaagctcaacaggggcaaactagtcctgtcggtgggagctccatcctcccctgccctgtccaatctgtgtatgtatagttttgatagggagctccaggagatctgtcagacttacggagtatcttacactaggtatgctgatgacttgacattctctactcaactaaaaggccgactcattaaattccccgactatgtcgagaacttactgaacaagcacttctcaaagaagatattgatcaataaccggaagacagtgttcaccagcaaagcccacaaccgtcatgtgaccgggataaccctcgctaacaacggcgtgatctcccttggcagaaagcgaaaaagatacatcaagcatcttatgcaccagttcattttggggaacattgatgacgaagaacgcatgcacctgagaggattactggcctttagtaatcacattgaacctagcttcatcagcacgcttagaaacaagtatgggaatgacgtggttcagcgggtgagcgaggttataaatgaaaagtga

SEQ ID NO: 11259 - RNA, 924 nt, synthetic construct
  source 1..924: mol_type = other RNA
atgaaaattatttctcagctggcgaaatacctaaataagccggaggattctatcgaggacatactgctgatcggacccgaaagatacaaattgtactatatccctaagcgtactcacggggtgagactgatagcccaaccatctcgcgaattgaaggagtaccagcgggcattcttatcattctacaaattcccaatccatgactgcgcaatggcttatcgggagggcatttctatcaaggacaatgccatcgcccataagaacaatagttatctcctgaagctcgatctcgagaatttcttcaactccatcaatcccataattttttgggatgtgtggcagaaactggaactcagcaacctttccgccaacgaaaagaaatggattgagaacctccttttctggaatcttcacggtgatcttgtactgtccgttggagctcctagttcccctaccataagcaacttttgcatgtacattttcgatagcatcctgacatatcactgcaacaacatcgggatcacttatacgaggtatgccgacgacctgactttttcaacaaacgaagagagggttctgtttaagatcccctccgtggtcgaaaccatgttatacgactgtttcgaaggcaagctgtgtttaaacaaaggtaagacagctttttctagcaaggcacacaatcggcacgtcaccggcattacattgaccaatgagggcaaaatcagcctaggacgaagcagaaagaggtacatcaaacataagattcaccagttttccctggggaaacttgataactatgacataatgcatctgaaaggcctcctctcgtttgctcgccatattgaaccaaaattctacgacagtttgctgaataagtactcaaaggagctggtgttgtcaatttttgaggccaattatgagtga

SEQ ID NO: 11260 - RNA, 924 nt, synthetic construct
  source 1..924: mol_type = other RNA
atgagtatcatttctctgctcgctcagactctaaaaaaacctgagtatgtgatagaagacattctgttcatcgctcccattcgctacaaaatctattatatcccgaaaagaacgcacgggtttagacagatcgcccaaccatccaaagagctcaaggaatgccagcgggcattcttacgtttttgtaacctgccaacccacaactgtgccatggcgtaccgggaaggtctatccattaagaataacgccatagcccacaaaaatcaggcctacctgctgaagcttgatctggagaacttttttaacagcatcacccccaatatcttctggcacacatgggagctcactggagctgaactccctacaaaggacaatcaacagtggatcgagaagctcctgttttggaatcttgaagacaagttagtgctgtcagttggcgccccctcctcgcctagcgtctcaaacttctgcatgctgatttttgatcagattttacaggaccaatgtcagaaccttggaataaaatatacgcgctacgcagatgatctgacctttagtaccaacgaaaaggacatcctgttcaagattcctgagagcgtagagaatatcttgtccaagtgcttcaatggtaatctcaggttgaacaagggcaagacaatattctccagcaaggcgcataatcggcatgtgactggaattacaatcaccaatagcggggagatttctctggggaggtcaaagaaacgatacatcaaacacaaaatccaccagttctctctggatctgttgaacaaccatgaagtgatgcatcttaaaggcctcatggcttacgcaaggcatattgagccaagttttcacgagtctttgataatcaagtatagcaaggagatcattgaaagaattttcgaagtccccaacgagtga

SEQ ID NO: 11261 - RNA, 963 nt, synthetic construct
  source 1..963: mol_type = other RNA
atggcacaagactcacatctgggaccatttcctctgggtaagttaatggggatcatatatcagttggccgaaaagctcgagatgtctgaactgactgtcaagaaatacttggcaaatgcgccgaacaaatacaaggtctacaaaattcccaagcggacgtacggatttagaattattgctcagcccgccaaagaactcaagaaattccaacgcgcttttttagacgtattcgatctacctgttcacaatagtgccctcgcctatagaaagtctatatcaatcaaggacaacgctatcctgcattgcaaaaatgcctacctgcttaagatggacttagagaacttcttcaactccattactccagacctgttctggaaggaatggaacaaaactcttaagatcctgccacgtacagaggcccagtggctggagcttctgctcttttggcggccgagcaagaaaagaaatggaaagcttatcctgtcaatcggggcacctagcagtccccacatctcgaatttctgcctgtttaacttcgatattatcatgagcacaaagtgtgaggcgctgggtatcacgtattctaggtatgccgatgacctcaccttcagcaccaacaagaaaaacatattgttcaccattcccaagtttgtggattccatcctgacagcttcctttgatggcaaacttacaatcaacaagaacaaaaccgtgttctccagtaaagcacataataggcatgtgactggcattactatcacaaatgacggaaatattagcatcgggcgcgagaaaaaaaggattataaagcacctcgtgcacaattataagattggcaccctcccacctgaggaaatagattacctgaagggcttgctagctttttccggccacatcgatcccacctttattgactctttgaagaagaacatccagcagcgactgagcaaaaaatacatttga

SEQ ID NO: 11262 - RNA, 942 nt, synthetic construct
  source 1..942: mol_type = other RNA
atgtcagtcattgaaaagctcgcactgacattggacaaagagcagagggaggtcgaacggtttctggtgaatgctccaaacaagtataaggtgtatagcatccccaaaagaacgcacggctcgcgcgtgattgcccaacctagtaaagagttaaagacttaccagagagcctttatcgacctgtacgaaaagtaccttcctatacacgacaatagcttctcttacagaaaaggggtaggcatcaaacagaacgcagacgtccacaagaagaatccctacctactgaaaatggacttagagtccttcttcaattctatcgttccttcaatgctgtgggaggaatgggagcgatctatcgggaacaccccaaatgctcgtgaaaaaatgtggatcgagagactgctcttctggaacccctccaaacgcagcgggggcaagttgatcctgtctatcggagcgccaagctctcccatgattagtaatttcgttatgcatagtctcgataaggtgctatcggtagaatgctccgagaagggcgtgtcctatactcgctacgcagatgacatgacattttcaactcggaacaaggacaccctctttatttttcctgagcttgtgtccaatatcattaagtctttgtttggcaatcgtatcagcattaaccggtccaaaacggtctatagcagcaaagctcataaccgacacgttaccggggtcaccctgacaaacgagggaaggcttagtcttggaagagatcggaagcggtatatcaaacacctggtgttcgaatttagggaaaagaggctggatattgataccttcaaccatctcaagggtctgatagccttcgccaaatacatagagccggacttcattattcgcttggagaagaaatactcaacaaggctcataaagaaggtgatggacggtgattatgattga

SEQ ID NO: 11263 - RNA, 942 nt, synthetic construct
  source 1..942: mol_type = other RNA
atgtcagtgctcgagaaattagccattactctgggaaaagagcaagccgaagtcgagtcgttcctgttaaacgccccaaataagtacaaagtttacagcattccgaagcgtacccatggaaaccgcattattgcacagcccagcagagaattgaagaagtatcagagagcctttatcgacctgtacgaggtgtattttcctgttcacaaaaacgcgttttcatacaaaaaggggatcggcatcaagcagaatgccgaggttcacaagaacaatccttatttgctcaaaatggatttggagaacttctttaacagcatagtgcctaacatgttttgggaggaatgggaacgctccatcggagataccccaaataagaatgagatcaagtggattgagcggatcctgttttggtccccctctaaaaaatctaatgggaagatggtcctgagtattggcgctccttcttctcccctcatatccaactttgtcatgcattcattcgacaaaatccttacgagcgaatgcgagaagaagggagtgtcatacactagatacgctgacgatatgactttcagtaccaaaaacaagaacaccctgttcagcctccccgaaacagtgtccaatgtgataaggggtgtattcggcaatagggtaagtattaacaggagcaaaacagtgtattccagtaaggctcacaataggcacgtgacaggggtcaccctgacaaacgaagggaaagtgtctcttggccgcgatcgaaagcggtacattaaacatcttatcttcgagtatcagaagaacaatctggacgcagaaaagtttaatcacctgcggggtctaatagctttcgcacggtatatcgagccatgtttcatcgatcgactcgaaaataagtactccgccagactagtcaaaaaggttatggacggcgactatgagtga

SEQ ID NO: 11264 - RNA, 933 nt, synthetic construct
  source 1..933: mol_type = other RNA
atgagtgtaattaatagattggcgaccagcctgcaccagaatgaacttgaagtgagagcctatttagagaatgcaagcggtaagtataaggtgtatagaatccccaaacgaacaactggattcaggatcattgctcagcctgccaaaatgttaaaggaataccagcgagctttcctgcagctttaccgattcccaatccacgactgtgctatggcatatcaaaaaggcaaaagcatacgtgataatgcgctgatgcacgcccacaacccttatctactcaaaactgacctagaggactttttcaattccataacgcccgatattttttggcaatgcgtagagcagaccagtgtcaatgtctccttgtttctcccggaggaccgccggtacgtggatcagattctcttttggaaaccaaccaagcggagtacacggttaatgctgtctgtgggcgcaccctcctcaccaatcatttccaacttctgcctgcatgagttcgatcagttgatccacgaaatttgtcggaacctggacatcgtgtacaccaggtacgccgatgacctcacattttcgtgcaacgtgagagacgttctcggttcactgccttccatgatagagacactgcttaataagctcttcaagaagaagctgaggcttaaccgtggaaagactatctttagctctatggcccataaccgccatgttacgggggttaccctgaacaacaaaggcaaactgagcttgggacgggagcgcaagagatttattaagcacctgattaaccagtacaggtacgggctgatagatgagtctgacaaagcctaccttgtcgggctgttggctttcgcatcacatatcgaacccgaattcatcatccgcatgaacaataagtattctactgagctgatggataggctcaggcgccaacagtga

SEQ ID NO: 11265 - RNA, 933 nt, synthetic construct
  source 1..933: mol_type = other RNA
atgtcactcatcaatcgcctggctacatccttacagcaaagtgagctgaaggtcaacgcatacctggaaggagccagtgggaagtataaggtctacaggatccctaagcggactaccggcttcagaataattgcacagcccgcaaaggccctcaaagactaccagagagctttcctgcagttatataggttcccaattcatgagtgtgccatggcctatcagaagggcaagtctatacgtgataatgctcttgctcacgccagaaacccttatctcctgaaaacagacttggaggacttctttaacagcatcacccccgatatcttttggcagtgcgtggagcgctcttcatctagcgaattgcaattccaactagcagatagaagatatgttgatcaggtgttgttctggaaaccaacaaaacgttcaacacgactcatgctgagtgtgggtgcgccaagcagccctgttatttccaatttctgtctttacgagtttgataccctgatcaatgagtactgcagggaattggacattatttacacgcggtatgccgatgaccttaccttctcctgcaacactcgcgaagtgcttaaaagcgtacccgccattatcgaaacgttgctgaacaagatattttccaagaaactccggttaaaccggggcaaaaccatattttcgtctatggcacataacaggcacgtcactggggtgactctgaataacgagggtcggctaagcctgggacgagaacgaaaaagattcatcaagcatctgatcaatcagtaccggtacgggatgattgatgaatcagacaaagcttacctggtgggacttctggcgtttgcctcccacatcgagccggactttatcctgaggatgaatgacaagtactcctatgagctcatggaccgcctccgcaggcagcaatga

SEQ ID NO: 11266 - RNA, 933 nt, synthetic construct
  source 1..933: mol_type = other RNA
atgagtgtaatcaatggcctcgccgggctgctaaatcagagcgaactggatgttgtgttatacctgcagagcgcctctcgaaagtataaggtgtataagatccccaaacgcaccacgggctttaggatcatagcgcagccagctaaggccctgaaagattatcagcgggctttcctgcagctttataggcttcctgttcacaaatgcgctatggcttaccaaaaaggtaagtctgtgagggataatgcccttgtccatgcccagaattcttttctcttgaagacagacctcgaagatttctttaattccattacccccgacattttttgggagtccatagagagatctcccagcgacacccctcaaattagtgcagaggataaagggtacgtggagcatctactcttctggcagccagcaaaacgctccaagagacttattttgagcgtaggagcgccctcatccccggtcgtctcgaacttctgtttatatgaatttgacaacctgatctccgagttctgcctcccactaaatatcgcttacacccggtacgctgacgatctgactttttcatgtaatactagggacgtgctgggagttctccctttgattatagagaaactcctgaacaagctgtataggcggaaacttagactgaaccgcgcaaagaccgtctttagctcaatggcacacaaccggcacgtgacaggggtgacaatcaataacgaaggcgagttaagtctgggaagagaacggaagcgtttcattaagcacctcattaaccaatacagatacgatatgatagacgaagccgacaaggcctacttggtgggtctgctggccttcgcaaaacatatcgagcctgagttcatcctgcgaatgaaccgaaagtatactacagaattgatggagcgcatccgtcgccagcagtga

SEQ ID NO: 11267 - RNA, 933 nt, synthetic construct
  source 1..933: mol_type = other RNA
atgagtttcatcaataagcttggcgttaacttcaatcagtccccactggaacttaaggtgttcctggaaaatgccccctctaagtacaaagtgtacaaaatcgctaaacgaactggtggctttcgtatcattgcacaaccggtaaaagccttgaaggtgtaccagcgggcttttctgcaactgtataacttccctgtccatggatccgcaatggcatatcaggaaggcaagtctatacgagacaacgccctgatgcacgcaaggaacccttatctgctcaagaccgacctagaggatttctttaattcaatcaccccagacatattttggaaatgcgtggagcttagcagcgctgacgctccacaatttagcgtggaggatagacggtatgtcgagaagattttattctggcagccggccaagagaagcaaaaggctcatgctctccgtaggcgccccaagttcacccgtgatttccaacttctgtctcctggagttcgataagctgatctcacatgagtgcagggaactgggaattgtctatacgagatacgctgatgacctcacctttagcagccgcatacctggggttctttctcccttgcccgcgatgatagagcagctgctcaaaaagctatacaaaagcaagttacggctgaacaggtctaagactattttctccagtatggctcacaatcggcacgtgacaggagttaccctgaataacgaggggggtctgtcccttggccgcgaaaggaaacgctatatcaaacatctcatcaatcagtacaagtatgacgccattgatgaatcggacaaggcgtacctgatcgggttgttggcctttgcatcacacatcgaacctgcctttattctgcgcatgaacgacaaatactctacagagttaatggatcgtttgagaagtcagcagtga

SEQ ID NO: 11268 - RNA, 927 nt, synthetic construct
  source 1..927: mol_type = other RNA
atgtccgttatcaacgacctgggccgctgtttgaaccaaagcgatttagtagtgaaggcctttctggagaacgccccaagcaaatacaaggtgtataggatcccaaagcgcacaaccggttttcgtattatcgcacaaccggccaaagagctcaaacgctaccagagagcgtttatggggacctaccgcttcccggtgcacgaatgcgctatggcctaccaggagggaaagtcaattagggataacgctcttgcgcatgcccacaacccttatctgttaaaaacagacttggaggatttcttcaattctatcacacctgcaatcttctggcagtgcattgagtcttgtcccgttgatgccccacagtttcaggatgaggaccgacgctacgtcgaacgactcctattttggcagcccgcgaagagaaacaagagattaatgctgtccgttggcgcaccatcaagtcctataatcagcaatttctgcctcctggagctggacagattcctgtgtgaggaatgcgagcggttgggtgtgtcttacaccaggtacgcagacgacctgaccttcagcacatctcttcccggggtattgagcgccatccctgccctgattgaatccctcctcaaacggctattcaattccaagctgcggctcaatcggaataagactcttttttcatcgagagctcataacaggcacgtgactggagtcactttgaataatgaaggggaactgtccctgggaagggctaggaagcggttcataaaacacctgattcacagatatgacaagctggatgaggctgataaagcttatctcgtgggccttcttgcatttgccagtcatatcgaacccgagtttataatccgtatgaacgccaaatatagtacggaagtcattgaccgaattcgtcggcaacagtga

SEQ ID NO: 11269 - RNA, 933 nt, synthetic construct
  source 1..933: mol_type = other RNA
atgtcagtcatttctgagctggctatgctgctgaatcagaacgaacaggatctcagggcattcctaaaaaatgcgtccagcaaatacaaggtctataaaatacccaagagaacgctgggcttcagaatcatcgcccagccggcaaaggctttaaaggagtgtcagcgcgcctttatccaacgctatcctttgcctgttcatgcgtgtgccttggcataccgtgagggtaaaagcattcgggataatgcattcatccacgctcagaattcatatctccttaagaccgaccttgaggactttttcaactccattacccctgaaatcttttggcaatgcgttgatgcatcccacgatggggcccccgtatttgacggatctgatagggtggacattgagcggatcttattttggcagccagccaaaaggagtcaacgactgatacttagtgtgggggccccctcaagtcccgcaattagtaacttctgcctctacgatttcgaccgactgctgtccgagagctgccagactatgggcgtggcttactcccggtacgccgatgacctgactttttcatgttccatgccaaacgtgctgcgaaccttgcctgctataatagaggctttgctgaatagactcttcaacaggcgcctcagattaaatcggggcaagacagtatttagctctaaagcgcataacaggcacgtcacaggggtgacactgagcaatgagggtctgcttagcctaggacgggaacgcaagagatatattaagcaccttatcaaccagtacaggtacgacctcttggacgaagaagataaggcctatctagtgggactgctcgccttcgcttcgcacatcgaaccagaattcattctgcgcatgaacgccaagtattcttctgagctgatggacagaatccggcgtcataaatga

SEQ ID NO: 11270 - RNA, 936 nt, synthetic construct
  source 1..936: mol_type = other RNA
atgagcgtgatctctggtctggctacccttctgcatcaatctgaaagcgatgtccggttgtttctggagaatgccccccggaaatacaaggtttaccggattccgaagagaacaacgggtttcaggataatcgcgcaacctgccaaacgcctgaaggaattccagagagctttcatgcaactctatttgttccccgtgcacgaatccagcatggcttacagaaagggcaaatctattagagacaacgcctccgcccacgctaacaaccagtatctactcaagaccgatctcgaggattttttcaatagtatcacccctgcaattttctggagatgtattgagatgagttccgagcaggcaccacagtttctcacccaggacaaaccctacgtagagcgcatcctgttttggcaacccgtcaagcgcagcaagtcgcggctgatgttatcagtgggcgcacctagttcaccagctatcagcaacttctgcctgtacgaatttgaccggcagatgaatgaggagtgccagaatctcgggattacatacacgcgatatgcggatgatctgaccttctcttgtaacatccaggacttactcaggactgtgccagcaataattgaggccctgcttaacaaacttttcaagaacgccttaagaatgaaccacggaaagacagtgtttagctccaaagcccataatcgtcatgttactgggatcacactaaataatgaagggaaactgtccttgggacgtgaacgcaaaaggtttattaagcaccttattaaccagtacaagtatggcttgctggatgacgcagacaaagcctatctgatcggactgctggcctttgcttcacacatagaacctgaattcatcactaggatgaatgagaagtattcaaacgagctcatagagcgaatccgccgacagaggtga

SEQ ID NO: 11271 - RNA, 933 nt, synthetic construct
  source 1..933: mol_type = other RNA
atgtccattatcaatgggcttgccaccgtattgcatagatccgaggccgatgtccgcagcttcctggagaatgcgccgaggaagtataaagtttatagaatccccaagcggacaactggtttcagaatcatagcacagccagcaaaggaactcaaggccttgcaacgagccttcttgcaactctactcttttcctgttcacgaaacatctatggcttatagaaaaggaaagagcatccgggacaacgctctcgcccatgtgaacaatccgtatctgctgaagactgatctggaggacttctttaacagcataacacctgacatcttttggcggtgtatagatactagctcaattgaaacgcctaaattttcggtgcaggaccgcccatacgtcgaacgcattctgttttggcagcctgtaaaaaagagcaaaaagcgcctcatgttatccgttggggccccctcaagtccagatatttcaaacttctgcctctacgaatttgatcgtaaactgtcagaggactgccagaatctgggtattacctataccaggtacgcagatgacctgaccttctcctgtgatatgagagacgtgctgcgaactgtgccagtcatgattgaggctctactcaagaagattttcaacaaggcccttaagatcaatcacggcaaaacagtgtccagttctaaagctcataatcgtcacgtgaccggcgtgacgttaagtaacgaggggaatttgtctctgggcagggagcgcaaacggttcatcaagcaccttatcaatcagtacaaatacggactgctagacgaagccgacattgcttatctgcgaggcctgcttgcgttcgcaaaccacatagaacccgattttatcggacgggtcaacaacaagtacagcatcgagttaatggagaggctcaggaggccctga

SEQ ID NO: 11272 - RNA, 936 nt, synthetic construct
  source 1..936: mol_type = other RNA
atgagtgtcattcgtggtctggcttccgtactgcggcaatctgattcagatatctcgacttttctggcgactgcaccacgcaaatataaggtgtacaaaatcccaaaacggaccacagggttcagagtgattgctcagcctactaagggcttgaaagacatacagagagcctttgttcagctttactcatttcctgtgcatgatgcgagcatggcctacatgaagggcaaagggattagggacaatgccgcagcccacgctggtaatcaatatttgttaaaagcagacctcgaagacttcttcaactccattacccccgcaatcttttggagatgcattgagatgagcagcgtgcagacacctcagtttgagcccctggacaagatctttatcgagaagatccttttctggcagcccatcaaaaggaggaagaccaagttgatcctctccgtgggggccccttcctctccagttataagcaatttctgcatgtacgagttcgataaccgcattcatacagcttgtaagaaggtagagattacctacaccaggtatgctgatgacctgacgttctctagtaatataccagatgtcttgaaagccgttccgtctactttagaggccctgctcaagaacctctttggaagcgcactacgtcttaatcatagcaaaacggtgttctcttccaaagcccacaacagacacgtgactggcgtcaccatcaacaatgaggaaaccctgagtctgggacgggaccgcaaaaggttcataaagcacttaatcaaccagtacaagtatggactgctggataacgaagacaaggcctatctgacaggccttctcgcgttcgctaatcacattgaacccggatttatcacacgcatgaacgaaaagtactcactggagctaatggaacgactccggggccaacgatga

SEQ ID NO: 11273 - RNA, 939 nt, synthetic construct
  source 1..939: mol_type = other RNA
atgcagattatcaaagcgttggcagccatcctgcgtcagagcgaatcagacgtgagactgtatcttcagaatgccccattgaagtacaaagtgtacaggatccccaagcgcactaatggtttcaggattatcgcccagccagccaaggctctgaaggaataccaacgtgctctaatacagctttatagttttcccgtacatgatgtggccatggcttataggaaaggaaagtctattcgggacaatgccattgctcacgccaataatagatatctgctgaaaaccgatctagaggacttttttaattctatcactcctacagtcttctggcactgtttcgagcaatgcagcgtggacactcctcagttttccacgcaggacaaaaactacgtggagaagattctgttttggcaacctgttaaacggtcaaaacataccctgatgctctctgtcggggcacccagttccccaactgtaagcaacttttgcctttacgaattcgaccgactccttagcgacgagtgcttgcgcttagatatagtgtatacacgctacgcagatgatctgaccttctcaacgaacacacctaacctgctgagactgctgccctcattcattcaggtcctcctcacaaagttatacaaaaatgcacttcgcctcaaccacggaaaaaccgtttttagctctaaggcctacaatcggcacgtcaccggcatcaccctgaacaacgaaggccagctgtccctgggtcgggagaggaagagattcatcaagcacttgatcaaccaatacaagtatgggctactcgacgaggcggatataggctatttatgtgggctcttggctttcgtgaaccatatagaaccggagttcattattaagatgaacgagaagtacaccgtttccctcatctcgtccatccatcgaagtaatcagtga

SEQ ID NO: 11274 - RNA, 939 nt, synthetic construct
  source 1..939: mol_type = other RNA
atgcaagtcatcaaggagctcgctgctatactgcatcaggacgagtccgacattagactgtatttgaaacacgcaccccacaaatacaaggtgtaccgcattcctaaaaggacgcatggttttcgtattatagcccagccagctaaagtacttaaagcctaccagaggacactgattcagctctatccctttccagtgcatgacgcagccatggcctatcgcaaagggaagtctattagggataacgctttggcccacgcagataatcggttcctccttaaaactgacctggaagatttctttaactccatcacgcctgaaatattttggcgatgcatcgagaggtgttcagtcgacgctccccagtttagtgcacaagataagagctacgttgagaagatactcttttggcaaccagttaagagatcgcgtcacactcttatgctgtcagtgggtgcgccaagctcaccgatggtaagtaatttttgcctttacgaattcgaccggctgttgtccgacgagtgtcagtccaccgggatcgtctacactagatatgcagacgatctcaccttctctaccaacacacccaacttactgaagctactgcctgcgttcatccaggccttattggctaagctgtataaaaatgctctcagactcaatcatggaaagacagtgttcagcagtaaggcgcataatcgacacgtgacaggcattactttgaacaatgaggggcagctgagcttaggacgggagcggaagcgcttcatcaaacacctgatcaatcagtataagtacggcctgctggacgatgttgatacctcttatctaaggggactgctggccttcgccaaccacattgaacctgaattcatcaccagaatgaacgagaagtacaccgccgcccttgtgggcagcatctaccgctctaaacaatga

SEQ ID NO: 11275 - RNA, 945 nt, synthetic construct
  source 1..945: mol_type = other RNA
atgtctgtcatcaaggagctggccacatttcttcaccaatctgaattcgacgtttccctgtttcttcaaaatgccccccgtaagtataaagtttatcggatcccaaagagaacctcaggattcaggatcatcgcccagcctgctaaggccttgaaggtatatcaacgcgctctcatgcagttgtacactctccccgtgcacgatgcagccatggcgtaccggaaaggcaaatccataagagacaatgctctggcccatgcccagaaccagtatctgttaaagatcgacctggagaacttttttaacagtattacccctaccctgttctggaactgtatagatgaatgtctggtgaatgacccgaaattttctagcacccaggataggatctacgtggaaaagattctgttctggcagcctgtgagacggagcaagaaaactctgttcctaagcgttggggctccctcaagccccgctgtctccaatttctgcctctataagtttgaccatctgctgaccgaggaatgccagacactcggcatcgtgtacactaggtacgctgatgacttgacattctctaccaacatcaaggatattctgaagctccttccagccctcatacagacacttctgaagaaactctataatagtgcactacgcctcaacaacggcaaaactgtgttctcctcaaaagcacacaatcgtcacgtcacaggggtgacgattaacaaccaaggtaatctttcgttgggaagggagcgaaagcgatttttgaagcatctgattaatcagcacaaatacggtctgttagacgatactgagttagggtacctacggggactgcttgcattcgcaaatcatattgagccacagtttataatgagaatgcgcgaaaaatacaccgtagatctgatcagcagtatcacgggcgcgattaacgactga

SEQ ID NO: 11276 - RNA, 936 nt, synthetic construct
  source 1..936: mol_type = other RNA
atggggatcattaaggagctttccattttcctgcaccaggatgaatccgacgtctctctgtacctgcagtctgctccccgcaaatataaggtgtaccgtattccaaaacggactaacggcttccgagtaatcgcccaacctaccaagaccctgaaggagtaccagagggcattcgtgcatgcctaccccttgccagtacatgaagccgctatggcctatagagtgggaaggagcattagagataatgctgaggcgcataccgccaatcagtacctcctcaagaccgatctggaggatttctttaactcaattacacccgcaatattctggcgctgtatcgaacagtgttccgctgaggtgcctacattccttcaccaagataaaatctacattgaccggcttctgttctggcagcctacaaagaggagtgcgcgcactctcatgttgtccgtcggtgcacctagctcacccgcagttagcaatttttgcctgtatgaatttgatcgactgttaagcgacgaatgcaaacgtttagatatcgtttacactcgctatgccgacgacttgacgttttcaaccaatacaaaagacctcttgaagatcctgccagcctttatacagagccttctgaaggagctgtataaaaatgctttacggctgaaccacggtaaaactgtgttctcgtctaaagcacataaccggcacgtgacaggggtcaccattaacaacgagggcaagctcagtctcggaagagagaggaagaggttcatgaaacacctgatcaaccaatacaagtacgggctcctggacgacgccgacactaattatttgagaggcctactagcttttgcctctcacatagaaccggagtttatcaccaagatgtccaaaaagtatacggatgcgctgatccgacggctttacagaagtaattga

SEQ ID NO: 11277 - RNA, 939 nt, synthetic construct
  source 1..939: mol_type = other RNA
atgcagatgattaagcaactggcagattcactccaacaggacgagagcgatattaagaagtttctgcagaatggaccccgaaaatacaaagtataccgtattcccaaaagaactaccggattccgcattatcgctcaaccatccaagaaactcaaagaataccagcgctatttcatagaattctatcctttgcccacacacaaagctgccctggcctacaggaaagggaaaagcatacgggataatgcactcgctcacgtgaatcagagttacctgctgaagatggactttgagaacttctttaactcaatcacgcccgcctttttctggcatagccttaccagctgtacatcaagtatccctcagtttaccgacgttgaaaagtcttacgtggaaaagatcctattttggcagcctatcaagaggtctaaaaacacactgatgttatctgttggggccccgtcatctccagtcatttctaatttctgtctgtatgagttcgacaggagactgagccaaatatgcgaggaatacggggtgatttatactcgctatgctgatgacctgacattctccaccaacattaaaaatcttctacctaagttccccagtatcatccacagcttattgcaggagctgttcaatggcatccttaaaattaaccacgcaaaaaccgtgtattccagtaaggcgcataacagacatgtgacaggaatcacccttaacaatgagggccagttatccctcggccgagagaaaaagcggtttatcaagcatatgataaaccagtacaagtacaatgtcctggatgacgaagataagaactatctgtgcggtctgctcgccttttccctgcacattgagccagaatttatcgtccggttggagaagaagtacacttcggagttgatcaaaaagctcactggtaagacgctctga

SEQ ID NO: 11278 - RNA, 1026 nt, synthetic construct
  source 1..1026: mol_type = other RNA
aagaagtatgtccattttgccgtgtccagtaaggaactgagccccagagtgctgaaattgctggggttctttgtagagcgttttatgaacctcgttcagcaactagcaaagcatctcaaaaagaatgagtccgatgtcattcggtttcttgtcgatgcccccaataagtaccgtgtgtataagatacctaagaggtcacatggacacagagtcatcgcgcagcccacgaaagagctcaaagagtaccaacgcgcctttatctcaatctttaaatttccggtacaccactctgctatggcttactgcgaaggtaagagcattaaggagaatgccttagctcatgttgagaactcttacttactgaaaaccgatttcgaaaacttcttcaactccattaccccagcaattttttggcagagtatcgagcactgtcgagtggacgcgcctattttcaccgcccaagagagaaagttggtcgaaaaactcattttctggtgcccttctaaggagaaaaatgggaaacttgtgctgtctgttggcgcccccacatcaccaaccatttccaacttctgtctttatgagttcgacaatctgatcagcaacgcatgtaatgcacaacagatcacatatacccgctacgctgacgacctcacattttccacaaataagcgggatattctgtgcactatcgtgtcctcaattcagcagttactcctgaccatcttctcgcaccacatcaagttgaactacagcaaaactgcattcagttcgcgggctcacaacagacacgtgacaggcatcactatcagtaacgaaagcaaactgagccttggccgagaacggaaaaggtatatcaagcatctgataaatcagttcaagtacaatctgctggacgactctgatataaggcatctccagggactgctagcctttgctcagcatatagaaccagtgttcatctctaggttgaagactaaatacacgaacgagctgatacagcgcatttatgaagccagccacgattga

SEQ ID NO: 11279 - RNA, 942 nt, synthetic construct
  source 1..942: mol_type = other RNA
atgaatctcgtgaagcaattggctcgccatctgcggaaaagcgaatccgaggtaatccgctttctggtcgatgcaccaagtaaataccgcgtgtacaaaataccaaagagatctcacgggcatagggtgattgcccagccttcaaaagaactcaaagagtaccagagagcatttttagccatctacacttttcccgtgcatcccaccgccatggcttactgtgaggggaaaagtatacgtgaaaatgcactggcccacgtccagaacaattacctcctgaagacagacttcgagaacttttttaactcaatcacccctgccattttttggcagtccgttggcagttgcaccgtagacacgcccatgttcacaacccaagagaagagactggttgaaaagcttattttctggtgtcccagcaaaactgaactcggtaagttagtgctgtccgtgggcgcccctacttcacctagcatatccaatttctgcctatatgaattcgatcgattcatgaccaacgtgtgcagcgatcagaagattacatatactaggtacgctgatgacctcacgttctccacaaacgagaagaacacccttaatacaatcgtcccagtcatacaacagttgcttgttgaatttttctcgtactccctgaagttgaatcactctaaaacagcgttttcttctcgagcccacaatcgtcacgtgactggtatcaccctgagcaatgaaagccggttaagtcttggccgggagaggaaacggtatatcaagcacctaatcaaccagttcaagtataacctgctggacggaagcgacatcaggcatctgcaaggactcctggcattcgctcagcatattgagccggtctttatttcacgcctgaagaccaagtatacttcggagttgattcagagaatctatgaggcgtctcacgattga

SEQ ID NO: 11280 - RNA, 939 nt, synthetic construct
  source 1..939: mol_type = other RNA
atgaacctcgtgcatcaattagctaaacagttaagaaagtctgagctggaggttatcagatttctggaaaatgcccctaacaaatatcgagtgtataagatcccaaagaggtcccatggtcatcgaattatagctcagccgacaaaagagctgaaagaatatcagcgcgcttttctatcaatctgcaatttcccagtacaccattcagccatggcatactgcgaaggtaaagggatcaaggagaatgctctggcccacgtcaaccataattacttgctcaaaattgacttcgagaacttcttcaattctatcactcccactctgttttggcaggcgatcgaaaatgccaaatgtgacattcccgcttttacgacccaggaaaaggagatagtcgagaagattgttttctggtgtcctagtaagctgaagcacggaaaactggtgttgtcagtgggagcccctaccagccccattatctcgaacttttgcctcaatgagtttgataggttcatcagtgacatctgtaatgaccaaaagatcacgtatacaaggtatgcggacgatttaacattctccactaatacccgcgatttgctttacaccataatccccagcattcaggatcttctagccctgatgttttcccacgatctgaagctcaaccactctaaaactgtgttcagctccagaggccacaaccggcacgtgacaggggtcactctcagtaacgacggaacaatctctctcggccgtgaacgcaagcggtacattaagcacctcattaaccagtttaagtacaaccttctggatgaaggggacacccggcacctgcaaggccttttggcattcgcacagcatatcgaaccagacttcataagacggctgaatgcaaagtacaccattgagctgatgaggagcattaaagaggccaacagctga

SEQ ID NO: 11281 - RNA, 942 nt, synthetic construct
  source 1..942: mol_type = other RNA
atgaatttagtcaagcagctggcccagcatttgggaaaaagtgaatacgaggtgagcttgtttcttgttgatgctccgaataaatatcgggtgtacaagatccccaaaaggacctatggccaccgtgtaattgctcaaccctctaaggagctcaagaagtaccaaagggccttcctagacatatatcctttccccgtgcattctgcagcgatggcctactgtgaaggaaagagtatcaaagataacgcccaggcgcacgtgcagaacgactatctccttaagactgacctcgagaactttttcaactccattacaccaacaatcttttggtcctgtattgaatcctgctcactggatactccttcctttactacccatgagaaaaagcttgtggagtccctcctgttctggtgcccatctaaaacaaagaacggcaagttagttctttctgttggggcacccagctcgcctaccatctcaaatttctgcctttatgagttcgacaggtacctcagcaccatctgtaactttcagaatatcacgtacacccggtacgctgacgacctgacattctccaccaagaaaaaggacatactctatacggtgataccttctttgcaggatctgctggtcaaactgttcagccaaagtatcagactgaatcactcaaaaaccgtctttagttcaagagcccacaatagacacgtaacaggggtgactctgaataatgaccgacgactgagcctaggtcgccagcggaagaggtacatcaaacacctcgtcaaccagtttaaatacgaccagctggatgaggtggatacacgccatctgcggggcttgttagcttttgcaaagcatattgaaccaactttcattaagcgcctgaaggataagtacagcagcgaactgattaaacgtatttatgaggccagaaacgaatga

SEQ ID NO: 11282 - RNA, 960 nt, synthetic construct
  source 1..960: mol_type = other RNA
atgaatttagtgagtaagctggcactgtatcttgaaaagtccgaatctgaggtaatccgcttcctctcagacgcacctaataagtatagagtgtacaagataccgaaaaggtcccacgggcataggatcatcgctcagccctctaaagaactgaaagagtatcagcgagcattcctggagctatacgaattcccagtgcacgattccgccatggcctactgcaaaggtaaaggtatcaaggagaatgccctggcccattctaaaaacagttacctgctgaagaccgacttggagaatttctttaactcaatcacaccacccattttttggcaatgcatggagaagtgcgcgtcgactgtccctcagtttacgaagcaggagaaagtcctggtggaaaagctcattttttggtgtccaagcaaagataggaatggcaaactggtcttaagcatcggggctccttccagccccgccatctcaaacttttgtctttatcagttcgacgatttcatgtccgatgtatgttacgatcacaaaatcacctacacacgctatgctgatgaccttaccttcagtacaaatgagaaggacctgctgcacactatcataaattctattcagtactccctcaactactttttctctaatagcctcaagctaaatcattcgaagaccgtttttagctctagagcgcacaatcggcacgttactggcatcaccataaacaaccatggacgtctcagcttgggcagggagcggaaacgatacattaaacacctggtgaaccagttcaagtacaaccaattgagcgaaagtgacattttccacctccaaggattattgtcatttgctcggcatatagaacccaagtttattttccgccttaaagacaagtatacaaacgagctggtgcagagaatttatgaagccggaaacgagcaacagaacaagaagcagtga

SEQ ID NO: 11283 - RNA, 1023 nt, synthetic construct
  source 1..1023: mol_type = other RNA
atgtacgagcattttgccgttagctctaaagagctgtctccaagggctccgctgctcttggggttcttcgtggaacggaaaatgaatctcgttaagaggctcgcacaccacctgggcaaatctgaaccagaggtcatccatttcttggcagatgctccaaataaatacaaggtgtacaagatccctaaaagaagttatggacaccgtgtgatcgctcagcccacccgagagttgaaactctatcagaaagcattcctggaactgtactcattccctgtgcactcaagtgccaccgcttactgtaagggcaagagcataaaagataacgcactaagccacgtcaaaaatcattatctgctcaaaacggacctggagaacttttttaacagcataacccccaacattttttggaagtcgattgaaaacgactccattgccacccctaaattctctacttcagaaattgccctcgtagagcggctcatcttctggcggcctagcaaactgcaggggggcaagctggtgttgagtgtgggtgccccatcctcacccactatatccaacttttgcctgtaccagtttgatgagtacttatccatcatttgcaaggaacaaaatatcagctataccaggtacgccgacgaccttactttttctacgtgtgataaggacgtactccatacagtcatcccgctgatccagtcccttttagattacttctttgcgtccgagctaaagcttaatcactctaagactgtcttcagcagtaaggctcataacagacacgttacagggattaccctgaataatgagggtaaactgagtctaggacgcgagcgaaagcgctatatcaaacacctggtgcactccttcaagtatggaaagctggataacacagaaattagacatcttcaaggcatgttgtcattcgccaagcacatcgaacccatctttattgaccgcttaaaggagaagtatacagacgagcttatcaagataatttacgaagcgggccatgagtga

SEQ ID NO: 11284 - RNA, 939 nt, synthetic construct
  source 1..939: mol_type = other RNA
atggatttagttaagaatctagctaacaacctgggtaaaagggaaagcgaggtcaggcggtttctagccgatgctcccaacaagtatcgagtctataaaatccctaaacgtagttatggacaccgggtgattgctcagccaagcaaagagctcaaagactaccagcgggcattccttcagctgtacacatttccagtgcacagagccgctatggcctattgtaaaggtaagtctataaaggagaacgcgcaggcacatgcatccaagaagtacttattaaagactgacctggagaacttcttcaattcaattaccccccggatcttctgggaggtggtaaggaagaataccgacttgatgaaggtgtttacatcccaagaagtcaagctggtggagaagcttctgttctggtgtccgtcaaaaactaaaagcggcaaactcattctctctgtgggcgccccaacctcccctaccatcagcaatttttgcatgagtgagtttgacaagcaactgtcccagctttgcaaagtaaaagacatagtgtacacacgctacgcagatgatctgaccttttccacaaatgaagagaacctgctgtttaagattattcccgaaattcagagcttgttgacgaagaacttctcattcaacatcaaacttaaccattcgaaaactgttttcagttcaaaggcccataatagacatgttacaggcgtcactctgtctaacaatgggaagatcagcctggggagagatcgaaagagatacatcaagcacttgattcaccaattcaaacacaatcagctcgatacgtctgaaatccaccacctgaggggaatgctcagttttgccaaacatatagagcctatcttcatcaagcgcctgtctattaagtacaccgacgaactcatccgcaatatatatgaagcgcagctctga

SEQ ID NO: 11285 - RNA, 942 nt, synthetic construct
  source 1..942: mol_type = other RNA
atgtctgttatcgaactcctggccaagaagttaaataaaagtgagagcgaggtcatgagcttcctgagcgacgctccgaaaaaatacagagtctacaagataacgaagcgttcacacggctacagggttatcgctcaaccaacaaaggaattgaaagattatcagcgcgcctttttaaccctctatacattccccctgcatgaatctgcaattgcctaccgagaagggttgagtatcaaagacaacgctctggtgcacgtagagaatcagtatctgctaaagactgatctggagaacttttttaacagcatcccacccagcgtgttttgggactctttgggctcatgtagtggtgttacccctcacttctccgtgcaggatcaacagtgggtggaaaagcttttgttttggagcccatccaagaaatccaatggaaagctggtgctttctgtgggagctccttcatcccctatgatttctaacttctgcctctttgagttcgatctctcactgtcgtccctgtgcaagaaacaagccatcagctataccaggtatgcagatgacctgacttttagtaccgacgaaaaagacgtgctatacaccatgataccctccgtcaaaaacgtccttttcaataacttcaaggaccacctgaaagtaaacaactccaagacagttttttcgtcccgggcgcataacaggcacatcactggggtgacacttaataatgagggtcagttaagcattggaagagaacgcaaacggtatattaagcatctggtgcatcagttcaaatacaatgagctcgatagctcagacatttcttacctgcagggcctcctcagtttcgccaagcacattgaacccgtcttcatcgagagactgaagatcaagtattctaacgcccttatacagtgtatttacgaggcaaatcatgagtga

SEQ ID NO: 11286 - RNA, 930 nt, synthetic construct
  source 1..930: mol_type = other RNA
atgtcttttatcgaacggatggccaaagagctaaataagcctcaaattgagatcgaggacttcctcttctttgcacctaacaagtataaggtctattcgatacccaaacgtacccacggctttagaactattgctcagcctactaaagaattgaaagattaccagagggcctttacgtcatgggtggaactcccagtgcacaactgcgcgatggcgtactgccaaggccggagtatcaaagacaacgcttatgctcacaagaagaacgcatacttattgaagttggatctggaaaacttcttcaattccataacaccagataccttctggcgagtctggtcttccaggtggaatcttcctaataagaacgaaagacagtgggtggaacgcttattgttttggaacaataaggagaagctcgtcctgtcagtaggggctccctccagtcccctaatcagtaatttttgtatggtgcagttcgacaaggacctgtatctgtactgtcagtctctgggagttacctatacaaggtatgccgatgacctgactttttccacaaacaaacgaaacatcctgttttcactgcccagcgatatcaatcaattccttgagaagcattttcagagcgacctcaagataaatccaagcaaaacggccttcagcagcaaagcacacaaccggcatgttaccgggattacaattaataacgacggcaagctgtcattaggacgcgagcgcaaaaggtacataaagcacaagatccaccagttcaaactcaatgtgctggatgcctacgagattcagcatctcaagggtcttctttcctttgcaaaacatattgagccgaccttcatcgagtccctggaaaagaaatacagcaagtctctgattgagatcatcttcgaagccaaatacgacgagagaaaatga

SEQ ID NO: 11287 - RNA, 921 nt, synthetic construct
  source 1..921: mol_type = other RNA
atgacatttattcagcggctggcgaaagagctgaataagtctagagatgaagtggaggactttctgttcttctcaccagaaaaatacaaggtgtacaggataccaaaaagaaagcacgggtttcgcgtgatagcacagcccacaaaagaactcaagacttaccaacgcgcatttatctcccttattcagttgcctgtacatgaatgcgccatggcctattgtaaagagaagagtatcaaagacaacgcagccgcccataagaacaacaagtatctgctgaaactggatctcgagaattttttcaatagcataacccccgagatcttctgggaggtgtgggcctcttttaccagcctgccatctgaggaagaccgaaaatggatggaaaaacttctattctgggacaaacagggaaagctggttctgagcgtcggagccccctcttctcctctgctctcaaacttttgcatgactaatttcgataaggaactgacgtcctattgtaagaagaaagatgtctcctatactcgatatgcagacgatcttaccttctccactaacaaacgtgacgctctcttctcctttcctgctgtgatcagtgagttccttgataagcactttagcagccggttgatgattaaccactcaaaaaccgcgtttagctcaaaggctcacaatcggcatgttacaggtattacgatcaccaatgaagggaagctaagtttgggcagggagaggaaaagatacattaagcataaggtccaccaatttaagatcgagaagctcgatccctacgaaattcagcatttaaagggcttattggctttcgccaaacacattgagccgaaattcatcaagtccctgaacaataagtactcgaaactgctcatcaagaagatcttcgagacaaacgacgactga

SEQ ID NO: 11288 - RNA, 918 nt, synthetic construct
  source 1..918: mol_type = other RNA
atgaagctggtggggcaactggctcatattctgtccatctcagagcaggacaccttgcggctgatcctgaacgcgccatttaaatacagagtttacaccatccccaaacggactcatggcaggcgagtgattgcccagcccactaaggtggtcaaaaagctgcagaagggttttatctccttgtacaattttcctgtacactcaaggtgcatggcttaccgcaagggactgagtattaagcataacgccgaaatgcacttagataactcctaccttctcaaaatggatctgagcgattttttcaactccctgacgcctaaaattttctggaacacatggaaagagttttggcagctccctgacggcctcgaacaacggttgatcgaatctatcatcttctggaataacaattccattctgacgttatcggtcggtgcaccgagctctcccgctatctctaatttctgcctgtatccatttgatgagaagctcgacaagtattgtatcgaaaagggcattgcctatacccgttatgcagacgacctgacattcagtactaaagagaacaaccttctcttcattctgccaagcatagtgagcggaatgctccacgatatattcgggggcagtctgaccatcaacaataagaaaactgtgtttagctctaaggcccacaatcgacacgttacagggataacaattaccaatgagggatcagcatctataggaagagagcgcaaaaggtacattaagcatctcctaaacaagtataagttcaacgagttgaacagtaatgatatcaatcaccttagagggcttctcgccttcgcttttcatatcgaacccgacttactaaccagcctttcaaataagtacacccacgaactactggagaaattgaaacaggagggcgaatga

SEQ ID NO: 11289 - RNA, 918 nt, synthetic construct
  source 1..918: mol_type = other RNA
atggagctggtggcgcagttggcccatatcttgtcaataagtgaacaggacaccttacgtctcattctgaacgctccctacaaatatcgcgtatacacaattcctaaaaggactcatgggcgccgggttatcgctcagccaactaaggccgttaaaaaactccagaaatccttcctgcatctatatgactttccagtccatagcaaatgtatggcctaccgcaatggaatttcaatcaaggataatgccgaaaagcacttggagaatccctatctcctgaaactagacctgtcggactttttcaatagtctcacacccaagatcttttggaatacctggcaaaagttccagcaagtgcctgatgccttggagcagagactcatcgagaatatcgtgttctggaacaacaattctaagctgaccctgtccgttggcgcaccgtcatctcctgtcatctccaacttctgcctttattttttcgatgagaagctggaagcttactgcttaaaagaggatatagtcttcactcggtatgctgacgatcttaccttttccacaaaaaagaataacgtgctctttaacctgcccaacatcgtgagtaagtaccttaatgacatctttgatggtgcactgaccctgaataacaacaaaaccgtatttagcagcaaggcgcacaacaggcacgtgacgggtataactattacgaacgaggggaacgcaagcattggacgggagcgaaaacgatacattaagcatttgctccacaagtataaactgaaccaccttaattacaacgacataaatcacctgagaggcctcctggcattcgccttctacattgaaccaaacttcgccacaacattatctaagaagtatactagggaacttctagagaagctgaatgaagaaagaggctga

SEQ ID NO: 11290 - RNA, 942 nt, synthetic construct
  source 1..942: mol_type = other RNA
atgaagattgtttccgtgctggcaggcgaacttgtggtatcagagcaggaaattctctccatcctccttggggcgtccaagaaatacaaagtttatcccatcccaaagcgaacacacggaattagactgatcgcacagcctacaaaaaaagttaaggtgctacagagggcttacgtcgatatgatgaattttcccgtccattccaacagtgtggcctaccgaaaaggctatagcataaaagataacgcccaattccatgcctcaaatccctatttattgaagatggacctctctaatttcttcaattcaattaccccgaagattttttgggggatgtgggaaaaattgtgggacctgcctgagccactagagaagcacttgatagagaacctcctgttttggaacatagataaaggcagctctatctcgcggttagtgctgagtgtcggtgctcctagctcgcccatcattagtaacttctgcctttatgaattcgacgagctgatgaccaaacattgtatcagcagggatatttactacacacgttatgccgatgacatgacttttagtactaagaaacgcaatgtactgttcgacatccctaactttgtgaagagcctcctgtatgacgtgttcggctcatctatctctgtcaactacaacaagactgttttcagctcaaaagctcataataggcacgtgacaggaataaccctgaccaacgatggcgagatctctttggggcgggagcgcaagcggtatatcaaacacttagtgaacgaatacagatacaacaagctctccagcgaagacttcaattacctgaagggtatccttagcttttccaagcacattgagccaaagtttgtcagatccctgattaataagtacggagaagacgtgatcacctctatatttagtggggatctgaatgagacgtga

SEQ ID NO: 11291 - RNA, 918 nt, synthetic construct
  source 1..918: mol_type = other RNA
atgaaaatcgtgatggccctcgcccagcagctgaaatatagcgaacccgaattgttgcagctagtccttaaagccccatataaataccgggtctacactatcccaaaaagaacgcacggacggcggaccattgcgcaaccgacaaaatcagttaaggagctgcaaagagagttcttgaagtacaaagtgtttcccttccatgcaagtagcatggcctacagaaagggcatgtctattaaagacaatgccgcctctcattccaccaactcctttttacttaagatggaccttgctaactttttcaattcactcacccctgatgtgttctggtcagtgtgggcggaccattgggagcccctgtcacctctcgagcaccgactggtggagaacattttattctgggataataaaggcaagcttatgctgagtgtcggtgcaccaagcagtcctacgattagcaatttctgcctcttcttttttgacgtggctatcacaaattactgttccggcatagacgtaacctatactcgctacgctgatgatttgacattttcgtgcaatactcccgggatcctgtccaccattccagctttcatctctaggatcctgaaagacaagtacaacgggaaaatctctattaaccaccagaagacaatctttagctccaaggcacacaataggcacgtaaccggtataacaatcactaatgacactaagctgagcatcggacgctatcgtaagaggtacatcaagcatctgataaaccagtataagtataagctgctggacagtgatagcatataccacctgaagggcatgatttcttttgcaaaccatattgaacctgatttcctcatttccctcaagaacaagtattcttcgaagctaatcaacgaaatcattggggttcacaaatga

SEQ ID NO: 11292 - RNA, 918 nt, synthetic construct
  source 1..918: mol_type = other RNA
atgaagattgtgtcagttctcgctcagcaactaaagtgttccgaaagcgatatcctgaaactgattctgaatgctccctacaagtatagggtatactcaatccccaagagaacacacggacgcagaattattgcacagcctaccaaagccgtaaaggagctccaaaggtcatatcttaagtacaaagacttcccattccatataaacagcatggcttatcgcaagggatttagtattaaggataacgccgaatcgcatcgactgtctgcatatttactgaagatggacttggccaacttctttaatagtctgacacctgacgtcttttgggatatctggcggcagcattgggaacccctgcagagccttgagcaccggctggtggagaacatcctgttctgggataattctggcaaactcatgctgtctgttggggcaccgtccagtcctgccatcagcaatttttgtctgtactttttcgacaatgcggtgtctgagtactgcgagaaaataaacgtcatctatacacgttacgctgatgaccttactttctcgtgcaacgatccaaatattcttcctaccctgcccgaattcataagccgagtcttgaaggaaaaattcagtggcaaaattctcgtgaatcaccagaagaccatcttctccagcaaggcccacaacaggcatgtgactggtataactatcaccaacgatgagaagttatcaatcggccgctacaggaaaagatacatcaaacacttgatcaaccagtacaagtataatctcctcgacgccgagacgatatatcacctgaaggggatgatttccttttctaatcatatcgagccagactttttaaacagcctacggaaaaaatactcctccaatttgatcgacgaaattattgaggtgaacaaatga

SEQ ID NO: 11293 - RNA, 921 nt, synthetic construct
  source 1..921: mol_type = other RNA
atggaactcataacctctctcgcacgggccatagagaaatcagaacccgataccctcaatctcgttctttctgctccttataggtataggcggtacacaattcctaagagaacacacgggcggagactgattgctcagcctaccaaggaaatcaaagcagtacaaaaggcctttgtgaagattcgaacttttccaatccacccggctgcgatggcttatcgcaaaggagttagtatcaaagataatgcacaggcgcataaactcaacagttacttgctgaagatggaccttaccgacttttttaattcgatcacaccctccgtcttttggagggtctgggaaaaagtgtggcccctgccagagcgtctggagatgttgctgattgaacggatcattttttggtcaaacgaggacgagctaatgctgtccgtgggtgccccaagcagcccagtagtgagcaatttctgcatgtatttcttcgacgattacatctctactctgtgcgaccagttcgacctggtgtacactaggtatgccgatgacctgacattcagcaccaacaaaacgaatctgctgtttgagatgcctagcatcgtcggagccgtccttaagactgagttcaatgatttccttgcaatcaacaagtcaaaaacgatctactcctccaaggcccacaaccgccacatcacaggcattacaattaccaacaacaatgagctgagtatcgggagagaaaagaagcgatacattaagcatctagtgcatcagcacttagtgtgtaaactctctattgaggattccaatcatttacgcggcttgttatctttcgttagccacatagagcccactttcataaaatcactgaagaacaagtactccgaagaaaccatcgacaagctcttgagaggcagttatgagtga

SEQ ID NO: 11294 - RNA, 942 nt, synthetic construct
  source 1..942: mol_type = other RNA
atgaatttaattacaaaactggcgaaggaactggaaactagcgagcccaatgtgctctctaccgtcgcatctggcccactgaagtacaaagtttactctattccgaagcgcacccgtgggcggaggatcattgcacatccctcaagagagttgaaacaggtgcaaaaggccttcttggcactataccaatttccgatccacagcagcgctatggcttataaaaaaggcgtgtcaatcaaagagaatgccgaatgtcatcggctgaataaatacctgctgaaaatggacttcgagaattttttcaacagcataacccccctcctattttggaaagtatggagcctgaattatccagagcctacattcctggagaaacgagtgatcgagaatattcttttttgggcccctagtatatccgagcgcgacaatttaatgctctctgtgggtgctccatcaagtcccacgatttccaacttctgtctgtatcagttcgacctcattatcaccaagtattgcgatgacaacgaaatcacttacacaagatacgcagacgatataacattctcctgcaacacacctaaggggctgtcgaagataccaaaggccgttagaaagacgctcaagaatctgtatggaacccagatcgaaatcaacaaccagaagaccgtcttcagtagtcaggcccacaacaaacatgttactggaatcactatcactcctgatgggaagctgtccattggccgggagcgcaagaggtatataaaacatcttgtacaccagtacaccctgggcgctcttgaacaagaggatattaaccacttgcgaggtttactctcttttgcgaagcacatcgaagtgtcatttttcaacagcttgattaccaagtactccgccgatgtcatgcttcagatcacaaggggaaacaatgaaaagaacttttga

SEQ ID NO: 11295 - RNA, 939 nt, synthetic construct
  source 1..939: mol_type = other RNA
atgaaccttctccagcgactgagcatcgaacttggcgtgtctgaatcccacatcttaagtataaccgcgagcggccccttgaaatacaaggtctattctatccccaaaaggacccatggccgacggataattgctcatccttccaaagacttgaaaaagctgcaaaagtccttcataaagctacacaattttccaatccatacaaatgccatggcctataaggagggagtgtccatcaaagataacgcttcttttcacaaaagcaacaaatacctgctgaagatggactttgagaacttctttaattcgataacaccggtcttattttggaacgtttggaaccagcacttccctaagtcatcctacttcgacaagaagattatcgagaacattttgttctgggccccaaacatacacgaaagggagcgtctgatcctgagcgtcggggcacctagcagtccaatgatttctaatttctgcctctttcagtttgactctattctgacacattattgcattgagcggtccattttcttcactcggtatgcagatgatctcacattttcaacggatactccagacctcctgaaaaccctgcctggcgtgatctcaaatctgctgagacagttatatgagggacagatcgagattaataaccagaagaccgtttttagttctcaagcccataacaaacacgtgaccgggatcacaataactcccgaaggaaagctgagtattgggagaagcagaaaaaggtacatcaagcatcttgtacaccagtacatcctcaataagctaaaaagctcagatttcaatcacttgcgcggtctgctcactttctccatgcacatcgaaccccagttcatcacgtcacttgagaacaagtacagcaccaatattattgagaacatcgtgcgcggtattaatgaacaaaattga

SEQ ID NO: 11296 - RNA, 966 nt, synthetic construct
  source 1..966: mol_type = other RNA
atgtcagtcgtgtcctatttgaccaacagttgccattgtaattcggacgacctgttccggctggcgatcaacgctcctcgacggtacaaggtgtattctattgccaaacgcacctctggctataggactattgcccacccaagcgcagagcttaagaaggttcagtaccagattatatccgcattcagcgaggggaataggcccctagctcagctgagtattcacagccaggctatggcatacaaaaccggagttgggattaaggaaaatgccaagatgcacagtcacaatagctacctgttgaagatggacttcgaacagtttttcaacagcatcactcctgagctcttctggcgttcttaccatgcactgaatcccgaaaccacattaagccgtactgataaaaagctcatcgaccttttcctgttttgggccccgaacaaatatgaccttagcagactggtgctctcagtaggcgcgccatcctcccctctgatctcaaatttctgcatgtaccaattcgacgaactgatccaccgcttttgccatgagaggaaaatcacttacacaagatatgctgatgatatcacattttctacgaatgttcctaacgtcctctttacggtgcccaagaaagtagatgagctgctgaaggagctgttcagtgggttaattatgatcaacaaccagaagacagtgtttagtagcagagcccacaacaagcacgtgacaggagtgaccatcaccccccaaggcggcttgtctctcggtagaaacaggaaacggtatatccgccatttggtgcatcaattcaccttaggtcgactggccactgacgatctaaatcacctccggggactgttgtcattttcccagtatattgagccatcatttgtcctttccctcaaaaaaaagtactcgataccaatagtcgattccatatctcgcggcaggtacgaatgttga

SEQ ID NO: 11297 - RNA, 939 nt, synthetic construct
  source 1..939: mol_type = other RNA
atggacctcgtaaagaaattagcttccgaagtgggcgtgactgaacgcgaaatcaaagcgttcttatatttggcccctcggaaatacaaggtatacacaattcccaagaggaagtccggggtgcgtgtgattgcccaacctacctctgagctaaaagagttgcaaagaaaatacgtgcagatgatggatttaccgtcacatgagtgttctatggcctataagaagggggtgggcatcaaggaaaatgctgaacggcaccagggaaatacatacttgcttaagatggacctagagaacttctttaactctatcactccagaggtgttttggggtacctggagtaatttttacgctttcccaaccagcatagagaagctttatctggaaaaactcctgttctggtgcccttctaaaaagaactcgaacaaactcatcctgagtgttggagcacccagttccccagccgtctccaatttttgtatgttggtcttcgacaacgtggtcagccagtattgcatttccaagcagatagtcttcactagatatgccgatgatctgacattttcaacccaacagaaaaacgccctgtttgaggttcccagcctcattcagagagtgctgagtgaaatctttggccgaaagctgacaatcaaccatagcaagaccactttttcttcaatggcacataataggcacattacgggtataacgattaataacgacggagagctctcaatcgggcgcgataagaaaaggtacataaagcacctggtcaaccagttcaattacaataaactcgacgagcaggatctttatcacctgcgaggcctgctggctttcgcaaagtatatcgagcccaacttcatcaatagccttaacaagaaatacagctccgacgttatgaacaagctgctgcggggcgggaatgaaaaaatttga

SEQ ID NO: 11298 - RNA, 939 nt, synthetic construct
  source 1..939: mol_type = other RNA
atggatctcgtgaaaaagttggcctcagaagtcggtgtgaccgagcaagaaatcaaagccttcctacaccttgctccccggaaatacaaggtttacactattcctaagaggaagagcggcgtccgtgttatcgcacagccaacgagtgagcttaaaaaactccagcgcaagtttgtgaagatagtgaactttccaacgcacgagtgttcaatggcctataagaagggggtcggtattaaacagaacgctgaaatccatcaggccaatacataccttctgaaaatggatctcgagaacttcttcaattctattagcccggacattttctggaaggtgtggtctgaatttaatcctctgcctacatcagtagacaagctgtacatagagaagttgttgttttggtgtccaagcaagaagaacagtaataagcttatcctgtccgtcggagcacccagtagccccaacatttccaatttctgcatgtccaaatttgatgacgtggtttctaaattctgccaagacaggaacattatctttactcgatatgccgacgatctgacattttccactaaaaaacgcgacgtactgttcgaggtgccttccttagtccagcacgcgctgtctgaggaatttggaagacggctaaccatcaaccacagcaagaccaccttctcttcaatggctcacaaccggcatatcacagggataaccatcaataatgagggaaatctgagtatcgggagagacaagaaaaggtatattaagcacttggttcatcagttcaagtataacaatctggatgagcaggatatctatcatctcaaaggcctgctcgcattcgctaaatacatagaacccagctttttaggctccctgaacgagaagtactcgttcgaggtgatgaaaaagattatcagaggcgacaacgaagaagtgtga

SEQ ID NO: 11299 - RNA, 912 nt, synthetic construct
  source 1..912: mol_type = other RNA
atgaagctgctttctgagaagtcaaatttgacagaggatcaaatcagccgaattcttgtgaacggatcccgcaagtataaagtgtacctgattccgaagagatctcacggcaacagagttatcgcacaccccgcaaaaaagctgaagctcctgcagaaggacttcttaaaaatcgtggactttccttaccacgagtgctcaatggcgtacgagaagggcactgggattaaaaagaacgccttcgctcattctaagaatgagttcctcctgaagatggatctagcggagttctttaatagcattaccccaacaatcttttggtcagccttctctaagtacttcaacattacacctaaccatatagacagttacttcgtcaataacctgattttttggttgaaggagggagataaagctgtcctgtccgtaggtgctccctcaagccccaaaatcagcaacttctgtatgttccagttcgatgaaatcgtctttcagtattgcaatgaatcgtttatcacttacaccaggtatgccgacgatatgaccttcagtaccaatgttcgtgagattctatttacgatccctagctttgtggaatcccttttgtttcagctgttcgggaccgcaatagccatcaactacagtaaaaccgtattttcctctaaagcccacaacagacacgttacaggggtgaccatcacaaatgaaggtgccctgtccctgggacggaagcgcaaacggtatatcaaacacctgactcatcaatttgtgacaggcgtgatcgacaaagaaaacatagcacatctcaggggccttttagctttctccaatgatattgaaccaagctttctcagtactctcgacaggaaatatggcccagggataactacgaagattatggagataaagtga

SEQ ID NO: 11300 - RNA, 909 nt, synthetic construct
  source 1..909: mol_type = other RNA
atggacaagaaggctatttacatagaacgattcttagtatacgctccgagaaagtatcgtgtttacaagatcccaaagaggaaacatggcagccgcgtcattgcgcagccaaccgcagagcttaaaaaactgcaaagagccttcataaaccgctcaaagatccccgtgcatgagtgtgcaatggcctacaaagacggtgtcagcattaaagataacgctcagcttcactcgaccaacacattttttctgtccatggacttcgaaaattttttcaatagcatcactcctgacctgctgtggggcgtgtttaataagtttgggaaggtgatcagtccaaatgagaaactgtggctcagcaaacttctattttggtgccccagcaagaaaaactcaaacaagctcatattgtctgtgggggctccctcttcccctaaagtgtccaacttctgtatgtacttcttcgatgagtatatcagtacttattgccaggatcgcaatatcacctacagtaggtatgccgatgacctctcattctccactaatgagaaggacattctatttcagatccccggcgttgtcaaggaaaccttattgaaactgttcggccgagacatcaccattaataacagcaagacagtgttttcttctaaggcccacaacagacacgtgactggtatcacaattacaaacgagggcgaattgtctctcggacgggagaaaaagcggtacattaagcatctcattttccggtttaaaaacggactgctggatgtttccgacgtgagttacctgaggggaatcctgagctttgccttctatatagaacctgcatttaagacgtccatggtaaaaaagtatacgaaagccaccatcgattcaattttcaatggggtcgatgacgggaagtga

SEQ ID NO: 11301 - RNA, 918 nt, synthetic construct
  source 1..918: mol_type = other RNA
atgttcattgctacactcgctcagaaaatggggaaaaacgatcgagaaataagagagttcctgattaacgcccccgaaaagtataaggtgttcacaatacccaaaaggaaacatggatatcgaattatcgctcagccttcccgggagctgaaagtctatcagaggcaactcgaagaccttatctcattcccagtacactacagggctatggcgtattgcaaagggcgtagcattaagatcaatgccctccaccacgttaagaattcttacttactgaagttggaccttgagaacttcttcaactcaatcacacctgacatattttggaaagtgtggtcgaagacatgggatcttccctgtgacgaggatcgcatctacatcgagaaactgattttttggagattccagggtacgctgagattgtccgtcggagccccatcttccccactcgtaagtaacttctgtatgtactatttcgatgagaagatcgaggagatctgcttgaacaataaggtcagcttcaccaggtatgcagacgacttaaccttttctagcaatgtgaagaacatcttgtttgagattcctcggctggtgcaggatactctcgaaaatcaattccacactggctttagcatcaatacctctaagaccatctttagttcacgcgcacacaatcgtcatgtgactggcatcaccctcgataacaccggtaaaattagtctaggacgggaccgcaagagatacataaagcataaggttcatcattacacgctgaatattctggacgaggacgaaatcaaccacctgcggggcctgattgcctttgccaaatacattgaaccggtgttttttcactccctggaagccaagtacactgcaaacatgatgagcaaactacttgaagggaaggatgagtga

SEQ ID NO: 11302 - RNA, 915 nt, synthetic construct
  source 1..915: mol_type = other RNA
atgtttacagaagctttcgctaggaaaatggggcgagatgagctggaaatcaccgagtttttaatgaacgcccctgacaagtataaggtctacgccataccaaagcggaagcaaggttaccggattattgcacagccctcgagagagcttaaacattatcagaggcagctccaggattttatcatatttcctaagcacaagtgtgcgatggcgtacaggaagggactgtcaatcaaaaacaatgccttgtcacacgtgaataacagttatctacttaagcttgacctggagaacttcttcaattctatcactccagatctcttctggtctgtctggagccgaacttggtccctgccaagcaaggaggaccagcttttcctcgagaaactaattttctggcggttccagggcagtctgatactgtccgttggcgccccctcctctcccagtatctccaacttctgcatgtattattttgacggggagatcgaggcaatctgcacgaaaatgaaaatcacgtacacaagatacgctgatgacttgacctttagcagcaacgtgagaaatattctgtttgaaatccctgtgctcattgagaacattctgaacgaacagtttaaggggctgctccggttaaattcaagtaagactatattctccagcaaagcccataataggcatgtgaccggaataaccttgaacaataatggcaagattagcctcggacgcgatcgcaaaagatacattaaacacaaggtacacctgtataccctcggtatgctggacgccacagaattaaaccacctgaaaggcatgatcacttttgcacgcttcatcgagccggcttttttcaagtcattggaaaccaagtacaactctaatgttatcttccgtctgacacaagaaaaaatttga

SEQ ID NO: 11303 - RNA, 906 nt, synthetic construct
  source 1..906: mol_type = other RNA
atgttgctgagcgcgctggcccagaaaatgggcatttccgaagacgtggctgaacagtttctgatcaatgctcccgagaaatacaaggtgtatagcattcctaaaagagggatcggattccgcttaatcgcccaaccatccaaggagctcaaggtttatcagaagacattgcttaatctgattgtgctgccaatcaacgataccgcaaaggcttatcggttaggtgaaagcattaaaagtaacgctctcattcacagcggaaacgcctatttgctgaaaatggacttggaagatttcttcaattctattaccccagacgttttttggtcagtatggcagagattttgggagctccccgatgagtacgatatgtccgtcatcgaatcagtgactttttggaagaaggataattcgcttgtactgtccataggcgcaccttctagtcccatgatttctaacttctgtctcttctttttcgacgaggagataaacaagttctgcgtcaagaataacattagctactcacgttacgccgacgacctgactttttcgacaaatattaggaatgtgctcttctccctaccgaaactgatcgccaaggtgctcaaggagaacttttctggggcactaaaaatcaaccgaggtaaaaccatctttagttctaaggcacataacaggcatgtcacaggcatcaccttatccaacgacggaaaaatatcactggggcgggccaggaagcgctacataaaacacaagatccaccactataagctgggccttctcgacttcgatgagattaatcatttgaagggccttatagcgtttagcaaattcatcgaacctctgtttttcgaaagcctggagatcaaatacagtaagatcacgcttatgaaactgatggagtga

SEQ ID NO: 11304 - RNA, 933 nt, synthetic construct
  source 1..933: mol_type = other RNA
atgggagtcatcgacaagctggcaaataagctgaatttcacgaagaaagatgtggcttttttcctcttcgatgcccccaagaagtataaagtgtacaacattcctaagagaagtttcggacaccgcgttatagcacagccatctaaggagctgaaagaataccaaagaacctttctggagctataccagtttcctcaccatgctaactccatggcctatagctccggcaagtccatcaaggataatgcggaggtgcaccggaaacagcgatacttgctcaagatggatctagaaaacttctttaacagcattactccagaggttttttggaatgcgtggggcaagtttaaagccctgcccgatgacaatgacaaggagtggattgaaagactgcttttttggcagccccgctcgacccgaagcaatgacctcaaactctccgtcggtgcaccaagctcaccgtccatatctaatttctgcatgtatctgttcgatgaagtcgtgacagagcattgtcagaaggaaagtgtgtactacacaaggtacgccgacgaccttactttcagtacaaacaagaaagacatcctgtcaagcatccccagtgtgattaaaactaaacttaaggagtgctttgaccacaggctggtaatcaatcagcggaaaacgaaattctcctctaaagcccataaccggcatgtaaccggcattacaatctctaacgatgagaagttgtcattagggcgggagagaaaaaggtatatcaaacacttagttcaccaattccagttgaacaagcttgaccagaaggatattcgccatttgcaagggctgatagcttttgcccgtcacatcgaacctatgttcataagctctctcaccaagaaatattcagaaaccctgatccagaggatcattgaagctcacaacgagtga

SEQ ID NO: 11305 - RNA, 930 nt, synthetic construct
  source 1..930: mol_type = other RNA
atggacactgctgactttctttctaagctgacaaataagagccgttcaagcattgtagatttcctaaggctggcaccaaataagtatcgagtctacactattccaaagagatcttatggctatcggacaattgcacatcccactgccaatctcaaatttctgcaaagaacattctcggaaaacttcgcctttcccacgcacgccgctgctcaagcttatatatccggaaaagggattaaatccaatgcaactcagcacaagaacaattgctacctcctgaaactggacctggaagactttttcaactccataaaacccgacctgttctggggagtgtgggataaggccttccaggagcttcctagtcctgcctccaaagagatgttggagcagctgctgttttggcggccttcccggcgcatcggacataccttggtcctctcagttggggcacctagctctccagccatcagtaacttttgtatgtacttcttcgatgtggcgataacgaatatatgcgagctgctggaggtgaaatacaccagatacgctgatgatcttacatttagcaccaatcagaagaacattctgttcgaactcccggcattaatcgagtcgacccttaaggaagagttcagtctacagctcaacatcaacaagaagaaaaccaaattctctagcaaggcgcacaaccgccacgtgacaggtgttaccatcaccaacgacagcaccctttccctcgggaggtcacggaaacgctacatcaagcacctggtgcatagagccactctgaagcagttgaacacagacgagctcaatcacctgattggcttgttatcatttgctcatgatattgaacccgactttttaactaggttggatgccaagtatggtgacggcagtatccagcgaatcaggagctctatctga

SEQ ID NO: 11306 - RNA, 939 nt, synthetic construct
  source 1..939: mol_type = other RNA
atgagggagattattaagtacgcagacagtctggaaatttcagtggagaacctgcagatatttctacttaatgccccgaagatgtacaaagtgtacaagatacttaagcggacccatggatatcgagtcatcgcccagcccgctaaacaactgaaggagtatcagaggaagttcatcaaaatcttttcccagtacttggtggtacacgaatacgcgatggcctatcagaagaataagaacattcagcagaacgcagagatccacaaaaataatagctatctgcttaagatggacttcgagaatttcttcaactctatcacacctgctctgttctggaatgagtgggaaaacattaaccccgatatcttcgacgaaaatgagaagaatctcttctcacgcctcctcttttggaacccaaatcgaaaacggactcagcgcgaaaatttaatactttcgatcggggccccaagttctcctttgattagcaactttgttatgtaccggttcgataaattgatcacccagtattgtctggacaaaaatatcaactacacaagatatgctgacgatttgacattctccaccaacattaagaacattctataccagatacccgtcgaagtgtctaagaacctgaacttactctttggtaataagctccgcatcaacaatagcaaaaccgtgttttcatccaaggcccataacagacacattacgggcataacaatcactaacaacaataagctgagcctggggagggagaggaaacgttatatcagagccctggttcaccaatataagtacgcacaactcgaaaaagctgatattcagtacctgaaaggactcttaaacttttgcaaatccatcgaggtcagttttattcattccctggcgcaaaaatacggcaatgaaactctgaagaatatcatgaaggagtga

SEQ ID NO: 11307 - RNA, 939 nt, synthetic construct
  source 1..939: mol_type = other RNA
atgcaggcttttctgaagttcgctgagagcctgaagatcagtgcaagagaactcgccatatttctgcataatgccccgaagatgtacaaggtttacaagataccaaaacgtacacacggctaccgcgtgatcgctcagcccactaagcaactgaaagaataccaacggaagttcattgaaattttctccactcagatgccagtgcatgagtatgctatggcgtaccagaaaaacaaaaacatccaacagaatgccattttccataaagacaatagctatctcttgaagatggattttgagaactttttcaactccattactcctgccatcctttggaatgagtgggaaaagattaacccaggggtcttgaacataatcgagaaagacttcttctctcgactactgttttggaatcccaatatcaagcgaaagaagcaagagaaattaatcctcagtattggggcacctagtagcccctccgtttcaaattttgtcatgtacgggtttgatgacctcattacccagtactgcaacgctagggagataaagtatacacgctacgcggacgatctgaccttctccaccaactctaaaaacatcttgtatcctattcccgccgaagtggataaaaccctgaaattactttttggtcacaatctgagggtaaacaatggtaaaacggtgttctcgtcaaaggcacacaatcggcacattaccggaatcacaatcacaaataacaataagctgtctctgggcaggaacagaaaacggtacatcagagcactcgtccaccagtatcagtgcgcccagctggacaaaaacgatatccagtatctaaagggccttcttaacttttgtaagtcagtggaaattgccttcataaagagcttgatgcgcaagtatggagaggagatcatcgagaatattatgaaagaatga

SEQ ID NO: 11308 - RNA, 939 nt, synthetic construct
  source 1..939: mol_type = other RNA
atgaaaaacataaccaaatatgcaaagagcctagacttaagtgtagagaatctgcaagagttccttttaaatgctccaaagatgtacaaggtgtataagatccttaaacggacttatggttatcggactattgctcagccgactaaacagctcaaagaataccagaggcagttcaccaacctgtttacccagtacctgccagtccatgactgcgcgatggcttaccagaagaataagaacattcagaagaacgccgagatacaccgtaacaatagctacctgcttaagatggatttcgaaaacttcttcaacagtatcacccccgacctcttttggtccgagtgggaatcagcaaattcagacatgctcgacaaggatgaaaaactcctttttagtaggttgctgttctgggaccccaatatcaaaaaaaccaagcaggagaatctgattctcagcattggagctcctagctctcccctgatctccaatttcgtgatgtacagatttgatgagctcatcaaggaatactgtgtgtgtattgaggtcaattatacaagatacgccgatgatctgaccttttctacgaataagaagaacattctgtacacgatccctgcagaggtgaataagaacctgaaaaacctgtttaacaacaagctacgcgttaacaattcaaagacaatcttctcctccaaagcccataacagacacataacagggatcaccatcacaaatgacaacaaactgtctctcggccgacaacgcaaacggtatattagggccttggttcatcagtataaatacactcaactggaaaaagacgatatccaatacctgaaggggcttttgaacttttgcaaaagcgtggagatttcgttcatacactctttggcccacaagtatggctatgaggtcttaaagaatatcatgaaggaatga

SEQ ID NO: 11309 - RNA, 933 nt, synthetic construct
  source 1..933: mol_type = other RNA
atgaatatcatacacttattggctcgttccctgaacgaggacgacattactattaagaactacttagcgaaagcaccactgaaatataaggtatttgctattcccaaacgcacccatggccatagaatcattgcacagcccgcgagagagctaaagcgataccaaagggcttttatcaactacatcgaattcccaatacatgattgtgcctccgcatacattaagaaccggagtataaagaacaacgccgagcaccataaagaaaactcatttctcttgaagatggaccttgaaaatttcttcaatagtatcacccctcagatcttctgggatgcctggcgcgagaattttcccctaccggacaaagagcaaatgtattacttcgagcgcctgctgttctgggatgtgggcaataatgaactcgtcctctctgttggagccccatcatcacctatggtgagtaatttttgcatgtatctcttcgattccacaatatattcgttttgcaagagcaggtctataacatacacccggtatgctgatgacctcacttttactacgaaccttaagtcaaacttgtttgacatccccaacgagatccaggtgatcctgaagaataacttctccgaccagattaaaattaaccggagcaagaccaagttttctagcaaagcccacaataggcacatcacgggcattacaattaccaacgataataagatcagcatcggaaggaatagaaagcgatacattaaacacctgattcaccagttctccatatctaaaatggaacagtctgacctttatcatctgaaaggtctgatcagcttcgccatgtatattgagcctgaatttttcaatgcactgacaaagaagtacgggagcagtatcatcaattgtatcatgtccaacaacaatgggaaaaacaattga

SEQ ID NO: 11310 - RNA, 939 nt, synthetic construct
  source 1..939: mol_type = other RNA
atggagattataaaaaacctgagcaagcatctgaatcggaccgaaagccatatcaagtcgtatctgatccaggctcccaacaaatacaagatttatacaatccccaagaggtcccacggggtgagagtgattgctcaccccgcaaaagaactgaaagagatccagtatgcttttctctcaattctcaagttccccgtgcacgaggccgcaatggcctacgtgccacagaaaagcataaagacaaatgcgcacgcccacaagaacaatcagtttctacttaagatggacttcgaaaatttcttcaacagtatcaccccaaatattttctggtaccattggaataatgcctttcctgtaatcgatgcggaagagcggttttggattgagagaatcattttttggaacaacaaggacctcaaatcaaacttgacactatccgtcggagcacctacaagtccaaccatcagcaatttttgcatgtacagttttgatgaggaagtcacaaaatactgtcgcgaaaaagatattacctacacaagatatgccgatgaccttactttcacttctaataccaagggaatcttgtttaacctgcctaagcatatcgacaaaaccctgaagaagctgttcttttctgctatcaacatcaacaacaagaagactaagttctcctcaaaagcccacaatcgacatattactggtattacgataaccaacgacgaaaaattatctattggccgcaaaaggaaaaggtacattaaacacttggttcacatgtatgttctcaatttactcgatcggaatgacttcgaacatctgaagggccttctgtccttcgtgtacgatatcgagccgacttacatataccgtctggagaagaagtatacgaaattcatcatagacaacatcaaggaggggaaatatgagcaaaagcactga

SEQ ID NO: 11311 - RNA, 945 nt, synthetic construct
  source 1..945: mol_type = other RNA
atgtcaaatatagatgtagtgaagcagctcactaagcactattccaagagtcccaaagagttgtttgtgttctttgtggatgcgccccgcaaatataaagtctacgagataccgaaacgtactagcggcaccagaattattgcacagccaacacccgaactaaaagattatcagcggtttatcatctccattctcaaggatcacctgccaacgcatgagtgcagtatggcctatatccaggggaaggatattaaacaaaacgctcagatgcatagtaagaacagctttttcctgaaaatggacttcattgacttctttacttccattacacctacccttttctggcatgcttgtgaaaggcaagagctcaattttgactggctggataaagaactgctggaaaaggtcttgttctggaggcctagcaaatattctaagaagcttgtgctcagcatcggcgcccctagctccccatacatctcaaactttctgatgtactccttcgatcaagagctgaacaattattgcaagcagaacggcataacatacacgaggtatgccgacgacctgaccttttccactaagaagtcgaaagtgttattcgacattcctgaatgtgtacgcaagtttctgatcaagttctacgggcagaagattcagatcaatcacttcaaaaccgttttctcttcaaagaaacacaatcgacatgttacaggactgaccatcaccaatgactcaagcataagtattggacgggccaaaaaaagatacatcaagcacctcgtccacagattcgtgaaagagaacatctctgtcgaggaccttaattacttgaagggttacctaggatttatccagtatgtggaacccaactttctgtactctttagagcggaagtacaccatctctataatcaacaagattcgagcagggcgcggtgtttga

SEQ ID NO: 11312 - RNA, 939 nt, synthetic construct
  source 1..939: mol_type = other RNA
atgtcaaatatcgatgtggtcaaacagctgactgaacattatagcgagagtcccaaagagctgtttgtgtttcttgttgatgcgccccggaagtacaaggtgtatgagatccccaaaagaacgagcggtactcgaaccatagcccagcctatacctaaattgaaggagtaccagcgtttcgtgatttccatacttaaggattaccttccgacacacgaatgttcaatggcctatctcaggggcaaggatattaaacagaatgcccaaatccatagcaagaattctttcttcttgaaaatggacttcatgaacttcttcaatagcatcactccaactctgttctggcacgcatgcgaacgccaggaaattaactttgactggctggacaaagagctgttggagaagattctcttctggcgcccaagtagatactccaaaaagctggtcctttccattggagcaccttcaagcccttacatatccaactttctgatgtacagctttgaccaggaattatccaactattgcaaccagaatggtatctcatatacgagatacgctgatgacctcacctttagtacaaataagtcggagatcttattcaacatccccgagagggtacggaaactgctgatcatcttgtacggccaaaaaattcagattaaccaattcaagaccgctttttcttctaagaagcataaccggcacgtcacagggctcaccattaccaatgagaattctgtgtctattggccgcgcaaagaagaggtatataaagcatctcgtacacaagagtatcgaggaggaaatttccgttgaaggactgaactacctcaaaggatatctagggtttatccagcacgtggagccaaaatttctgatggctctagaacgaaaatacacagaagccgttatcaagaagatcaggctggggtgttga

SEQ ID NO: 11313 - RNA, 939 nt, synthetic construct
  source 1..939: mol_type = other RNA
atgagccgcgtggagatcctagaaaagctgaaactcaaattcaacaagacgcccctggaactctttcagtttctggatgatgccccacgtaagtacaaggtgtatgagattcccaaacggactagtggaaccaggatcattgctcagcctatttccgagctgaaagattaccagcggtttgtcattagtatattgcagaccgatctcctgcttcacgactgttgtatggcctatgtgaaggggaaagacatcaagaagaatgccgaagcgcactctcaaaacagcttcttcttgaaaatggacttcatggactttttcaactcaattactcccagtctcttttggcatgcttgcgagcgccagaacattgattttgactggttcgataaagaactcctggagaaaatcctcttttggaggccgtcaaagtattccaagaagctggttttaagcatcggcgctccaagctcgccattcatcagcaatttccttatgtattcctttgacaacgagatctccgacttttgccgaaaaaataacatcacctacacaagatacgccgatgatttgactttctctacatccaatgcactagtgctgttctcagttcctaacttcgtcaagaaagtgttactgaagatctacggtcagaagatacagatcaatcagttcaaaacggtgttctctagcaggaaacataacagacacgtgaccggcctgacaataaccaacgagaattcagtatctattggccgggcaaaaaagcgatatataaagcatcttgtccacgcttttattgaacaaaaagttgacccccaagacttgaattatctgaagggatacctggcctttatacaatacgtagaacctaagttccttaacagtttagagcagaagtacacagcagccgtcatccaggagattagaatcgggaattga

SEQ ID NO: 11314 - RNA, 948 nt, synthetic construct
  source 1..948: mol_type = other RNA
atgtccaacattgatgtgacgcaataccttatagaacaccatatggagatccataagtccaaagagggtttcgagtcattcattaagggcgcttccaggaaatatcgcagttatgaaattcctaagcgaactagtggtacccgaaagatagctcagcccatgcgccagctgaaagattatcagcgcaccatcgtgactatattcgagacaacgtttttgatccacgactgctgcatggcatacatgaaaggaagagacatcaagaccaacgccttaattcatagcgggaattcctttttcctgaagatggacttcaccgatttttttaatagcattaccccaaagctcttcttcgaaggctgcgagaggcagaaaatcgacctgaattgggccgataaagagacgctggaaaaaatcctcttttggtgtgaaaacaagtattctaaggagcttgttttgagtatcggcgccccgtcttcgccctttataagcaatttcgtcatgtatagcttcgatgaggtgctaaacgagtactgtaaaaagaatgggattacctacactcggtacgcagacgatttgacattttcaacctctacttccgggatcctattttctgtcccagacatcgtgaggggaacactgcttcaattttacggtacaaagatccagattaaccagtttaaaacagcgttttcatcaaaaaagcacaaccgtcacgttaccggcctgactatcacaaatgacaataacatcagtatcgggcgggaaaagaagcggtacataaagcacctcgtgcataatttcattgaggagaagattacactggaagacctgaactatctgagaggctacctgggattcatcaaatatgtagagccttctttcttaatcagcctcgaacagaaatacactcagagcgtcattcaaaagattagactcggaaactga

SEQ ID NO: 11315 - RNA, 939 nt, synthetic construct
  source 1..939: mol_type = other RNA
atgtctcgtatggacatcgccgggcatctaactacacattattctaaaacacctcaggagctttttgtgtatcttgtggacgctcctaagaagtacaaagtgtatgaaatcccaaagagaacttccgggactcgaacaattgcccaacccacccccgagctcaagaagtaccagagcttcgtagtgagcatactgaaagagtatttacccatccataattgctgcatggcctacacagacggcagaaacattaagcagaatgcgcagattcactcacgcaattccttctttctcaaaatggacctgatggatttcttcaacagtatcatacctaagttgttgtgggaggcctttgagagggaaggtgttcaattagattggctcgacaaggagttcctcgaaaaaatcctgttttggaaacggagcaagtactctaaaaagctgatcctgtcaatcggtgctcccagttccccgttcatctccaacttcttgatgtatagtttcgacaaagttctggatgaatactgtgaaaacaatggcatcacctatacgagatacgcagacgatctgacattctccaccaaagaaaaagatgtcctgtttctcattccagatgtagtccgagaaactcttgtgaagttttatggacagaagattaagatcaaccacttcaagaccgctttttcgtctaaaaagtacaacaggcacgtgacgggcattactatcaccaatagcgacgagatctcaattggcagggcaaagaaacgctacattaaacacctagtgcacaagtttgttgaggaacgcatctcactcgatgacctgaattacctgcggggatacttgggatttataaaatacgtcgagccaaagttcctgataagccttgagaaaaagtatacccagaacgtcattgagaagattcggatagggaattga

SEQ ID NO: 11316 - RNA, 948 nt, synthetic construct
  source 1..948: mol_type = other RNA
atgtctaaagttgacatcatcgagtacctgatgtctaaacaagtccacaacttcgactccaaaatggattttttcaagtttttcggggaagcacctaagaaatacaaaagatatgagatcccgaaacggacaagtgggacacgaacgatagcccagccaatccgggagctgaaagattatcagcgagctctgattgatctcttccaggggtacttccccgtccatgatagctcaatggcttatgtgaaaggtaaagacataaagaggaatgctgaaatccactcccagaacatctactttctgaagatggacttcaccgattttttcggcagcattacacccaagatattttggaaggcgtgtgagcgcgccggtatagaattcgattggcttgaaaaagagattatcgagaagacgtttttctggaagccttcgaagtacagtaataaactggttctctcaatcggcgcccccagctctcccttcatttctaacttcatcatgttttccttcgactgcgagattgcccagtattgcgaagagcaggggatcacatacaccaggtacgcagatgacatgacttttagcacaaacactccaaatttactctttagcatgagtgataccgtgcgcaatgtgttaatcgagttttacggaaacaccatcaagatcaatcacttgaaaactgtcttttcatccaagaaacataacagacacgtgaccggaattaccatcaccaacgacgacgaactgtcaattggcagagcaaaaaagaggtatattaagcacctggtgcataagttcatcgaagagaagattagcctggaggacctatcctatcttcgcggatacctcggctttattaagtatgtagaaccgaacttccttattactttggagaagaagtacactcagaatgtaattcaacggatacgtgtgggcaattga

SEQ ID NO: 11317 - RNA, 948 nt, synthetic construct
  source 1..948: mol_type = other RNA
atgtccaaggtcgacgtcattgagtacctcatgtctcaacagattcacaacttcgattccaagatggatttcttcaaatttttcgatgaggccccaaaaaagtacaaacgatacgagatacctaaaagaacttcaggcacccgaacgattgctcagcccatcagggagctgaaagactatcaacgtgccctgattgacttatttcaggagaactttcccatccacgccagctctatggcatacgtgaaaggaaaggacattaagaagaatgccgaagtgcactcacagaatatttactttttacgcatggacttcacagactttttcaactcaataactcccaaaatcttctggaatgcatgcgaaagagctggaatcgagtttgattggctcgaaaaagaaattatcgagaagaccatcttctggaaacctagcaagtacagcaataacctggtattgtctataggggccccatcgagtccgtttatcagtaacttcattatgtactccttcgataacgaaattgcgaaatattgtcaggaacggaagatttcttataccaggtacgctgacgacttgaccttcagcactaagttgccaaatgtgctgctggatctgacccgggttataggcaacacactcatcggctttttcgggaacgctattaagatcaatcatctaaaaaccgcgtttagcagtaaaaaacataatcgccacgttactggtatcacgatcacaaataaagatgagctcagcataggcagagccaagaagcggtatattaagcacctagtgcataacttcatagaggaaaagatctcacctgacgatctgaactatcttaggggttatctggggtttatcaagtatgtggagcccaagtttctggcatcccttgaaaaaaagtacacacagaatgtcatccagaagatccttctcggatcctga

SEQ ID NO: 11318 - RNA, 948 nt, synthetic construct
  source 1..948: mol_type = other RNA
atgaagaatcttaatatcctgaaatctctggaggaaaaattcagcataccccagcacgaactgcaggagtttattaaaagctcccccagaaagtacaaggtgtatcagattccaaaaaggtcatccggaacccgtactatcgcccaacctaccgcagaactgaaggaatatcagcggcacctcgttagtatttttagccctatactgcctgtacatgagacatctctagcctatattaaggggaaatccatcaaagataacgcattaatacactgcaaaaacagatacttcctcaagatggacttcgccaatttttttaactccatcactccgaacatcttttggaactgttgggaagaatccaagaaccagaataaaatcaatgacctcgacaaggagatccttacaaacctcatattttggaagccatctaagtatcagaagaatctggtcttgtctatcggcgctccttctagcccacttatcagtaacttctgcatgtacaaattcgatattgctctgtcagagatatgtcacaagaagaatatctcctacactcgctatgctgacgacctgaccttcagcacagagtatgccaatattttatttgatctccccctgattgtgagcaaaattttgatggatctgtatggcgggtcactggaaataaatcatttgaaaactgcgttctcgtcaaagaagcataaccgacatgtgacgggcatcaccatcaccaatgaaggtaagattagtttaagccgcaagaagaagaggtacattaaacatctgatccacaagttcatctttggatctatcgagatcaacgagctcacgtacctgaaaggttacttctcgtttattcaacacattgagcccgacttcctaagtaggttgaaatccaaatactcagatgagacaattaaccttatccggagcatggagctctga

SEQ ID NO: 11319 - RNA, 942 nt, synthetic construct
  source 1..942: mol_type = other RNA
atgaacaatctgaacatcctcaagattctagaagagaagtttgatgtgcctcagcacgagctgttagagtttattaaatcctcaccacggaagtataaggtgtatcagattccgaagcgtaccagcgggacccggactatcgcccaacccacagctgagttaaaaaagtatcagaggtacctcgtgtccatattcacacctatcttgcccatacataaaaatgctttcgcctacattcagggaaaatcgatcaaggataatgcattagtccacagctcaaattcatacttcctcaagatggatttctctaacttcttcaactccatcacccccaatattttctggaatttctttgaggagacgaacgtcaagttttccggcctggaccgaattctgctgtcccaccttttgttttggaagccttccaaatatcagcagaacctggtgctgagtattggcgcaccctcttccccactgatctctaacttttgtatgtacaagttcgatgtggtaatcagtgagttctgcaagaataacaacatcaactattctcggtacgccgacgacctgaccttttctacaaacattgcgaactcgctctataatctgccacttatcgttagcaaatcactgaaggaactgtacggaaacagcatcgaaattaatcctttgaagacgagtttcagcagtaagaaacacaatagacatatcactggtatcaccataactaacgacgggaaactttcactctctaggaaaaagaaacgatacatcagacatctaatccacaaattcatgatgaagagcattgagactaatgaattgcagtatctccgcggctacttttcctttatacaacatgttgaaccagactttcttagtcgcctgattagcaaatacagcgaagagacaataaggctgatcagactcatggaaaattga

SEQ ID NO: 11320 - RNA, 939 nt, synthetic construct
  source 1..939: mol_type = other RNA
atgtctattctggaacacctcatatccaatacctcatattctcggaaggacctgttagagtttctcgaaaatgctccccgcaagtacaagatttaccatattccaaaacggacatatggcttcaggacaattgcacaacccataccggaactgaagaatctccagcgaataacgatcaaattcttggagaacgagttacctatccataatagcgctgctgcctacattaaagggaagtcaataaaacacaacgcactcagtcactgcaagaacaagtatttcctgaagctggacttcgagaatttctttaactccattaacaccactgtgttttggaagatgtgggatagttatacaaatgtgcaggttcctactcaggataagacctacattgaaaacctgctgttctggaggccatctaagacctccaaaaagctaatattaagcatcggggccccatcatctccctttatcagcaatttttgcatgtacgagtttgatcaggccgtggaagagatttgtctgaagcataaagtgacatacacccggtatgccgatgacttgacattttccactaatactaaaggagtcctttttgatttccccaaatatatcaacagcatcctccttgacgtatacgacggccaacttcgcttgaactcgttgaaaacgaaattctcaagtaaagcgcacaacaggcacgttactggtgtgaccatcacaaacgacaaaaaaatttcccttggaagagcaagaaagcgttacatcaagtcactgatcttcaagtacatcaatagcaacatcgatctcgaggacattagcaaactgaagggcctactgtccttttcttatagtatcgaacctaccttcatcctgtctctgaagagtaagtacagcgccgaggtcatcgacgagattttcgaaaagaccaaatcctga

SEQ ID NO: 11321 - RNA, 939 nt, synthetic construct
  source 1..939: mol_type = other RNA
atgtctattctggaacacttggtagaaaactcctcatactccagccaggaacttattgagtttctggataatgctccccgcaagtacaaagtgttccatattccaaaacggacatacggctttcgcactatcgcacagcctatcccggagttaaaagatctccagcggatcgctatcaagtatctcgagaaccagttgcccgtgcataagaatgctatggcctatctcaaggggaaaggcattaagcagaacgccaccaagcactgtaagaataaatacttcctgaagctggacttcgaaaacttcttcaatagtgttaacaccacagtgttttggcagatgtggagtctgtacagcgagttccaaatacctcttcaggagcaagccatcatcaataatctgctgttttggaggccttctaaaacgagcaagaaactcgtcctgagtatcggtgccccatcatctcccttcatttccaacttctgcatgtttcagtttgacgaagctataacagagctatgcctgatttatgatgtgacctacactagatatgccgacgacctgacattcagcactaacaccaaaaacgttctctttgattttcctaaacacgtgaccacgatattgctgaacatctaccagggacaattgcgacttaattccctcaagacaaagttttcaagcaaggcgcataatagacacgtcaccgggatcactatcaccaacgataaaaagatttcccttggcaggtcgcgtaaaaggtacattaagtctcttgtctacaagtatatggcatctgagctggacaatgaaaacctggcaaagctgaagggattgttaagttttagctattcaatcgaacccactttcatcttagcgctgaaactcaaatattccgccgagataattgacaaactattcgagaagacaaagccatga

SEQ ID NO: 11322 - RNA, 927 nt, synthetic construct
  source 1..927: mol_type = other RNA
atgggaataatctcccggatggctgtgcgccttaatatgtctgagccactgctcgtgagtcatctgaacggtggggccaggaaatataagctttttttcatccccaagaagagagggggcaagcgggctattgcccagccttcgaaggagatcaagtttctccaacgtgtctttttatcagccgtgcatctgcccacttccaacttcgtctattcctacaagcaggggaagaacattttccagaacgccagcctgcacaaaggcaacaagtactttctaaagttagacttcgataacttcttcaacagtattacgccaagaattttctgggaacaatggaaactggcctttcctgaacagaactacttaaatgcagtggacaaaatctgtctggaacagctgttgttttggcaaccctctgcttataaatccgatttggttttgagcgttggcgctccgtcttcacccgcgatatctaatttctgtctgctgagcttcgacaacgaaatccattcatattgctatcaaagaggaatcacttttagccgctacgccgatgacctcacattctctaccaatgagccgaatgttctctacgaggtgcttccttttgtgcaggaactgctgactcagaaatttaatggcgcaattaggctcaatccaagcaaaaccgtgttcacaagtaagaaacacctttgcaaagtaaccggactgatcatcacaccagaggggaagataagcatcggtaggaataacaaacggtacataaagcacttgacctttgagtacctgcagggccgactagaggaggaagatgtcatgaagctgaaaggattcctgtcgttcgcaaagtcaattgagcccagctttatccactcccttcagaagaaatatagtcctgtactcttgtccaagctcggtatttga

SEQ ID NO: 11323 - RNA, 930 nt, synthetic construct
  source 1..930: mol_type = other RNA
atgtgcctgatagatgacttagtgactgaattttcaaagagcaagaacgagattcttgaatactcttttgtggcaccgaataagtacaaggtgtataagattcccaaacgcaagaccggagagcgtgtgatcgctcagccaacaaaggagcttaagtcatttcagaggtacattgtcaataagaaactaaacatcctgcctatccataactgcgcctttgcttacgtgaaactgaaaaacatcaaggagaacgccaatcaacacaagtccaattcatacttactgaacatggatttggaagacttctttaattccattacccccagcttattctggaaagtctggggtaggattctgatcaatctgcccgaccttgaggatcggaaactttatgaaaacttcctcttctggaaaccaaagaaattcagtaacaaactgatcctaagcataggcgcaccatcctcgcctttcatttctaactttatcctctacgagttggatgatttcttgttcgaattctgtaagatcaactctattacgtactctagatatgcggatgacctgaccttttccactaacataaaagatatcctcttcagcattcctaatgaagttgaaagtaagatcctggaactgtacgagggcgccattaacctgaatacatccaaaacctactttagctccaaagcccgaaatagacacgtgacagggctggtcttgagtaacgacggaaagatcagtattgggagaagcaagaagaagttcgttaaacacttgatctttcagtatatgctcaacaggctgaatcatgaggagatacttttcctccggggctatctcaattttatcaaagacgtagagcccgagtatatatctatcctcaagcggaaatattcagacaatctgatcctgcgcattatggtagactga

SEQ ID NO: 11324 - RNA, 939 nt, synthetic construct
  source 1..939: mol_type = other RNA
atgagcctgatcgatgagctggcctttgagtttaacaaaagcaaggaggaaatcaggacctacctgctccaggctccatctaagtataaagtgtaccttatccccaagagaaaggttggaaaaagagtgatagcccagccaaccaaagacctcaaactaattcagcggtttatcttagccaagaaactgaaacatctccctattcatgatgccgcctttgcttatgtgaagaacaagagcatcaagaataacgcagcagtccatttatcgaattcctacctgttgaacctggacttagaagattttttcaactctatcacacccaagcttttctggagagtatggaagcggacaatagaccaggtacccgaggttgaggagcgccgcatatacaatcagtttttgttttggcagccaaaaaagaattccaagaagcttattctgagtatcggagcgccttccagtccttatatctcaaacttcatcctttatgagctagaccgttacctgacagtcttctgcaaaaacaactttatcagctactctcgctatgctgatgacctgactttctcatcaaatgtgaggaattccctgttcaaagtgccgaaagttgtggaagacaaactgttcgacctttacgaaggcgaaataaacctcaatcacagtaagacggtgttctctagcaaggcaaaaaacaggcacgttaccggcctggtgctgactaacgatgggaagatttctattggtcgggctaagaaacgattcattaagcacttggtgtatcgatttaagattggcgaactcgagcaaagttccttccaatacgtcagcgggtatctgaattttattcaggatgtcgagcccgtgttcttggaatcactcaagttcaaatacaccgaagaggtagtgaataagatcatgctcggtgtctgggagtga

SEQ ID NO: 11325 - RNA, 942 nt, synthetic construct
  source 1..942: mol_type = other RNA
atgaacttgctggatgaattggccatcaaattcaacaaatccaaggacgaaatccggacctattccctgaaagcacccgataaatataagatgtatctcatccctaagcgaaagaaaggtaaaaggcttatcgctcagcctacctctgaactgaaactcattcagagatacatcgtgatacacaagctgcaaaaactccccatacacccttgcacgtacgcctatagaaagaacatcagcattaaagacaacgcatccgtccatgtcaagaactcttatctcctcaacctggacttagagaatttcttcaatagcattacaccgcgtctattttggaaggtttgggagcgcacacttaataacctgccagacaaggaagagcaggagctgtacgaaaaccttattttttggcggccacgcaagtcaagtcataaaatgatcctcagtatcggagccccaagcagcccctacatatccaacttcatattgtatgagctggacagctttctgtcttcttactgtgacgaaaagtcaatcaactactcgcggtacgctgatgatttgacatttagcacttctaaacgcaatatcctctttgatattcccaacatcgtagaggggaaaatattcgagctgtacaacgggttgatttcattaaatgacgataagaccacctattccagtaaggcgcgaaatcggcacgtgactggacttgtgctggccaatgacggtaagatcagcatcggcaggagaaagaaaaggttcattaagagcctgatcttcaagtcaattaacaatgagttacctcttgagtccattagttacctatcgggctatctgagttacatcaatgatgttgaaccctcctttatttactctctggaaaggaaatactcctatgaggtgattcataagattatgggctcaaagaatgagaattga

SEQ ID NO: 11326 - RNA, 942 nt, synthetic construct
  source 1..942: mol_type = other RNA
atggatctcatcagtcggcttgaaataaagttcagcagcctgtcaagggtggacgtacgctcctaccttagcaaagccccagacaagtataaagtgtatccaattcccaagcgaaaaggcggtacgagggtcattgcccagcccgcaaaagagacaaagattttgcagaatttcgtcattgacgaaatcttctataactttccgattcatcaagccgcgatggcttaccggaaaaatcacagtatcaaaatgaacgcatctatccatgcatcccagaaatacctgctgtctatggactttgaaaatttcttccactctatcacacctcaactgttttgggacgtgtatgcacggctaatccaggagcctataacctttgaggataagaattactaccagaacctcttcttctggcgccctaaaaagcagtcagataagctgctactttcgatcggcgcgcccagtagtcccttcatatccaattttgtcatgtatgagttcgacacctttatttacgacttctgtaagtccgtgggaataaaatataccaggtacgccgatgacctcactttctccacaaaccagaaagatattcttttcgagataccacacttagttgccaagaagttggatgaactgtacaagaaccgaatcaacattaaccgtaacaagacttctttttcaagcaaggcccacaatagacatgttactgggatcgtgttaacaaacgaaaataagatcagcctgggaagaaaaaagaagcgctatatcaaacacttggtgcatgagtttaagctcgggaagctgtcaattgctgataaaaactatctctgcggctttctgaactacgccaattttatcgagcctgagtttattttgagcctggaaaataagtacaccaaagaaatcattgctctggctagaaggaacatcaatgagtga

SEQ ID NO: 11327 - RNA, 945 nt, synthetic construct
  source 1..945: mol_type = other RNA
atggatttgaagttgtaccagtacctcgagtcacagaacagcaatttcacaaacctgctgcgcgcgacccccagcaagcactacaaagtgtataaaatccctaaaaagcggttaggctttagaacaattgctcagcccaccccagcggttaaagttatacagaaacagattgtggactatctcatacctaaaacctcaatccatacctccgctttagcctatgtatctggcaaaggtgttaaggataacgccctccaacatgtcaagtccgactacctgctgaaagtcgatctggagaacttcttcaatagtatcaccccgaagatgctggtgaaagctctgaagcaccagggcattaacatatctcaaactgacattatggtgcttagccagttcctgttctggaatatcacaaagaaaactaacgggaagttggtactctccgtgggagcaccatcaagtcccttcgtttctaacttagtcatgtttgcctttgatcagagaatgagcaagttgtgcagatctacgggcattacttataccaggtacgccgacgaccttactttttccacaacacacaaaaacatcctgttccagcatctcaatgaggtccgaaaggtgctaaaaaaagaatttggggctaggctcgtgctgaatgaaagcaagactgtattcagcagtaaagcccacaatcggcatgtcacaggggtgaccctgacgaataacaataagatctcactaggacgagacaaaaagcgttacatctcctctcttattcacaagtttaagcttggactgttggatcaagaggatatataccatctgcaaggcctgatctcctatgccaagcacattgaggtgcggtttctccgcaacatgagcctgaagtatggtgcaaatgtgcttgactcgatcaggaagtacagtggggaagacgatgcatga

SEQ ID NO: 11328 - RNA, 945 nt, synthetic construct
  source 1..945: mol_type = other RNA
atggatttgaagctgtaccaatatctcaacgagcgtaacctcaattttaagagtttattggaggcaacgccctctaagcactataaagtgtataagatcccgaagaagcggctcgggttcaggactattgcccagccaacacctgctgtcaaaataatccagaaggaaattgttgactacctcacacccaaagtgtccattcatactagcgccaccgcttatgttcccggacggagcgtcaaggataacgctcttgtccacgtgaagtctaatttcctactgaaggtggacttagagaacttcttcaacaacatcacccctaagatgctgtttaaatccctcaagaaacagggcatcgtggttagtggcgtggacctgattgtgctgcagcagtttcttttttggaatatcagcaagaaacgctcaggaaaacttgctttgtccgtgggggccccaagctcacctttcgtatctaacgtcgtaatgctgtccttcgacgagagaatgacgaaactttgcaggaaatctggtattaattacagtcgatacgcagatgatctgacttttagcacaacccagaagggactgttgtttgagcacttatttgtcgtgcgaaaagcccttaaaaaagaattcggggcgaggctcgttctgaatgaatcaaagaccgtattctcttccaaggcccacaatcggcatgtgaccggtatcaccctgacaaataacaataagatctcgctcggaagagaacgcaagagatacatttcagcgctggtccataaattcaaactggggctgctggatgtggaagacactctacacctgcaaggcttgataagttacgccaaccatatagaggcaagctttgtgcagaaaatgagcatcaagtatggcgataatgtcctaacagagattatcaagtactccggcgagaacgacgtttga

SEQ ID NO: 11329 - RNA, 960 nt, synthetic construct
  source 1..960: mol_type = other RNA
atggacctgaaggagttgcacttgctgcagtatgtcatttccaaaaacatgcatacagtgagccttctggatgatcaccccagtctgcattacaaggtctacaaaatccctaagaaaaatatcgggttcaggactatagcccagccgacagcgccactgaagaagatgcagcgcgacattgtggaatatatgacccctcgggtttgtatccacaaaaacgctatggcatatattgaaggcgtaggcatcaaaaataatgctcttgcccacgcaaagtctacatatctgttgaaagtggatctggaaaacttttttaactctatcaccccagaaatgctgttccatagcctcaaaaatcaggggttcaaaataaactcaatcgattgggcttacttaaaagaactcctcttttggaacattgccaagaagaaaaacaaaggcaaactggtacttagtgttggcgcaccctcgtcccccctcattagcaacataatcatgtacaactttgacgtgcgtatgacctccctgtgcgagaaacagaacatcaactatactagatacgccgacgatctgaccttttctacgaaagacaagaatatcttgttcgagcacctcaagatcataaggaaggtccttgataatgaatttaagggtgagctagtgttaaatgagtcaaagacaatcttcagctctaaaggtcataaccgccacgtgactggcattacgctaaccaataataacaaaatcagcattgggcgggagaagaagcgatatattagttccctgatccacaagttcaagtaccaaaagttaaatgaggacgacatatatcatctgcaaggactcctgtcattcgccagccacattgagaaggactttatctacagaatgtcaaaaaagtacggaatcgacaccattaagaagattaaactcttctccggagataagaatgatcagtga

SEQ ID NO: 11330 - RNA, 951 nt, synthetic construct
  source 1..951: mol_type = other RNA
atggatattaagctctatgagcagctgaattctacaaacatcgggttcaatgaactgtttctccgaagtccatcgaaacactacaaggtatacaaaattcccaagcgtactctaggctttagaacgatcgcccaaccgaccccagctgtgaagcggatccagaagcagattgtgtcgatcatctctaaaaacgcaaaagtgcaccattgtgccacagcgtacgtgcgcggcaagggtatcaaagaaaatgctaacaaacacgtctgcagtgaatatatactcaaagttgacttggagaacttttttaacagcgttacacctaagatgctgttcaaggctcttaagaagcagaagatcgttttaagccagattgatgagaaggttatagagcaattcctgttttggaacatgtccaaaaaaatcaatggcaagttggtgttaagtgtcggggcaccttccagtcccttcatttccaatctggtaatgtattccttcgacaaaaagatggaagaatactgttcaaaggagagcattgtgtatacacgctatgccgatgatctaaccttcagcactaagtccaagggcattctgtttactcatcttcagtttgtcaggaagatgatcgccaaggaattctcttctaagcttatgttgaacgagagcaagaccgtgttttcttccaaggctcacaataggcacgtgaccggtattgtcctgaccaataacaacaaattgagcctggggagggaaaaaaagcggtacatatcagcactgattcataagttcaaactgggaaaactgctcatagatgacatataccacttaaaaggactcctctcccatgccagccatatcgaaagagacttcatcctgaaaatgtcagagaaatacggcgccgaggtggtccttgagatcaataaattctcatgcggagagtctaacgacgggtga

SEQ ID NO: 11331 - RNA, 939 nt, synthetic construct
  source 1..939: mol_type = other RNA
atggacctgcgcctctacaggcagctggagcaacggaaccccaacttcattagattattgaaccgttacccctctagacattacaaggtgtacaaaatccctaagcgcacatttgggttccggactatagcccagccgactccaaacgtgaaacaggttcaaaagctggtgatttcgcttctctccgagaaagtgaacgtgcatccctgcgctaccgcctacgtccaggggaagtcaataaaagacaacgcatcatatcacgtgaagtccgaatacctgctgaaagtagacttggagaatttcttcaacagcatcactcctaagatgttgtttaaagccctaaagaagcagtctattagcctaaccgaccaggacatgctggttctcgaacagtgtctgttctggaacatgagcaagaaactcaatggcaagctggtgctctcggtaggagctccatctagtccctacgtcagtaacgtcattatgtacagcttcgacaaaaggatgtcaaagatctgcgcaaagaataatatcaactatacgcggtatgcggatgatttgacatttagtacgaataccaagggccttctttttggacacctgaatgaggtccgaaaacttttaaagaaggaatttggcgccaaactcactctgaatgagtctaaaacagtcttcagctccaaagcccacaaccgccatattaccggtgtgaccatcaccaataataataagcttagcttgggtagggatagaaaaaggtatatatcagctctgatccacaagtttaaacattcccaactgagtgaggatgatatttatcacctgaaagggttaatctctcacgctctccacatcgaaagcaagttcgttcatcggatgattaagaaatattccaaggaaacactgaactccatccgaaagtatccttctggagcatga

SEQ ID NO: 11332 - RNA, 939 nt, synthetic construct
  source 1..939: mol_type = other RNA
atgaaatcaggcatctatggaattctaaaggctgagttctgcgactttgacgccttcctgtctagtaagcccccactgcactacaaggtgtacaagatccctaaaagaaccattggctttcgaactattgctcaacctacaccaaccctcaagaaaattcagaagaccctggtgggactgattgaacctcacgttaaaatccacccaaacgctgccgcttaccggatcggtaagggggttaaagaaaatgcgttatcccacgttaactcctcctaccttttaaaggtcgacctcgagaatttttttaactccatcaccccgcatatgctgttcaagacgttgaaacagcagcatatcgaaataaacgatgtggacaagtatgtgctggagcagatcttcttttggaaccgaagtagacgtaagaatggtaggctaatcctgtccattggagccccctcgtctccctttatcagcaatgtcattatgtcaaagttcgacaacgacattagcatcatctgtgacaaaaaaggcgtatcatatacaaggtatgcagacgatatgacgttctctactaaagagaaagatgtgatattctctgtcatggccgatgtgcggcgccttctgcgcaataacttcagcaataagatgaatgtgaacgagcttaaaaccatattcagcagtaaagcacataataggagggtgaccggtgtcacactgactaacgataataagatctccatagggagagataaaaagcggtacatttcagccctgacacataagtttaagttcggaaagctcgatattagtgacatttaccacctcaaagggctgatcagctatgcaagacacgtagatgtcgggtttatacgcaagttgcaaaaaaagtacggcgtgactacactcgaattgatcaacaagtattctagcgagggctga

SEQ ID NO: 11333 - RNA, 948 nt, synthetic construct
  source 1..948: mol_type = other RNA
atggacctgaacttatatcagcgcttggaaactgacaactgtaatctgaataagttgctctcatctctgccctcgactcactacaaagtgtacaaaattccgaagagaaccatagggttccggactatagcccagcctacttccgaaatcaaagacatccagcgcaagatcattgaaatcctgagccctaaagtgcagctgcatcccattgccaccgcgtatattaagggccaatccattaagtcaaatgccctgaaacacgtcaatagtgaattcctcatgaagatcgatctggaaaacttctttaactcaatcaacccagagatgctgatgaaagcactgtccaagcagaaagttgaaatctcatcggaggatgagaagattctgagggaacttctgttttggaacaggagcaagcgaatcaatggcaaagtcgtgttatccgtaggggctccaagcagccctttcatatctaatctgatcatgtacgagttcgatagtaagctagagtctatgtgcacaaaaaggaaggtgatatgcaccagatatgccgatgacctcacattttctacctgtgataaaggagagcttttctctctgttacccgagatccggaaactcctttaccgaacatttggtaaccgtttggtggttaacgatagtaagacggtgtttagcagtaagaagcataatagacacgtaaccggcatcacactaaccaacagcaatcggttgtccataggaagagagaaaaagaggtacatcagcgctctgattcataaattcaagaacaagaagctcgacgagcaagacattatgcatttgaaaggccttctctcttatgcagtccacatcgaggacattttcgttcaccgcatggggaaaaagtacggatatgaaacgctcgaggctattaagaagttttcccttggtgagtgcaatgaatga

SEQ ID NO: 11334 - RNA, 942 nt, synthetic construct
  source 1..942: mol_type = other RNA
atgcacctggaacttagtgacttcctgcacaaaaagatacctgagtttgatgccttcctacagtccagacctagcacacattacaaagtgttcaagattcccaagaggaaaattggatttagggtcatagcccagccaaccccgcaggtcaaggcagttcagagtcaaattgtgtcgttcctcgagaaaaagagtaaaatacacccttgcagcatggcttatcagaaggggtgttccatcaagaaaaacgcattagcccactccgatagcgaattcatcctcaaagtcgacctggagaatttttttaactccatcaaccccgagatgcttttcaacgcactcgaatctcaatccatagtgattagtgatgatgacaaattcatcttggaagagtgtttgttttggaatcgctctaagaaacgtactagcaaactgatcctgtcagtgggagctccctcgagtccatacctgtccaatatcgtaatgtatgactttgatcgcgtgatccacaagatttgcattaaccttaacgtaaactacacacggtacgctgatgacctaaccttttcaaccaaggaaaagaatgtgctgtcagaaatgattagcaagattagagaggctctcaagacattcttcaccagcaagattatcattaacgagagcaagactatcttttcttcaaaggcgcataatcggcacgttacaggcatcacgctcactaataataacaaaatctctgtcgggcgagagaagagaaggtatatttccgccctgatccataaatttaagaattccttgctggacgaaagcgacatatatcacttacagggcctgttctcttttgcctgccatatcgaggtggacttcaagaaacggatgaagaagaaatacggtgatgacgtggttcataatctgatcaaatactcatctcgcgagaactga
